United States Patent Application Publication US 2015/0315605 A1 - sequence listing, part 23

SEQ ID NO: 35018 - DNA, 4550 bp, Zea Mays
cgctccccttccaccctcttttcatgccccttgcacaaggagcaaaataccttacctgagtcgctccgatcacaagcgtcgggcgaccaccttcctcctccgcggaatcctgctgtatctggtgcctagcgctggtcgtcgagaggacgggcggggaggcgtccgccggcgagggactgagcggtggagacctcggtgggcaggcgcctacgagcccccggctgacacggtcgaagctgctgcggacggccgggctccaagcgcaccctcggtgtccgcgtcgccctccgttctcttctttgactcctgagtttcagtggacgttggcggcgtttgagacccggcggcggcgtatccgccggccactgcacatcccccgcggcgcgccactcctatggtgtttctgatcaaatggagcaagcctgcaatggcgcactgccggctcctccaccgctacgtctcgtccgccgccgccagagccgcagcgccgatccctgcccggcacgtgccccggtcgcccggcacgtccgcgcaaagcgcccgcatacgggagctcggccgcctcggccgcttgcacgaggccagggaggtgttcgactcgatgcccttccgcgacatcatcgcctggaactccatgatcttcgcctactgcaacaacgggatgcccgacgccgggaggtcgctcgctgacgcgatctccggcgggaacctgcgcacgggcaccatcctgctgtcgggctacgcgcgcgccgggcgcgtgcgcgacgctcggagggtgttcgatggaatgggcgtgcggaacaccgtggcgtggaatgccatggttacctgctacgtccagaacggggacatcaccctcgcgcgcaagctgttcgatgcaatgccgagcagggacgtctcgtcatggaacacgatgctcaccgggtactgccatagccaactgatggaggaggcaaggaatctgtttgaacgaatgccagaacgcaacggggtttcttggacagtgatgatttctgggtatgttctaattgagcagcatggcagggcttgggacatgtttcgcacaatgctatgtgaaggaatgacaccagagcaaccaaaccttgtttctgtgctttcagctgtacgccatcttggtaaacctggcattctagagagtatccacgttcttgtgcataagactggctttgagagggatgttgttgtcggcactgctatacttaatggctacactaaggatgtgaatatgcttgacagtgcagtaaagttctttgaaggtatggcagctaggaatgagtacacatggtcaaccataatcgctgcactatctcaggctggacgaatagatgatgcttttgctgtttaccaaagagatcctctaaagtctgttcctagtaggacttcaatgctcacaggccttgctcgatatggaaggatcgatgatgcaaagattctatttgaccagattcatgaacctaatgttgtatcctggaatgccatgattactgggtacatgcagaatgaaatggttgatgaagcagaagatctttttaacaggatgccctttagaaacacaatatcttgggctgggatgattgcagggtatgcgcgtaatgggaggagtgaacaagctttggtttcactccaagctctccataggaaaggaatgttacctagcctgtctagtttgactagtagcttctttgcttgttcaaacatcgaagctcttgagacaggaaagcaagttcattcacttgcagtaaaggctggctgtcagtttaatagctatgtttgtaatgcactgattactctgtacggtaagtacagaagcatagggtctgtgagacaaatctttgatcggatgacagttaaagatacagtgtcttataactcttttatgtccgcgcttgtacagaataatctgtttgatgaagcaagagatgtattcaacaatatgccgagtccagatgttgtatcttggactacgataatatctgcatgcgcacaagctgaccaggggaatgaggcagtagagattttcagaagtatgctgcatgagcgtgagctacccaatccacctatattaacgatacttcttggtctcagtggaaatcttggtgctccccaacttggacagcaaattcacacaatcgctattaaacttggaatggattcaggacttgtagtggctaatgctcttgtctcgatgtatttcaagtgtagttctgcagattcccttaaggtttttgattcaatggaggaacgggacatttttacatggaataccatcattaccggctatgctcaacatggccttggaagagaagctatcagaatgtatcaactaatggtatctgcaggagtgttgcctaatgaggtcacttttgtgggccttttacatgcatgtagccattctggtttggtagatgaagggcaccagttcttcaagtctatgagcagtgattatggattaactcctctgctagagcactatgcttgcatggtcgacctacttgggcgagctggtgatgtgcaaggagctgaacattttatttatgatatgcctattgagccagattcagtgatctggagtgcgcttctcggggcatgcaagattcacaagaatgtagaaattggtaggagagcagctgagaaacttttctctatcgagccatcaaatgctgggaattatgtcatgttgtcaaatatatactcctcccaagggatgtgggacgaagttgcaaaggtacggaaacttatgaaagaacgaggtgtgaacaaggatcctggttgtagctggatgcagataaagaacaaaatgcactcatttgtcactggagatgaggaacatgagcaaattcaaaacatatatgctaccctttgggagttatacactttgctaaaggccacagggtatgtacctgacacggactttgttctccatgacatagatgaagagcagaaagagagctcgcttctgtaccatagcgagaagcttgctgttgcttatggccttcttgttacacccaagggcatgcccatacagataatgaagaaccttagaatatgtggtgactgtcacactttcatcaagtttgtatcctctgtcaccaagagagaaattgatgttagggatgggaatcgattccatcatttcaggaatggaagctgttcatgcggtgatttttggtgataaactatcagagcatgagcaggtcttcttcatgctatcccctcaaacacagagttacaagtgcttcataaggaatcgaatagatctgaaagttttactgtgccaacacatgcacacactggtggtgcctgcatctagcttttcagatcaaagcctgacagaagatgatgcacttctgtgcctgaacactgaacggacagctaccatagggcaaagtgaagaagaaacagaagagttgagcaagatcacactagagaataaggatattcagcttgatatcgatataagagtgtctgatggagccgaccctatggagctgcatgtttatgattttaaaggacctggtgtggccttatcgatgtacaatagcgatgaggtacagtagaacatcaataggacttgttgctgattgctatattctcttgactggtattctaacttcctatctctatttagtttattaggcctttcgctgaatcctccatggatatggctctttcaaaaaagttgtctctttatctcagcaccaagaatacaatcctcaagaagtatgacgacaggtcacaattggaccatggtgctccattttgcttactgtgatatgtgcagcgaagcgatggcgatggtgtttttgatgttcaggacagaatcaatggccgcaccttatgtgattgtgatagcatagttgtttgcgaggtaattacaaagctgcaggctgccgcctggaggcagtgggaggccctgggcgaccgaagggtgcatgatattctagtttcagatcaatgctgagtgcagggagaggcaatgtcttacctcttggatgttcatctctatattagtccatccataggtatgcagctttggaccgtcgatgttaaatcttgtctcaccagcgactacttctgatggtgtggctacctgagcagcttgtaccgattctgccttagcttgccgatcaacgctgtccaccaggacagagctgaaaacttgaaatggcaagaccagaaccctgaagttgaagtgttggcaagaaactcagataggtggatgaacgttgtgagccacctagctaagagcttgaagacgacagatggtaggtgttagaaatggaaggccatgcggctcccatgttatggaaaaaaaacccaatcatgaattttggaaagctcaagaacctttgttgaaggagataaggcggatccgttcaaggtcaacaatcgtgatgagaaattacagaaaagaggaagaatattgtcgatgaaaaaaagtgctcaaagtaggtgatgtaagtaaaggtgacagactctaaattttacactataagatttaaagacccatttatagttatttttaaaca

SEQ ID NO: 35019 - DNA, 593 bp, Zea Mays
tttgcctagccaggcaatgcttgggaggtcacaacccaaatagatcccaagtgcatcacatattgcaaacatttgtaaagcatttgtagaaagatatgatatctggctttgattactcccacaacttgattctactatgctccaaaccaattgcccttaatctataacctggtgagtggtgactactctgctagccgagccagtagtagatgtggactcattgttgcaattgttaagtttataataatattatatatactaggtttaggtttgtacaatgtatcatgatttgacccttttgcttcccaatatgcagggatgggttccacttgctcagtagcaagctgcacacagcaccaaatgagttcgtttgctggtaagaatccagttaatcttctgtcatctttttgaggcgttcttcgctgttgggaatttacaccaaactaaaaatcggaagagcattttaagtgtaatgtcattgtcaaattggttgtatagaaacatagctaagatgttctaaatgacatttacgttaaaaggaacatgatgtttttggatgaaatcaaacaagttggtgaacattctgtactttc

SEQ ID NO: 35020 - DNA, 246 bp, Zea Mays
cttaccttgcattgcacgacgcagagcccctgcaaacgacacaggatgtcccagtggtagagactcaactccgctgacaaattcctctaccaccgaccgatcccaatgtggtaaacccacatcagaatgttcctagttcctaagccgatcttctagactctatgccgaggatggagcgacgggatcgacccagatcaacaagggcggtaacacggtgacaacattgcttctctccctggctacgac

SEQ ID NO: 35021 - DNA, 660 bp, Zea Mays
attcatcaagccggccctagaatggttaaaccctagtagagagaaaggaagagaagggggcggagaagcacgtacgtcgtacatcgcccaccgccctttgcctcgcctcgcctcgcctcgcctgcatatctaacagccggagccggagccggagccggcgccgacaatcgttccaactgatatggctacgacgccgccaggattcacgggcaacctgaagaaagcacttgcaggtctgagaagaatcagtttagatgggttgcgatggcgcgtatttgatgctaagggtcaggtgctcgggcgattggcttcccaaatagctgttgtgcttcaaggcaaggataaacctacctatgcaccacatgtagaaaatggagacatgtgcattgtacttaatgcaaaggatatcagtgttacaggaaggaaaatgacagataagatttactattggcatacagggtatgttggccatttgaaggaaaggaggctcaaggaccagatggagaaagacccaactgaagtgattcgcaaagctgtgctgcgcatgcttccccgcaacaaactgcgtgataggaggggcggtggctctgcagcagggggagaccggctgctgttgcagaggaggggcggcggctctgcagcagggacgaccgacagctg

SEQ ID NO: 35022 - DNA, 4330 bp, Zea Mays
aacgggtttggttgggtttaggcccatcccgagctctttccgtccgcctgtcgacaaatggcgggggcggcgtggcgatagacggcgcagcccgcgctttggacgcggaggcgggcacgcctcccgcgtgggcggtgcctccgccccgggcgcaggcaggcctcgcggtctcggggttgcgtcaccggtgccgccggtgtccggttgtcggtttgtgcgcctaaggactgctctatttttctttttttgagttccagtccaagcagtgagcgtctgcaggtggataaacccttagtctatgattacgcggcgccgcagtttagcttagcggtttttgcggtactttctaccatgtgcgtttccacttcgtacgccgctcgttaatttttcgtggattactgagttcatttagcattgatattttttcatcgtttcttcttcttttggcacccgaggcttgccggctgctatgaccgactgatgaatgcaggttgttgctagtatgatatggtatatacatatacaatcagagaacgggcctggagattgcattgcaccataaggggggccagctccaaaatattactgtagcaggaaccaggaattgctgaaatgtacgaaatagaattgaatcttctcagagctagtttaagtatataatgtcatcgcgagacttttaccaaaatggaactgggaatcacagattggttgtggtcttctgggcgtaaatctccctagaactagtaaagacatcgccctcaaggactggcatttactttttccctctcctggtttcatagagaaatgaaacagggcggttttggagggagcaaaaaaaaagtagatttcaatgccattttggactgcccatagatatggtatgacatatattcgtttcccaggggtctactgtattattattatactaatggcaccgaaatggccgcggcttcatttaatgcgatgttgttgtcttttgtcccccattttctgcatgtcattttgtcaacagattcccacggacattgctaaaaccatgtgctgtggcaattactgccatcatagtttggtacttagtggttcctgtaattgcattagcatgtcaaatttgatgctacaaatcgcaaacaaagaggaataaatagaacggtagaggtttgcatgttaatattttaccagtttcccactagttttttttcttgaaaacgaatactccatagctcagagagtatggcaccctgaaagcaacatggttgcaagcttttgcatagaaaaatagttttgactttggatgctgatgtattgcttgagttaccatatctcttggctttactaacttctttgtgcagttgtgcatcagtccaaatacaggtcaacttaccattgaaacaagcgattccacacattttaaagccctgtctttttcttcatttatatattatataaagagtgcttacctctgacccactacgaaggtctcacaccagaaccagattatacatccttaacaaatactcaaagtttgtcgtcaaaataccttgatgacagaatgatggaaaggctttcagcgctggttcttgatggtgacccagcgtccttgtcgaccatctctgagacgcttgcaaagttcaacttcagagttgtttccttccaaacagcagaagcggccctggatttcattaaatgtggggctgctaaagcagcggaccttgatttggtgttggtggaggttaatcttaacaatatggcaccaggcacttcagcaaaccctgatctgttccatcacatactgaatgaacttcaagtccctcttaccgcaatgtgttctcgtgacgatgaagaggcactttccaaatgtatgaacctgggtgcatgcttccatctgctgaagccactgaacagaagaagcttcagcattctgtggcaccaagcactggaacacaagtctaaaaaggcagcacctcaaagaccaagtcttaatgatagtaccaaaaatagaatggtttcaccatctactgaaaaacccaaggaagtccttattctagagagaaacaatttatctgttcctcaaagcaatggatatgaagagccaaagaagcagaatcgggtcacatggaccattgaactccatgaaaagttcttggaggctgtcgaagctcttggggggaacaagtctgctagacctgagaagatcctgcacctgatgaatgtaaagggtttgactgtgaagcatataggcagccatctccagaaacatcgattgcgcaaccagaatacaaaacaaggacagcgccaagagaatgccagcagaaaacctatatcaaggcaaggtgaagccacttctgaatccatcacacccagagttgagacagacggggaagtgtacccctcaaggctgtggacaaaggtgaagaaaaggtcagtagacacatcggctctgaagactggcatgcacacatgcacatctggaaacgacaatgagggcacagagtctgtgtgggataggtatgaaaataacctgcaagtgttcgctgagaacaagaaacgttggatgttcacgagcgaacatcagtggcctcggagaaacaatattgataccacagacgaaggggatccaaatgaagcccccgaaactgctgctggtgcatccatagaaatctttggttcaagcagcttaataagtgatcaagtgggagagaaaaatcgtgttgaatctgacagagacaataacaccgtgtggagcactgatttactagaaggttatggtgcatccatagaaagctctggttcaagcagcctgttagcaaatgatcaagtgggagagaacaatcattctgaagctgccagagccaatgacagcatggggaacattactttgcttgaagcttacggtggtgcatacataggaacctctggttcaggcagcctgttaacaggcgatctagtcaggcagaacggttgtgctgaagctaccagacacaatgacaatttgtggggcgttaatctacctcaaggttatggcgcattcacagaaatctctggttcgagcaacatgttaacgagttatcaagtgggagagaacaatggcactgaatttgccagagacaatggccacatggagaacattagtttgctcgaagtttatggtgcatccatagaaaacgctggttcaagcagcatgttaacaagtgatcaagtcggacaaagcaatcttaccgaagctgacagaatctatgacaccatggggagcattaattaccttgaaggtaccgtggacccggagtacattgcaccaatggattattctgttgcttgggcgcacctagagggcaatggtccggacctgagaagcccttctgatggccgggaggaagcatattcattttggatgagtcagctggcaggaccacaagactatcaaagccttggcccggagggtttccttcaagtaggtgacgacgcatataacgatgctctgagatcggttggtctggttaacgtggatgaacaagcgactcaaggatggcaagagcagcaaagcctcagcatggaagatctcctgcaggtagatgacgttgcatgggatgacactctgatatctatggggcttatcaacttgttagatgaaccaatggctgaagaggccgccattggaggatcacaaggtcagcaaagcctcgccccggaggtcctccaagcaggtgacaatgcgtacggtgatgatcttgggtcgattgagatggtcaacttgttaaacgaaccaatgactcaagaagccgctattgccgatgctctggtggacgatcctatgaccctgattgcccaagacgatgtgccgtgggcttggagtcctgcagtgccgggtgactatggcattgattggatccaggatcctaacgcagaactgtatgggtaaaagatcgatgaccgagccgtggttgcgtacaagaatcggaccgggtggaagagaggtgtgagacagccttgagtccagtcaaaaataattgacttgcttactttattctaaaactgtttttggatggatttattctcttttatcgacaatcactccccattttacttctaatgaaagcaatgtaagggctagtttggtaaccctattttctcaagggattttcattttcctaagagaaattagttcatttttccataggaaaatagaaatctcttaaaaaaatggggttctcaaactagaaaaatcatggtattttgtttataaggggagtttggtttctagggactaatgtttaatccttccatattatttcattgtacttgtcggagagaaaattctccggccgggtggcgg

SEQ ID NO: 35023 - DNA, 5158 bp, Zea Mays
tatataagcatatgtctgcctctacgatcccatccgatggcaatgaggcaatcaaagctgagagcagtgtcggcaaggccgtggttgttactcctttgcctcgcgctagcagccaccgccggcgtaatgcaagctcgcgcccagcctaacagcatcggtaatctcatggggcgcgcgggcgatcgagcacgtttcatcagcatcgactgtggtttcccggggacgacgagctacgtggacgacgccacgacgctgccgtacgccccggacgctgcgttcaccgacgccggcgagaaccacaacgtctcgtctgagcacgtcacgccggagctcccgaggatctaccgcgacgtgcgcagcttcgtggacggcgcgcgtaactgctacacgctcccgtcgaccctcgcggtggggctcaacaagtacctcttccgcgccgccttcatgtacggcaactacgacggcctcaaccggccgcccgtcttcgatctctacataggcgtcaacctctggaagacggtgaacctgtcgtcgtcggacccggccgccccagtcatcgcggaggccatcgttgtcgtaccggacgacttcgtccaggtttgcctggtgaacaccggcaccgggacgccgttcatctccgggctggagctgaggcctctcaagaactccatctacccgcaagtgaatgcgacacaggggctggtcctgcaaagcaggcgcaacttcggcccgactgatatgacagacattatcaggtaccctgacgatcaatacgacagattatggacacctatgattattgacgccatcgactggctggtgctatccacgacggaaaaggtgcggaacatatatgatgacctcttcgaggtgccgtcgaaggtgatgcagacggcgatcacgccgcgtgacgctaccagcagcatcaacttctattggaactccaagggctcgtcgcttgggtacataccggtcttccacttctccgaggtgctgcaggcgggcgccggcgttgttcgccagttcaacatcaacatcaacggcaagcggttcacctcccatgattattacacaccacggcacctcgaaagtggctacgtatacggtaccagaccttacaccaaccagatccggtataacgtctccatcgttaagacagacacgtcaacgctcccgcctatcatcaacgccgacgagattttcatcgtcatctctacgaccaacgttggcacggactcggaggacgtctctgctatgaaggctatcaaggcgaagtatcaggtgaagaagaactggatgggagacccgtgcgttgctgggacttttaggtgggatggactgacgtgcagctatgccatttctgatcctccaaaaattactgccctaaacatgtccttcagtggtctgaccggtgacatatcatctgctttcgcaaatctcaaggctgtccaatccttggatttgtcacacaacaacctgacgggctcaatccctagctccctgtcacaactgccgtcactgacaactctagatttgacggggaatcagctcagcggaccaataccctctagtcttctcaaaagaatccaagacggctccttaaacctaatctatgccgataatccagacctttgcaccaacgccggggattcatgtcagacggcgccgcaaggaaagagcaagctagtcatctactacgtcgctgttcctatggctctgatcgtggtggcgttggcagtactgctgtgttgtcttctgcggcggcgaaagacgcgagggctagcggacgtctctgtgaagccccgggacaagactccgacgagccttgcttcaatggcggccgacgaacacagacttagctcgctgcggcttgagaaccgccggttcacatacgaggacctagagatgatcaccgacagcttcaagcgtgtcattggccggggcggctttggatacgtctacgagggcttcttggaggatggcactcaggtggcggtgaagatgaggtctcagtcgtccaatcagggtgccaaggagttcctcacggaggcacagatcttgacacggatccatcacaagaaccttgtctccatggtcggctactgcaaagatggggtgtacatggcgcttgtctacgagtacatgtcagaaggatccctgcaggagcacattgcaggaaaacgcttgacttgggggcagaggcttcgaatcgcattggaatcagcgcaagggctagagtatctgcacaggggctgcaacccgcctctgattcacagggacgtgaagaccagcaacatcctactgaacgcgaaactggaggccaaggttgctgatttcggcatgtcaaaggctctagaccgcgacacctatgcgtccacgaacactcttgttggcacaccaggatacgtcgacccagagtacctggaaacaatgcagccaagcaccaagagcgacgtgtacagtttcggcgtggtgctcctggaactggtcacagggagacctcctatcctgcacagcccacagcccaccagcgtgatccagtgggcacggcagcacctggcgcgcggcgacatcgaggtcgtggtggacgcgtccatgggaggcaaccacgacgtcaacagcgtgtggaaagccgcggaggtcgcgctccagtgcaccgagcaggcgtcggcgcagcgccccaccatgggcgacgtggtggcgcagctcctggagtgcctcgacctcgagaagggccgctccgccaacgaaagtttctgcgacggagacgacagcggctccgcgaccgcgagcttgagccacagcagcgcatttgtgacggggcgtatttttgggacggtgccaatggtggagacaggccctgccacgagacgcgcgctcgtgtgtgtctcactgtctcccctgtcccctctcccgcgtgctcgtctaccttcggctcccccatgggatgagagcgccttcctcgccatggccgcctcccacctgccccccgcagccaccctcgtcaagaagtacccaactctcctccacccgttcggcgccaaaccacacgcccagaggctgatcttcaggtgccgcgcgaccagcagcgagggtgcggacgatggctgggcgtcctttgtggacgagctcaagaggtcgctgcaggtggacccgtccgacgcggtgattagcaacgccggcgcgggtctcacatcaaataacgacctcgtcaccgcgctgccactggaaccctccgctggtccggctgcgggagacgcgaccactgccgctgccggcgcggtgagcgagctcctgggcgtggacgcgtcaggcgcggtggccacccccgaccgcctcctgagctccctgctgcacctggacgcgtccaacccggtggcgagcgtggcgggcggcgcgctgtctcgcctggacgcgctcacgtcgggactgtcggacgcgcagcggtgggcgctgttcgggttcctggccgcgacgtggctgtacctgaccgcgcggcccggggtgctgagcggcgccgtggacatgtacgtgctggcgccgctgcagctggcgctggacagcgtgctgggccggcggagcctcaagatgagcgacttcgtcgtcggcgagcgcatcggggagggctccttcggggtggtgtatgccggcgccgtggtgccgaagaacggcgccgtcgtggaggagcggtccggcaaggccaagacgagcctccagaacgacgacaggtacaaggagaaggtcatactcaagaagatcaaggtcatgacggtgggggcgaaggagtgtggggactacgaggagtggttcaactaccgcgtgtcgagagcggcgccggagtcgtgcgccgacttcctcgggagcttcgtcgccgacaagaacaaggcggagttcgtcaagggcggcaagtggctcgtctggaagtttgagggcgacaggacgctggccaattacctgagcgagcgcggcttcccgtccaacctggagcgtctcatgttcgggcgcgtgctgcagggcctgggcccgctggagcgcgaggcgctggtggtgaagcaggtgatgcggcagctgatcacgtcgctgaagcgcatccacgccacgggcatcgtgcaccgcgacatcaagccgtccaacctcgtcgtgacccgccgcgggcaggtgaagctcatcgacttcggagccgccaccgacctccgcatcggcaagaactacgtgcccgaccgcgcgctgctcgacccggactactgcccgcccgagctctacgtcctccccgaggagacgcccgagcccccgccggagcccatcgccgccatcctctccccgatcctctggcagctgaacagcccggacctgttcgacatgtactcggcggggatagtgctgatgcagatggccataccgacgctgcggacgcagtcggggctcaagaacttcaacgccgagctcaggtccgccggctacgacctcaacaggtggcggcagagcgcgcggcggaggcccgacctgcagatcctggacctcgactccggccgaggctgggacctcgccaccaagctcatctcggagaggggcgccaacggcggtggccgcctgtctgccgcggccgcgttgcgccacccgtattttctcctgggtggcgaccaggccgcggcggtgctgtccaagttctcgctcagtaaatagcatccatccatggcccatggctgggtacctacgacctacgggatatatacacatcggcttattggaatcctccgatcgattcaccatccttgtatattgcgcattattgaatccttgggcataccataccggcagtgggaggcatcccaaattcaaaagggagtcatctggtaactgatgttacaacttttctgtatgggaatgctgtgaacaatgtggtgcagagtttcacacactaactaaccttacattatgctagacagagatcctacttcctttgcttcagttcctcgaatctatgcagatgcagacactcgcagagagagctcatcaactggctgcaaaattctgacctgctccttctttcagccaatcagatgtttggccatgctcgttctgatcctatactgacagacgaatccggccatggatcgcctctactgtcactggcagtacggatcgaacttcttctgga

SEQ ID NO: 35024 - DNA, 2765 bp, Zea Mays
ccaagcccaacttgagaaaatgaggagaaaggcctcaggattttggaatttggaacccaacgctgcatttcccaactgggggcacacattaacctcagcctcatttctcttttatttccgctctcctccattctctgtttgctactttgcaagtctcgaacaaaacctgaagcaactcgaagcgaagccgcgatactgcgagaagcggaagcggggagggcgaggaggagcagcaatggaggcgctgctggagctcgagaagatgcagagggtgctgtccctcatgagttcacgcggcctctcccacaccgactccagctgcggcggcgctgccgctgaccgcttcctcgcccaattcctcctcttcatggtgcaaccgtttgattctcttaccctggagaataagttccttttgatctctgagctattaagaaaggctactcctaatactttggaagaagtgcagcatctcacccatctggaagctaataaagatatatgttctggaggttcactccagccaattaagaagtttaagatgcatgccgagaaatcaaccgttcaagctatgccgatggttggttttgatgcgatggcaagagctaagtctacgcttgaagattttgtatgtattctttgtagttggtactcgtaaaaatccttaatggaaacactgccatgaattaatcctggagtgacccaggtcttctgggctgccttttagtttttcttcttttatttttctcaagagaaacctgtttaccttttcttttctcacatcaataaaatcttagcacattaggggattcctttactgtttttgctaaaaaaacactgtcatactgccttttgttgagattttgcaatgcaagtgctacaaaacaattgaaccgcttatagaggcattaagcccgtataaaaaatagcaaggtatctttgaatgtattttgttgttccattattagtcttatagagaaactgggtcacatgctgttctaaattttgatttttcctgttcaaacatgtcttttttggggggttatgagtctatcttgagcacttcctgataattatgtttccctaaagtcccttttttccttcttgagaaaacagtgtaggtcgtactttatgtttcatggtttggatgttaacaagccacaagccattttcaagtatctacctgttctttctttcacagagagttacatatatcagttagatgcttcaaatgaagactgtttacatgtagtcccagatgacaacacttcaaaagtgttgggaaagaaagaagaatctctcaatgagacatccttgtctcaaatgattgaaccccttgaagggcttcttcagtgccaaggattaatgacagaccgattgcgaactgaactcaaatcaggcattcagtattggtctctagagaggaagctctgccaagcattactaagaaatgagaagatctcgattgaagatgttatgatggcaatccatctgaaatcatttgactatcgagttcttaacctgttgatgtttcaacttactggtcagcatgtcaatgaattgcatatggacttcttgtcagtttcagaatttttggttgagatatctgatgacctgtatgattatgaggatgacgttatgaacaatacgttcaatatccttcgcatgtttgctgcaatatatggaccattagaggcaccgaatatgctggccaagtgcataggcgaggctgaagagaaatacgagagcttctccaagaaactggatcctagtctctcaggtagttactggagaagatgtgaggaagcgacgaaggaaggcggaaaaacatcaggccatgcatatggaacatggaatatccctcgtgtgataagcaacgaagatgctttccgacgtgaaagacggagcaaacacgatgcttgtgctgtgatcacttgataggcaaatttcatgttccagacttccaggcatcttcaaaattgaatgaagctaggtacactgctagacagtgtcttacttacctgtatgcacgtttccattcttgccaggtgaaatgcagaaatgacctgcaaccgttgatgtaaggtgctaggggtctgctcagtgggaactccttgaggatatagtggtccttggcctaccttgggcccctttgatgctcacaaatgtacccattttcaagtcaaattttcacaaatgcagaaatgacatgctgaatttagtttctgtaaggctgtctccatcggataccccatctcatctcttttcaaacttatctgtaaataatgtcaaacagtatagttttttactgagtccaagaagggaacaagtcggtctggactctggagtgcgccttgtggccacgtgagagcatctgattcacgacgggctacagtgacagatggatatgtatcggtgtatcctgctactcctacccctatactcgtggctgcgcctgctacagtgacagacgggctacagtgattcacattccatgtgattggttgttaggatcagcagatcctggtcgaagccgagatgcaggttgggcttaacctgtatgcattgatgcaaaccaaaataagttctcttgtttggttgtttgtcctcaattagttaggatcaacactgttttaggtaagttgtatggatttagctttaagttgcacgactcaactatatttctaaaattacaatgccataaattataacgccataaattacacaaaatccaaatttatacaattataaattacaataacttatcc

SEQ ID NO: 35025 - DNA, 1372 bp, Zea Mays
atttagagtaaccatgcgagaaagaaaattttagggtttagggtaccaagttggaactcgcactcgtgtagcccaaaactaatggaattagccgacgcaaggcaagctttccgcttcctatttcggattgggatcatcagcggctgtagcgtggacccgacgggggtgtccggaccacatccctatttcatcttggtaccccgtccgtctccgatttcagaagcacggcgggctccccggcagcctctaccgagcagaaagctgagttctaccccagaaccgaggcatggaggacgaagaaaacatcgagggagaactgttgctcgtggagtcacaactccacgacatccaaggacaaattaaaacattactcgatcgccaagaggagttgtatgaacgccaggcacagttgaaggctttgctcgaagcatctaaattgaccagaaatacaacaattaacacatcttcagttgctccggaagattggtctgggagcttcccatgggatctggaggctgacgataccaggttcaatatatttggcatttcctcctaccgatcaaatcaacgagaaataattaatgcagtcatgagtggaagagatgttctggtcataatggcagctggtggagggaagagtctatgttaccagctcccagctgtacttcgtgatggaattgcactggttgtcagtcctttactttcccttattcaggaccaggtcatgggactgtcagctttaggtataccagcatacatgctaacttcaactaccaacaaggaagttgagaagttcatctataagacacttgataaaggagaaggagaactaaagatattatatgtgacacctgaaaagatctcaaaaagtaaaaggttcatgtctaagctcgagaaatgccatcatgccggtcgtctttctctgattgcaatagatgaggctcactgctgtagccaatggggtcatgattttcgtcctgactacaagaatcttggcattttgaaaattcaatttcccagtgttccaatgatagctttaactgcaactgcaacaagtaaggtccaaatggatttaatggagatgctccacatcccgagatgcatcaagtttgtcagcacagttaacaggcccaaccttttttataaggtgtctgagaaatcgccagttggaaaggttgtcattgatgagatcacaaagtttataagtgaatcatacccaaataatgagtctggaattatatactgcttttcaaggaaggaatgtgaacaggttgcaaaagaactgcgcgaaaggggtatttcagcagattattatcatgcagacatggatatcgttaatcgtgagaaaattcatatgcgatttgttatggga

SEQ ID NO: 35026 - DNA, 1495 bp, Zea Mays
taattactgtgcccctgattctgtttcggcgttctcaatttctctggaccagacactacacgttgctgtgaggatacagaagttgtaaacacaaaaccagcaaagcgatacccacttgcgttatggatagccatattgggcctgataatgctagttggtgtgtacatattctcgttgtctctaaagcaaaatgggatgcttttcgggctcatgcagacaaatttgatagaaaaggaaagggagaaaccttgtcatgatcccggtattccagacacagaaatcccttacttgcactacccaatgccaaatacttatgatagaatgtgcgtgcacgggggttaggttctttgctatattgtcaatgcagaggtcagggagtggatgggttgagacattgttgaatagccatcctaatattagctccaatggagagatcttctctgtcaaagaaagacgcagtaatttcactgcgattaagaaaacactggacaaattgtacaatttggattggtacagcagtgctgctaagaatgaatgtacagctgctgtggggctgaaatggatgctcaatcagggcttaatgaagcaccatcaagagatagttgaatacttcaaccgaaggggcgtttctgcaatttttctactaagaagaaatcttctcaggcgttatgtctctatattagcaaatgctcatgatagtgccatgaaacagctgaatggaactcataaagctcatgtgcactccaaacatgaggctgaaattcttgctcaatataagccaaccattgacaaaaaaacattgatcgctgaactaaaacggtctgataagtttgcagctgatgctttggtgaatttcaagaacaccaggcatgtcgttctgtactatgaggatgttgtcaggagtcggacgatgctcatggatgtcctggattttctaagactgcctaagaggaagctgttgagtcgacatgtgaaaatccacactaaacgattgcgtgatcatattgataactgggcagacgttaataattttttgaaggggacgccgttcgagagctttttgaatggctcaaggagatgacatcgctagctgatgtatatagggctatagtgtgctgcccttttgacgctttggtacccctttctaaggttaacagagttagcacagtaggcaaaaaaaatttgacatcatgatcgaataagtttgggtcagtgagagaaatagttaggaagcagaagtagatatgcttgatccaggttagtctcatagatatggacttcatgacagcagaatgaagacgagaaacaatacctttggggttatcaaatattcaatgcaagaacttgtaaaagctgtctggactcattcatgaatacatcgaagtttacacttgaaaatgatagcccagccggattgccgccacaagtgctcaactgctcatactccttttgtgcacatgttggccccctcgaaagtatcttggggtgtgtttgg

SEQ ID NO: 35027 - DNA, 2408 bp, Zea Mays
gggaggcaatttacatggagatccataagtattttggatatttatgggtttgagtgtttcaataagaatggttttgagcaattttgtataaattatgccaatgagaggctgcagcagcacttcaacagacatcttctcaaactacaacaggaggaatacttggaagacggaattgattggacccccatggaatttgtggataacactaattgcttatctctctttgagaagaaacatctagggctattgtcattattggatgaagagtctactttcccaaaggcatccgatttttcctttgctaacaagcttaagcggcaattaagtggtaactcttgcttcaaaagtgaaaaagaaggcacatttaagatttgccattatgcaggggaggtgacatatgatacagctgggttcctggagaagaacagagacccattgcactctgagtcaatccaactactctcatcatgtacatgtgaactttcaaaacattttgcctctgtcatggttgctgattctcagaataaatcaagtctgtcatggcattcagtaaaggatacacataaacaaagtgttgtcatggaatttaaggctcaactgttcaagctgatgcagcagttggagagtacaaccccacattttatccaatgcattcaaccaaatagcaaacatcatcccaggttattcgagcatgatcttgttttgcaccagcttaaatgctgtggtgtgtttgaagttgttcggatatcaagaacatgctatccaactaggatcacccaccaacagtttgctgaaagatacagatttcttctcttgcgttccattgcatctcaagatccacttagtgtttcaattgctgttttgcaaaagttcaacattccccctgaaatgtatcaagttggctacacaaaattatttttccgtacaggacaggttgctgcactggaaaatgctaaaagacagatgcttcttggaaccctccatattcaaacacagttccggggtttgcattctcggcggggatatcaacgactaaagaaaggggcgatgaatttgcaatcatttatacgtggtgaaagaacaagaatacactttgataatcttgtcaagagatggagggcagctgttctcatacagaaacacactaggcgtcgacttgcagctaacatgttcaatgatcaactgaatcatgtcattcttcttcagtccgtgacgcgtgggttcctggccagaaggaaatacaagtgtctgcagaatgaaaaggagtcaaaggccagtcacagcatagttcaagggaacacaaggaagaataactcagagtcaagaatatgccatgaaatgaatgggcattatcctcacgaaccagtcatcactgagcttcagggtcgtatcacgaaagctgaggctgcattgcggggtaaggaggaggaaaatgtaatgctcaaacagcaattggaacagtatgagaggaaatggtcagaatatgaagccaaaatgaaatgtatggaagaggcatggaagaggcagctctcttctctgcagtatgactctgaagatacattatccaccgggactcgtacacctgaagtgatcgagtcgaaacacgacaaccacaaccctgaagctaaagtttcagcaggaaactcggataggcgagtgaatgctgtgaaccacctagcaaaggagtttgaagacagacgacaggtgttcgaagacgatgcgggcttcctagttgcagtcaggtccggtcagattggttcaaatatgaacccagatgaggaactccggaagctcaaggaccgctttgcgacatggaaaaaagactacaaatctcggttgaaggagactaaggtaaaccttagtaaggttggcacccatgatgagaaatcacggaaaagatggtggggaaagaagagctcgaagtgaaacgtgtaagagaatctccacaacattttgcaacgacactgggtcaaggaaagtggccaggaatgccagggcaggcgagaagaatctgcctctgatcccaaaagcttggtgagatgatgaactcccatgttggtggcagtgccgttactcatctgatgtcacgagtgtcgaaaagatcaaagtagacaataggtgaagccagagttctgtacatgtatattagtcagctctgagtcatcacttgacagtgtgtttatgtcatcgtgtatgtagagtgataaatccgaggcgtggaagggtaactaaatgcagattatccaccatgagcgaagagatgcgaaagcagagtactgtaatatgtgtacagtgagaacattgttgaaatgtgcaaggcattttactctgaaaactgtgattgcatcgccccatattttgcactatcttttgagacctttacacttacacatcagttttattttttt

SEQ ID NO: 35028 - DNA, 1760 bp, Zea Mays
ttggcccaaaactaacttgcaaaattggccgtatcaggccctacgcgtctaccgcaagtagggccaaggacgacaaagaagaaacgaatccgaaacctctccaagaatccatcgcagccgccatcatgtccgccgccggtggccgaacccttggccggagcagcttctcccgcgccacatctaaactggtggcgtcctcatccggctctgctggcgttaagattggcccgaacggtgcttctttcgtctcctcgggcattcccgacctcgacaggattttgggtggtggattccttcttggctcagttgtaatgatcatggaggacactgatgcgccacaccacctcttgcttcttcggtgcttcatgtctcagggtgttgtgcacaaacaacccctgctcttttcaggagctatgaaagagcctgtgttgttccttggtacactacctgctccagtttcatcttcaaaggaggatggacgacacagagcaatgggtcctgcagcaagtagtgatggacgagcaaatgatgagggtttgaggatagcttggcagtacaagaaatactttggggatgacaagacttcgcgagctgaacataaagacaataaacaggaattcagcaatgattttgatttgaggaagcccttggaaaggcatttacttaatggacagaatattgaatgtgtaagcactcaagatgctgacacactcagcagcctccaggattgttgttctgctttcgtatccaagcttccaaggtgagaaaagatggtgggagttcaactgctgggagaattgctatacaatcactctgtgcaccgcagtgcagatactttgaaaaggactgggacatggtctcatttatcagatcactgaaggccatggtgcgctcatctaactctgttgctgttgtaacatttccgagtacagttctgtcaaattcgttctgtaagagatggcagcacctggcggatacactgctgtccatcaaagcaattccagatgaggacaaagacttggcaaaactcctcacaggatatcaagatatggttggttttttgcatgtccacaaggtggcacaacctaacagtcaggtccctgtgatcttagaggcatccacgctctctctaaagctgcgaaagaggaggtccctggtcttagaacggttgaatcaggctccagtcgatgggtcaagtgggccttcgtctgctgcatcaagcagttgctcatcgcaaggttcacagcttgatttctaattggtatggctggatttccttgagaggagctcagaagtgctgtgtactagttactcgtggcagaatgcagcttttggaggtttaggttttagataggagtcagtttgatggttcactgttaaccatcctccctcatgtaaccccactttcaacagtattagaaccgtcgaaacttgtatatttttcgggtagttgtccaagtttgttgaactgccttgaacaggttacaaaagtgtggggttttcttgttttgtctgttccaaatgatcatgttttttgcgtagaacggaaatggttgagttgctgatgcaactgaagaattgttggtcttcacgaagatggagctctgtcagacaatgcagcaatcttgctatgttaatgtcaaagatgcagaaggcaattgtaacaacgggaagtagatttttgtaatactggcatcggcattcttgagcttcatggaaatggcagcgccaagcacacaattgcatttgtggcattataa

SEQ ID NO: 35029 - DNA, 1905 bp, Zea Mays
gtgggtcttctccactgctgcaataaaaatgcctcaagctgcggccacccgccgggaccagcctcgccgccgcgcgccaaaaccctaacccctcccggcgtccgcccctgccgcgtgacggccccagagatggggcgagacaagagccgtcgtctatacggcagccgccacttccggcagcggctggtgctggcgacgctcacctctaccgctgtcaccatcgaggacatccgctctggggacgcttcgccggggctccgcccttacgaggtctccctcctccgcctcctcgacaagatctcagaccatcacaccattgacctcaacgagacaggaacgaagctgaggtaccggccgggggtgattatagggggaaagggccttgagcacgactgcggggtgcaccggggtattggatactttcttgagccactcatactgcttggtctattttcgagggcccctatatcgattcggcttaaagcactttggtgttcctctggatggtttcgatctaaatattgacagccgtggatctcctcctcttggtggtggtgaggtgtttctccgggttcgcaatataaatagcacattgacggcagcaaattgggtagatgaaggtatggtgaagaggataaggggtgtttcgttctccactagagtatctccacagttggaaaaccgcatcatttatgctgcacgtggaatcttcaatcgtttcattcctgatgttcatatacacacggatcatagatctggttctgctggtgggaggtcaccaggctatggtgtatcgttagttgctgagaccactacgggatgcctgctctctgtagatgtcactgtgagttatcctagtgttgatgaaataaatgaagaatctgagaagcctgagctgacttctccggaggatcttggtgttcaagctgcatcaatgctactagaagaggtggctcaaggaggtgttgttgattctacacatcaggtctgggcttttatgcaagcattctatgtatttctgaattttgcctggtgttaagctcgatgatagctgtatatattgttatgggctcagtgaagcttagacaggagtacaggacagtgaagcattttgttcttttggactgtttgtgtctactacagacaagctgcaagttctacatggcatgtggataactagatatgatttttttcaacgatctactttctcttaaaaaatgttgtcctctcttggactgacagtgctgtacatttatgtttgcccatcttaaattgcttgttgtctatcctgatgatattccatgcataagttacagatgcttttgtttagtgattttatcttaaatgcttgcagggcctcctatttattctgtgtgctttatgcccaccggatgtatcaaaggttcgtgtgggacagttgactccatatggtatagagacacttcgaaacatcagagattttcttgacgtcaagttcatcatcaagcctgatcccaattcaaacaccgttactttaaaatgtgttggcgcgggagtgaagaatcttgctcggaagatttcataagcaacatgaccattaatctgatgaaggatccatgccacatcaagagactactatgagaccctatttgtaactgcaaacaacagtgtaggagtttcccttagctgttactgctgaaattctattcgaggtccatgatgtcttagacatcaccgatgtacatcagtattagaatggattgttctgatcatgatgccctgtattgtcgacacatttttgcatcacattgcttcactccaactatgccatgacatgctgatacatagaaatgaagaaaaggtgacaaacgtccagactaaatgtttgttttaccatgtgcattttgtttgatcaaattgtcctgt

SEQ ID NO: 35030 - DNA, 2323 bp, Zea Mays
cactccgtcagtctcccctccggcctcacgccgcgctcgcggtgctgcctcccgggctcccgttccagcattccaggctcgcatcgcacggcctggccccgcccgctccgacccttctcggcgacactcctcgtaggctcgtactggcacgtccccgctctgtcttctgcccaccaggcactagcgggtgcgggtccacgcttccaagggttccaaactctcggcggcgcaagcaatggcggcgcggggccgggagcactggtagtttcgcatatcgcggcggcttgttgccacctcgccatcgcagattatggggatcaacggcgaggagtgggaggagacggtactgggcgacggcgttgggaggcggaagggtggtgctgaggcttccggtttggtcgcatcctcctcctttgctgaggggatgggggaattcgtgctgaggtctatggacgccaggttctccggatcggtcgacgacgatgaatatgtctcgtctcggcagccagtatttggccatagtaaatcgacagctactacttctggtaccattaaagggcaagataacgtttttgtaaggtcatactctgataggttgctgaagtgtgacctcactttggatatgctatcagaaaatgagaagataaagataaccgagagattggtaaagatccagaatgatggtacagtggaggtagatgtgacgcgcagtgctcttgttgcctcagaactctcggagattgatgcttttggttgtgtaccacacgatattgaagaagttacacctggaatcaccaaatcagtcccaaagctgaagattgctatacttgtagttggaacccgaggggatgtacagccttttatagcattagctaaacgactgcaggaattcggtcattatgttagattggcaactcatgtcaattttcgtacttttgtgaagtcagctggcattgatttttacccattgggtggtgatcctcgggttatggctcagtatatgacaaaaaacaaagggtttttcctggcggcaccgacagagattgccattcaaagaaagcagcttaaggaaatcatcttctcacttctacctgcatgcacagaacctgatttggatactggaacacctttcagagctcaggcaataatcgcgaatcctcctgcttatggtcatctacacatagcagaagcacttggagcacctctgcatatcttcttcacttttccatggacgccaactaatgaattcccacatccattggcacgaatgcctcaaagtgcaacttataggcacataccatggatctatatcacacttacctactggatacatgtggagcccgcaacttatgccaaagccaaaagattggggtcctctagtggatgttgtgggatattgcttcttaaatcttggaacaaagtatcaaccgccaccacaactgtcacagtggcttcaacaggggcccaagccaatatacattggttttggtagcatgcctcttgatgatgagaaaaaagtcactgctatcattttagatgcacttagagaaacaggacaaaggggaatcattagccgtggttggggagctcttggaagtttttcagaagttccagttgatgtcttcatcttggaggattgccctcacgattggctcttccctcggtgtgctgcagtggtgcatcatggtggagcaggtactacagcagcagggctgatagctgggtgtcctactactgtagtgccgttttttggagaccagttcttctggggcgagagagttcatgcacgaggagtgggtcctgcacctatatctatcgcagaacttactgtagaagcactatcaaatgcaataatattcatgcttgatccagaggtaaaatcacgaacaatggaactggcgatagcaataggcaatgaggatggtgtggcagcagctgtagatgcatttcatcgtcacctgccttcagaattgccgctgtcgccgcccgcacatgtggaggaagaacgcacagacttcttccaatggttttctcgaggcctggagaagtgttgtttcccattcagtttttaggtacggcagtccgtacgctaggtatatgtatgatttattcatttatgagttgaaaaggtatatcacagtaattttctaaaattggaataaatgctggtataagccaatggtgaggatgcaataaaaaagatcgacgcaattgtaaatgtttgggcagctacaattgtattcagaatttgctggtaggcctgaaatttgtgccccgatgtgccttccagtatgagtgtagtagctacagaactgagcgatca

SEQ ID NO: 35031 - DNA, 1876 bp, Zea Mays
gaggaatatgcacaattatattaggtcgaagaagccgccactgccggatctggcgcagcgctagggcacaacgtgcgttggcgaggcaggcgagcgtgccgtgggtctgcgtgcccttggagctcctccaggtgacgtagggccatcacgccaattcacagttcgagatccgacgctggagccgccgctccaccagctcatcggcggtagctccgtgcggacagcgacgtcgacgcgtcgtcatctggtggcatggcagcggtggtcctcaccgatggctcagccatccgcaagagcgcaagcatggggacctctccctcgtcttcgcggggtccaccagcgacagcgcgtccccaactgttgggcccgacctcgccgacagcggtgtggggccatgacttcgaacgacatcgtcctccgcgagccatgagcgtaaaaaggttaggtactgccctatctctgcccctcctctctaatcgatcaatggtaatagcacactacgagtactcttgccattgtattccattagcgacaaatctgctagaaaactatgttatggctagaaactgttagaagtttcaggaatggtgttttatgttacctcgtcatatttttcaagatacatgtcttgtggtcgaaatttcttaagatttcttagttgtcttatagttttgattaagttgacaacttgaagtctggatagagaaattaatgatgaaccagtgtgcaatataagacatatatcatatttaatggtttagtgacatccttattagcacccgttttgaggacatggacttccacatacgtggctgattctcttgaaccatgacggtacaatctctgatttcaactgaagaaaatctctgctttcctgtcctttcccatgaaaatcgtccgagagatgactaggatgaaggatgagaggaataggctgaggatgatcatggcacagtacttggtgtggcttcattcttcatgcaagatctgagcaaccttgagtagcaaatcgaggggaagggtacgagcagcttcggcaagcgccggaacaagacgcacacgctctgcatccgctgcagcagccgtagcttccacctccagaagagcacctgctcctcctgcgattacactgccgcccgcatccgcaagtaaggacaagcctccacgtcgatagaagcaaatcaatccatttcgtttgacaagtagaagattatctgtgttcaaccaaatggacataattagtgctgttttgcaaaagcattttggattttccagtctcaaagcattccaaaaggaagtcttggatgcttggtttgctcatgaggattgtgttctcctaacagccataggatcaggaggtaccaaaggaaatgagcaaaacatagcatacagtctcagatgctgcaggatcacatgaaaattattgaagacgacggtccaggtgcagccttctatgccagtgctaaggccatgactaatggaaatcacactttctatggacctctcaagcaacaacctcaatggataaggcatattaaatacattacttcttcagcatcatgggagaaaatcttactgtcagggttcagaggatgttgtacggaatgaagttggttgatttgacgaagaagaaaacatttttagtcttgtggctgtgcgtctagctgttgatgcagctgatgagaagtcggctatagccgagagaatttcagtcatcctgcagaaatatgtcttcccatatgacttctttcgttgttggatttatcatcgagtggagagtggcaatacttagtctggccactacttgtgcttgccaactttgcttaggtaatttcttggcctacttttaagcggtgtcatctgtagacaaaatgag

SEQ ID NO: 35032 - DNA, 1943 bp, Zea Mays
aagcagaacgggagttgagttgagacagtctgaacacgtggagtcgacgtgtgcccgcgccggcgccggccaaacgcaatccgctgacgcagagcgctaaacaaaagaagggtccctgttgccggggcccagccgccgcgcacgcccaaaacacacactgacgcgtggggccaccgcctttttttcccctttgctgcgtgtcttgttgttcctcctctcctccctcgcggacacacaaacccaaagcagagaggtgagagggagaggaccgagggagagaggagagagagcgatcgagagatgaggagggagcttgcctcccccttagctactgccgccgctgccacggccggtgcctcctcctcggctgccgcctcgctccggggctggtgggacgatgtcaacgagtcgccccagtggcaggacggggccttcttctccctcgccgccgcctacgccctcgtctccgccgtcgcactgattcagctcgtcaggatccagcgccgggtgcccgagttcggatggaccacgcagaaagtcttccacctcatgaacttccttgtcaatggggtccgtgctctggtgttcggcttccatgtccatgtcttcctccttcgcacaaaagtatacaagttggtgttgctagatctccccggcttgttgtttttctccacctacaccttgctcgtgctcttctgggcagaaatataccatcaggctaggagtctcccaacggacaagctaaggcctgcatacattgccgttaacgccatcatatacgttgttcagctttgcatatggatatacctcggaataaatgataatgccgcggttgagctggccagcaaaatattcattgtagctgtctcctttgttgcgcttcttgggttttcagtatatggtggaaggttgtttgtcttgctgagacgtttccctattgaatctaaggggcggcaaaagaagctgtatgaggattgtctactcaaataaggtgataaatactaaagtatgcttgcacaacggcttcaggtacacctgccccctacacgcgtgctagggtgaaaaggcgtgcacataatgtcgaatgtcgtgctcacatttaatgcgagccatgcagtagttatctcttcgcaaagcgaccaccataccgaataccagggttgggaccgtgacagcaatttgtgttacctgctttctgataagatgtgttgtggtcgcgctatctgcatttgatgctgatgtatctctcgaggttttggaccatccagtcctggatttcttctattatatgtttgcggagatactcccttctgcgctggttctcttcgtccttcggaagcttcctcccaagcgggtatcggcgcaataccaccctattaactagggagttctttgtttttatgatgttacatgctaagaactccggataagctggaactgctgaaaacctacatccggttgtattgctgtaatattttatggaagcatcccagggttggcaagatgcatcatcaccatcatgctctatgagaaaagagttttgagtggtgctaatgagtttgtgctactgctagccagagcatcacatgacatctccagcagagtaccataccattatttgaattgcatgtgcattcttgacgcggacaaggccaatgatttatcgccttgttggtcccagtgacttttatggagtacttgtgtggtaattgttggtattcctgaggactagatctgaaactgaaaatgcgttatatcagctatcggtcgtcctaatatcaatttttgttaggcttttatctgtttcagcgttccagagtagagcctttagcctaatgttgtcaggatctgtaattcgaggagcagtgttggtaggattattattgtagttttggtgctggattgttctggtaaatcgatcgatcttccatgctttatttgta

SEQ ID NO: 35033 - DNA, 2101 bp, Zea Mays
ccatcccggggtgccgcggctccaggcggtactacatatgttcattgtaaagctggaagaggacgaagcaccactattgtattgtgctacttgattaaatacaggaacatgacccctgaagcagctttggatcatgtacgatccattaggcctcgagtgcttttggcgccctcgcagtggcatgctattagttcatttggagctctcaccggtggacaacttccagtatggagtacgaacttggcctgtttcctagaagccattgaagctggctgtacgaacacaggaaatgatactatagtgcagcaagataacatagataaagagaatgactctgctatgaaattagacgtttccagttccatggaaaaaccttcaggccaggggccagaggagtctatccttgagagcgatgttattatgcaagggatgtcttcagatgacatgaccaaagagaaagatctaaacattggggaagctacataatctgagaagtgtattggtgatgtccccatagaatgtgataaacatggtgatagtgaaccattgagcatggaaggcaaaatcatttctggcaatgtgaatgtgaagaaccaaatatcgagggaggatctaaaagaagcattcaaaaattttggaactgtccggatgcgccaacagagtgaaaccctaggaaaacatgccatgcactttcttgctggttatatttccatgttttctacacagggtccttttcagacagggataacacggggagctcttagcacatattagaacagtgaagatgtacagttgggagaaactattcactgaacgtttggtggaaagaagagaatcagaagtgaagcatctcgcgacaagaaaatatctggatgcttggtgcgtttatttctgggcaaccacaccgacattgttctccctttccaccttttctatttttgcaataacgggacacgcattggatgctgccacggtatttacttgtgttgcactctttaacacactaatatcaccgctaaactcatttccatgggttattaatgggatgattgatgctgttatctctagcagacgactgagtaattatttatctactccagagcatcactcatccgagttaaatgcctctgctgaccttttaaaccaccactttaagagatattccaaagtaactcataatccaatggccatcatctttcagaatgtatcctgttcttggtctagcagctctgttgctgaactgaacatagttctcagagatatatctttgcagctacaaaagggctctttattgcaattgtaggttggttctggtaaatcatctttattgaacacaatcattggagagactcgtgtcatcagtgggttcaattgcctatgtaccacaggtaccatggattttatctggctttttacgagataatattttgcttggtaaagaatttgatccaaggaggtagtttatctgtctctgacatacattaccacaagtttgtttcattatgtcattgcatggcattaaagcagctatcatgattcatgaactattggagatgctcatacaccatagaatttattgcttccccttttaattagcattctgcattacaaaatcaatgcatatacgaagaagtaatagaggcatgtgcgcttcatgttgacatattggcaatgaccagaggagatatgtcacatattggagagaaaggtaccaacttatctggtggacaaagagctcgtctagcattggcaagggctttgtaccacaattctgatgtatacttgtttgatgacatccttagcgcggttgactcccaagttgcttcgtgcatcctggaaaaggctattatgggggcaccaactaatgcagaaaacaagattactaagcacacacaatcttcagtaaaacgacagagttctgatggctctgttatgtccgatggccccgggcagccgtcggacataacacaatacgtctgacggctggcagagagactaattggtctactaaagtagctactctgacctgctcaatatgggagacagctatgacagattctgctcttctgaagaagctattttgatcgattttggctgcaac

SEQ ID NO: 35034 - DNA, 5176 bp, Zea Mays
tctagagatgagctacgtcttgtctatggtgtttctgagcgtacagaaagcgatggtgcagctaatttaattcagaagttgagagctataaactatgctctgggtgaactaggacagtggtgtgcttacaaggttgcactgtcattcttgacagcactacagaatgatgaaagggccaactatcaggttgatgttaagtttcaagagtcatacttgagaaaggtagttgatttgttacactgccagttgactgaaggggctgcaatgaaaagtgacagtaatgatgttgaaatgcataattctgaaaaccccaagccaaatgaacttgaggagggagagctacctgacagtcatggtattaatagtcttcttgcaaaatgtgttatatggtgacctttttctttttaacattccccaatgaatttcccttcttccttcactctacaattagcacatattgtgtttattttttgtcctttattataccttaggatatacaattagcacctattttgtttttttttgttctttattatacctgagggtatctcagcctcacttttaacgctttatgctgttatttcccactagctgtttctgtaggtgaacatgtagatgaagtcattggtgccgcagtggccgatggaaaagttaccccaagggtgcaagctttgataaaaatacttctcaagtatcagcacactgaggattttcgtgctatcatatttgtagagcgagtggttacagcattagtcctccctaaggtctttgcagaacttccatcgttgggctttatacggtgtgcaagcttgataggtcataacaataaccaggagatgcggtcgtgccaaatgcaggatacaatcacaaaatttcgtgatggccgtgttacactgttagttgcaactagtgttgcagaggaaggacttgatattaggcagtgcaatgttgtcattcgctttgaccttgcaaagactgttttggcctacattcagtctcggggtcgtgctagaaagcctggatctgactacatattgatgcttgaaagaggaaatatgtctcatgaagctttcttgagaaatgctcggaatagtgaagagacattgagaaaagaagctattgagagaactgatctcagtcatctcgatggcacttctatgctaagccctgttgatatatcacctgattctatgtatcaggttgaatcaacaggtgccgttgtcagtctgaactctgcagttggactcgtacatttttactgctcacagctgccgagtgacagatactctattcttcgaccggaatttattatgcaaaagcatgagaaaccagggggttcaacagaatattcttgcaaacttcaactcccttgtaatgccccattcgagaaacttgaaggtcctatatgcagttcaatacgcctggcccaacaagctgtttgtttagctgcttgtaagaagctacatgagatgggtgccttcacagatatgcttttacctgacagaggaagtggggaaggagaaaagactgaacaaaatgatgaaggtgatccactgcctggaacagcacgccatagagagttctttcctgaaggggttgctgaaattctacatggagaatggattttatctggaagagatggttaccaaagttcacagtttattaagttatatttgtattctgtgaactgtgtaaacattgggacttcaaaggaccctttcgttacacaactttcaaattttgctcttatttttggcaatgagctggatgcagaggttttatcgacgacgatggatctctttgttgctaggacaataataacaaaggcatctctcgtattccgtggaccaattgaaattacagaaagtcagctgatcctgcttaagagctttcatgttaggctcatgagcattgtacttgatgttgatgttgatccctcaacaactccttgggatccagcaaaagcatacctctttgttcctgtgggagctgagaaatagggcacgcccagatgtctatctaggcacgaacgaaaggacacttggaggggataggagggaatatgggttcgggaagttgcgccatggaactgcatttggacagaaagcccaccctacgtatggtatcagaggagccatcgctgaattcgatgttgtcaaagcgtctggattagttcctggtcgtggatggggacattttaatgattatcaaaataaaggcaagttgttcatggcagattcatgttgggatgccaaagatcttgctggaatggttgtaactgccgcccactcaggaaaaaggttctatgtggacagtatttgctataatatgaatgcagaaaattctttccctaggaaagagggctatctgggtcccttggaatacagctcgtttgctgattactacaagcagaagtatggtgtggagttagtttataagaaacaacctcttatacgggcacgcggtgtttcatactgcaaaaatctactttctcctagatttgagcattctgaagctagcaatggagagttctcagagaatcttgacaagacatactatgtatatttaccacccgaattgtgccttgtgcatcctctccccggatcacttgttcgtggagctcagaggttaccctcaataatgagaagggtggagagcatgcttcttgcaattcaactgaaggacataattgggtatccagttcctgcaaataagatattagaagccttgactgctgcgtcatgccaggagacattctgctatgaaagagcagagctgctgggtgatgcatacttgaaatgggttgtgagtagattccttttcctaaaatatcctcaaaagcatgagggacagctcacaaggatgcggcagcagatggttagcaacatgatcctgtatcaatacgccctgaataaaaacctccaatcttatatccaagcagatcgatttgctccatcaagatgggcagctccaggagtgttacctgtatttgatgaagaaacgagagattctgaaccatccatctttgatgaggaatttactcctagcagtgagttacaaaagaacttgtatgatgactatgatggcgatagcatgcaagaagacggtgaaattgagggagattctagctgctatcgtgttctatcaagcaaaacattagcagatgttgtggaagcacttattggtgtctattatgtagctggagggaaaattgctacaaaccatctgatgaaatggatcggtattaatgcagagttggatcctcaagagatcccatcttcgaagccatataacatacctgagagcataattaaaagcatcaattttgacacattagagggtgcattgggtatcaagtttcagaataaaggcttacttgttgaagctataacacatgcatcaagaccatcatcaggtgtttcctgttaccagcgcctggaatttgttggtgatgctgtattggaccatctcattacgaagcacttattttttacttatacggacctacctccaggccgcttgactgacttgagagctgcagctgttaataatgagaactttgcaagggttgcagttaaacataagctacatgtacatcttcgccatggatcatctgcattggagacacagattcgagagtttgtgaaggatgtccaggaggagctttcgaaaccaggtttcaattcttttggccttggggattgtaaggctccaaaggttctcggagacatttttgagtctattgctggcgcaatattccttgatagtgggtgtgctacctccgtagtctggaaggtttttcagcctctgcttgatccaatggtgacgccggacacccttccgatgcaccctgtaagggagctccaagagcgctgccagcagcaagccgaaggattagaatacaaagcatcccgtacaggcaatgtagctacagttgaagtcttggttgatggcatacagattggtgtagctcagaacccacagaagaagatggcacaaaagttggcggctagaaatgcacttgttgtcttgaaagagaaggaaaccgcagcaaagaaagacactgaaaaggatggcgagaagaaaaacggttctcagttcactaggcagactctgaacgacatctgcttgagaaggcaatggccgatgccacagtacaggtgtataaacgagggtggccctgcccatgccaaaagatttgtttatgcggtaagggtaaatacatctgacagtggatggactgacgagtgcattggagagccaatgccgagtgtgaaaaaggccaaggactctgcagctgttcttctgctcgagctgctgaatcgaaattaccgtggcaagcctgatggaaaataatctttggtgatgttctgtggtggtaggtagacgtggaagcatccatcattctgattatacccccatgcagtgcttttcagcaaagcaaattaatggcctttgttgatgttcttggtggcggtattggtgatatggaggcattcaatgcaagcataagcagagctatggggagtgggattagaggattattattagttttgtctgaggtgactactaggtattttactggcgaggtactgaggtcacaactcacaaatagcagttgcaaattgcaatagaggaaatgatgataggttgatataggatattggaggcctcttattcatcgattgtataagatgtttacagaacagtgcattgatccattaaatttatattgattgatatttttatagtggatgcgcctgcagctgggaactcggggttctctatcttggcctcgccgaccaaatatcacgtacgtcgacgtccgcgaacagtatatatatggcgggcgtgatccccttgcgcatggtacagagcaagacgctgagctggatattctgataatcccgtatactccaacagaaactacagaatggaatcaagttgtacctgcgtttctgctgctcaaaaattgcgagatggaccatggacgtgtgttgtttggcaacaacgacgcaaccagcacggacaagaaggggggacatgcagtctctcgaaacctgtcctatacaattagaaagaaaaaaaagagggaaaataaaaggaaaagaacgcgagggcagggccggccggtcggtcggtgcctgcgccgcacttttgtcatgtgcctagcaca

SEQ ID NO: 35035 - DNA, 569 bp, Zea Mays
ggggtggtttcttcgtggccccttatggactctggcaaacatcaacataggagcgcccccagtgctatgtccactccggtagaagatgaacgattcgagctaggtgatctcgatgggacaaagaaaagaattcgggatgtctttttgccaagagctggagtcgaaggttgtgggcctccatgagggtgtagatgaagtggtcgccttcgtccgtgcccagggtgccgatcgaggagagtgactcctcgacgttactaaccgggtgcgcctggccatccgccgtggtgctgcaggggctctggcctttgtgcagttctagtcgggctataagctcgacactagcgatctgttggaggacacgaccgctggtgccctggaggacttcgaagataactttagcatagctattggggttgtggttgaaatccttccactagaggatgtaatcaacgaatccccctagttaggatgtttctgcaagctgcttctgggatatgtatgcccctatgcttttataatgtttcctgaactttgttgatggaatgattctccttcctttcctgcccctg

SEQ ID NO: 35036 - DNA, 2994 bp, Zea Mays
cccacttcgcgtccacccatcagctctcgtcctctcaccgtcctacgctctgccgcccgccaccaggcgccagatcgacaccggaggtgatgtcgccgccggcgagccaccgccgccgttctcggttccttagctggccgctgctcttcatcgcgatcctcgcgatccactcgctggcagtatacctttttacccgcggcttcctcctcacccgcaccgagctggacctccacagcagccgcgacgacttctcgccgcagggcaacgtctcccccgggtgcgactcctggcccccggccgccgtcgaccgccttgtcattgtcgtcctcgacgcgctaagatttgatttcgtggcgccgagtaccttttttgcagagaagcagccgtggatggacaagctgcacgttttgcagaagcttgctgccgacgaaaagacctcttcaaggatcttcaaagctctcgctgatccaccaacaactagcctccagcgccttaaggctctcaccacgggtggactccctacctttattgatgtcggcaatagttttggtgctcctgcaatagtcgaagataatataatgcatcagttggctaaaaatggaaagagagttgtcatgatgggggatgatacatggatacaactgtaccctgaacacttcaacaagtcattcccatacccttcctttaatgttaaagaccttgacacagtagataatggtgtaattgagcacttgcttccatctcttcacaaaaatgattgggatgttcttattgcacattttcttggagtggaccatgcaggacatatatttggtgttgactcaaccccgatgatccagaagttggagcaatacaatcagatcctggagggtgttattgacacattgagaagtctatccaaacctggtggtacccatgagaatactttgcttttggtaatgggtgatcatggtcaaaccctgaatggtgaccatggaggagggactgctgaagaggttgaaacatcgctgtttgcatggagtccaaggaccccaccagatgcagtcttatctgttcttgatgatagttcgtgcactgttaatctgcatggggaagaggtttgcgtcagcactatgcagcagcttgattttgcggtgactatatcagcacttcttggcataccttttccctttggaagcattggccgtgtaaacccagagttgtacgccttgagtatcgggacatgggtaaatcaaaggaggggtaccaatgcttgtacctcacaggatgatctagaagcatggatggggagatatgctgaagttctatgtgtaaattgttggcaggtaaagagatacattgatcaatattctgctacttccgttattggatttccatcagaagacctgcaacatatcatggacctatattcaagagctcaggaaaattggtcagcttctctgataactagttcatcagagacatgtagtcaagaaaaagtagagaagggttcagttctgctgcagcaaattgatgcatacaatgacttcttgaagagttttgcaaagcttgctcgctctgcttggacagaatttgatttatggtcaatgggcattggtcttttacttatgatgttgtcagttatcattcaggcatccatgcttaactttgtttttcttcttttaaatattttcacacggtttggaattgaggttgggatgtcaaaacaattgcctgccccaacaattacaaaggatcatcctgtgagcgtcatttataaaatccttggtgctaattcttgcaacatcctcttggagctattccccatcatatctctagcctttgtggcttacattatgttgaaatgcctatcccgtgcaatctgtcagaggttcttgaagttctttcttttgtgtggaacaatggtgagttatttatctatagcgtttcattgggcttcagagactactttgtttgctcatgctgggactgttcaagaatttggaagaagtttggctcctcgcattgtttacactattggaggtctatcactagccatttctgcattttctcggatatttggttcaactgttcatttgaagttgaacaaaaggataattattttatcggctgtcatgctttgttcttggagtccaactattttgatcctgttgggaaggcaaggtccatttgtggcattgatttgcatgacaggagcttggtgtatgataaaattgcaacagaaacatcagagagagacagaactctctgttgctgaccctgtttcggtgattcagtggagccttcttgcagtttgtctattttatatgacaggtcactggtgtacatttgatggcctccgatatggtgcagctttcatcggttttgatcattttcatatcattcgacaaggccttctactttccattgacacctttggtatttctcatgtcctgccaattctaagccttccacttattgccatagtgtggtacaacaccatatccaaggacaacgaactgaaggacgtgattctcaacaatattaataaggtgcttttgatgtatggtcttataacaacaatcactgctacgctaacaatcatatgcgttgctattcaaaggcgtcacttaatggtttggggtttgtttgctccaaagtacgtattcgatgcaattggccttctcctcacagacttgttaatttgtttagcatcaatctactacagctgatgttgctttgcttcttgagttgcactgctaaccactaacacaacactgctattatgcttttgtgtgaatcggttgcagctagagatgctattttttcttattcttcttgtgactgcagtaagaccacacactaaacttagttcattcgtatttgtattggccaagtaagcataaaatatacaaccatagttggtctttcccacggatgttcacacttatacaaaaaggatactccctccgtcctaaaatatagttctttcaaaaatatagttcttcctagcct

SEQ ID NO: 35037 - DNA, 2371 bp, Zea Mays
atgccccaccaggcaccaggttgctgggtttgggcctcacggtccagcagatgccagccagttgccacgcgtttcatcagcccgacccaaccaaagccagaagacacggtgccgtcagctgtgctcccggcgctcccgcaccacaagcaagcgcgtgcgcgccgtcaagtcgcctctacagcaacttccaccgcgtactccctccctccctcgtctcgtcttcgtctccaggtttcgcgggggccaaggtttctgccggagcagtcgcggtctgcgctgcggcacggcgacgaggtggggatggagtaccgcgacaagctcgtgctggcgcccatggtccgcgtgggcaccttgccatttaggctactggctgctgaatatggtgctgatattacttatggagaagaaattattgatcacaaattcttgaagtgtgagcgtgttacaaatgaatctcttgggactactgattttgtggagaaagggactgacagtgtagttttccgtacatgcccacaagaaaggggcagggttgtattccaaatgggcacatcaaatgctgtgagggcacttaaagctgctcagatcgtgtgccgtgatgtttctgctatagatatcaacatgggttgtccaaagtctttttcacttagtggagggatgggtgctgcattactctccaaacctgagcttatacacgatattctgacaacactgcggaggaacttggacacaactgtgacatgtaaaatccgtcttctgaacacacctaaagacactgtggagttggcacgccggattgagaaaactggtgttcctgctcttgctgtccatggaagaaagattaaagatagaccgagagatcttgccaagtgggatgagatagctgatgttgtgtcagcgctgtcaattccagttatagctaatggagatgtctttgagtatgaggattttaagagaattaaagatgcaacaggtgccgcgtctgttatggttgctagaggtgctatgtggaatgcctccatcttttgtgccaaaggaaaaacaccttgggaggatgtcaaaagagagtatgtaagaaagagcatattgtgggacaacgatgtgaagagcacgaaacataccttgaaagaaatgataatgcactattcttgccttgaacttcctgaggggaaaggcgttataaagtgtgatacatctgaagatttagcgagactatacggggaagaggactactataattttgttgttgcaaataggaaatgaatacaatttgatgttgtgagctctcatgtgtaccagcaaaaccggtgaaacttgcctggaacttgaagaaagatgttcacttgcatgattaaattgcaaatcagagaactctcaacttcatgattgattattcgcttcgattaaagccagctgtttggactgctgtagctgcaatccatagagataaaacactgtagaagcaatagaagcctacggattaaagtcaagcaaacaggctagacctctctctttctctgaaaaatgtactaccaagaacctgcatatctacatacaatgacacctctcctcacctgcccgtgacgctgagctgccttcgccccccccccccctcccccttcgccgccgctgcctagatgtttcatttcatctttgtgcgtgtgaggcacacggcacgataaggacgaatgttgggtggggctgctccctctttcaatggaatgacatggtcaatatcacgttgaggagggacttttgtgtactcctgacagaattcagagtattgttgcagtaaggcttgaatagccagacgaagagtgtggtgcctgcagagacaagctgttgagatgcagaatgaaactagaaatgcctttgttgagaagcttgttcattatccttttcagttgttcagtgtacgcatcctgagatgtacaatcctttaatgagaggagagtatcatcttctaaggagtcaagggtgttgttcaaggcatgttcctgaatagagaatgcagtgcctgttatgattgccccagatcttctgcttggattcctatctcaccctttattgatgggattaggaggaattcctgccaccaaggacaacgggatttgccattttggcgctgtctggacttaacactgaagctgctgatctttctcttgtactggtaatagttaggtttatacctgaaattaatcaaacaccatttttttgtaacaaatactaatttatttgctttctatactatggaaattttgtcatgtattgttggtggaaatactattgcgcttttgaaggaattgaaagactttgatatgttgactactattatggccctatggtctaagaaatattaaatgttttcatg

SEQ ID NO: 35038 - DNA, 4348 bp, Zea Mays
cataaatgctggtatatccaggaaaaaatcatacataggaacctggatgatcctcgagaggctacgtgagtacgtgactcactctgagtctcgatgaccttcgtctccactctccagcacgcagtcgcagttgtcgtctggggtggtggtggtggtgggccgaggtggagtcgtcggatctcacacacgcaactctctcaagactcaagagaggaaaggttgctttccggccggaaagggaggcgagcgcgagacccctgtgatcccaattaagcgcccagccgcgacggccccaaaacggcaaacctccccagcccgcccgcccgcgccgcccgaccgcgatgccacccacgccgccggagacggagacggagccggaattcgccgaggtcgaccccaccggccgctacgggcggtacacggaggttctcggcaagggcgccttcaagacggtgtatccttccattccccctgggcgtttgacgcctgggtctgattcggggccctttgacttcgcgcgatcgattaaagatcccggctttacgcggtccatgccatgggaggggaccgtttcttaggttctcgccgatttggatcggctccatggtttctgatgcgctcattgctcaaagttccaggcccgatgccactctctctatatatgaatatgatgcctcacatattgcctttttgttgggaatcctgatctcctttcatttaaaatacgtgaccgcattgctctgctgtgactgcctgatgcattgtctccatttcagttcccaattccattttgtaccttctgtcctaggctatcaactcgacattttggtatggcggttacgggcttacagccagggtggttttacttggtgctatcaaatgaagacccacatgtttacccacgggggatggaatattttcttaggttcttggcactttgcccagtgattgcatcgtgccacttggattggctcgatgctttctgatgcgcttgttgtccaaagttcctgccctgatgcctctaggtgcagcctcttggggcctagcatactctgtctaacaatatattgctgttcagtgcaaattctgacattctttcatttgaatacattatcgcattgctgtgctgcgatttctcggtgtgttatcttcttttcagtttcccatttcatttgtacctgatgtcctatgcttattaagttgacattttagtatattgattcaagcctgtggtttgcgatgtgcatgtctgacgcgattattttgctgcccttttctggagtggaaagggataagtgccatcttcttttggataactatcatttatgtcatcatttagtacggtcttaagtaaattgtgtcgttttctcccttttctgtgtgcattacatttatcttcagtatgtatatttttaccattcatattgcttggatacttgaagtaactctgccaattaatcttatgcatgtttatgcatttatcacttggagcactagtttctagctgccggtaattgaacggttttccatccatcacaaacagtgcagttctagaaattgtttatttctagtaagaccaagatcatgtgtgtatgcacttcatttgagagattctcttagtcaatcttgataagaaggcaaatccaacattttctttagacgccttgacttttgcgttatgtccacaactgtttttagcgataatctataatgttaattaacacttatatctgcttcaatgctatccagttgggttccttgatttatattttattggcatagatacaaagcttttgatcaacttgaaggactagaagttgcttggaaccagatcaaagttggagatttacttcggaacaatgatgatttggagaggctgagatcagaagtgcggttgcttaaaaccctcaagcataaaaacataataaagttctacaattcatggcttgacaaaagaagcaacaatataaatttcatcacggaggttttcacatcagggacgttgcgccagtaccggattaagcacaagaaggtagacattagagctttaaagaaatggtcaaggcaaatcttgagtggtcttgtctacctgcacagccatgatccaccagtgatccatagagacttaaaatgtgacaatatattcgtgaatggaaaccagggtgaagtaaagattggagaccttggtttagcgactatcctggataatgcacgttcagctcatagtatcattggtacaccggaattcatggcaccggaactctatgacgaggaatataatgagcttgtagacatctatgcttttgggatgtgtttactggagcttgttacatttgagtacccatattgtgaatgttcaaatgcagcacagatatatagaaaagtatctgatggtgaaaagccaggttcactggctaagattggtgatcctgaagtaaaattatttatagagaaatgcattgctaaagtcactgaaagactttcggcaaatgaactcttaatggatccttttctcctagatgttagtgatgaaaaaatattctatccagtgcatccaaatattaatacaacagaataaacatggcagatactggtagtccaaaaccaagctctagtttcagatatgacggagtagcatcatctgccggtcgccatgatcgctcaggtagcatgtcagattcacatccttctgataactatgtacatgacactgtggatccacatgctgcaattggtcgaagtatcacagtcgagagtcaacggaaggatttgaatacaatatttttgaagctgcgcattgctgatccaacaggtcatgcccaaaacatccacttcccctttgatattgaagcggacacttcaatcagtgttgcaactgagatggttgtgcagctcgatctcacagatcaagatgtaacggcaattgcagaaatgatagatgctgaaatacgttcgcatattcctgattgggcagcagaggagtcaattgacaaccaaggggatgaagctgctcactctgagacccatagttcagaaggtgatgagggaacttctgaactgcgtgatgagatcggtgcctcacataacggttttgttcaagaacagcttccctctggacggaagtactggtcagactcacccaggagagacggtgaaatatctcaatcggtggtggaacatcaaattggtgatagtagtgccaatggaataccaaagaggaacaaagtagatgccatgtttgaacgaatatcatcatctgtggacttgtcgaacccatctgcggtcgacagcatgtctagggatgcttctgttggtggcagccctcactctttagacggtgaggaggagcacaattctgatcagcatctggcagcaggtgtcactgagaggttaatagacctgttggctcagcagcaagaggagcttcgtgcgctgcaaaggaagcacaaggcggacatagaggagatgctgaaaatcgtacctgcggaggatcgggaagagaccttaactctatgccacttgaaggcggaacagaaaaacagagccgccgaaccttagataaactgtctcatgtgcatgttcctctgtgtgctgttagatttatacatactcacaccaaggagttgttgtttacactttacagccgttgttgtgcaaaagttggacctctgttgtgcagaagataagtctgaagcctttttcattgttcttttttgacataatggagaagctgggggagtgcttgtctctggaggacctccaattcagtgaccgagcactaaatagtaatcaggttctttttgacataatggagaagctgagtttttgacggcaaagatgaagttcctgcccaccaaatgaaatctgcagatgccactttgatgccgctgcgtgcctgaattaacggttcataaggagtgcctcccttcctttttcttttcttttcttatttgtttcttctgtactttgacttgccaaggatatacatcagtgtttgagctgttccaaacttgcaatgacagactttaaagtgcaattattttccggatcacatggctgcccaagttctcagagctgtgcgcacacacacacacacatatacagatagataaatatatatttctctgaatgcaaacaggcaggatatgcatacagatagatgtatgtatgtatttgttaattgcaagtgtggcgtggaggctgctgaggaagtctccatgcactcccagtgatgaggtagcagcagatctggattctggagtgggcagtggatgataaaacaagcatttgcgcaacacatgcgttgctccagatctcccacatgcatatgcctggctgccccagctct

SEQ ID NO: 35039 - DNA, 2669 bp, Zea Mays
ctactactccatttggcgcctatgcctatcccatccgtttctccagtttcgtcttccccgctcgctgcagctccactcagagcctccgttcccaactcgaatctccccagatcctccgcatcatctgaaaacccagatgcttctcctccagcccagtgcagtccctgcgcctgctctgcgggggaggcctcggccacgtcggcggctggtgccgcctcccctcgcctccgcgcccgcttccatcgtcgtcagctccgacgaggacgcattcaccaggtgctccgggtacctgttcgaggagggcgcggccaccgagtcggagctccccaccgcgtacgacctccccggcatcgcggccgtgtaccgccgccgcccgctcctcgtgctccgccgctccctgcagatcggcacctccttcggccggtggttcgcgctgcggtacctcgatcgcgtcaacgagcgcgccgacgacatgttcgagcttcgggcggctcagctcaggaggatactcttggagcttggcccggcatttgtgaagatcgcacaagcagtttcgtcacggccggatgttgttccacctgcataccttgatgagctctcactacttcaggaccgcatagcaccattttcaaacgatgttgcttttaatattatagagaaagagcttgggcttccactggatatggttttctctgagataacaccagagcctgttgctgctgcatctcttgggcaggtttaccaggctaggctccgctccagtgggaagattgttgctgtcaaagtacaaagacctggagttcaagcagcaatttcattagacatatatatcttgaggttcctagctagtcttgcaaggaaggctgccaagttgaacacagaccttccagctgtgcttgacgaatgggcatcaagcctattccgggagatggattatagagaagaagcaagaaatggacttaagttcaggttgaattcttcatccattagacaagagaattgtttgggaaatttagagatgtgtcggttcctgaaatgtatctggaacagacaagaaggcgagtccttatcatggaatggatcgaggtgcagtctgtgatcttattgaactgttagcaaatgaacatgcatgcaaaaaatgcagttcataattctacttgcactctgtgatcttctagggggaaaagttatcagaagtcagagatcaatatttggttgaggttggagtatattgttcactttcacagctattagaatatggattctatcatgcagatccacaccctggaaatcttttgcgtacagttgatgggaaattagcctacttagattttgggatgatgggagaattccgacaagaacttcgtgatggatttattgaagcttgtcttcatcttgttaaccgtgattttgatgctttagcaaaagactttgtaacccttggtttacttcctccaactgcccagaaaggtgaagtcacaaaggcattgacaggtgtatttgagaatgctgttaacagaggagttcagaatataagctttggagatctgtcaggaaatcttggacgaacaatgtataaattcaagttccagataccgtcttacttttcccttgtaattcgaagccttgctgttttagaaggtatcgcaatcagcttcaatccaaagtataaagttctggggagttcatatccatggattgcaagaaaagttctcactgacagttcaccaaagcttcgatcaactttgcagactcttctttataaggatggcactttccaaattgatcgcctggaatctttgttaactgagtcacttcgtgcaagaacagagcaatcattggtcagaaatgaacaagatgtcgacagtacgagatatgcaattaagcaagtcttgtcattcacactcgctgaccagggtgcctttgtgaaggacttacttcttcaggagattgctaagggaatagatgcacttggtgtagccacattaagttctgcaacgtctgcagcagcctccagattgccattcggtggtggaccatccccattgacctcactagatgacgaagatgccacaaacttaagaaatctgtatcgcctgctcctacttttatctaaggtttctcagaaggaaaatccatctccaattcctgaatataacagtgccatagagaaggaaggtggtagcacggatgaacttgctcttgcgctgtatggaatgacctctctgccagaatttcttccagttctttctgtcattcctgagcttccaccggagtcccaacagcagttgcttcttctgccagcggatttaaccaatcgtattttatctcgggctctcgcgagaaccattagaagactcatgtaaagccataggtgcagaaattttcggtccctgcttaatttttattttactattctttttggttcactgctagaagatggggatttttttagcatctcatctacaacccaagatcaatcccttttttgttatctacgattactatgtacatattgttcaaactaaagcaggcattgtaaatggcccatgttgttatgcacatatggtgtaactgataaactttaaatatatgtgaacatagaaataattctgtaatgcaatttgcctcgaaagcatggattcatgtcattttcttgtttcaccatc

SEQ ID NO: 35040 - DNA, 1619 bp, Zea Mays
ctcgccgttcgggatacctcagctccaataaactcggcgggcgggcggtggagggcgagtgaagacgaggtgcttgcctcgctcggctcacaccccttttcgtctcttctctgcctttcctccgcaatcacagagcgcaagaggagagagagagagagtgaggggggagagagagggctagggttttgtgccccccacgcctcacgcatcgaatccgagccgggtcggggttgctgcgaatcgccggcggtgcttgggctgtgattccattgcaatggcatctgaaactgatgagaaagctaagatggagagtttgacatctgctgcagcctttgtggagggtggcattcaggatgcatgcaacatttgccttgaggccttctgtgagagtgacccttctgcagatcaaccaaaatggatggatcaacacatgagtcaccaaaatccaccacccaacccaatcggtatccaatcaaatactgtagacttagatgctgaagactctgttccatcaagctttacttcgaagaggccgctaggtcatgattcgtccaaggaaaaggcaaagaagcaaagcttcaattgaggagaggaagttggagtctatgaacaaaaacgagaggcaaaaactcatcttggagaggaagaagctaaacctggagaaacttaggatggatcggcagaaattgaaggaggacaaggaagaggaggtcatgatattgggcatggatctgagtaaatgtaaccccctacttcgacaatgctacgaggctaagcaacaggagatattggcaagggttattggaaactcgtcgtcaagcaagtgaggagtgaacgaagttaatttttgttagtggttgagatgctgtcgtttcttctggaaatagcactactgtatctagtcctaggttttttttaacaggtagttccccagcttcgtcctcatcttagagcctcggatggatcaaactaaaactaacaggtggagcagaagtgcagtaacacgatgctccagttccaagttgacaacctggcggtagagcagaagtgcagtaacacgatgctgccatttttatctcaagcactgcataaactgcatgcgtgtggcttaggggaagtccgatctcaaaaaatcttctgtttagggcatgtactaaacatgtacagtggtgtttaatgtggaggctcctaaggtgtttaaggggtgtatttgcaaaaaaaattagagccgtctctccgtgaagagacgcctctggctcgtaaaccaagtagtaacagacgtctcacttcctattgtacgaatttgtcgtctgttctatcgatctgctgctgtacaaatgcatttaattctgtatttattaatagactacatttatagacactccattgtataatagagtctcttagttgtctcttgtgcttggataaccgttttggtgtctcttcactgtacatgcccttatgtcttctgtaaaaaagaacttgtgagaaaagatgtttaccggtacaaataacggatatggcatcttcgtggtgcgcggatcagttacaaatatgattgggacagcgaagtttgctgctgctgatgctatgcaagtgtaccgtgggacggtttcctg

SEQ ID NO: 35041 - DNA, 4286 bp, Zea Mays
aaaacaacagcatggaggaggaagaaaaagggaaaaaggtgaaggaagggggtagagcaagagaaactggagaaatgaataagagcctactaactctgggacgtgtcatcaatgcacttgtggagcattcagttcatgtgccatacagggatagtaagctcaccagactgctaagagaatcattaggaggcaaagccaaaacatgcatcatagcaacggtgtctccatctgcccattccctggaagaaacgctggtcacacttgattatgctgctcgtgctaaaagcataagaaacaagccagaggcaaataaaaaaacatgcaaaactgttgtgctcaaggagctctaccaagaaatggaaagaatgaaacaagatgtcaaagctgcaagggaaaagaatggaatctacatctctcacgaaaggtttgcccaagacgaaacaaaaagaaagacaatgaaggaaaaaatagaacatttggagctcagtcttgaaaagcagaacaaattcaaaaattcaaagccttgtacctagcagaacaggaatgccactgggactttgaaagtcagaacaacgatttgaaggtaaatcttgaaagcttgaagggcaagttcatagatcttgaagaagctcattgcagagctcacatgtccctgagggagaaggacttcattatatcaaatttacttcattctgagcacttaattattgaacgtgcaaaggatatgcggaacaccttggagaatgcaaccgaagatatcagtgtacttctgaataaacaagaaaggcaatcaaaaactgaagctgaaaacaaaaggttgctatctggttttcgggctgaattggatcgtagtcttggagttctgcatgctacagtcgttggatcagtatgtgaacagagtaaaattttggagtctataaatgaacaaacaaagttgtactttttagccagaaatgagtcagaaaaccaattggaaagaagaattgcaagagccaaagatatgtatgtctccggggtccaatgcatgaaggagctcgctaataccatgagacagcagtctatcatagattccgagcagatgaggcagaacatatctactaatgcaaatgctattggcaattttctagaagtgatgttttcagaagctgaacaagttctaaatgatgttctgaaatctacttcagatctcaaggaactattagccttttctgcagaactacaaaacactggattgagaaggaatcttgcttctgttcaagcaatgtcaaagcaatcaattgatttctttgaagatataaggatacatgtgtctcagctcatgacacttatggagcagaatcaaatggaaaggtcctccaagcttgttaaatttgagaatgagtttaaggaaacttgtgttaaagacgagcaagctgctctgaataagattgctgcaattttatcagagttgaccgccaagaaaactacaatggtttcatcatatatgggacagcttaatgagaggtatagtgaagatcagaagaacctgaaactggagatatccaacctacaacaggtttcagataatggcaaaaatgagtctgtggcttgtgttggagtgatagagagtcagttccaggaggatatgtcatcacatactaaatcaaatgatcaaatggaaggcatcttaaaacaatactcggagaaaggtagtcattttgtatcttactggtcacatatacaatcatctttgcatgatcttgttaagagctcaatcatggagactgacgattttattgaggaaagcagaaacaaaaatgaaaatatattccaggaagggcttctgttttcttcacagaatgatgcagagtttcatggcattacatctgacgtgctgactgtttcaaagaattccctcttactggatcatgaaacttgcaagatggtagagactaacactaccattttctcggatcatctggaactgctgaatgaaaagcacagcgaaggcgtggaatctacaagaaacatgatgagtgattgtcttgaaaaggattacatggctaatagtccggttcgaaaccatccacgggaactactgaccagtgcaaacagcttggaatcaattgacaaactaagagcttctctgccagatctggtggcaaagttcaggctcgagaacaagttgaatgaaatggataaggggaagcaatactcggatcaaaggacacgtgtacatggtaagttcaaaaccataataagtgctattgagcgcagagttctggaggagcaacttggctgggccagactggagcggcaaaagatcctcgctttgtctgcggaggctgacgatgcaatctggcatctggccacgctcgcacggaggaggatgcaagaaagggacgaggccaggaaccaggcgaggatgctgctcgcggacctccaggcaaggaacgcccggatgaaggcggcggttcccggagcatcgtgctccagagtcgcgcggcctgacgcgttcgccgccaccggctacgagcacatccaggcccaggcccaggcccaggcccaggcactcgctcctgccgcgttcgggccgcgggggcagcgtgcccgtgcgggaactggctactactgcgttgcgtcgtccagcggcttcggccacaggagcatcgactcgtctctggacacctgcgccgttcagccgtcgctgcttggcttcgcttcctcgagctcgagccaggagcatttcgaccctgacatgttcttggtggacgtcgcagaatcgccgcaggatgtcgttccggttccggccaccgcagactcaagccaggggagaagctccggctccggctccggcacttatggtcatagtttggcgagcaaaaggccttgcagtgaaaggaagtaataaatcatcagctcaagctgcagcacgtcctgccacgggccatggccatgctgcctaaatcctaggccggaaaaatcaaccaattagttaagaaaggaaactaacaaacaactatcaattagttaaaaaagggaactaattggaaaaaaacaaataaacctagctgcattatgcaacaggcttactagcattgaataattgtggccgttgttgtatatcgcttatcatggtgtcatgaaattatgtaacctggaaattttgtttttttggcataaaaatcactgtattcagaacaccagtgctctgtccaagacaaagaagcaagagtgctgaaatgagaggataatgagcatgctgacttggctgccttggcttccacccacacactcgataggggaaaagcgagcccttccacggttccaccacccactcgatagtggaaaagtgagctcgagcgtgtccagcagctatggataactgacgatgggggtaacaagcttcacagaactctccctcgagctcagcgctaccctgaacaactgaagccgaaatggcgagcctgcagaacctggtctgctccgtatccaaacaactggctgtgccaaattgcgcggcgactaccaaactgaacagggctcctccctcagctgtggcggcgagctcgatccaaggatctttggacgacaccagtaacccccccttttgttgttgttgttgttttttttccgttcatgcatctagtggtcgacagaatcctggttcataacatctctccgcttgtatagaggtcacgaagagacggctagctttgcttggtgctggagcgttagccactggcctactgaggacaagctctgctgcgttcgctgaagaggtgccgaagaattacaagtcgtacgtggacgcgaaagacgggtactcgtacctttatccagctgaatggagggatttcgacttcttgggtcatgattctgcgttcaaagaccgcaacctggcccttcagtgtgttcgtgtggggttcattcctaccgagaaaacagacatccgcgacctaggaccgatggatgaggccatcttcaacctggtaaacaacgtctacgctgccccgaaccaaataccgtcgatttacgacatgcaagagcgcaccgtggacggcaagaactactggacgtttgagtacgatctggaggctccgggctacagcgtttctgcgtttgcgacggtcgccattggaaacgttcggcttaccgcctcactgatcatgagctggacttcccgcggatggcgctttctgcagaacacgttgatggacgtgccctgctccttcgacatatagatcctgttcgtgcggtcctttgtttcttttttttcttttctcttttttctccacaaccttgcg

SEQ ID NO: 35042 - DNA, 1548 bp, Zea Mays
agaataatcacccttttggtgctcaacaatgtgatgacttataagagcttatgcaactactttacaacacaaagctgtacatattttgacgtttatgtttctggatttaactcttgatagctgctaagctccacgactttgttaaccaaaacgtcaagtatttgtggaaagtcaaaactcacatgagtagtagtagcgttggactgttggaggtttggtagacgatcgcaggggggacagaacatgtcacgactcgagggtggtcaagcagccaccccaagcccccaacaactttagggccggggaactcggtgacccatacgtaacggcttagctaaccgtacctgcttctagtcatcagcaagggcggcaaatcatgattccacggttccaccatacgtacgcctgttaggaggagctcaagacaacccgcgctaacttctttttacagcaatcagcgctcagcgtggcacctccgtctaggaaccgtcgcagtccatgggcacggcggcgtcttccacccgcttccggcacctgcgcgccgccttgatggccagcagggtgtcgcagatgatccacgggaagctccagaaccgcttctccccgcggcggtccgggtgcgcgtcgacggcggcgatgatgcggtccttcatctcgaagtagcgcttgttgtcccgccgcaggtacaccagcttgttccggatgttgcctgtcagaatctcgtcctcgcgctccgccgagtagtaggtcatcagggcgcccagcctctcggcgtacgcctcgtaccgctcctccgctgcgtccaggaactcgtcgaaaccggcgacctcgaggtccgggtcgtacacgcagctcggtgggcccgcaggcaggagcgcttctgcgtcctcctcgtgccgcagggcagcgcggtagagcttgccgaggacgccgttggagacgtacattggcctctcccaccgttccatgaagtccggaaactcccggggcctcagcgccaggggcatctcggctggagctcccgtcttggcgaagtcgaccgccatggagtgcagagcggccagctggacgcactcggggctgcgagctttcagtggatcacggtctgcgtggatcaagtgggcggtggagatggcaccgagggtatcgtttatcatgtaactgacgaagtgcttctgaatttcctgcaaccatttgcatgcagatgttaacatttttgctcaagcgagatggcaaaatatgcaggaatttgctgaatgctcacggtgagcatattcaggttcaaaacatcatttttttcattttaaacatgtatttttcaagtaggtagattacttccacatgccagccaatgcacataccgtcttaataccatgctggctggatggtcttgtgctcgttattgccctatcagggcctgtttcatggatttaatccttattacataaacacattttagaaacacgccaggtttcttagctcaatacagtagacagcacaaatcaatgtatccatcgtctcaggggaaagataacggcaattcataaa

SEQ ID NO: 35043 - DNA, 1514 bp, Zea Mays
cacgagcaggtttcctgcaacgcagcgcgtcgagcagaccagacccgcccggcctggttgtggtcgaggaggagactggaggaggacgggatagcagacgagaggagaggacgcgcacgccatgtcagtgcactttgcaggtccaccaccaaagccttgggagcgatctggaactgaaggaacttcaggtccagcacctttcaagcccccatctggtggaagcaccagtgatgttgttgaagcttctggtaccgctaaacccagcgaaaatgttactgcgatggaggggaatgccgctcctaatgtaaatagcactgtttcaaggcctatgccacagcggccttggcagcagacaggttatggaaacacctatggagggtatggtggatccaacatgtatagttcatatggtggatttggcaacacttatggtaccggtggactcggaaatagcatgtactcgagttacggaggaggttatggtggtggcatgtacggcggtggcatgtatggaggaggcatgtatggtgggatgggaggttatggtggttacggcatgggcggaatgggtggtatgggcatgggtccatacggtaatcaggatccaaattcgatgggccctcctgcatccccgccaggtttctgggtgtccttcctccgagtggtattggtcacaaccacttgcagtgccattacatttacaaaatgtcgaatcacctcactttttatttccagaaggacccaaatgcatggtgttgtcaatttcttcggacgaatctcattccttgttgaacagaacactcaggcatcctatttcttcatgacagcaatgctgcagctcttcgaccggtccggtatgctctacggtgagcttgcacggtttgtgctgcgtttgctaggagtgagaagaaagccaaagaaggggggcagcattcaggggccagaagcgctggcgttcgagggacctagccggcagtctaccgaggcaccgaaaacgaacaactgggacaacgtctggggaaactgagatcatgcctatgggtgcaacgagttgaatcatatagaagaagtgcaagggctatgacctatgggagtttgcttgccttttgattcatcaaaaagaagattgcggccagataccgcctttggtggcaacttaggggaagctgtgaagaagaaactgctgggcctctcttgcttttcccagctttgccttgatgtacctgcgagggccatggcccatgacactggtaggttttttttttcatcgcaactgtaaggtttggtgaagaacggtttcacagtgcactgatatatatgtagctgcttgctgctgttgtgatatcagtgtgggtatcgattgtttgtatatctctatctgggtaaatagtgtccgccttcgaaaagaatacatcaaatgtttgtgcaccctttacagcctcgtctaacttggttttgaatttggacttggacttgttgagagtccccaccccatgcaagtgtcgattctgttg

SEQ ID NO: 35044 - DNA, 1700 bp, Zea Mays
agtgcctcatgttcttgattggctggatgttcttggataggatgctcatccatcttggttgctgcttttgctaaccccaaactgtaaagagatggggtgtggcccatcaatccccgacaagtacacgataggtgggaaggggcgcaagcgccggagcgtcatacaggaggttgccgtgttcgtgcccaccatccgcatcccagtggcctctgacatagctcatccgctcaggggaatagtttccaaggatcttgtcgaccgactctccacactccgtgcccatgtcgcctcgctggctgaagaaatctatcacgcggacgtatcagctgttcaagaactgcagcatgcgctagaggagtacttgccagttgttcttggtttaacaacgaaagagagccgtcttgaatcgtcagtacagttcagatggaagaccttagacgacgaccaggagtgttgtctggcgagcgcgtggtatgaggtgctctcggtggtccacatgatggccatgcttgcgttgtttgaggctaacctattgctcatcccaaagagcagccaaggtggtggtgaaaggaaggtagcagaagacgcaaagaaggatgtcgtcgattcattgctcagggcgtcgggatgcttagactactccgtgcatcgcatacttgttcagatacctgcgcaagtcaagaagggttttcccagttacttgcaggagggcatgcttgaggccatctcaattcaggcattggctcagtgtgtggaaatacagcttggcttggcttctgaatgtgagaaggcaacgctgtcagtaaagaggaggctagcttgtgagcaagtcagctatttttctcaggctcactattgtctgtcgggatgcgatacgagtgactcgtacgggaagaagcttctgctgttcctcaagtggaagtggatggaggccaaggctgtagcgtattactaccatggtctggtgctcgacaagggcggcgaaccggcaaaccatatcagtgcagtctgctgcctctctgcagctgatgacctgctctcagacagcaaaagggcttgcttgagtttttgcttggcaaatcctgtcacgagggtgcctcctccttggggtgtcatgaaaaacatgcacaaaaagatcccagatgtcgcttacaagaagttccaagcgcacgggcatctgtttgagcaaaacaagaacagcgcactccaatccgttcctgacctaccagagtttgcgctgtcgctgagaccggatggatacgagttgccaagcactgattcgatctgggataatgttgatggccaacctcagattcaaagcctcaaggagcatatgatagatgacgaagatgaagtaggcacaaaatgatagttctcacttccaaatgcttcttttcattgtaccaccaaaagtagcagagctcaaaaacgcttaatccaaaatgttttggattcagcatatggctcaactgaaaaaggaatcgcgatctctgtattattgcaagtattaccatatgatatagtaaagtcttatgtgtaatagaatcataaataatagttggtttcttgctgtaatcgcctttaattttattttcccaactggcagaatagagcatcacagaaaaaaaaaatacggcacgcatttcagtagaacaatagtctgcgtgtttggttgggtggctaagtggagaatgtagaag

SEQ ID NO: 35045 - DNA, 1715 bp, Zea Mays
aacccgccactttgcccactctcctcttccttctttgctacccatttcgtcgcagtagtcggcagtcgaaaccctagtcccctcgctttccttccactcgccgtcgcggcgccgatagagccagagctgaaaggcgtaggaaaagctggtggaggaggggatggaccggatcgtaggcagcaagtacaagctgggtcgcaagatcggaagcggttccttcggggagatctacctcgcgacgcacgtcgacacctacgagatcgtcgccgtcaagattgaaagcagcaaaaccaatcatccacagttgctatatgaggccaaactgtacaatgctcttcaaggagggactggtatcgcaaacataaaatggtgcggcattgacggcgatgaaaacattcttgttattgatttactcggaccaagccttgaagatctgtttgtttattgtggccggagattctcactgaagacggtcttgatgctagcggaccagatgataacaagaatagaatttatgcattctaaaggctatctgcacagagacatcaagcctgataacttcctcatgggccttggtcgaaaagctaaccaggtttatgtaattgacttcgggcttgcaaagagatatcgtgattcagccaccaaccgccatataccttatagagaaaataaaaacttgactggcacagctcgctatgctagccgtaatactcatcttgggattgttttgttgccagagcaaagccgcagagatgatttggaatcgatcggatacgttcttctgtatttccttaggggaagtcttccttggcagggcttgaaagcagccacaaagaaacagaagtatgacaaaataagtgagaagaagctttcgactcctattgaggctctatgtaaatcccatcctgtggaatttgcttcctatttccactactgccattctctgacatttgatcagcgtcccgattatagtttcttgaggcatgtctttcgagaattgtttgagcgcgaaggctatcaatttgattatgtgtatgactggactttgttgaagtgtaagcaatcccagaaggctaaggttcagcaaggatgctctcatgatgcaggcgtaagcagccgtccagttgcaacaaacgtggacaagcaccaagttggtgttgcacgcccaattaatgcttcaggtctgcttgaagcagaacaacgcccggcaatcagaatgcaattaaacagccgttccaataatctgcatcctgagagattgggagtgtctgctagtcataataatgtactgctgcaatccacgtcacttgacaatgctgatgctccaatggaccacgcgacacattcaaaagcacaggggtccattgatccacacactcgtggaagttatagtccagggccctctaaccgcacttaaccttttgcattgttcgtaaaagcttgcgggtccatgcagtaaacaattggttgcctgatgtagtttcatggatgcattctggacaaacatccaatgcttcttagttgcatgaggccattgctggaaatagctgtcggatttttatgaggacttctgtattgcttgaggatcctttacaaacctaataatggtgacacattctatgcataatgaaaatttggggtttcacctggatagctttcattttaattacgggctgcagcagtgcgacaatgtgcattctacttggattgagtta

SEQ ID NO: 35046 - DNA, 263 bp, Zea Mays
attttggggaggccttgattggtggtcaggaagtcgctatccaaagtaaagattcagaataagttccattggttctccatgcaagagggatgccgcagcgcgacgttctccatcaaggagatccactagctggcgctcgggctattgcagccggcggcgaaggccgaaatgctgttgctcaattcgtgcactatcccagagtgaagagcaggtggtccaagaggagccctataatgaggagtacaagttgatctaggtggcgt

SEQ ID NO: 35047 - DNA, 1799 bp, Zea Mays
cattagttatcaagcgggagatttcgactatgaagctgatcaaacatcccaatgtggtacagctgcatgaggttatggcgagcaaaacgaagatatacatggttcttgaatttgttgatggaggcgagctattcgataagatcgtcaattctggaaggctaggagaggatgaagctaggatatactttcatcaacttataaatgcagttgattattgccatagccgaggagtgtaccatagagacctgaagccagagaatttgcttctggattcaaatggagctcttaaagtttcagacttcggcctaagtgcatttgcaccacaaacaaatgaggatgggcttctgcatactacctgtggaactccaaactatgtagcacctgagatgtatggtcctgtggcataatcttatttgttcttatggctggatacttaccctttgatgatgccaatctgatgagactgtacaaactgatctgccaagcatatttttcttgcccaccatggttttcttctggagcgaagaagtttattaagcgcattctcgatcctaatcctgatacgaggataacaattgcagaaattttggaagatgaatggttcaaaaaagattataaaccaccacgttttgaacaaggtgaagatgttagccttgacgacattgatgctgcattcaatgattcagaggaccgtcttgtggcagagaaaagagagaaaccggaatccatgaacgcgtttgctcttatttcgaggtcgcagggtttcaaccttggaaatttgtttgagaaggagatgatgggaatggtaaagagggaaacatctttcacgtctcaatgcacagcacaggagatcatgacaaaaatagaggatgcatgtgggccactcggtttcaacgtgcggaaacaaaattacaagatgaaattgaaaggtgacaaatctggaagaaaaggtcacttatctgttgcaactgaggtttttgaggttgccccatcacttcacatggttgagcttcgtaaaaccggaggagacacattggagttccacagcttctacaagaacttctcatcggagctgaaagatatcgtgtggaaagctgaatctgacgcaaataataaacagacgaataagtgatacccagagaatctgtgtagccctcatgaggccacattcagatagatcacctcttcgggtgataccacctgcttggtactgtatgcttttttttttactggtaccacattagcagccaaaatctcttgtaaacgggaactccttctgaatgagcgcaattgtacaaaacacatatgaagaggccctccgtgagatgctccgaacactgcaatgggatgtcaaatagttctgaatggtgagtgctgtttttgcatctataggggcatatatgtttccattccatgtgcatgtaccgttgttgtatgcgcatgggggtacgtgtgcagcaggagagagagaacatctgaacgtgtcctgagaggaaaaaaaaagtctatgtccgtttctaaaatgctttggttgtcaccagggttgagtgcctttgttttatgaaaatggacaatggagaatgatgtatgaagcttaactctagtatttgggagtaaaagtatgtttggttggatgtataatgaggaatggaagggggtcgtcacactttctatagtgtttggatgaaagttaagcggtgaagaggtaaatgccggagtaattttttggtggtgtagggaatgttgagatccacatagttgtacttggttggatacgctattatttttagcacatatta

SEQ ID NO: 35048 - DNA, 1274 bp, Zea Mays
caaaactgtttgctagttttctggtagcaaatggtgatccaaaacatcccattaattggtattaatgaatgatttggtcagatcttcccatttcataaaacggctctgaatgataagttttaacaggtatgcaattgataatatgcaatctgctagcatggaggaagccaagaaaaatggtatccagcagctagctgaagaaacaactctggtgcagtttatatttgggggttatctgcgatctaagataaaatgtacgaagtgtcaggtcatttcaaaacacagtgagcgtattttggatttaactgttgaaatagatggggatatcagtacccttgatggtgcacttcgtcggtttacatcttcagaaattttagacggtgataataggtaccattgtagcagatgtaattcgtacgagcgtgcccaaaagaagttgactatattagaggccccaaatatattgacaattgcactgaaaagatatcagtctggtgttcttggcaagatcagcaaggctgtcaagttcccagagcacttaaatttgtcccagtatatgtgtagaacagatgattctagtcctgtgtacagcttatatgctgtggttgtccaccgcaatgttaggaatgcaactgtgtctggtcattatgtatgttatgtcaaggattcccaagggaagtggcacgagatggacgataacaaggtgaaacctgtgtctgtccaaaaagtcctgtcaagatgtgcatacatgctgctctatgcaagatgttcaccgcgtgccccaacctctgcacgcgctaagaaacccaagcagatggcacgttcaggatcattcccttcgggaggaggcaggtaccggagcaggcaccaaggtgggctttatccaatctgggaggagcagatggagagttatgaagcaatgtactagctagagagctggagcctggaggcctaccgtacgtcgtcagggtcgaacggttggttgaagaagaaaacttgaagagaactgaatccctcgataaacatacttacatatatatataccaaaaaactcaggtgcagaataatgctcagactgatgagcgcgagacgttttgatgacatgcccgtggtgctttctttttctctttgtttctctctctctctctgatggtgcatggcaagatactggttgctgttgctggctgtaaaactttttttgtggaggaagcggaagttaacttttgaccgtgacagcagctgaggtctgtgattctatgtcgtgaatgattcgt

SEQ ID NO: 35049 - DNA, 4095 bp, Zea Mays
tccgtttgtgggaaccctcacgcactacgccgccgcgtcgtcggcttctccgctcttcacctgctccctctcgacgaactacgaagccatccccgcctccgcaaaccgccccgagcctccgacgtattccctggccagtaggccacttcccttctggccttcctactctctccacgctccacagctgtgagcctgtgaccctccgcttcgacgcggacgccgcaggccgttgacgatacaacgcaccccgccgaaaggggctgggactccttttccgtttccttcgcacatctcctcgctttccgccgagagaacttttttcagtcaatcataataataataataaaaaattcgccgttcggccccgaatttcccctctgtttctgcttcatctgacgcatctgatccattcccccttctcgacgcggatcgaatcacgagcgtgtggcggcggctgtggtggttagggacttagggttggagctcctggaggatggcgagccacggcgccggggtggctgctggatctgacgccccgcacgctgaggttgtcagtatgggtcaaacaaatctatctccatatcctctttcttccagtcatcattcatggtcctctgcaactgggtcagcaacggtttcatggaacaatacagtggacaaacttagccaagatacagtttactatgatccacaaagggatgtatcagattcaggagggaatcaaaatgtagaaagtagcgtgcctcatgttgcccagtcgagtagggggatggcagatgtagcccattctcacatgtcttactctagttcagatcaacatgtctataaccctgtagaatatgccaactattattatagctacccacaagcaacaaatgattcttctgtccagcaaggagcaaaccaacatccagaccgtgccaggatatggaagcagcagctactattatcagaacaacacatggaatggtggaagcacagggaatacttttgctcaatcataccagaactactcatcatctgatacaaatgcacaacaaagttctacttcagtgcctgccaattctttaccatatcagcagcagtataaccagtggccatactattacaatcaatctgtgccaagtgcttctagcaatccagttgctgggaacagtactacagataacttaactggtaacatgccttctggctattcatatcctagtagccagccacctccaccaggaacaacatcatggaaaagtaattcagttgcttctgttgcacctcctatgcaggttccaggtgttccaggacagcaaagtcaatatggcaaccaggcagaaggccattataaccagggacctggtgtgcaatggtctcaaaatcattatgcctaccagacacagccataccctcagaagactaattccaatcatccacaactaagcaaccatgaagatcaacaggagactgattctgtgacaatggacacttccagcgaaggcaaaatacaggttcctataaatcctcaaattgccccaggtttctctatggtgataccaaagaatgagaagaaacattctggacttgatttatcaaagaaacctgcctatgttagtgtctccatgcctacgaatgatgctaaagcaactcaagttggtcttgatgctagattacccttttcactccgtaactatgctacgaggaacctcaatcgttgcaagaatgatgcccagagggaggcctgccgaagcataatgaatgagatcacaaaaaaagcttttgctgagggaacccttcttactaagaactgggacactgaaccactatttcctttgcctgaaagtactgtgggcatgactggaacaagcagtgtaaacaatttaagtcccttctcatcagtttccaccccaaggaaacgtgtgaaaagtagatgggagcctgttgtggatgaaaatgttaccaataaggtggaacaaatagcaaaaggattgatcggcagtaatgtccacagtacttcggaccctaaaaatagaatgggtagcagttgggatcataggaagtttctccagtcttctcaagcaccttcaaataaagtcaatcagaggtctgccaagaagcaaaaaatgggtagtaatttgagtcaaatacagaatggaaatgcttcaagtgacagtgagaaggaacatgatctaaccaaatattatgccagtgcaactgcactagcaaattcgcctgaggaaaagaaacgtagggagcatagatccaagcgttttgaaaagagtaaagattcatcatttaaatcaagaaatgtttctgcaaataaagatgctatgactaatttgcgtgcaagaagggcaattttgtcttttcgtactagaacctatgaaggcggcactttggctgttgaggatatggattgggatgcactgacagtcaaaggaacatgtcaggaaattgagaaaagatatctacgacttacagaagcacctgatcctgccaaaataaggccagaagatgtcctggagaaggcccttgcaatggttgaaacatcacaaaagaattatctttacaagtgtgatcaactaaaatctatccgccaagatcttacagttcagagaatccagaatgaactgactataaaggtttatgaaacacatgcccgattagctatgcaagctggtgatttacatgaatttaaccagtgccagtcacaactgaagaggctatatgcacaaggaatcaagggttgctattttgaattttctgcttacaatttgctgtgtgtcatgctacactctaataataaacgagacttgctgtcatcaatggcaagcttatcaaaagaagccaaacaagatgcagctgttaagcatgcccttgcagttcatgcttctgttttatctggcaattatgttctatttttcaaactgtacaagaaggcgcccaatttgaactcatgcctcatggatctatatgtggagcggatgcgcttcgaagctatgaaatgcatgtctaggtcatatcgcccaactgtacctgtgggatatgttgcacagattttggggttcatgagaactgatacaggctgtgcaaccaatggggatgatggattagaagaatgcgaaaaatggttgaaagcgcatgggatagttctttcagaaggtaacagtggggaattacaaatagacatgaaggcttcgtcttctacactttacatgccagagccagagaatgcggttgcacatggtgatgcatcacttgctgttgatgactttttggcacggactgacgggcatcttaaaaggtgcagcagcgatgagccaacggtggatactccgtagtgtagtatattggtgctgctgtggcagtcgtgccgagatgtggacgcactgcacttctcccgtagaaactgcaaagggggcatgaaatggagctgcccaacgaagctcgcggagctaagagagtcggaacaactgaacaaggatgtggtcatcgggttttgccacttgcgcaaattgatccagtcatccagagttgcaccgcgatgagcttcgttgagaagacagagaagaaagcagcattacccgacatgagcagaagtttttatgtcgtggtggtttgctcacaagggcctgttccgataggagtagattgaaggtattagaagatattaaatttcttagtcttgtttggaagtaaggggattggaggaactgaagatttgaaggggccaaaatcctagaaggggattttagccttggctgatttgatgacccctccaatctctctcaatctccttatcatcaaatcagccctgcctcgattctcttctcccaaacaagccagcccttactagtaaaaattgaatagaaaaaaagatttaatcctcctcaatctccttcaaccaaacaaggtctaacttgcattaagcgtagaaagtattgtgaaaaacagctacagctttgaagcatacatcatacattatcttttccggtgctctttttttctggctgccccttcctctgtgaagattgtgaattactttttcttgcacgtaaatttattttcctatcccatagaataatgaaaattatatactaatgttcc

SEQ ID NO: 35050 - DNA, 1731 bp, Zea Mays
ggcagacacaatgaaaaatgattgaaatactgcgagtgtggcaaacaaactagctagttccaattttgagcactgctactttacataagtaaatgaccaaacctatcaccaaaaaggaaattgtgtacacaaaatggaagaaaaaacacaggacgaaatacgcgagaaattccaggacacagcggcggtcacgcgttttctgacggctgacctgattgggagcacgccgctgccgttggagttgacgccccggcctggagccaccgtcatcgaggggggattgccgcgttcggcgccgctcgcggtgacggtcggcctcgcactcgctactggtggtggtggaagcctcgcactcgctatcgctagtcgctactgatggttccaagagcaaaggcccatgttgtttgggatccagtaggcccaatcaagccgttgactccgaggagagccgcttccgatgtcctcgcctcttgccgacaccttcacccactcccagcaggccagcacacattggcgacgcttctcgccggagaagggtgggcggaggatgccctgcctggcccctgccaattgacggccacatggcttcttctagcagggcatcatttcctctcctatggttaagttgattgaaacttttgctgttttttgcaagtctcagagaactgcttatagggagaaggtgttaattgaagcagagaaacaatttctgcatgatttcacttttttcaaggaaaagttatcagttgattttggccaaatagtggatgtcgaatgcattgatagtacttgccaagttctgtgtgacaaggtcaggggttgttgttcaatttgcaagtcaaggtgtactgaagctatcatcgattctctaaaaattttggctgaagcaatgactattaagcatcagaagtttttgaattccaacaaccttctggcgaaagatatggatattaagtcagatgagaaagctaccaaaattgataccaatgtgcagccagttgatgttaagtcgaatgagaaaggggctggtgtggacattgttgaggcttctcatggaaaagctcatgtggtttttagctagatgatgctggggttatggttaatgaactactacttactactaattaccaggtgcaagtgtaacttctgatctgcttttcgtctactgtgtcactccactgtgtagcaatcagagcagtaaccttactagtatctctgttcaaacaaaggaagtgcaccatacaatctacagtttaatcaccctacctgtgccttgcatcagttttaaacgttggagctcattcctgtcagtttctctctccctctctgaatttttgacagctctacttggagcaggatctaccattttccctgtgcatctgaaaatcacgctgtgctatacatataaatactgccagtctccagagctggctctgcgtgctgtctgtctgtctgcctagctgtgactgtgagcgagcatccgggttatctgtctgcctagctgtgactgtgtctgtcatcctatgtggtctaatattacaatgactttatgaagttgttgtgtttctgttctctgtaactagacacaggagagattgttcatcttatatgctgaattgttatgttcatcctatgtggtctaatatgtctgttatcccaatgaatcaggatttccaggagaacaggttgttgatgtcatttgttaatttccatgagcaagagaagatctct

SEQ ID NO: 35051 - DNA, 321 bp, Zea Mays
ggataaaccacttacaaccaagatcgcaagattaagtaacacaaatcacacacaccaatagtttgcaacggaaatcttattaccaaattttacaagttacaaaaattttactttgtacatgatcggagtgattacaaaagtgattcaaagaaataactttgaactattataaattatttgtagttttgaaatatatgctagctcaagtgaccatcctcaataagaagtatagaagagttacttagacttataagaaggccgagcccactggcacttaacaccatcaacagcagcacaaagttaaaacctgaaaaacaatag

SEQ ID NO: 35052 - DNA, 1384 bp, Zea Mays
ctcgcgtggcctcccgaaggttctaggctcgattgaacaaattggagcggcactacactcctccacgcctccacctccagcctcccactgatctggcctctctcgagttaatcctagatcaatatgagaaggggctacagttacagtccttcaccaccaaggggctacaggagaagggcgcgcagtccaagtcctcatgatcattatggtggtcgtggtagggatctcccaaccagtcttctggtcaggaatctccgtcgggactgcaggccagaagacctccgtcgcccatttggacagtttggtcgagttaaagatatatatcttccaagagattattacactggattattactcttgccccacctcttgaagtaacatgaaataattttttgaagacgcaacacaagcctaaaagattattgttgaagagaaggaagaaatagagaaattcaattaagtgatctgcaacttaaaagagtactcagtactgttcaagagatgggaagaaatagagttacaagtttaagagatactcacatcatgaagagtttcaagtctgaatttaaactctcatgagtgcaagggatccccgagggtttgggtttgtccagtattatgatcctgctgatgctgctgatgcgaagtactatatggatgggcaggtagttcttggtaggcaaataacagttgtttttgcagaagagaacagaaagaagcctcaagagatgagagctagggacagagtcaggggtcattcttatgatgacaggaggtattctcgctctaggtcgcctcgttattataggggccgctctccttcacgcagccaaagctactcgaggtctccacctcagaatccaagacacagacttagagagaggtcctactccggctcacctgtggacagcagatcaagaagtgggagcccttatgaggatggatatcgcaaatcatcacggagagagaggtctctttctgtcagcggatgaagcagttttacggtctagagctattgctgtgaatctgcgcatggtggcctacttgctatgtctttctgaaccatatatgttctgtctagattatcattcccagtaccagagaagtatcgtgagactgtttgctgtactttctagtcttgaggatacagaagggggtcaccgattctctcagtagatggactattgaccactagctacgccagttccactgctttgtgtatttacaggcagctttgcggtttgaataaaattgtttgcatcgtgaaagctaattggtaaaaagactgaatcatgaaacgaacgttttgcatccctgttccctgatggcatttggatacgattttttgttctttcgacgaacaatttggcaaatctgcatctta

SEQ ID NO: 35053 - DNA, 1573 bp, Zea Mays
gcgcgcgagattgaccaaaaattcacccatctgtagctgctccccgaacccctacccacaccgctgccgccaccgctgccgacgtaatcgcacggccgctccccgacccacacctcgcacaatgtgcgccccgccgccgccgcctcccctctagatcctcaatgcaccgctaggtcccgtccacagccgctcactgccgccacctctaacgcgcctaggaccatcgccacctccacatctagcttctggagtcgagatccatggtcgactccactggaggagcccggatctggcctaccgggcacggtctcgagctttaggcatctcagcaggcagcggtgtactccgtcatcgcccaatggagcaaccaaccaagcaagaactctatccatgctcgtgtcgaggcgttgtctctactctctactccatcccgcgtctgcgcgtcgtcctctacggatccgtccaccgctgcgccagcacgatgtgaatcgagacacgcctccgcctatgcgtccaagacacgcctctgcatctgcgtccgtgcactggctacgcggcatcgattacggagtggagtctacctactcgcaattctctacatatgaggacttgaggatttagagcaagacctaaagtaagttactctgaggtatatacattttggtcccctccgatctgcttcaccttcatccttaattacatcccaaacatttataagtctgatgttgcttattagagtctttttaaaaaaattgaaaacacaagagagttgcatgtcctattaaaaagaggatggtcatattgtggaactgttattttgaaacggagtggtcttattgtctgaacctgctattttgagctctgaaatatatgtgattgactatagaattatttcaagaacaaactgttattggcatttgttcttgcgagtgtccagcagtagcatgcttgtcactctggtttggaaatattgaaaatttcatctttgaccgactaataaagagtagaacaaaatatatttgcatttcccctagtcaatgaaccagttcaatttacaccaaacaatttctatacaaaggtatacccttgaagggacacactttatgattccatggtttgaatgaccaatcatttatgatgtccgtgctcgactgaatctcgtggagagtacttctgggagcctagaccttcagatgggtgttctggacaatgaaagcttgtaccttaaaacaggaggatacaagaagctggagtggttgtctgaaggcttttgaactgcttgaagcattagtgtagctttggtgcttttgtgactgatcagctctggagcagctagagtgatgtagttgtgggcttttgaacaatacctagagtgatatgaaacattagtgatgtagttgtgggcttttgaactgcttcacgctggagtgatgtcgctgtggtgcttttgtgactgatcatctctggagcttttgtgaatgatctagctagctatctgtaaatgatctagttgtgaatgatattataattgtgatgcttttgtgaatatataattgtggtgtttttgtgttta

SEQ ID NO: 35054 - DNA, 3808 bp, Zea Mays
ctagatgtgacatgttaacctggttgggattgagaacactattttgaccaataaaaaaagagaactttgatggtactcattttattagggagaacatatgggaagttggttcaagctacacatcatcttaggcactttcaaatgagtcaatttccagcttctcatgccatgtttggctctttcccagatatgaaactccataaaacttgtggctttgtcgtcactctaaacttcaagcgtatgatttcattttagaatacctgaaaatttcaattatctacttcggaaacttcaccttattggtgctcttaaaaagaagaacgctttgtctccatgcaatctgctagatagcttgattgtgaatatacagaatgccataagcacgggctaccaattagacaggaaaaggcttctgggagttcctgttagcatacagccttgcagttcagctatttacagtatattcgtaactggaaagggatcttgttggattccttttgatatgtttatggagaatgcaatggatgggagacatcttcatactatatcatcagttgaatatctgacagttggttgacagaactatccaaaacacttcaagtgttgaatcgggcaacttggcaagagacctttcaggctttatggatttcggctttgcggctagtacagcgaggcccagatgcttcggaaggaccatttcctcatcttgattcacggatgtgcatgttgttggctattatccccttgtccattgcaactattgtgaaggaagaggcgggcaatctgaaaggggaaacaacctctgttataagaggacaattagtgtcttcacttcagattctgagacaattttttggtcttctttcaccacctccagcaactgtgcacttggcaaatgctgcagctagaaaagcagcagttgttctgtctaacctgaaaactgggagtgagaacatgtacagttctttcaaagacagttcctctattaaagcagttggaaatatgctacatcttatcgtggaagcctgtatcgcaaggaacttaatagatgcatctgcttatttctggcctggctatgtggttccacttaaagaatcctctccagttcaggcatctccatggtcatctttagtagaagggtctccacttatagaacttaaggatgcccttatggtcacacctgcttcgagtgtagaagagttggagaaattgtactcttttgcagtaagtgggtcaccggaggaaaagttggcagcttcgaagattttgtgtggtgcatcacttcttcgtggttggaacattcaggaacatgttgttcaaatggtgcttaagttgttatcgacattcctccctttggattctggatcagaagggcgatatgtacagcatatgcctatgctgcatgctcttgtatcaggaatttcttctattgacactgttcatattctctcactgtatggtctggtgccagaagtagcatctatgttaatgcctctctgtgagaattttggatctttacctccatctgatcataggagttgtaaacttgaagaggcttctgtgtactcagtattctcatgcgctttcctgtccctgcttcgcttgtggaaatttcatagaccacccattgagagtgctttatcaaggcgtggagtctctgtttggtcagagctccgtttggattttctcttgttattacgtaatagtcattcttctttgaaaaatctgtctaatgttactcaatcaagcatatttgaattagatccaccatttcaaaaaccattgtatattgattcatttccaaagctaagggcatggtacttccagaatcaagcttgcatagcttctacactttctagtgcttgcagcaggacaactgtcctccatgtggcaaacatgatactgaaaatcatatgccataataaagtgccaaaaggtggtgtcctgtctgtaaatcctcagtcaacagcaaattccactacgagtagttcacctgcaggcgtacaggaagatatgtgccagtggccaacacttccagcatgggaaattcttgaagctgttccttttgtgcttgaggctatgctaacttcatgcgctcatggaagactttcatcccgtgacttggttacaggtttaagagatcttgcagatttcttgcctgcttcacttgctgctattgtcagctacttctctgcagaagtcactagtggcatatggaagccagttatgttgaatggaatggactggccaagtccagctgcaactcttccagtagttgaatcggagataaaagaagctcttgcatttgctggtgttcatatcaatatctgtccacgtccacgttctgcgatgccaatgcttccattgccaatagcagcgctaatgagtttgtcaataacagtcaagatggaggaattcagccacctacacggcatcatttcccaaggaattgaaatttgtgcgacatctagttcatggcccactatgcaaattataggcgcattgtggtcccagaaggcacggcggtggcatgattttatcatcctgacttgttcgcagtcccccttcactcgagataacaccgcggtggcacaactgatcaggagctgcttctcgtctttcctggggcctttggttgatgggcgctcctgctccgtagcaaacagaggagttgcgaatctgctggggcagagttctgatgaaaaagcacacaggcttgctgtagctccagggtttctctacatgagatcctgccggttatttccaaacaacacctttgtttgtgaagagatcttggaggtggtcattgagagagcccatgcgctagcaaatgaccgcagttctgacagacctgcccgtttgaggtcagagtgtttgccgctatcagctgcgtcatccttggtagagcagatagcatcacttgcagcgactatgctttgccacgctggcggggtgaatctgattcgtctcctctacgagcagatcatgcccaccctgctgctttcaggtggagaagctaagctcggttccggtggtatggtatgcagcataatcgaaggatacacgctagcgtacgttctcctcttctcgggcgcaaccgtctggggagtcggagaaacgtcgccagcttacactttaatatacacatccaaaagacaacgggtcctcgacaggcacctggagttcatggccagggtgatggagggtaacattgtgctgggctgtggagatgccacgtggaggtcctacgttctgtgtttcgtcaacttgctggtcagcttcgtgcccgcgtgggtccctgaagtgaagctaaatacgctgcagaaactggcatctgggcttcggagatggcacgagggcgatcttgccctctctttgcttgagctagggggagccaagaccgtgacttcagtagttgaatctcttctgcggtgagctggtgctcaactgactgtatagttttctacgacaggttggtccatatacacattataacatgttaatgatctaaaaattcagtcatcagaaagatgaacagtacagttctaccgaagcttgattattcgtactgtcagtcagctaaagagatgtccagcagtttctatagtagttacatgatagtgtgtaattgatggaaatgtcatttactggcagtcgtccatttggagtgtataaaaatcatggaataattggaagaatgcagtattagaaaacagcattgctgggagccaggcgtctgttccatcggatgacccgtgcggatgtgccgttagccttgttgcttccatttggtaattcttgcgccgcc

SEQ ID NO: 35055 - DNA, 1658 bp, Zea Mays
atcagaaggaagaccaatcaaagggaggcaaacgccatagcggccaatcacttggcggcggcggcggcggcgatggggcggctgaccgaggagcaggcggcgcgcgaggcgggctcggcggggaccaacgctatgtccctcaagctcacacaccgcgctctctccgacgtgtcgtgcctgagcagcttcaagaacctggagcacctcgacctcggcttcaactgcctcgtcaccctcgagggtttgtcctcctgtgccaatttgaagtggctttcggttaaggaaaacaagcttgtgagcttaaaaggtgttgaggggctctcaaagctgcaggtgagtcacccccctaaagtactgaattttaccacgttactttgactcacctcacttcggagttgttgtacaggtactgaatgctggcaagaacgaacttacaaaaatggacgaggtcacatctttaacaagcctgggagcattgattcttaatgataacaatatttcttccatctgcaagcttgatcagttgcaacagttgaatacacttgttctctctaagaaccctgtctttaccattggcaatgctttggtcaaggctaagtctatgaaaaagctatccttgtctcactgccaaatagaaaatattggatcttctcttgttaagtgtgtggaactgaaggaacttaggctttctcacaacaagatcagtacaatcccttcagatttggccaaaaatgtgaagatcttgagccttgatttggggaataactttattgagaggagttcagatttgaaggtactttctgaattgcgctacttgaggaaccttaatttgcagggaaatcctgtttccaagaaagacagtcttgtcaaaaaggttaagaaatctgtgccaaccttgcgcatactgaacgcaaagcccctagaggccacctccaagagtgataagaggtctacaaaagagaatcctccgagcaaagatgaagacctcattgggattgatgcgaagaagaaggataaaaggaagggatctaaacaagaggtaaagggccttgaagagcttgaagtccagagtgtttctacaggtatcaccacttcgaaccctggtaaacttgaagtgccagacagtaaggaaaagaaaaaggtcaaggaagctaagacgaagaaatctgaagagccgtaccatgccaataacagtagcttaaagaacaaagaagttcaatcttttgtctatgataccagcacgaaggacaagaaggaagccaagaggaagaaatttgttgacgaagaagatgtagatgctgaaggaattgacaatacagaaatctcgtttgcagatttaatgttttccaatgtgggcaatccagagactaagctaaagaacatctcaaccctggaagcagctcctgatggaaaatctgttggaggtctggtaattgatcacacaaagaagagaaagaaaccaaaaggtgttgtcaccatcactgactcctcagctcttaagatgttttcctcaatgccagaggtaggagcaggagggcttggcctgtcaggatgggatgagtagcgtctagctctctagtaccataagtttgctgcctgatgaatatcgttttttgaagccaattatacatgaaattaagggcaacagaatactcctg

SEQ ID NO: 35056 - DNA, 350 bp, Zea Mays
tttaaattcacgacggagctgctgttcatgttcatcatggatatggctcaggttgaatcccctcactgttcctgtaagcggtgttaagttttttttaatcagtttttgattttacgacaaggtccaagactttcaccgtcctcttcagcagcagtacaaaaagtgattttaccttttgtctctgtgtcttgtttttattccagaatctgtagcaaatggagaacaacgaggacacccaaccccttgtttgtaacaatggagtgttttagttaaaaatgcactccaaaagtgtttttataattcctcaaaaagaaagaacatcaggacacaaactcattatgccatttcaa

SEQ ID NO: 35057 - DNA, 2087 bp, Zea Mays
cttcacaacggacgagaggcgtcagacaaaaaatagaatctggttgctcatctcatctcacgactcataaaaaaatagcgtcttttatcatatccgttgctcgcaaaacgcccccacacgccgccggcgaatcggcgactccccttgcgacgggaggaagcagccacgccgccgtctcggcgactccctgacgactgcctctccggtctcgaacgcgatctggcccatggtggctctggcgccgttggttcgtgagatctagggttgtcgagcgccgcggagtgggagcggatggggcgccggaagatgtccgcagcggcgccgccgtcccggagctggtccaacgttggcgggagcgtaatccccgaactacttgcaaaacacaaaatggacttggaaaatttgacgctgacaaaacatccaatcagaacattacattttttcctgttagccatgttacaatacttgaaaagattagcaacatatatcctgagaaagagtggtttgttctttctcttaattgttttggtggtagcttccggaatcttactctctatttcagatggcctgcataagaaggagttccttaattatgctaaattcgtgttgtggtggatttcattaggtgtggcttcatcaattggactaggttctgggttgcatacatttgtgctgtatctaggtcctcatattgctctgttcactattaaagctgttcaatgtggccgaattgatttgaaaacggctccatatgataccatacagctaaaggttgggccatcatggctcgacaagaaatgttctgaatttggtccgcctgtgtatccagcatcagctcattctgttaggatccccgtctttgatttactacctcagatacagctggaagcagttctttggggcattgggactgcacttggcgagcttcccccttattttatatcacgagcagctcgcttatcaggaagcaagtcaaaagctgttaaggagcttgatgccgctacttccaaagaagatgggacagtagcatccactcttgatcgctccaagcgttggcttctttctcactctcaacatctcaacttcttctctatcttgatacttgcttcggttccgaacccactctttgatctcgctggaattatgtgtggccaatttggtgtacctttctgggagttcttttttgcaactttgattgggaaggccatcatcaagactcatattcagacgctgtttatcgtgtccttatgcaacaaccagctcctgtatcttatggaaaaggagctaatctggatattcggtcacattcctgggttttctgctaccctaccatctgtgattgccaaactccatgctgccaaggacaagtatctatcaccaccgacaccagtctcggcgtcctcacagatggaggagaaaagttggaatctctcttttacattggtttggaactctatagtgtggcttgtgcttctgaacttctccgttaagataatcacgtcgacggcacaggattatctcaaaaagcagcaggatatggagatggaacgcgtttctgattctccgcccccggaacaaaactaactagcggcgcaagtttatttcagctgctagctgcacagattctcctctgcatttttagcaactggttaagcgtctgcagacgattccaagttccaacgattatcaattagtattagtagctattcatctacacagtcaacgaaaacatgggcctggcaactggccgggtgatggctgtgacctcctatcatatcattgagcctgtagtgggcagttcctggaggagaattctactgttcttttttgtttttccggacatctacacggatagacagtagggattgtttgtgtgaagcacggttggcttatgccgagatttagcactggtagatgtttctatttgttttggaaatgctatagaaacatgtgagcattcaacaatgatacgctctgttaagtttgttgtgtattttggtttgcaactggtgcccgaaagagcaaacagtggctccatcaatttcctttggcaagtaaaaccccctatagaagacattgcttgtcct

SEQ ID NO: 35058 - DNA, 1098 bp, Zea Mays
cattgcagccatacttgaagaacctctacacttacatgtcaatatcagggcctcacttgggttactggtacagttcaaattctttgttcaattctggactctggctgctgaaaaagctcaagaatgctcaatgcatccatcaactcactttcagtgatgatcaagacccccacaatacatacttctataagctttgcaagttgaaaacattggagaacttcaaaaatatcatattgttatcatcaccacaggatggctatgtaccatatcactcagcgagaatggagctctgcccagccgcatcatcggacacctcaaagaagggtcaagtcttcacagaaatgctcaacaattgcttggatcagatccgtgcgccctcatctgacacccggacgttcatgcgctgcgatgtgaattttgaccagtccaaccacggacggagcctgaacaccatgattggcagggcagcccacatcgagttccttgagaccgacatctacgccaagttcatcatgtggtccttccctgacctgttccgatgacagacaacgccgctcgtctctgtaatgtctctgtaatactgctgcataccaaacctacaaaccgatagcgcacactactgagtactgaccaggcaaggaaaagtaagcttgcataaaggctcccccagaatccaacaccgccacaggcagagtagcgctgtaaagatcctagaagcaacggtttttccagcttgctagatctgattctgtataaatagttgattctttcgtcattccattcatagtgctgtagatgtgcacctttgctgtgaatttataatcctttgtcggcttgtgtatctaacgcttcggtttaggatgtgctgacaatcagtgagcttatgtccaaataagccccctttcttaatgtttggttttagtcaccttggtctttgtgctgctgtaaatccagggtgttgtttctgtttggtgaaatgactgctacatgaatatctggttctggcatcttgccatagccggatcttgcttctgctaaggttattcctatcagggatatataggattggaaaaaaatatgaaagattttgatttattt

SEQ ID NO: 35059 - DNA, 2264 bp, Zea Mays
gtcggctccgctccccccatcttgtcttgaaacgaaacccctcaaaccccagagccccaaaaccaccgggagactccgcgagatctgaactccatggtggccgccggggcagcagcggccgcgccccggctgaacccgtcgccgtccccgcaccgccgccgagcttcctccgcgctctccccggcaaagtccaacgccaacgccaacaccaacgccggcgacgcgcggcccaagcccaaggctaaggtcgtctcctcccgctacctcgcgcccttctccaggtccacctccagctcgacctccacctccacctccaccaccaccaccacttcgagctccaactccacctcgacatcgtcgtccacgccctcccgccgcttcgcgtcgccgctgccgaggcgctcggtctccgtcgaccgcccgcgcccagccccggctggcaatgctgccgtcggggagactgggggacccaaagcgggcaccaccaccaccacgaggagcctctccgtggcgttccagggccggtccttctccttcgagacgagcaaggcgaagccggccacgtccccgtctccgtcgcggcgaccagtggcttcggcggcgggggccatcacgccggagaggactcgtccaactatggggacagtgccggagagggggaagggttttgagggggtccatgctcaccacaggtggccaatgtcggcgaggctgtcgcaggggtttgaggggaacccgcttaccaaaagcttggattgctctttgcacaagagggacgctgctgtacttgctgctgtccggtcgctgcggcagtccatggtgtttgaggagggggcacggcgatcctcgttcgacagtggggactacttgatgtcgtcggacacagagagtgtgtcatctgggagcaattcagggtctcaggatgcaggtatcggcatttcgcacagagcacgaccatccccaaagggtatgagtgtgccagcacggttcttgcaggatgctgcagtcagcaggtcacaaagattcacagatcctggcacaccatacttggcgtatacctctgggttggctgcatctccaaggacagcgccggttaagaagtcactgcaaaatggctttgtttcgtccccactgaaccggtcagtcaggcaatcttcaccaagtaagcttaccggcaatccatcgaggagggtgtcaagcccatcacggtcgagaaattgtgtggggtcgggcacttcatcttgggatcaccagggaagaaactcatctggatctggttatgctttgaatggtgaagtgaggaggaggtggcatgggggtagtaaggttgactgtgagcatctgttgagaattttatccaatcgacatttgcagtggcggtgtgtgaacgcacaggctgaagctgcactttctgcacaaaaaatgacagcagagggatgcgtaaatctgttgctcttaagaggttccagctacagttataccggaacaattggaagctcatgacagttctaaagggacagatggggtatctagaagaatggtctttgttagagagggactatgtggattctctatctgtaactgtggatgctctaactgccagcattttgtgccttcctgtcactgatggagcaaaggctgatatccaagatgtgaaaaatgctgttggttctgctgttgatatcatgcaaacaataggaagctcaatatgttcattattagctaagctggctggaacaagtattttggtttctgatctttccaaagttgctacccaagagcgcactctaatggagcagtccagagaattgctgtccacactcgcaacaatgcatgtcaaatactgtagcctacaagggcagagagtacaggcaactgacaggagctccatgcatccctagccagactactataaccccccactaaccgaagaatgtaggtgcaactgcaaattctggtggcttggctggtgcccacagagcaatcctgactcatccgaagatgctatctaggctaggctagttccagtggtcttggtggctatggcccccctagttctggttgctgatttgatgtatgctaaccaatgcagaacagatggcatgcgccatgtgtatagatgtacctcatttgttggttttagtcgaggattaggtcagatgctaactagaaagattgggttccttttgttcatcagcagatgactaacgactaccagggaaatgcaatataacttctagcggtacgttggattccttgcctaa

SEQ ID NO: 35060 - DNA, 1633 bp, Zea Mays
ctcccttccctccatcggtccatccatcctaacagaaacaggacccgcacgagacgaaaccgccgccacccatggccgactccggcgccctcgtcgtgacggaggcgcggcagcagcacccgctgagccagatcgcggccagcgggacgcaccggctgctgctcaagcagtgggtcaaggaggaggacctgctggcgcgccgcgtggcgctgcgggaggcccgcctcgacggcgcccgcaaggagatcgccttcctctactgcgccttcttcgccttccacgccgcttccgtgctgctcctcttcctctcctcctcctcctccgtcgccgcctcggcggccgcgacaacagcgtgcagacggtcgtggatcccctgcctcgtctcgctgctctcctcgctcgccatgctctgggcgctgcggtacaagtccgacacggaggacgcgctgctcctggccagggccaagaacctccgcgccgaggccaagggcgcagcagacaggcccaggaggtggcaggccagggacctggccgtcttcgcgctcttcgccgccgcctgcggggtgctcgtgctcaccaggttcctgctctgcaattagccaggtcgggtggggagcgatcagcacgtgctgcttgccttgccttcttggcctcttctcctccttgttcgttctgggcagaactgtttgttctgcgaattttggtgctggttttgtctgtttgtaaaataataaggaaatgatctgatgtgtcaggtttagtttcttctgattgtaacatagaataaatgctctcggtattatgaaattgcatttgtaagtaagggctcgttcggtggtttttgcgtttcttctgagagaaactgctgctggaaacacgattgtggtttccaagccatccagaactttttttgacacgattgcgtttcttcagacgtttccccaacttcagacgacatctgacagcacaacatccacacacacacacacatcatctttagacacaagcacaatttcagaaattttttgcttgattacagaagatataaagtgtgattgcaatcgtatcacaacatccacacacaccatctttagacacaagcacagatttgactctcaatctacactctcaagacagccagggcgaaattaaagaagaaagaactaagaatataaatccaacatcaccaccaagacatatatgtagtagtagtagaatggatggatggagagacgtctgaatctcagtcacacagcctcggaccattgtttcttgctgtggaacggctcaggcggcggcgaggaggctccgacgacgccgggcggcggcagcggcgtgccgtagatctgcacgccgatgccggtccgcatctcctcccggcccctgtgcttgccgaggaagtagcagccgaagccgaggaggatggagaagaagatgaagggcagagagaccaccagcacgaaccccattgcacgtctgtgcctcctgtcctgcctcaagtcgcagaggaggggggtggagcgagaggaccagatatggtgactaatgattgcttttttgggtcgctcgtcgttgccgctcgctaaaatcctagcagagatgctttgaagctttgctttgctttggggcatga

SEQ ID NO: 35061 - DNA, 2785 bp, Zea Mays
cccactaatcagatccccgcaggctggttcactgagccggcttccgagcggcccatgggcttgcccaggaccggctcttccagtcgcctcaacgcgcaggcgccggagttcgtgccgcggggcccgccaccaccgacgccgccccggccgtttgagtactatgcgcctatggtgaacgcagcggatttgctgccaaggagcaacaggcgcgggagccggaagcggagatgctcccgcccgccgcggtgaagacggagctggtgtatctgggcaatttggtcggttggcacggggtatgcatcaataggcaccgtcatcgcagtaggacgcgtgcgtgatcaagcctggatgggacggttttgacacagcacgtcctgtgtgcgaggatctcgaactgggtcagttcgtggtgatgttcttctaggattctttcgtcatttcttttactgcatcgttgaaactgatccagggtagtgcggcggtgttgggggttgcggcgggcctcgccctcatcgtcggcttcgtccgctgcgatacctgtgaagttaacaatctacgctattatcgatagcaatccagcgctgaagtcaagaagttacctgggcaaaaacagtatacccgattctaggtgagaagctcaaagaaggggaagacatctacatctatcaggggtgacaaatccttttgctatgaagatgaccacagggttcttgtttgcgagttcatcctctagaatgtattgggttgtcgccacgaaaaaacacacgaatacataaattcaaataatttctggtgctgtggagtattcataattgtgtgcttttgttgaatccttcatgtaccataattcttactgctttcaagcccttttagaatatgactttaggatgtagaaattggtgaaaggagacaagaaattattctctaaactactattttttataggcaagggaggctggaagcaccttttttgcatgggagctgcatggagagaaattattggcagaaaacaaacttagaccagattcttgaatgtgccaagggaataagcttcgcttgctgcaattcatgtgctgcttggcgccacaaaaggagtagagatttgcttgctttgcagggagcggggtcatagtctgaagaactgtcctgacaaaagcgagggaaatttgaagaaattttgctagaactgtggtgaatctggacactgtctttccaagtgccccaagctcattgagaatgggttacaaattttgcaagctgctttatctgcaatcagcaaggacatttgagcaagaactgccctgaaaacaaacatgacatcccatccaaagctccatcttggcgccaacagtggttcacataggtttgctcttgagaattaagttgttaatgaagctactttccgttgccctgatgagctaggatggaaaccacagaggacacctatcatatcatcagatggaagcatcttacacgcaagacagcaagctttctggtatggagctgaatggtactctggattatcaattgttaagtctacaggctctgaaaacaatggacttaagcaacaaccacttgcatgattcaatcccttaccagttgccatcaaaccttacctatctgaatctggcaaaaaataacttctctggtaatcttccatactctatatccaacttggtttcacttgagtacctcaatctcagccacaactcgttatttcagaaaattggtgaattttctttcagaattgtatattgtgtaaggcctactgtatatttcagaaaattggaagcctcaattcactttcagaactagacgtatctttcaacaacctcacgggaatcttcctttctcaatgggcgctctgtcgaagctttctaccctctgatcactcttaaaaaactaacgggtcctggtgtgagtggcagaactattggataggatcgccctgagggcactcaacatcaccactgttgtacaaaagtaggccaattgacatatacactttgttcatttatgttggtcgattctacccagtttaaagagagactaaaatgtgggcgttgttgcttgtgtccatccatgccacaagctgtaatattttcttctaataagcttttatacattacctctcttgttgactggttgaccatttgtgcagaggcaaccctttccagtagggtcgcgcccctctggtaagagggtcgctgttaagttgcctgattaatccattctttcactgtgtctgcatgttgcagtagatgccagcagatcatgaagcgcccaaatggtgctggtacagatacaaaatatgctcctgcacaagatatatatatatatacatattcacgtgagtttgttctttcttacatccagagctacagtactatcagaagctgaatagattgctgctggaattagagcaaaggagtggaggagtttctgaagagagcagacctgcaaaataaccgtcgtcatgtcagtgacatggccgctcaacttcttcctcttactgcattgtatctgaactgcgtcgacctaccaactacatcactgcaccgactgctatactgcatcaaccaaccgaacggctatatgaaacgacacaatgtcagccgtcagatatgaatattaacttcataaaagtaattgtaacttgtgtaggctggttatagcttgtgatttcacatttcatttgttagcggccaagatttatttctgttagtttatgaccaccactcaggaaagttgattgattctccattccaatctttgttagacctgc

SEQ ID NO: 35062 - DNA, 4833 bp, Zea Mays
ctggatcttattaaacaatatagtcagggtcagcaaagctgatggagatgatctggttcccgaatatttagtaaaatggcaaggacttccttatgcagaatctacctgggaaaaagatacagatattgattttgctcaagatgcgattgatgaatataaggctcgtgaagctgcctcagctatacttgggaaaacagtagatttccaacgaaagaaaagcaaagctagtttgaggaggcttgatggtcagccagaatggctaaaagctggcaagcttcgtgattatcagctggaaggactaaactttctcgtcaatgggtggagaaacgatactaatgttatacttgctgatgaaatgggtctgggaaaaactatccaatctgtatccatgcttggcttccttcataatgctcaagaaatcaatggcccatttcttgtagtcgtgccactgtcaacattgtcgaactgggcaaaggaatttcggaagtggctgcccaacatgaatgttgttgtttatgttggcaaccgtgccagcagagagatgtgccagcagcatgaatttttttcagacaaaaaaggtgggcgtcatgtaaaattccacacgttgataactacgtacgaggtgattctcaaagacaaagcggttctttccaagataaaatggaactatcttatggttgatgaagcccaccggttgaaaaattgtgaagcgtcactgtatacaacccttttggaattcagcactaagaacaagctgcttatcacgggaacacctttgcagaacagtgtggaagagctttgggcattacttcatttccttgatccagtcaaattcaacagcaaggatagttttgttgagagatacaaaaatttgagttccttcaacgaaactgagctcgcgaatctgcataaggaattgaggcctcatattctacggcgggttataaaagatgttgagaagtctttacctcctaaaatcgagaggattctacgtgttgagatgtcacccctccagaaacagtactacaagtggattttagagcggaattttcagaatctgaataaaggtgttcgtgggaatcagttatttcagttggcacatcttggaattgaatgcaatttggctgtctcagtatgtagcaaattgaaccttatgtctcagtatgtatatataccgttgctgctagtctaagaccatttttcttgctaaatgctgtggtgcttgccaggatcttgattggaacaatgttactattctttctcacctactattgctaggtcaagcagttcctcacctgctattgctagctcaagaagtttctcacctggccgtgcattacctatcaaactggagcatgggcaaggccacaaggcaagacttggctgttgtatcacttcttaacattgttgttgaattgaagaaatgctgcaaccatccattcttgtttgaaagtgccgatcatggttatggtggagatagcatcggtgatcggaataaagttgaacgtattgttatgagtagtgggaaacttgtcttgttggacaaactattggtgagactgcgggagactaaccatcgtgtgcttatattctcacagggcctcttcagtgtggtttggtttggttcaaacccgcactacgggtgccctaagagagaaagcaaaaaaatggttaagatgttggacatccttgcagaatacctctctcttcggggatttcagtttcagaggcttgatggtagtacaagagcagatcttcgtcatcaagccatggaacactttaatgctcctggaagtgatgatttctgttttcttttatccacacgtgccggaggacttggtattaatctagcaactgcagatacagtgataatttttgattcagattggaatccacaaaatgatttgcaggccatgagtagggcacataggattggccaacaggagacagttaatatctaccgcttcgtcacatgcaaaagtgttgaggaggatattttggaacgcgcaaagaaaaagatggttcttgatcacttggtcattcagaagctaaacgctgagggcaggcttgagaagaaagaatccaaaaaaggtggccccatatttgacaagaacgaactttcagctatcttgaggttcggtgcagaggaattgttcaaggaagacaagactgatgaagagaccaagaggaaccttgaaagtttggacattgatgaaattcttgagagagctgagaaagtcgagacaaagggtggtgaaggggaggaaggaaatgagcttcttagcgctttcaaggtcgcaaacttttccagtgtcgaagatgatgcaacgttctggagtaggttaatacagccagatcctgcagatatagttcaggaaactttggcacctcgtgctgcacgaaataaaaagagctatattgaagatcctcagcttgacaaaaataataacaggaaaagacgggcagttgaaacacaagaaaagccaaggaggctttctggcagaactgtggaaacagttaattcattaccattggttgatggagcagtagctcaagtacgagagtggtcttttggtaatgttccaaagaaggacgcttctcgttttgtacgagcggtcaaaaaatttgggaatgcaacccagattggattaattgtggatgatgttggtggtgtacttgcgaaggtaccgcatgaagcgcagatagaactatttgatttgctggttgatggttgtcaggaagcagttaaggagaatacagacattaagggcacagttttggattttttcggtgtagctgtaaaggcctatgaattgctagctcgtgttgaagagcttcagttcttggcaaagcgaattgcacgttacaaagatccaatcaagcagtaccgcatccagctaccttataaaaagcctcagtggtcagcaagctgtggatggactgaaactgatgacgctagattgatggttggaattcattggtatggctacgggaattgggagaaaataaggttggatccaaagcttggcctgacaacaaaaattgcgccagcaacacttggagaaagggagacatttttaccacgtgctcccaacttggataaccgcgctagtgctctcctgcaaaaggagtatgctaagtttagcggtaagagcttaaaagtcaaaggaaacacccgccagacagtcaataacgacagtaatagtggagttcgatcaatgaggggccggcaaaaggatgtaccagaaaaagatgataataagccgaacaaagatgacattcagaagcgtagggtaatagtggaagctgaagcaagagaagaaggtgaaatttctgaatcggaggcagagaccaggtatcgtcaggacaaagaggagaagtggcttgaatggtgctctgaagttttagatgaggagcaggaaactttgaagcgcctggataggctgcagaatacaagtgtaaacctcccaaaggaaaaggttctttcaaggattcgcaagtatctcctgataattggggacaaaattggagaagttgtccggcaacacagtgaatcttataggcaatcccgcatggtcatgaggttatggaattatgttgccaccttttcaaacatgtctggggagcaactgcatgatctctatatgaaacttagtcaagaccaactggaaggtggagttggcccatctcatggtggcaatttcacatccattcctcccaataagggaggtaactcaaatcaacttcatccttcgagaaaccaaaggccaactaggtctctccagtacaattctgagtctttccataatgagagctctggaagttctgaagcctggaagcgtcgacggagagctgacacagataatcaatttgacacccagcctttgtgtcaacctccaattatgacaaatggaaataggttgcaggaatctagtagttctgcaggtattcttggttggggtccagttgaaattagacggtatggtaatgagaggccaaaacgtgctgttcatcctagtcatttccctactgggcatggacctttgctgtagctgaaggaagtagatgatgcgaacaaccttgttcattttggcataaccgttcccagtgaatttcagcttccatatagttataaatggtggatctccgtaggaattgaaattctttttccaaaacaaaaaggaataaagagcaacctcacctggatcacagttttgaattatatgccttaaaaggtaatgccaggactctagaggcgacttatggaattgttaacagctacactgaatatccttctgacaccatcacagcaacacaaatacatggtggcttgtgaactgccaagaggatcaatcgaggaagttttgcctgttcagttttgtgatctctcaacaatgatctatagttaaatctcaatacataaattatgctttacattgtaatatattgaaatatggttccgttatgctccctccctctcgatgtgttttgtgccgtttttctaccgtgttgatgtaaaagatgaaagaaatgcatgttctcattttgaggcaacaaaaagttgcagccgggagcataatagtgaaatgcgatggaattatcggatacttatcgattccatagtgttttccctgagacaatgtactgaatgaggtacggttataagaaatggtgataattagcttagtaggtgctcagccattctacaagtcatctggtagtccgaagttgcatgaggcctactttcccctggttgccccacttatgctcagtaagtatgcttctagggttgtatgatgatggcccaattgaatttttaatcctgtgtatgaa

SEQ ID NO: 35063 - DNA, 376 bp, Zea Mays
ctcttccaaaccagttccaacatgttattgccatgtgaaacaaattactttgtataacaagttcaggaataaaaatatatatatataacaatagattgagatgggtgcttcagaaaccactgcaagagagacatcaaaattcacagttttcattcagtatagcttccccaatgtgaagctctctctagtcaccaggtattcgttcaatatccatcatagataacccgacatcacttttcaactaagcatcttcaacacagtaaactacgccaaagctgatccctgctcaagagacatacatacactatggaaggggccatttttagtttgtaagaactagagcacattcatggtaggaaacaaaaatgtggacaat

SEQ ID NO: 35064 - DNA, 1515 bp, Zea Mays
tccatttatttcctcatttcaaagcttctcgctcgaaccaaaaaaaaagataaaatagattggataagcctggaacgactgcatgtgaggtccgttcccgactcccgtgctcgccacctcctcttccgtaataattccattccagaagtaacagtgtccgtgtcttccttagttccttgctccactcagtcactctccagtctcctcacgacctggctgctcccaagctccgtcctctgctctgcctttatataatccccgagccacaccacctccctcacagtcgcagacacacaccgctgcttcaagaaaccaccgagagcccaaccgcacaggcaggagagagagcagggagccagggacagtagcgtggggccggggagcaaagatggaggggaaggaggaggacgtgcgcctgggcgccaacaagttctcggagcggcagcccatcggcacggcggcgcagggcgccggggccggggacgacgacaaggactacaaggagcccccgccggcgccgctgttcgagcccggggagctcaagtcctggtccttctaccgcgcgggcatcgccgagttcgtcgccaccttcctcttcctctacatcaccgtcctcaccgtcatgggcgtctccaagtccacctccaagtgcgccaccgtcggcatccagggcatcgcctggtccttcggagggatgatcttcgcgctcgtctactgcaccgccggcatctccggaggacacatcaacccagctgtgaccttcgggctgttcttggccaggaagctgtccctgactagggccatcttctacattatcatgcaatgcctgggtgccatctgtggagctggagtggtgaagggcttccagcaggggctttacatgggcaacggcggtggcgccaatgttgtcgcccctggatacaccaagggggacggccttggcgcagagatcgttggcaccttcatcctagtctacaccgtcttctcggccaccgatgccaagaggaacgccagggactcccatgtccccatccttgccccactgccaattgggttcgcggtgttcctggtccaccttgccaccatccccatcaccggcaccggcatcaacccggctaggagccttggcgccgccatcatctaccaccaggtgatcatcagggccatcccgttcaagagcaggtcttaagctgccgcggactgctcactgctgcactgctctgttatctgaacccagaacttcgtgtactcctgtaccgagctgtgtgtatgtttttttttcttccatcgtgtttgttgcaagggttcccgtctccttttatgcgttgggatcgtggcaagaaagggcagatatcatgtggaaacgtgggtttataactatcagctggatttttcatccaagtggaatcgattcagaattttcttttgttcttgttttcaacagaattttccaaccagccatccaatgcatcgtgaaccacagacctagtaataaatctgacaccagtggtaaaa

SEQ ID NO: 35065 - DNA, 4155 bp, Zea Mays
cccaaaccaattccaaaactgcaggcctctccaaaattcgaacaccctcgcctggaaccttctacgagccagctccgagcggttgccgtcccataatctgagagacggtgccgtgggtttgcggcgcctgggtcgccagtaaagtgcgggccgagatggagtcctcgtcgtcgggcggcgggctggcgcggcggcggagtagcggcggctggggcagcttcagcggcgacacggacccgttcgacatccccgcgaagggcgcacccctcgagcggcttaggaagtggcggcaagcagcccttgtgctgaatgcatcaaggcgctttaggtacacactcgatttgaaaaaggaggaacaaaatgaggaaatcaggagaaaaattcgtgcaaaggcatatgttataacggctgcttttcgtttcaaagaggctggccgagtccatgttcggtctgaagaaacaaaagtaccgattgctgatggtgcacttggctttggaatcaaagaagacgagattacagcactgacaagggatcacaactactctggtctgcagcaatatggaggggtttctggtgtagcacatatgctaaaaaccgattcggagaagggcattagtggagatgactcagatttgatagcaaggaaaaatacatttggttcaaacacatatcctcgtaagaaaggaagaagttttttggctttcgtatgggatgcttgtaaagacctgacgctaatcatcctcatggttgctgctgctgtttcactggcattgggcataacaacagagggcataaaagaaggctggtatgatggagcgagcattgcctttgctgttcttctagttgtatttgttacagctatcagcgactacaagcaatcactacaatttcaaaatctgaatgaagaaaaacagaacattcgtttggaggttgttagaggtggaaggcgaatcacagtatcaatatatgatttggttgttggagatgttgtccctctcaaaattggtgaccaggtccctgctgatggtatccttatcaatggccactctctttccatagatgaatcaagcatgacgggagaaagtaaaattgtacacaaagatcaaaagtcgccatttctaatgtcaggttgcaaagttgccgatggctatggcacaatgctggtaactgctgttggagtcaacactgaatgggggttgctaatggcaagcatatctgaagattcgggtgaagagacaccactccaggttcgtttgaatggtgtcgctactttcattggaatggttggactttctgttgcccttgcagttctggttgtacttttggccaggtacttcactgggcatacttataatcctgacggatctgtgcaatatgtgaaagggaagatgggtgtaggccagacgatacgtggagtagttagaatattcacagtggctgtcactattgtggtcgtggctgttccagaaggactaccattagctgtcacactgacgcttgctttctcaatgcgcaaaatgatgaaggacaaggctctggtcaggaggctttctgcatgtgaaacgatgggttctgccacaacaatctgcagtgacaagactggcaccttaactttaaatcagatgactgttgttgaggcatattttggtggaaagaagatggactcaccagataatgcacaaatgttatctgctgatgtcacatcactgattgttgaaggaattgcacagaacacttctggaagcatatttgagcccgagggtggtcaagaaccggaggtgactggatcacctacagaaaaggctatattgtcttgggggctaaagctgggtatgaaattcaatgaaacaagattgaagtcatctattcttcatgtatttcctttcaactcagagaaaaagcgaggtggggttgcagtgcacctggatggccctgaagtccatatacactggaaaggagcagctgaaatcattttggattcatgcacaagctggcttgacactgatgattgctgaattcaagaaattcattgaagatatggctgtggctagcctccgctgtgttgcctttgcctatataactcatgagatggatgatgttccaaacgaagatcagagggcagagtggaaactgcctgaagataacctcattatgcttggaattgtgggaataaaggatccctgccgtccaggagttcgagattctgttcgtttatgtcaggcagctggcattaaggtgcgcatggttactggtgataatcttcaaactgcgagagccattgccctggaatgcgggatacttgatgatcccaatgtgttggagcctgtcatcattgaaggaaaagcattccgggtgctgtcagacttagaaagggaggaagctgctgaaaaaatatctgtgatggggaggtcttcaccaaatgataaacttttacttgttaaggcactgagggcaagaggtcatgttgttgctgttactggagatggcacaaatgatgccccagcactgcatgaggcagatattggtctatcaatgggcattcagggaactgaagttgccaaggagagttctgatattattatcttggatgacaatttcgcatcagtcgtgagggttgtcagatggggtcgttcggtgtatgcaaacatacagaagtttatacaattccaactaacggtcaacgtcgcagctctgataatcaatgtagttgctgccgtcagttctggaaatgtgccgttgaatgctgttcagttgctgtgggttaacctaattatggatactttgggtgcccttgcattggcgacagaaccacctacaaaccatcttatggagagacccccagtagggagaagggagccattgattacaaatatcatgtggagaaacttaattatcatggctttgtttcaagtttcagttctcctcactctcaacttcaagggaataagcctcctgcagttgaaaaatgatgatccagcacatgcagataaagtgaaaaataccttcattttcaacacatttgttctctgccaggttctgcgttttagcttttgcttagaaaagatgtttctgcctttttgtctaatgcggctccggagctttatacaacaaacgcagtagtggcctgacatgtgtaattttgtcttcttaggtgttcaacgaattcaattcgcgtaaaccagatgagctgaatatattcaagggcatttcagggaaccatctgtttattggcatcatagctataacagttgtactccaggcgcttatcgttgagttccttggcaagtttgcctcaacggtaaggctaagttggcagttgtggttggtatcgataggtcttgctttcttcggctggccgctggcattcgtggggaagcttattcctgttcctaaacgtccattgggagaattctttgcatgctgctgtatctgcaaggggagcaaacaagcccctgatgacgcaacctctaatgataaggaagacaacaagcccgagccttgagatgtcagcaagattgatggttgctaacaatgaccttgtgctgtttcttaccgggttttgacgtgttggatttgtgattaccactgattgctattgtacttcaaacaggaaggctggaaatgcaactcggcttctcatgagaccttgtcatttgctgtagttcgttcgcaactgtatattgtagcttggaagactctgtgccgtggtgcgtgtatttgagaaatttctatgcaaagtgagctggcgataacattggatggcgcagcaaagcatcgcgcgcagtgtttcctaggcatcatccagtgcggctcgtggatgcttttcgtgggtggagctgcctgtgttcgtgccatagcatttgacgagtgggcgcccgctgtcggctttgtgccttgaagcctccgatgcagagaaaacaaggtgagttggaacccgagacgtgtctgaccagcatggcccgtagaaaagtttgccccggccggctaaaatttcccgtgctcgtactttagccgtgcacttgtgcgtccatgtccgtacgtaccgttacgtgaagccgttgccttctctatatttcttgtcagctgtccagtgtattacacgcatgcgcgtttcattgttgagccccacggggccgaggcgacagttgacagcag

SEQ ID NO: 35066 - DNA, 3489 bp, Zea Mays
ttccgaattcccaaaccgggtatacgctcatcggttcctcggcgctcgcctcgacctccgactcgaagcggccctcctccctcgccggacgacggcgacggccgtggccgtctaacacatccgtggggaaccgctcccttagttgggcctcctccggccatggtgcacagcgcgtacgatgctgtcgagctggtggctgacgtgccgggccacatcgaggccgtcgcctcccacgctgggaagctcctcgtcgcggtttccgacaccgaaggcttcctctggggctccgactgctccttgcgcatctactccgctccttccccctccgacggcggcggcgagatccggtgggacgggccctacgcgctcgagcggcaggagccgcggttctggcggcgcccgcccttagccatggaggtcagcgccagccgcgacctcctgatctcgctctccgagtggatcgcgctccaccgcctccccgggctcgagaccgtcgctgtcgtctctagcaagacaaagggggccaacgtctttgcttgggacgagcggcggggcttccttgccgtcggtcgacagaagcgactcaccgtcttccgcctcgacagtgggcgagaatttgttgaagtgaaggaatttggagtgccagatattctgaaatcaatggcctggtgtggtgataacatatgtcttggaatcaggcgggaatatatgataataaatagcatgaccggggcactaacagaagtgttttcttctgggaggatcgctcctcctttagttgtgcctctccttactggggaactgatccttggcaagacggcagaattatttggtcagacacaccagcttctgttgttatacataaaccatatgccgtggcccgcctgccacgacatgtcgagatacgctctcttaggccccccaatgcattggttcagacagttgtgctccgtgatgttcaaaagcttgtccaaactgaccactgtatacttgctgctctatctaactctgttcatggtttgttgcctgttcctattggagctcagatagtgcaattgaccgcttctggagaatttgaggaggcgctagcattgtgtaagctacttccaccagaggattcaaatttacgggcagcaaaggaaagctcaatacacataagatatggacactttttgttcgataacgggagttatgaggaggcaatggaacagttttcagattcacatgtggacattacttacgtgttatctctgtacccatctattgttctgcctcaaacaaatattataggtgatcatgacaagctgctggacatgccagaattagcaagggaatcctccgatgtgacagatgagatggaatcatactctttacagcttcaagaaccagatgataaatctccattggaggtaaagaaaatgagtcacaatgctctagctgcccttgtgaagtatttgcagaagaaaagaagtggcataattgagagagcgacggctgaagtaacagaggaggtggtctctggagctgttcaccacagcttaaaattatctgagccatataagtcaaagaagctgagcaagaaacgagctcagacacatacaagctctattgctagagaaatggcaactgtactggatacttgtctgcttcaagctcttattcttactgggcagtcatcaggggcaatagagttgttgaaaggactcaattattgtgacctgaagatatgcgaagagtttttgaaggaaaggagagaatatatggttttacttgaactctataaaagcaatgaaatgcaccgtgatgctctccaactactcaatcaattagttgaagaatcaaaatctgaaatggagaatacatattttaataaaaaatttaactctcaaatgatacttgaatatctcaggcccctttgtagatctgacccaatgctggttttagagtcttccttgtacgtccttgagcgcaacccatcagaaactattgagctctttttgtctgaaaatgttccagcagatttggtaaattcatatctgaagcagcatgccccaaatttgcagtcaacttacttagagctaatgctctcaatgaatgatactgggatcaaccctaatctgcaaaacgagctggtacaactgtacctttctgaagttctagactggtacaagattctgaaggaagagggaaactggacagagaagacatattccccaacacggaagaagttaatatctacgttggagagcaattcaggttacaatacagacgcacttcttaagcgccttccccaggacgctctttttgaggagcgagctatattgtatgggaaaataaatcaacacctcagagctctctctctctatgttcacaagcttcagatgccagagcgagcagttgcatattgtgaccgtgtttatgaagaaagagaacaacaaccgtccaaatcaaatatctattttaatcttctacagattcatctgaacccaagaaaagctgaaaaggaatttgagcagaaaattattccagttgcatcacaatactctggaatccaaaaggctagtgctactaagcccaaagggggtcgcgtaggtaaaaaggttgtagagattgagggggctgatgacatacgctttagccccagcggaacagatagtggccgaagtgatggtgatggagatgatgtaaatgaccgaggccctataatgttaaatgaagcactggaactgttgagccaacggtgggacaggataaatggtgctcaggctcttaggctgttaccaagagatactaaactccaggatcttgtatcatttcttgagccactattgcgtaactctagtgaacatcggcgcaattatttggttatcaaaaacttgattttgcgggcaaacttgcaggtcaaggaggatctgtataatcggtgtcaagctgttgtgaagattgatggagatagtacgtgttctctttgccataagcgtgttgcaaatagtgcttttgcaatatatccaaatggacaggctttggtgcattttgtctgctttaaagaatcacagcaaattaaggccgtcagaggagcaaactctgtgaaacgtagataatatggccgtgatccaggtttggttgatgccagcttatggaattccctctctttggcttcacactggattttagtggactgcttcagaagtttttactggagtaatcttcactctcttcagagatcgagtttatagccgtgcgtgtgtgctcgctctctgttttctggccatcgtactggaaaactggaacccctttcttttggttttcatgtacagaatgtaaatgatactgtaaagtttcggttaacagattgatgatggtcttgattatagtgccgcaatgtgtgctccaaataggtttggacattattattattggatccatgtcattataattctctaagttttgaatggcgctattataattcgtatattcggaggtctacca

SEQ ID NO: 35067 - DNA, 2287 bp, Zea Mays
tctcagggattgaggggaattcgaaattttccaattgcggtcctttgggaccgaaggtcggaagaaagatggaatgcagattcctgctagcgacaaagtatacgagtatatcctctttcggggaactgatatcaaggatttgcaagttaagtcatcaccaccgccgccgccacctcaagcagcttccctgcacaatgaccctgccataatccagtcacattattctcaaccagcatcaacatcgtcaaatttgccttccgctgggggtgcagttttaccagacctcagctcccaggcagttcaatatgggcttcagaggccaacttttcagagtaaccttcctctataccaaccagggaatgctccacggggctcttcagcggcacctccagcaggaaatgctccgtggggctcttcagcagaacctccagcaggaacgacactttcggttccctcaatgtactggcatggatactatgcgccttcaagtgggctgccacctcatttgcagcaacctctgctgcttcagccaacaccaggattgtcagttccccagaatcttcaatatccaggactaaatccttctttgccatctgggatgcaaaagctgtcagaactccaaccttcattgatgccacctattaatagtcaaggttcttcaggtatcctgcctactacaacagctcctgcttctgctaccttattagctccagaaagctcaaagcctcaggtgccaaacatgggatctttgtttactcctgcaacatctcttggtgcaacttttccttatccaagccagccaacaccggtggctgaaactagtgcaacagtgtcacagaacataacttcatttagtagcaacaaggctactgctcttccaggctcaacactgtcataccaaactgcatctcagtctgtttcttcgactattgccccatctagctcagcacaagtggagatggctgtgcctttgttggcatcatcaggtcaactattgcagaacacatcatccatgctttcatcatcacactcgatgcaggcaccattacaggtagctagcaaagaagtcaagccggttgagccaaaggctaaggttgcagaaccattactgcctgaccctttgctaccagacccaccatcacagtctctgcctgaaaataaggagcctatattgccattgcccaaacagacacctcagaagttttcacagtcagtaacaacattcactgaagaatttgatttcacggccatgaatgagaagtttaacaaagatgaagtctggggtcatcttggaaagaaatcgcagtcaagggacaaggatggtgaggtgggagatgatgtgtttgatgaagacctggaggttgaggaaactgataacccagagctatctgttaagacttttggcgaatttccacggcacaggcaaccctaccgtggtggcgcccgaggttaccgtggcggtggacgttcccgaggttcatattatggtggcagaggctatggaaacacagggaccggaggctatggaaacacagggacaggtggccctggaaattcttattctcaccggggctatgggagagattgattatagcagaaatgtgcaggcaaccatacttgtgggtgttgtagtcttttaccacatgtatgatgtatcccttactactggtgcagcggtgagaagtcgttttcccactgagccgagccaaaggtttaatgggctctaaattttacactataagatttaaggattggattaggatcggactctatttctattcatttttaactaaaatttatttagggccctaccattctgtgaagaatcatttggatcctaatcaattaccacccctaggttttagattcaacgcagcaaaagaatgtagatgtaagacttaccttgttattcccttggagagtgcactcgtgggagtcgccagcactaggtctgcgagtctgtccattatgcatcccttaatattcaacaaataaatggagcttaccagcatgtcacttgggtgtgccttgtccagacaaggcgtgtagcgtttggtcattgacgtggtacacccgtgttctgtaggagagttaccagtagatgagcggatgatgctggataggtataagcttgtggcccttgatgtgtataccttacgcttgggatttagttgtataggccgatctcgatgcaggcatgcaacgcctggcctagctcagtaactttttcctttaacaaagttctgccatgttgtcttttgtattggtgatagtgtaacttaaaaat

SEQ ID NO: 35068 - DNA, 3332 bp, Zea Mays
ccgagagaagcgagcggaccctaaaagagaggaagaaacctgctggcttccttctcgtccccaacaggcgtccccaagactccaacttcctcgatctagccatgtcgtccgcgccgcctgcccaccagtccaagccttccccccaccgccggcagcaccacaacctcggaccgaggtcgccgccgccgccgccgccgcagtcccagcgctacgtacccaaatccgccccccgctgcggcgccaaaaccctcccccccgtcccagccatcgctcactaccgcgctccgatcatcggccgcctcgccctcctcgtccggctctggcgggagctccagcggtagcgtaggtgtccggtcggttgatgcattcgtcgcgtatctgccgcatgacgaggcggtcgcggcgggtctcggcggcctcgatgcacacgagtcgcaggtcgtcgtcgaccacctcaacgacgcacttgccgcgctccttcgggccaagcctcgcgagttctggctccgggtggcacagaacacttctttgcatgaattccttgatagttatctacaattcaggcacaggtggtatgatttgccacaccgaggcccaaagggaactgtagcaggtttggttgttggggagcttgagctttgccgtcgtgtatttatggtcctctatcatcctcgaataaggatcctggagcaggtcgcggcgagtcccttagcatgaaggagcatgcagcccttctgctggagaaaaaattgcttgatctaccaaaattgttggacatatgtgctatatatgagcatgacaacggcaagttaacaagttcactggttacgaatgttattaatgtgcagccgagtgtactggatgacattaatattgtcattccccagttcctcaacattttccacacgatgcatgataggtgcatgacatctttacaggtgctcacctcaaccggatcaattgataatggatatgttcagcttcagaaagatttcatggaggtgttagattttataaatgatgcgattgttactctggattcttttgttggtgcttatcaacctgccgctttattgttctgtactaattttgaaatgagctatggagttgaggaattgctgaatgctcttgcaaggctgtatagttcattgctaccatcattgctccatgggtttaaagttatgcccaagtctcagagcaatgcagaggcatcacttgacagcacacttagtgacattcctcttgctataaggatgttgtcaaagagaacagcgagatttggttggagattgttgcactactgttatttgaatgatcaagttagggagcatgatgctcaaacttctactaagatgtttccagctaaagtcgaagatcctatgatcaggggagacatcttggttcaaacacttaaagatataaatagagaatccacttactcttctcaagtgaatcatggaaatacttttctccaagaacttgaaagtgaatttcaattaatgagccagattggtgatattcggaacaaaggatggatatacatggatgatgagcagttccagttcttatcacgattgtgtggatctactcacacttcttggaatggcatatctgatttgccagtctcttctcatggtggtgaattacagcagaaggatgaggaaacagcgatggttgagtccaaaattagtcagataagggatcttttccctgattatgggaagggtttcctttctgcttgtctggaagcctacaacctgaaccctgaggaagttatccaaaggatattagaaggaacacttcatcaagatctgctagctttggatacttcattagaagagatgccacacgaaaaacctgcaccaactgctgtgaaagataaagggaagggtatattggtggaaactgtgcctcaaattacaaagaaaccccataaagttgctgagacacattactttgttcaagatggcctatcttcagcaacttcatcagcatcacaaggtccatcttctgcaatttcaccagcatcccttgggccatcttctgcaatttcctcagcattccagggaccatcttctgctatttcatcagcatctctgggcccatcctcatccatatcatctgtcccaaaaggtagatttacaaggaaggccaatgatgatttgccggacactgcaatcctggactcgaaaaatgctaaaaatgcagctagatctgttatccttgactcgcaatatgagtatgaagatgagtacgatgattcatttgatgatcttggcttcagtgtggtagagtcaagttatgaggaaactgatggtgtcaatgacgctgaggcttcatcacatggcccaagatggagttcacagaagaaaccacagttttatgtcaaggatgggaagaattatagctacaaggttgctggttcggttgctgtatccagtgctcgagaagcagctgtcatgaggcaaactcaaaaagagacaatctatggtctgggtcgtggtggaaatgttccttttggtgtcccgaacaggcaacatatagatgtggaggcagaggaggttggtgatgctgacaactcaggcagaggttcaaattcccgtggccggggaagaaaaggcggaagggaaggcaaccgtccggaggagaatgagagctccaatggacgaggctctggctttggtggtaaaagaggaggctggagtcagggcaatccggctgaggaaaactggaaccctaatggtcaacaaggttttggccgtggtggcagaagagggggctggaatcagggtggcccagcgaaggaagacggtaactctagtggcaggcaagaaagttttggccgtggagcaagacggggcagcatgaaccatgaccaatcagccgaggataatgaaggccataataatcccgcacaagactttactcgaggaccagctcctcgtggtggccatggaaggggaggtggccggaaccatcacaggagagatcgggcaatgaagaagcatatgcaaggattgacagggctttagctgctggtagccttatgcttttgatgtgccgtactgtaaatggcatttttggaggcactcctacttgaccatccaaatttttgtgcttgttctgtttttaaatcaaataacgccatgaagtaacccacatatgttctcgtaacatttgtgattgccctaaaaagggtaatagtgtatgtagttctaaacatgcttgtaactcgttaaatacataattaattctctagcgactgaaaagaaaaatcatgaaaccaaaccaattttgttagctttttttgtcatgtgctatccagtaaaaca

SEQ ID NO: 35069 - DNA, 652 bp, Zea Mays
cgtggctgtaccttactgcctttacctttgttactgcttgctattgaacagactatattaaagtcttatttctcaggcacgaaagatgcaggatagcggatggaagcctcggtggtttgcaaaggataaagctactgacacataccgttacctcggtgggtactgggaatccagagaaaagagcagctgggaaggctgccccgacatcttcgggcaagaccctaacgatctgatgatagctgactaggtttgagtaggttataggtcttttggttctctttttcgggaacgcataattccggaaatttttagtggttcatattatagagcaattaaatggccgttgatatgtaagcattggcagtgcctcagggagtattgatctcgtacataataattagacaatggttcgtctcacatgtcaccttatttttttggcaaagtatttttagccctcttgtgaggttttcacgctcacaagttcagtcttcagagtggtggtataaggtgggcgatcagtgattcaccagtatatggctattattattatataaatgtagtcttatactggatatgtaactacacatacaagtgcaggagggcgtgactttgttcatcattttggtggagtgctagtaaagatattaagctg

SEQ ID NO: 35070 - DNA, 3166 bp, Zea Mays
atgacccacccacccacagccacacaggccgagctgaagggagggggactgcctgcgggctgcggcttccggcgcaagatgccatgtggactccggatgactcgaaagtccatccatctcctctctatctctctatctatctatttcacgcctccacggctccacggctgctgccagcctgactagtgaggtgattgccgcagcggcggtcggccagagcgcgtgtgctcctccccagcataatcccaccaccatcgcgcacccgcccacctcaagcgagcggccccaattcccagccaccgcaagtggcttaaccctcgctcccgcacccccactcttccaccgcacgcacccgcgcgagcgagtgcggcagatcgcggccggccgctgggtccggtgcagttccgggctgcggcgccgggccacagttgatgcggacgatccgaggaggacgggacgggatggcggcttcggcggcgcctgggtcggctgggaggcaggcgcgcggagtcgcggcagcggcgaccggaaacgcggtatttaagagtggccctctcttcatatcatcgaaaggaattggatggaaaacgtggaaaaaacgctggttcatcctcacacgaacatcactggttttcttcaagagtgatcctagaagtgaagtgaaccttacattgggaggaattgaccttaataattctgggagtgtagtagtcagggaagacaaaaggctactgactgtcctttttccagatggccgtgatggccgtgccttcaccttgaaggcagaaagttctgaagatttgtttgagtggaaaacagcgctggaagaagctcttgcacaagctccaaatgcagctcttgtgatggggcataatggaatatttcgcaatgacacaacagatgtatatgaaggggctattccgaattggggaaagaagagacctatcaaatcaatagttgttggcaggccaatactgcttgcactggaagatatagatggcagtccttcttttctggaaaaagctttgtgtttccttgagaaacatggaatgaaggtggaaggaattttgcgtcaagctgcagatgtggaggaggttgacaggagattgcaagaatatgagcaaggaaggacagaatttgcaccagaagaggatgctcatgttgttggtgactgtgtaaagcatgttctccgtgagcttccatcttctcctgttccagcttcgtgctgtacagcattattggaagctttccgtctggaaaccaaggaatctcagatcaaatccatgcgtgcagcaatatctgaaacatttcctgagcctaataggcggctgctacagaggatgagcactttaggtgctccttatcacctgattctcaaacaggagatagtggaagtgaagaatcaactgatgacgaaactgtggataccaagggtaatggatttcatgatgcggaaaatgatgtagatcaagaattagatgatgccgagcgaatgctgagtggaaaattcactgaaaccagtgcaagtgcttgtgctgacctctatgaccacaaggaagttaatggcaatagttcagacactgagctctttgttgaggatcacacatttgaatcaaatgtagatttaaatgatgctcccctaagtcgtttaacagaaaatggaaagggtccatcaaatctgatgtccgctcatgaaactccattatcagtgggagagattcttctgtctttggatgctggaattccattaccttgtcgtgcagctgaatattctagcaaacccaatggaactcagcagcatgtgaagcgtactaacttatggggatggagcaatgtgagaaagggccaacgatcggagttagttgatccatcaggtgaagaagagcttgctattcaacgacttgaggtaatgaagaatgacttgcagatcaggattgcaaaggaggctagaggcaatgcaatcctacaggcaagtttggaaagaagaaaacaagcactacacgagcgtcgtgtggctctggaacaggatgtgtcaaggttgcaagagcagctacaggctgaaagggatcttagagctgcactggaggttgggctaagcatgtcttcttcacaattttctagctcactctccatggactcgaagacaaagtcagagcttgaggaaattgctctcgcagaagctgatgttgcaagattaaaacagaaggttgcagagctgcatttccaactcaatcaacagcgccagcaccagtatggctcttccgtagatgcaaatgatcatcctcaacaccttctaaatcatctctcgcagaacattgtccaaacaggatttgataggagcgttgctttctgtaatcaagagaagcaaagaaatgaggagagcctgccgagcacatcccactggagaagcatcaaacagcatgtgctatctcatggttcttcaaggcctttctcccgaaagcattcctcggacacctccttgagtgattctacaagtgtgcctgcagagggcgggccaatgttggtgaacatccctagaacaacgaaaggtgtcgaatatgggagaccgccgtctgtgtcgtcatccactctggttgaactaacaaccaggctagatttcttcaaagaacggcggtcacaattgatggaacagctccacagcctcgatttagggcatggatccacgtcccatggtttcccatacaaaccttcatctccctggaacagcccaaagtaaagtaggggatgatcatttgctgcagtacgacgtctctgtatattcttggtatagaatctcctttatgtttcactccatctttgtagagcctggtagtgagaatgtatatcccttgccttcacttgttttgctagtgcttgcagcggatctttttttagcatgattttgttttactgtatatgtaatgagttgaggagattgtgacacggcttttatatgttttagcaattttgttctattgtgtatgtaatgagttaaggggattgtgacacggtttttatatgttttcgcaatatatagatgcgtcttttttcttggggatatatagtccactgcaggtggagctactgttgtcatttcgaaaacaatgtggctgatccttgtaggcagctaattctctcccccaaatggattggaggaaacgagtgg

SEQ ID NO: 35071 - DNA, 273 bp, Zea Mays
gggatggatggatggatcgcgcgcgattggacggcatcgatcgggtcgtgtcctcgtgtgagtcagtcgctggtggtccgtcaacgcctccacgccgtgtacaatggtctcgtagacgtggcactgccatgaaacggggcaaccggacgccactgtgctgcgcgtgacctatagattggtacctcagcagtagggacagacggggcgaatccagcgccaattttgccgtggtgcaccttaatggctttggaagcgataaaaccagagatggtt

SEQ ID NO: 35072 - DNA, 1096 bp, Zea Mays
tagcgcgtgcgtgcgtgcgtattttgcgcgaaacgaagaggcgacagcggcattgattggagccgtgcgagttttaaacgcccggccgctacacccgcacacaccaccaccaccactactaccacagggtcaggatccgatgccccattactactttggcattagcagtcggtgagaagcggggagagcagcgcgagagagggcacgtacggtggttcgttcaacaccctactagcaagctcagccctagtccggagccacggcgcggctagggagccgtgcccggcggccgtcgtcgccgcgcgcgtgcgccgccgcaccgagcgagcagggatcgtggacctccacagggacgtgcagacctgcgggtaccacgacgtcgaggtgatgtggggcatgctgggcctggacgccgggccgcccagcgcgccggagcgccggaaccgctcgccgccgttctggacctggacgccgtccttctggcacttcgggtcgtcgcgccgcacgcccacgcccacgcccacgcccgccgcgcggtagatgatgatgactaggcagtgtctgtgtgggcctctggggcttatactactgtcagtttaatttggctaggaaatgcatggtgctggtgtgacagtgtgtgtgctatgcatgtgtgtgcacggtgcacctttactcctactacgcgttgtagagagagagagagagaagaaaacgcacataaaaaaatcagctctaattccccatgtttattttgctttgcgttctgtggttctgtccttgttcatgcatgtgatggctggtcgcgagggacagacatggcgacatgtttgtcagcggtgtgcaaatggcggagcgttcttttcattactggaccctgacctcactacaaagtttgatgtgagccacagctctgtaccaacaggaacctctggtcttttcggcaacaaagtaacgtgacgccgatgcgtgaggaagagcctctcgagtagctccaaaaaaaatagcacgtactaaaatgtaagatttttttggagtggctagtcatgtccgtgtattaccatggtttatatatatcccatcaatactgtacctcaat

SEQ ID NO: 35073 - DNA, 1183 bp, Zea Mays
cctgactaccaggtcgaagtgctatacaactagtacggcatacgattcgtccaccacactagcgcatgttcttgtggctcacaggaacttgtcaggtgcggcgaggatgaggatgacgacatggaggagcacgcggtgcaggtgctggtgctggcgcacgcgtaccaggtgccgtggctgaagcgggcgtgcgagggcgccatcggcgcgcgcctcaccgcggactcggtggtggacgtgctgcagctggccggcctctgcgacgcgccgcgcctgcacctgcgctgcgccaggctgctggccaaggagttcgcggccgtggagcgcaccgaggcctggcgcttcctgcaggagaacgacccctggcaggagctccacgtcctgcagcgcctgcacgaggccgacatgcggcggcgcaagtggcggcggaagcgcgcggagcagcgcgtgtacatggagctgagcgaggccatggactgcctggaccacatctgcacggagggatgcacggaggtcggcccggcggggcgggcgccggcgccggcgccgtgcgcgcgctacgccacgtgccggggcctgcagctgctcatccgccacttctcccagtgccaccgcaagagctgcgcgcggtgccagcgcatgtggcagctgctccgcctccactccgcgctctgcgaccgtaccgaccgctgcaacaccccgctctgcatgaggtttaagcagcaggagcaggataaggcggctgccaagggcggcgatgatggcgacaaatgggggcttctggtgaagaaggtgaagactgccagggtcttctcttctctggccaacaggaagcagatgagcaccaccaccacccagtgctgaggagcagcctgggatgcttaggggtcaaagttagattagtgagagagaatgaagcgagcagtttttttttgggtctgttttgagatgtcagatctcttttgagatatgtacatgtacatgcctactttgtcaccctacgttggtatagctcttttatcgaggtgggagttggtcagccggaagtctatgtaaaaagtgcgcatgtatcattatataataatagggaaatatgagaagtattttagtcttatgatacctttcagtattatggtaccctgacaaaaatgatcaatccaaaacgacacgacgcagaatggac

SEQ ID NO: 35074 - DNA, 1037 bp, Zea Mays
acctgaaattagcagaactccacaaatgaatagtgccatctgctgaacctgtagttatatatggagtgtccggaagggaaatgacagaaacaactggcgacatgaaaacatccattgtctggacgcattccttttccttcaaggcccatgcctcatttgacaaaaatatagcatggatcagtagcaattgttatgcgcggaactataatgtgtctatacacacagacaacatcgataccttggcagtacagtcttgagatccactaatcaaatattgctgaccatcatgtgtgacgaaatccaagcaattcactttgtccgaatggccgtgcagagtacactctgatgtgggagatttcaggcaccaaagctgatgtacatcaaagcatagcttattaatcacactatcgcacagtcattgtttcaaaggaaattaattacacttatcttggtatattttctttatcgaacttgcaggagaactgtgcatcttataaagagtaaaaaggcttacaaagcagcgaaacctgctaaatagaagcataaacagagggggggggggggactacattttggcaccaaccataacccaacacactaattcatccaagaagcttctctgcagccttgctaaggaaggaggttccccattaaaaaccaccttgttacgatgaaaaccatcttggtatattttgaatgttgtgttaattcaatataagaatcaaaacaagggagagaggctcaaacctttattgtgtgatcacttgaaacactggcaaaactgtcatttgggctaaatgccacttgaagtatggaatcagtgtgttccctaccaaatttttgtatgcacttccaatcatcgtcccagtcccaaagcttcatttcttcacaggtagagagcaaatatggctgggttggatgaacgataagcgctctggacgagcaaataccccagtctatgatcccagatgagtatgctgtataaatgagaaaatggtccattatgtaatactttttactatcattatttggagact

SEQ ID NO: 35075 - DNA, 10922 bp, Zea Mays
atgcaaacccctcgtccctcctacgcgcaccaccagctccagcagcacctctcctccctcctttccgccgccgccgccgatcccccgcacccctccgacgatgcctcccgcaccgccgccctctccaacctccgtctctccttcctccacccacctaaccgccccctgttacctgccctcgctcccttcctcgccccgcccctttcggtcctcctcgccgacgatgcgtcctatgccgtgcggcgggcggcggtatcggcgtacgcggcgctctgcgcggtgctgtgctcgcacgaagcgcccgggggcctgccggacgggttcgtcgcctgggcactgccgctcctgggtgacccctcctcagctgctctcgtcgccgaggggctccgggagctcctgtccactggggacgtgtccccagtcgagaggttcgtgccgcctctccttgcagcctgccgtgacgtgctagaggatgagcggatgtcgcccgctgtgctccggtgtctgctcagcctgcttatgttggttgccgccaagtttccccactgcttccgtccacagtttgttgatatcatggacctgcttcttgggtgggcgtttgtgcaggacctagctgatgcagatcgcagcatgatcattgatagttttccgcagtttcagtggcattggcttgggaatctgcagttttcacttggattactgcccaagttcttggccgatatggaggggcttgtgcatgatctcaacctgggaggcagccataatcctgggaggcttcgttcgctgtttgcttgtttctctacggtactgcagattatgtcttctggtgtggctgagcgaaataacctaagagaacttgtagctgggcctctggaaggtttagctcctcaacttttaaggtgtgcatcagtgatagcctctaaccttggctggtctgagaggatggaagacgcatccaaatgcttggtcttgcttgcagagattctgcaggaaaggtttgctgatttttatgtccattttgtggatgtgttggtccagagcttggaagttgcctcctcggcacagttggcggcagcacttaagactaacctgcaagttctatcactgcaaaatttggggctccatgcagcttctgttggagctttgcttgacttcagttcaattttatctaagtcacgtcttcatccaaaccacagcgtggttgcaaactcagcagctacctacattttttgcttacagcatggattggaagatgtagttgatcaagcaattgcatcagtgatgaatgagttggagctgataaaatctctgctagcggaagggcaagcaagttgccctgatatccatagtccccccttagaattgaacagtgaaaggaaaaacgagtcgaactcaggtgtgcattgttggccacaatattcagaggatcagttgctttgcctaatgaaatttgatctcaagattcttctggcgactattgcactggatacaaaaaagagaaatgagagaacaactaacttgatacaattcatcttaaagaagcttgacccatttggtgcccctttccataatttccttgagatgcagtttcagattttctctacactacacaaactgagcaacatggaactctcaagcaatatgccagcatctgaaccatttgaaagagactctggaggttataaaacacagccggttgtgttagaaaagaagatttcttgtgaatgtaaaaagaagtttgtgcataaatatggcaaatacatagttcagggccttaatgcatcatcatctttgacactgaaattagaggctctagattggataggttcatttgaaaaattgatccatggattggagaggggtgtggataatttcagtttctcttatgaggtaatttgggatgctaccctttcgagtgatatcctttttgctgtcttggattgtgcatatgatagggagtctaaagtaaggtaccatgttgcaataaccttggagttactatttctgggaaggctcatcaaccccatgaatttctatgttgttgctcaggttctgctagacaagcttagtgatccagatagtaatgtaaaggatgcattcttaaggttattttcaatcaccttgcctatcacaacatatgcgtttggcttgtttgcagatgaacataattatcgtaattcctcagatattgttaacatgtccaaccattgcatgaactggaggcatgtgcttgctgtgaagcaacagcctaggaaactccactggcagcagcttgtttctgttttgagttacctttctctcagattgaagttacctctttcgtcttgggtgcaacggctggtctttagttaccgtgggaagaaagatacgcgttatggtcaaattgatatgtttggagatgctgatgggaatgaactccccaaaggccctggtgtggacagaaatactattgatataatatactcagtaaataatcatgctgctgtttggtggggaatccatgaagctgcccggcactgcattaaccttcggcttcgaactcatctaggtggtcccactcagacatttgcagctctagaacgcatgcttttggatgtaacaaatgtattaatggtggaagctaaggaagctgaaggaaggtatatagggccagctgacatttgcttattgccaatgcgtcttctattggattttgttgaggcattgaaaaaatatgcttacaatgcatatgaaggttcctttgttctatcacccccaccaaaagcaagttccgtgtttttccatgcaaacaaacgagtttgtgaagagtggttttcacgaatttgtgatccaatgttgaatgcaggattagctatgcattgcagtgatgcagtcattcactattgttcactgcggctggtagatctcagaaacctggctgcatcatctctcagaggcaatagtcacatgggtggggctactgaaagtcatgcctttagagagaggttagaagcagatgttatgaaagtcctccggcatgcttccctggcactctgcagatgtcatgaaacagatgccttagttggacttcagaagtgggctgcatcaacattctattcttactttgagcaagataatcaactagttcggggcgtatctgatcgcgacaatcgcttctcctggatatcaggattgatctatcaatcccaggggcagtatgaaaaggctgctgcacattattcacatctactgcagtcggaggaagcccttatctccatgaaatctgatggcattcagtacatcatagagcgtgttattgagtgctacacatccctttcagattggaaatgcttagagagttggcttgctgagttacaagtgctccgtgctgtacacgccggcaaacctttttcaggagctctaacaagtgctggcaacgaacttaatgctatccatgcaatggcgtgctttgatgagggggactttcattcagcttggggttatcttgacctgactccaaaaagcagcaatgagctcacccttgatcccaaggttgcacttgagagaagtgaacttatgcttttgcgtggaatgctgcgatgtaatagcaagttagagggcataacagaggagcttcataaggctaaattgatgttggatgaagcactcactgttgtcccactcaatggattgcctcaagctgctgcttgcgctggccagcttcattgcatatttgcattggaagaagccttggggttgacctcccaaaatggacttaatcaatcacaatcaataatggattctttactgaaagcactgcatgatcctgtcgataaaatgcatcaagattgcaacatgtggctaaaggtcttcaaagtgtaccgtaatacacggccatcttctttatccactcttcttctctgtcagaagcttgcaagtctttctagaaagcagagcaattttatgttggctactcgtttaaatcaatacctcatagatcatcctttgaagtcatctgatgagatggacaaggaaatacttgaattgaacattaagtatgaaggtgccttgctgaagcatgcaaatggaaataatgaagaggctctatctgatctgtggtcactggtccgagctagtgttctgtctagagttagttgttcatctggcattggcacttcacattcactggttgctagggcttgtttgaaactctcaacctggatggagcaagcgaactcaagtcctttaaattcgatcattccaatggtagtaaaagatttcagcgattctgatggatttcaagatggggcagagaaacttctatctggtgatagtgtatctgtttcgactttggattatcatgcacttgctcaagaaatcataggcactgctcgaaagatatcctggcaactttgccccactatgggtaaggcttggcttgcttatgcatcctggtgctttgctcatggcagttattctctgtctggaactgattcaaatttgcagaattcactgtcccctgttcttcagtctgaactctccccgagtagatgtcatttaacagatgacgagaaatctgaggtgggtgaaataatcagaagtatctgtgctgatgaacatgcaaatcatgtgggttgtgaatacccaatgacaccagggtgttacaattctgcaccagagcaccccatatctttacttgttgaacaggcaattagtttgatagaaactgcagctggagcaccaggctttgagtcccgcgaaggtgatgatccctctgcagttctagcatcagagctggtggttctttgtaaatgtgattctggaaaggacactgcacctttgattggcaagcttactgaaatatggtggtctttaaggaaaaggagggtatcactcttcggacatgcggcacatgcttattttcagtatctttcccattcatcaactgagcttcaatcttcatatcaccatgatgctttgaaagggaaaacaagaagctacactatgcgtgcgatgctgtatctacttcacataatgttgaactatggggtggaactgaaggaaacacttgaaagtgggctttcaacagttcctttattgccatggcaggagattatacctcaactttttgcacgcttgagttcccacccagagaagatagtgagggaacttttggagagtatattgctgaagctaggaaagttatctccttgctctattgtatatcctacattggttgatatcagtgcttgcgaaggagaaccctctgaggagcttcagcgcatatcggactttatggttaagctataccccaatttaattaaagatgttaagcttgcaattgaggagctaggtatgattactgttctctgggaggaacaatggctcagcacattacaagatctccattcagatgttttgaggagaatcaatatacttaaagatgaagctgtaagggttgctgcaaattctacactgagttcggcagaaaagaacaagattaatgctgcaaaatattctgctgttatgactccaatagttgtagccttggaacgtcgtctggtgtctacatctcgtgaaccaaaaacaccccatgaaatgtggttccataaagaatacaatgctaagctgaaatctgcagtcacaacccttaagatgccccctggatctccagcagcattaggagagatttggcaaccttttgattcaattgctgcttctttagccacacatcaaagaaggtcacacataatgttaagtgaaattgctccacagctagctgttttgtcaacctctgacattccaatgcctggttttgagaagatacttggttcctcagaatccttttctggaaaccatggcattgtaaccatatcttccttctgtaaagaggtaacaatactttcaacaaagacaaggcctaagaagctcatcttgcaaggatcggatggtcagaggtacacttaccttctcaagggccgggaagatttacgccttgattcacggataatgcaactgttggaggcaataaatagcctgttgtattcgtcttccgacactcgaagtcgaaatatcacactacggttctattccgttacaccggttagtggacgagctggactgatccagtgggtggaaaatgtaagcagcatatacaatgtgtacaaatcatggcaaaagcgttcacagttggcacatgcacatgcagaggcacaagtatcttcagttagcactggtaacattcacaaccctgttgcacctgttccccgtccaagtgacatgttctatggaaagattataccagcactgaaagaaaaagggataaaaagggtagtctcacgaagagattggccattagacgttaaaagaaaagttctattggagcttatgaatgagactccgaaacagattctgtggcaagaaatgtggtgtgcaagcgaagggttcagaaactttaactccaaagtaaatagattctccaggagcgtagcagccatgagcatagttggccatatactgggtcttggagatagacatttggacaacattcttatggatttcagcaatggggatgtggttcatattgattacaacatatgctttgataaagggaagaggttgaagattccagaaattgttccattccgtctcactcaaacaattgaatcagctttaggattgactggcgtggaaggtgtttttagagttacttgtgaggaagttatgggtgtcctcttgaagaacaaagatattatcttgatgttgttggaagtatttatttgggatccattgattgagtggacacgtggaaatatccaagatgaagcaggaattgccggtgaagagaagaaaggaatggaattagcagttagtttgagcttgttctcttctagaattcaagaaattcgtgttcctttgcaggagcacaaggatcttttcttaactaatttgccagctacagtatcgtctctaaagaaattcttggatattttagatcagtatgaggttgcatcggctatattttatcatgctgagaaagagagatcaagtgttttgcagcatgaaatgtcggctaagttggtcctagctgatgctacatcgggtgctgagaaatctcgcacttcatttgaaattcatgctcacgagttagcagaagcaaaagcggcggcagttgatgaagctaacaagcttgcaatatgggtcgaaaaacatgcactggttcttgaggctatacgggagaactctgttgcgtgcattgagtcatgcatgcaattgaattgtaaggacaagacattgagccttatttcagccgtcctagaatcaggggtcccacttacagttgtaccagaaccaacaagagcgcaatgctcggaattggatagggagatttctcaattattatctgagttacagggtggactttcctctgctttagactcacttggtgaatattctttagtcttgaagcaagttcttccggttaactacatcacaaccagtccggttactagttgggcgcaagtcttgcagcgatctgtaaggagtacatcgcaagatatgctttccctggctaaaatacaggctgcagaagtcattgctaaggttcaaggtgaaggcattaatctggtgcaacaaagatatcaggatctcgtaaatcaaatggaaagttatgtttcatgtgtggagaaacttgcgagggagtgttctgaactgatgaattctattgggttgaataacgaagtgcaatcaaaagagcggatactttctgtattcatgaactctgttcagttgccttcacaaaagaaggatggtgatagtactcatttatcgcattcaggaagtcctcagcagggtgagatcaaaactccagccaagggcgatgtacaggagacaacaggtaaggtcctctctattcttgggattgctgtgagtcagctatatggtgatattagagccaaagtgtctgaactctcaattaaagctattggaaaagctaaatttaggacagatgattctggtcttcaagctgatgctggaatgagcttgcaagtatttgaacaacatatagaaaaatgtgcattaatttctggagttgttgatgaagtgcatgaagttattgggagaaccttagcagaaacaagtgctgcttatgcaaagcccagtcctaggcactgggcctctacttttcaggcagctttgcactcaagcatcaacttgattgaacaaatgactgaagcttttcttccagaatttatcagatcagttgttccacataattcagaggtaaaggaaaccgtcaggtcaatttctgaggtacgtggttctgttgataatgctctagagaagctgattgaggttgaacttgagagaacatctcttgctgaattggaacagaactactctgtgaaagttggcagaattactgagcagcaaatagctcttgaagaagctgctgcaagaggtagagaacatctatcatgggaagaagcagaggagctagcttcacaggaggaaatctgtagggctcaattggaacaattacatgaaacatggagacagaaagatatgcgtattttgtcacttatgaaagtagaagacaatatcatgaattcgctgctttcttctaaacagtatgtttcatctttggtggaccatgatcaggaaagtgagtttcattatggacaaattaaggccctcctttcaatcttcgcaaagccctttgctgacctggaatcgctggaccatatgctatcatcatctggcatgtttcctcacatagacaatcccatttccaatattaaagatgctttgtctttgggctcttcattgtctgacgtggtgtggcctttagctggcatattgaaggatcatgctttttttgtttgggaactcaatcttcttgattcggttcttgttttatgcatgcgtgagatttcatcttctcttgagcatggcattaatgccaatcaactttacatgactcttaaaaagaagcttgcgatctatgtggaaaaacaagttttccggtatgttacagaaaggattgctcctgcgctcaccctaaagttagatgaagaaattagcgctttgctgcagctgagtcaaggaataagagcatcagatcagcctaaaagagattctgctgccgttggaagggttgcattaatgcttgaggagtattgtaatgcttatgaaacagctagagctgccgggactgcagtttcgctaatgaaaaggcaattaaatgagctcactgaggctctgcgcaaaattattttggaaatagttcaggttgaatggctacatgatatttcatcgtctcatgcacagaaggtgaaggttttgtcacaaaatattcttagtgatgataagttcatctctttgatgttaaatctgagcagaagcaatttgttagataagatccaatcttctgtctcattaataacaaggtcaattgaagtcctgcaagcttgtgaaagcatttctgtttcggccgaaggacaacttgagagagcaatgggatgggcctgtgctgggccaaatacttccagtgcaggtggttcaacggcaaagggttcaggaatcccccctgaatttcatggtcatctattaaaaagaaggaaattgcttcgggtggttcaaaaagaggcatctgatcttgttaaagtttgcacctctgttttggagtttgaagcatccagagatggactttacttcgttcctgaggataaagcttccgaacaatcttcggacaaaggcagggcctggcatcaaactttcttgaatctcctggcacgtctagatgcggcatttcattcttttacatgtgcagaacaagaatggaaacttggccagctcagtctggaagctgctggaaaaggcctgttttcagctaataaccaggtttcagtagtctctgtgaaagcaaactctgctttagttaatctccaggatgttcttggtgccatgtatggtcatgcttgtgaagcaagtgcattgctatctggattcaaacatgtatcacaagactgcactgctttgacttctgaatgtggttcgttgctcgaggaggttttagctatagcagatgggttgcatgatgtatacactctggggaaggaagctgctgctgctcacagttcccttatgaccaatctttccaaggcaaatacaattttgtttccacttgaggtttgtctatgtgctgatgtaactgttatgtctgaagcgatttcaaacgaaagagagaagaacaatgctagtatgcctcttattcatggaaaggcattataccaatcttataatattaaagttagggaagcttgcaaaactttggaacctctggtgggtccactttctgacaatgcgaaggaactgcattccatggtaatgaagcttggacacctttcaagtcttcatgctgggaatcttcacaaggctctagaagttccaggagaaagggaatctatgagatcccaggatttgctctcaacacatcctgatcttttgcaaagtgattcatcaactgagaaggatagagcctctcttggcatggattctggctctccagatttggaattgaatactgacatttgtttgcaagatagatgttggatttcacctccagagcactcatatactagcagttctggatgtaccacagggttgacccagattaatccctatgacaacttagagaaaatagatgctcttatggatgatggggctgaaatagatggttctggttctactgacctggaaacaaaagacagtaatcaggaagttgaaaccgatttggtggtgggaagaattgaaagtgtggataacaacagtgcagcagccttcagacaagttagaggacaagaatgtgacaacagcgatcctaaatcctatggagactctactactcgagtgaccagagcaacaaaaattgcataccctat

SEQ ID NO: 35076 - DNA, 1363 bp, Zea Mays
ctgcgggtggtcaatgttatattttctcagggtggtggagagcgtgggtgaacaggtggacgagttcgcggcgggcgacgcggtggtgccgacgttcctggggcagtgcagcgagtgcgtggactgcaggtcggcgcgaagcaacatgtgctccaagtaccggttcgcggtgcgcccggggatgccgcgcgacggcaccacccggttcaccgacggccaggggcgcccgctgcaccacttcttcggcgtgtccagcttcgccgagtacaccgtggtggacgtgaaccaggtcgtcaagctcaaccccgccgtgccgccggcactcgcctgcctgctcagctgcggcgcctccacgggggtcggagccgcatggaagcaggcgaaagttgagcctggatcttcggtcgctatcttcggcctcggcgctgtaggattggcggtggctgaaggagccaggatttgtggggcgtcgaagataatcggcgtggatataaaccctgagaaatgcgagcttggaaagaagttcggcgtgacacatttcatcaatcccaaagagctcggtgaggagaaacctgtccaccaggcgatcgccgagatgaccgacggtggcgcggactactgcttcgagtgcattggactggcggcgctgatgaacgacgcgttccggagctcccgagacgggtggggcaagacgatcattcttggggtggaaatgcacggtgcccccctctgcatctctcctcacgagatcctccacgggaagtctgtcatcgggtccatgttcggcggggtgaagcctaagcaggatatccccattctcgccgacaagtacatgaacaaggagctggagcttgacaagttcataacccatgaagttggcctcaaggacatcaaccaagcttttgacctcctgctgcaagggaagagtctcaggtgcaccatatggatggacaagtgatgcaataaccagagttacgcatcggaacctgaagatgctatgatgcttccacctcgtttcagtgaaaataattgtttcatcagctgccaaaagaaatgttatatgtatcttaaattcgagttttccattccttttcttcacgtcatcactcaaacatgttaaaatgtgcccatgttttgatttttactgctttcaaaagttgtgactatccttatcttattagtgatattttcggaatttatctggcggaagtaggactgaaattaagcaggtgctatcgtgctagtgtaacaaaaatatagcatatatgtagcacatgagtagcaagaaaacattatgtaatatatcattgaggtgctacttgttagccatggacaataatgtgagtagtaaacaatatcatta

SEQ ID NO: 35077 - DNA, 2004 bp, Zea Mays
ccgagggaaaaggacagcgagcccggacagcccagcgtcaacgtcaggtgcccgccccgggcggttcccagtcccagtcccactcccaccacggcccgggccactgcactgcgccatccaaggacgactggacgaggaagaaaaaggatttcgaaaaagcgacgctgccgggtatatatacggcgccggcgccgaggagagaggaccccggccgatcccgcacccctgactgtcagccgcgatccgctcttgtaggctccctccctctccgacccgcgtctccctcctcccactccactgctcctggtctctctctctctctccttctcctccccccgtccgtggccggagatcgacggtttccattttccagatcgcagttcattcagttgctctgttacctttacacggtctgcatgcctctattgtgtctgcagttttgcgtgcagcggcggagcaggagagatggcgtcggaggccaaggacgtgggcatcctcgccatggacatctacttcccgcccaactgcgtgctccaggaagagttggaaacacatgatggcgtgagcaaagggaagtataccattgggcttgggcaggaaagtatggcattttgcactgaagttgaggatgttatttcgatgagcttgacagtggtgaagtccctcctgaaaaattataacattgacccaatgtgcattggacgtttggaagttggcagtgaaacagtaatagacaagagcaagtctataaagacatggctgatgcagatatttgaggaatctggcaatactgatattgaaggagttgactcctcgaatgcatgttatggtggaacagctgcattgtttaattgtgttaactgggttgaaagcaagtcatgggatggtcgctatggacttgttgtttgcacagacagtgcggtttacgctgaaggtccggctcgccctactggtggtgcggctgctattgcaatgctgattggaccaaatgctcctatttgttttgaaagtaaatatagaggatctcatatggcccatgtatacgacttttacaagcccgatcttgcgagtgaatatccggtggttgatgggaagctatcacaaacatgctacctcatggcattggactcctgctacaatgtattttgcaaaaagtatgaaaaacatgaggggaagcagttttcaatttctgatgcagattatgttgtgttccattctccatacaacaagcttgtacagaaaagcttcgctcgtttgtactacaatgatttcttgagaaactgcagcacggttgatggagagtcaagggaaaaattggcaccctatgcaggcttgtcatctgaagaaagctaccagagtcgcgaccttgaaaaggcatctcagcaagtcgccaagaatctgtacgagaccaaggttcagccaacaacattgatcccaaaacaagttgggaatatgtatacagcatcactctacgcagctcttgcatcggttgtccatagtaggcatgaaactctggccagaggattgttatgttttcgtatggcagtgggttgacatcaacaatgttctctttcatgattaatgaaggccatcaccctttcagtctgctaaacatcgcaaacatactggatatttccaagaagctgaaggcaaggcacgtggttcccccagagaaatttgtggaggcactgaaactgatggagcaccgctatggggcaagagatttcgtgacgaatcaagatacaagtctgctatccgcaggcacatactatctcacgcacgttgactccaagtacagaaggttctacgacgtgaaaggtgacggtgtcgccactgcaatgtccaacggccactgatctttcttctgcccgaagctgcaacaagtcaaataacagaggatatgcctgtccataccatgagtccacgacccacattgttgcaggatatgtgatccaagggcagtgcccgtagcatcctagcaggtgctaataccacccatggtac

SEQ ID NO: 35078 - DNA, 854 bp, Zea Mays
cctcggtcccgcccgccaccggccactcccgccgcgcccgcccccgccgcacccgccgcggccgtcgatccatcaggtcgcagcctcgtctgatttggtacggattttggcaagataccacgtccctaactccgctgtttcaaggataacaaagatggcgtcgccgcggggcgggttcgatgagcaagatcgccggacagagaagggcaccgaggtgttcgtcggcgggctgccgtggtcggccacagaaagcatgctcagacagggatatggttttgtgcggtttgcaaagagggattatgctaatactgccaaaaggcaaaagaatggtattgagcttcaaggaaagaggcttgtgtttgagctttcaatggatcaagatacagttttctttggaaatctttgcaaagagtggactttagaagaatttgaagaattgattcacaaggcattcaaagatgttgtttcagttgaccttgcaatggcttcaaatcttgattcttcaaacaagaagaatatcaatcgaggctttggatttgtgagattttcttctcatgcagtatttgccaaatattattgcctcttcctatgcccccgcccgccccggcctcgcctgccgctcccgcccccgcccccgcccactgctctgctggcgtggccgcccctgtccccgcccgccgcgaccaaccccgcccccgcgataaaaacataccctctccatcctctcctcttttcttcttcctctcctcttcttcctcctcccgtagcggcttcccccgatttcccccgatattgtctcttattagtactggatgatgagatgtgtcttattatgactatggatgagacttttg

SEQ ID NO: 35079 - DNA, 325 bp, Zea Mays
ggacagttcggctatgccggaagacctgtcggctggacgaagagttggtgcagatcggatcagcagcaacatcgaggtagagcgtgctgataacgtgttgagaactacgttaccgcggatcaccagatccgcttcattccctcccgtcagaagtagaggcgcaagaagatgtagaggatccgtctcccttcccataagcacgacagaggaaacacataagacaccggatatagggttgggcccctggcctctttctcatctctgtattatgaggagggtacatgttccttttatagagatgtgagacccctcagagacaaagtcg

SEQ ID NO: 35080 - DNA, 1712 bp, Zea Mays
aatccacgacgcccatttccgattcttgccgttttcgggcaggcagccagtccctttaaagcaccactaggcaggcactaggccggtagtatataaaataatgtcctactcctaccccgccaccacgccgcggcagcacaagcccctctccgcccccagccagccctcctcagatctcaatcccggcgctccctccctccctcctcgcctcgggacagcgagcgccgccgtccgccgtccatggagcacgacgccgaggcgcgccgcgggttcgccaggatgggcttcgggtgcaagcactaccggaggcggtgccggatccgcgcgccctgctgcggcgacgtcttccactgccgccattgccacaacgagtccacgaaagacgggcacgagctggatcggcacgacgtccaatcggttatctgcctcgtctgtgacaccgagcagccgatcgcgcaggtgtgctgcaactgcggcgtctgcatgggggagtacttctgcgcagcctgcaacttcttggacgatgacgttgacaaggagcagttccattgcgacgattgcggcatctgcaggtgcgtgcgtgcgtgtgtctgtccctctttttttgtttcttgttttcttttcttccttccattgcggtcactgagttacaggatctgagtcgccgcgcacaaatcgcgattttagtaggaacccccccctctgattaactaactaagctactactacctattgatgatgatccaacaaagctgacagaaactgtggtgcatttgcatttgttcgaacagagtaggaggaaaggagaacttcttccactgccaaaagtgtggtaaagaaataaacaaatccatcaccagccatattcaccacacccgaggatgttctggctccccatcaccagccatacatcatcctgttgttttttttttgtttgcacacgcaggatcctgctactcgacgacccttcgcgacaggcactgctgcatcgagaactcgatgaagaacaactgccccatctgctacgaggcagtacctgttcgattcgctgagggagacgtcggtgctccgctgcggccacaccatgcacctgcagtgcttccacgagatgttgaagcacgacaagttctcgtgccccatatgcgccacgcccatcttcgacatggacaagttcttcaaggccctcgacgcagagatggaggcaagctacttgtacacgggaaagggatgggtcgtgtgcaacgactgcagggacacgacgcaggtcttctccggcatggcgggccacaagtgctgccactgccagtcccacaacacctgccgggtggcaccccccgtcctcccgtagccaccaccaccaccacatcattgttgttggaattggatgcagccagccaagatacccccggccccagcagctacgctattattaccagtagcgcctgcgcttttacgcaccgctccgttccagtccatgatgaactgcataatttcgtgccatgcaggtatgtacgtacactgttattggagatcggaagatttatccgactcgggacgcattatttgtaccacaacaaaacacgtgttacactattgtaataccagatctggatacgaaactattttttaggatgcttgaacgagtggtatttccttggagtgtgtataacatttatttattagctcaaatctctctctctctctttgtgatg

SEQ ID NO: 35081 - DNA, 1439 bp, Zea Mays
ccttatccatactctcccgtaggcgcgtccaccgcaagtccgcaacgcgtgctggtctgtcacccgtatataatccccttttcaaatggccattttccgcaatcagaaaccagtcctctacttgctaggaggtggttacccgaaaacctacccccgccgccttggcccttggcctcacgtcacgatgtcttgcacggtgaccatcccgaactcgccagtattctcgccttcacgccgcccgctgtcctgcaaggccgctcccgcgtcgccggagcccgccgtcgccgtctccgcctcttccgcggcgcccgcgcccgcgcccgccgccgccggctcgccgctccgccccttcgcgctccgcgcgctgctccgggaggaggtattcccgtctccatcgccccagctggcctctgccgcagcggtggcctcggtaccaagcggggccgtgctgaagcggcggcgacctgcgccgctccttgtgccggcgtccggcgcgactgctgctgctgcggtggctgccgtggaggcagatccgacgaacgaggtggaggaggagggggaggagttcgcagcgtactgccggagggggaaggggaggagaagggtggaaatggaggaccggcatgtggccgaggtcgctctcggcggagatccccaagtggcgctctttggtgtattcgatggtcacgggggcaaaaatgcggcagagttcgctgcggagaacatgcccaagtttttggccgaggagttcaagaaggtgaacggcggaggagagatcgaaggagctgtcaacaggggttacctcaagacggacgaggaattcctcaagagggacgagagcgggggcgcgtgctgcgtcacagccgttctccaaaagggtggtctggtcgtctccaacgctggagactgccgtgcggtgctcagccgagcagggaaagcagatgtgctcacctcggaccaccgggcctcccgggaggatgagaaggagagaattgaaaatttgggtggatttgtggtgaattaccatgggacatggcgagtccagggttccctggcagtgtctaggggcattggggatggacacctaaagcagtgggttgtggctaacccagacactaggacgctcctcgtcgaccaccagtgcgagttcttgatacttgcttctgatggcctatgggataagatcgataatcaggaggcagtagaccttgcacgtcctctatgcattaacaatgacaagacctctcgcctggctgcctgcaggatgctcactgagacgtcgatttccaggggctcaactgatgatatcagtgtcatgattgtgcaattgcagaagttttcaagttcctaacttaattggagaaacttgaccaaaactctaggcattagcaccaacagactggtggaaggtgtcagccttggacaatattgcttacggg

SEQ ID NO: 35082 - DNA, 1428 bp, Zea Mays
gcttcttgttcatgtctatcactgcaagtgaccagctcgccattgccaaggagacgggcaggaggctggggatgggcaccaacatgtacccctcctcggcgctgctcgggcagagcaaagatgaatccatcgcctccatccccgtggacgatctgatcgagaaggccgatggctttgccggcgtcttccccgagcacaagtacgagatcgtcaagaagctgcaggagaggaagcacatctgcgggatgaccggggacggcgtgaacgacgcgccggcgctgaagaaggcggacatcgggatcgccgtcgccgacgctacggacgcggccaggagcgcctccgacatcgtgctcaccgaacccgggctcagcgtcatcatcagcgccgtgctcacgagccgctccatcttccagaggatgaagaactacaccatctacgcagtgtcgatcacagtccgtattgtgctcgggttcatgctgatcgcgctgatctggaagttcgatttctcaccgttcatgatcctggtcattgccatcctcaacgacggcacgatcatgaccatctctaaggacagggtgaggccgtctccgcatccagacagctggaagctgaacgagatctttgtcaccggcgtcgtctacggcacctacctcgccgtcatgaccgtcatcttcttctgggccatgcgcagcaccgatttcttcacgaacacgttcggcgtgaggtcgctgcacggcagccgggacgagatgatgtcggcgctgtacctgcaggtgagcgtcatcagccaggcgctcatcttcgtcacgcgctcccgcggcttgtgcttcacggagcgccccggcttcctcctctgcgtcgccttcgtggtcgcccagatcattgccaccctcgtcgcggttatccccaccatcgggttcgcgcacatccgcggcgtcgggtgggggtgggcgggcgtcatctggctgtacagcgtcgtcaccttcctgccgctggacgcgttcaagctggccatccggtacgcgctgagcggaagggcgtgggacacgctgttcgagcacaagatcgccttcaccaccaagaaggactacgggcgggaggagcgggaggcgcagtgggccacggcgcagcgcaccctgcacggcctccagacgcccgaactggccggcgtcctcaacgatcgcaccagctaccgcgagctctccgagatcgccgagcaggccaagcgccgcgccgaggtggccaggctgcgggagctcggcacgctcaagggccagatggagtccgtcgtcaagctcaaggggctggacatggaaggcgtccagcagcactacaccctgtgagtgaatgcggtagtgtatttgtaattgttgctgtactcattgggaaataataacaacaggaattgaaatggttgtgatgattgat

SEQ ID NO: 35083 - DNA, 2050 bp, Zea Mays
ggaagacacagcaaccgccgtcgccctcccccgccaaaatcgcaacaagaatgtccacaagccacagccttgtcttgtcttctgtatctacatcctctcgcaattccccatcgtcttctacccttctgtcctccgatccccaccctccggttaactcctcaccaagaaaaaggaaccggccgtcctcgttcctgtcgtcgctgttctttcctcgccattaccggcgtataaaaccagccctcggcctgatcgcacagcatccggccaagcgggagtagtccctgtcgtctgtccaccaccctctgcgagtacgtctcctcctcccgtctgtctctctctgtgtgtcggtctgccgttcccgccgccgccgccgcagatgggcctgttcagctcgccggccaaggtgtacaagccggccgccgacgtggacctcggcccaggcagcgacgagctctacatcagccccaatgtcaaagctcctcgggtcgccgggctcctggtgaagatcttcgtgtggatcctggagatgcccatcgtcgggcagatcgtgctctacatcctgaagaaggacaacctcatcaacaagctggtgtccgacgccgacatcccggagccgccgctgttcacggcatcgcacagctgggaagacaccccggagcagagcgtgcggctgaccaagcccgacctgtcggcggcggagcgggtccaggaggccgtgggctgcctcccggcgcggctggaggccgcgctggccgccgacgcgcgcggcatcaggcgctggaccgtccgcgacttctccgacgcgtacaggtccggcgaggtgacgcctgtccaggtggcggcgaggttcctcgcggcggtgagggagagctcgggccctggcgtgagcaatatggccttcttcatcagctgcgaccccgacgacgtcatgaggcaggccgaggaatccaccctcaggtaccagagagctactcggcgatcgtcgaccagtcccagccgtcctacttgcggccggaactgaatcttcctcagctcggctccacactctccatcggcaacatcaagctcgccagatacggaaagtggttcaatgacagcgccgaggacatcaggagctgctgcgacaaggcgctgcaggcgctgcgcgcgaactacggctggcagaccgtggacgtgaccatcccggaggtggaggagatgcggctggcgcactacgtcaccatcggctccgagtgcacgacgtcgctcgccaagtacctcgacaagctcaagaggtccgagatcggctgggacgcgagggtggcgctcagcgtctacggctccttcagcagcagggcgtacctgaacgcgcagcggctccggaaccgccagatgtacttccacaagcagatcttcaaggccgcggacgtcatcgtctcgccgatgaccggtgtgactgcgtacccgctgcaagacgacgcgctcagcaccggggagctcgactacataaacggagccgcgctggtccggtactccatagccggcaacttcctcggcctgccggccatcaccgtcacggtcggctacgacaggggcggcctccccatcggcctccagttcatcggcaggccgtgggccgaggccaccctcctccacgtggccttcgccacgcagcaggcgtgcgccaaggggtacaagaagccgccggtgttctacgacctcctcggcaagcaacaggactgaggtcagcgacgcgccgccgccgccggcggcgagcgagcgaggatccaccgtatatgtatccgtgggggtcgatcggaggagaagagacgtatagcagcaggacaattgttgtcatgtataccttcattctcgaatcattatcgagtatttgtcgttgactactagttcattcttgaactaaaacacggtaaataaaaaataattgaggtcgttcataatctgagaagagagaaagaaatttcactcactagcggtacatcatcagactcggcggcacaaaatcctgtccggatacatattgttgtaacaattacgcagtaaagcttct

SEQ ID NO: 35084 - DNA, 1133 bp, Zea Mays
cacggatggttcagggggattagtttggcatatacgagggtgtcaaagaaaccaaacaagcagcagcatttgtggatcaggaaggagacagctgggtcagggaagaaggctctccgtcttattgatgctgtaaccaagtggttgatgagcaaaggacaggtgctgacatggacaacatatgatacacttctgctcgcacttcttatggataaacgggtagacgaagctgagtcagtttggaacactgtaatacagactcatacccgctcagtgcccaagaggttgttctctcggatgatcttgatctacgacattcaccagcgcccagataaagttttggagatattcgcggatatggaggagttaggtgtgcgtccggacgaggatacagcgagacggatcggaaaggcattcgtggcttctggccaagaagaaaaggagaagcatgtcctcgagaaatacttgaagaagtggaagtacatccatttcaacggcgagcgcgttcgcgtgcggagggacggaccattggcgtagtgcccgttttctgaaaaatgctcgaacctatcagagtatcgtgccggtaggcggtagggcaggggagatgctgttactgccgctgtgacagtcaggcacatggatatcggcactagtccctatcctatgtatgtggaatggaacggaaactggagattggttccatggctctagcctgtggaggagacgagcggatggggggtggctggctactaccggcgagatagtgatttaataggcactacataggcgtccagtgattgcgatggctttaacttgcgtatgtgtctgcggaatggtcccgtgctatttcggtgacttgtgcttgtggaattgtgaacacccactggaaagtgtatatcatgagagggacgatacctgacgtctgggcccatggcttgctgatttcacgcaacgaaccattttctgtttgttgcggtgccccggggttcacgtacttgttctgttcttgtgatctggcacagagctgttggcttatccatttctatgcccatccttcttcagcaaatgatcatgtgagttgcgttccgtttgttctgtctggcactcaacccacatggtgcgtgtcagtgtttggc

SEQ ID NO: 35085 - DNA, 224 bp, Zea Mays
ctcgaaatcgccgtccaggacgccatgacgaggtccaggccgagtgggcgggcgcgacatcactgggtccacgaacacggatcagacacacactagtcttccaggtttagtggctccggaggctgacctctattttaacgtttgttttacgagacattattcaatacggtgaattccgctacatatagcgtatagactcatttacggttctctgttgaagagag

SEQ ID NO: 35086 - DNA, 1337 bp, Zea Mays
cgcatctaaagtgctagtctattgaaggatactttgatactaaaaccatgcagctttagattggcagcttttctttttgtgatttattacagaataaaggaaagaaataaaacaaatagttttcccccctgaaatgccaacttactgtatgagaaagaacaggtttttgtcataatatacaagtgctaacatgccatttatcttccggcatttgatatgccaatttcctgtaggctggcttttggctatgcctatcctgcctatgaatgctacaagaccgttgaactgaacaaaccacagattgagcagctcatattttggtgtcagtattggattttagttgccctgttgacagttttggagagatttggagattttacaatatcatggctaccgttttactcagaagcaaaggtgttgttctttgtatatttgtggtaccctaagacaaagggaactacgtatgtttatggaactttctttaagccatatatttctcagcatgagaatgaaatcgaccgaaatcttcttgagctcagagctcgagccaccgatatggttgtcctttacttccataaggctgcttcggtagggcaaaatactttctttgacgttttaaaatatgttgctgcccagtccccttctcggaaatcaaggctgcaccctcatcaggaaccacagcagcagcaaccacaagtgcaggtggagctgcagcagccgcaaccacaaaaacaagcagcacctgttatgcgcagaggagcatctattgctgctcggcaagcagcaatggcacagcaatctctggagactatacccgttccatcttcacccaagatcaagcgtcaaacatcagggagacctggttcggtggcatccacaaagcctgcagcagctgcatccacaccaaaacctggcggtagcccaaagaaagagggcgcggaagagcttgaccctgcgctcgaggagacgccgatggaggagacgatccgtgtgacgcgcgccaagctaaggaggcgcacggccaccgaggattctgctgggaattagctgcatgccgttgttttccctgcacattgtattgatctttttccgagttttaggctcacatgttgtttgctggaatggagatatgttgttgttcacttggttcttgtgacacagagttaattatcttatttccgtgctttcttagtacctttttgtgtgatttaagttgtaaataacagttcccctccgcatttgtatatagtttagcggcatgggcaacgaatgcctgtaattgcaacattacacgcttcaatctggtcactccttgggtatcttctcaagatgtgtca

SEQ ID NO: 35087 - DNA, 246 bp, Zea Mays
tgcacattaaaatcaatgtatttgtacaacgggtgatctcttgacaaggtaattctttacttttatcattaactattatatgaaaacattatcacatgtaagtttaacgggtccccgcggggaacggggatggggaagaaatgtcccccgtaagcgtccccgtttacccgtcgggggagaacttttccccatttacatccccgtgggggaagaaacttccccatccccatcccctaatagaggaat

SEQ ID NO: 35088 - DNA, 1317 bp, Zea Mays
ctgccacaaactgtcgaccggaggccggagcaaatgcgactagccgaagcggccgcggcggaacacctcggcgatcggcgtgcgtaccttccacgcgggagtgcgggaccgttgctgcgacgctgcgtcagatcgacgcgcggcgcgtccgccccccaccctctcgccgcctatataactcgcgcccgaatcggcggctccctcctttgccctctccgcgcaccttccaccacgctctggaagctgtttcccctttctcgagagtttagaaagctggtgcagagatggccggggagagctgcgtccccaagcccctgttcggcggcgccatcttcaccaccttccccgaccgcttccaggacgtgagcaacatccgggaggtccccgaccatcaggaggttctcgttgatccatcccgcgacgagagcctcattttcgagctacttgacctcaagggcgaggtggacgacgccggcagcgcgctctggttcctgcaagacatcgccaacgagcaagacgccggggacaacttggtggtagagcattctgggacacttgaactggctgctttgcatctcggagaagctcctgcagtggctgcaactgcagttggccagctggccgtctcaaaagggaggcagggcagagaagcacaaaacattgttcgaatttacctggcaaacatacgccttaagaatgcggcaaccgatgtacttatcaccgcatatgagccattgttgataaactggtccggcaatacctgctgaacaagtagggtgcttgccaatgtctgaggtcttcaaacttgcagtgacgaatttcaatgtgcgtgattggaaccttttcgatggtggcccttgaaccagagtggataatctctccaaaatcagatgtagagcatctggttgacatacggaagactactacctgttttctagatttacaattcattgtcagaaattatgctatctgacttaatcttccaaatactcctattgaacttacctctggaacattagctgagtttgtcatgatagattctactagtggattgtacgcagatggtctgtgtcgcttcatcggtaaagcaaactctgctcgttcctgttgaacacaggccatttaaatttagaaattagaattgatgctacgaaaaatccaatagtagcatgctttcagttttctgaatttttataggggaaatatggcatccttacatttcattttatggcctgataatatctatatattgcgcaactggcgccaaggatcctggacgacgagcatgtgaactttggagtgtacggacgatatggc

SEQ ID NO: 35089 - DNA, 830 bp, Zea Mays
gtctatcttctcggctcgcacacctcagacacagccaggcagcggagcgctcccccctcgattccttcgcttccttctagaaccttccgctccctccgttgcaacagtagcacagagcttcctcctcccccacccccgaagatgacgaccatggagaacgtgatcgtgctcgtgaaccgcatccagcgtgcctgcaccgtcctcggcgaccacggcggcggggacgccgccgcctccctccctaccctctgggaagcgctcccgacggtcgccgtcgtcggcggtcagagttcggggaaatcatcggtgctcgagagcatcgtggggcgagacttcctgcctcgaggatcagggatcgtgacgcgtaggccactcgtcctgcagctgcacaagacagaggccggggtgcaggagtatgccgagttccttcacatgcctaagcgccgcttcactgatttctctattgtgcggaaggaaatccaggatgaaactgacaggttgactggaaagacaaagcagatatctccagttccaattcatctcagcatatactctccacatgtggtcaacttaacattgattgatctgccgggcctaaccaaagttgcagttgaggggcagcctgaaagcattgttcaagatatcgaaagcatggtgcgttcatatgttgataagccgaattgtattatattggctatatctcctgccaatcaagatatagcgacatcagatgcaatcaagcttgcccgggaagtggatccaactgatattgtagaattgtgaagtccttgatgtattgcataagggatgatgacatatatatagagtca

SEQ ID NO: 35090 - DNA, 4323 bp, Zea Mays
tctccccctctgttttcttgggtctgatttcagaaagaagaagcttgccagcgctgtggaaaaagtgataatctagtctcttgttcaacatgtacatacaaatttcacagaaaatgcttggttccttgcttaaacatcacatctgataaatggagctgcccagaatgtgtaagtccattaacagagatggagaggattctagatattgaagtgctggaagcacctcgtgaagattctagttccacagagcctcgatcaaagaagatggagcgatatcttatcaagtggaaaggattatcatacattcactgctcttgggtttcagaaaaagaatattcagaagccgcgaatatacaccctcgtctgaggactaggttgaataacttcagaaggcaaaaggaagccatgaaaatagaagcagaaagatctggtgaggacatcgttgcaattagaccggagtggacaactgttgacaggatccttgctagcagaaaaaacttagttggcgatcgggaatactatgttaaatggaatgaacttacatatgaggaatgtacatgggaaaatgagtctgacatcacggtgttccaacctgagattgaacgcttcaatgagatccagttcaggcgtaagaaatctggtgacaagggcaaggccactcgggagccacgccaattcaaggagagccctacgtttctttctggtggcacactacatccctatcagcttgaagggttaaactttttgcgatattcgtggtttcataacaaacgcgtaatccttggtgatgagatgggtcttgggaaaacgatacaaagtattgcttttcttgcctcactctttgaagacaagtttggtccgcatctggtcgttgctcccctctcaaccctgcggaattgggagcgtgaatttgcaacttgggcacctcaaatgaatgttgtaatgtattttggagctgctgcttctcgtgacattattaggaagtacgagttttactacccaaaagagaaactgaagaagctgaagaaaaagaaatcttctccatctaatgaagataagaagcagtcaaggataagatttgatgtcttattgacgtcttatgagatgatcaacatggactcgtctattctaaaaaatatagaatgggagtgcttggttgtggatgaggggcatcggttgaaaaacaaagattccaagttgtttggtcaacttaaagattataataccaaacatcgtgttctattaacggggaccccagtccagaataatcttgatgagcttttcatgcttatgcacttccttgagggtgaaagttttgggagtataactgatctccaagaagagttcaaggatataaaccaagacaagcaaattgagaagcttcatggaatgctgaagccacatcttcttcgaagattcaagaaggatgttatgaaagaacttcctccaaaaaaggaattgattctacgagttgaattgacaagaaaacagaaggagtactataaggcaattctcaccaagaattatgaagtgttagcccgtcgtaatggtggacatacatctctaataaacgttgtaatggagttgcgcaaactctgttgccatggattcatgattgatgaacctgatcttgaacctgccaatccagaagaaggtttaaggaggcttctagattcatcaggtaagatgcagctgctggacaagatgatggtgaaactgaaagagcagggtcatagagttctaatttattcacagttccagcacatgttggacttgctggaggactatttaagttacaggaaatggacttatgaacgcatcgatggcaagataagtggcgctgataggcagatacggatagatcgcttcaacgctaagaattcaactaggttttgctttcttctttctactagagctggtggtctgggaataaacttggcaactgcagatactgtaatcatctatgacagtgattggaacccacatgcggatttgcaagctatggcaagagctcatcgcttaggacagactagtaaggtgatgatatacaggcttgttagccgaggtacaattgaggagcgaatgatgcagcttacaaaaaagaagattttattggagcacttagttgttggtcgactcaccaaagctaataatgtcaatcaggaggagttggatgatattatacgctatggatcaaaggagctttttgaagacgagaatgatgaatctcgccaaattcattatgacgaagctgcaattgagaggttgttagaccgtgatcaagttgacggtgatgaatctgtggaagatgaagaagaagatggattcttaaaaggattcaaggttgcaaactttgaatatatcgatgaggcaaaggctcaggcagaaaaagaggaggcacggagaaaggctgcagctgaggctgaaaattctgaaagaaactactgggatgaactattgaaggatagatatgatgtacagaaagttgaagaacatactgctatgggaaaagggaaaagaagccgcaaacagatggctgccgctgatgaagatgacattcatgatttaagttccgaagatgaggattactcattggaggatgacatttcagataatgacacaagtttgcaaggaaatatttctgggaagaggggccaatattctaagagaaaatcacgtaatgttgattctattccattgatggagggcgaaggacgtaccttgagagttcttggattcaaccatgctcaacgagcaatgttcctacagacactcaatagattcggttttcagaattatgactggaaagagtatcttcctcgtcttaaaggaaaaagtgtcgaggaaatccagagatatgctgaacttgtcatggcacatcttgttgaagaaattaatgattctgactatttttcagatggcgttccaaaggaaatgatgcgtgttgatgatgtactagtcaggatagcaaacatatcccttattgaggagaagatggctgccacaggaccaggaaaaattacaaacatttttcctaattacttgctctatgagttccaaggcttatctggtggaagaatatggaaagcggagcatgatctactgttactgagaggcatactgaagcatggatatgcaaggtggcagtatatatcagatgacagagagaatgggctttttgaggctgcacgacgagagcttcatctcccttcggttaatgaaataattggtgctcagttgaacgaggcaaatgggaatttggaaggtgcacaggaaggccaagcgaacacaacaagcatgtcgcattacaaggagatccagagaaagatagttgagttcttgagaaagagatatcatcttatggagagagccttgaatatggaatatgctgtgataaagaaaaaaattcctgttcctgatgatattactgaacaaggtgttccagcaggacatgctccttttattccagatatcagtgaactgttgcgggaattgcccaatcttgagccaatttctaccaatgaattggtttctgagggcacagctggtcagttacaagttccccatctctacaataagatgtgtggagtgcttgaagagagtggtgcttatgcgctcagttccttctttggagacaagtccgcatcttctagtttggccaatagccttcgacagtttgaaactgtgtgcgagaatgtcgtcgaggccttgcgaccacaccaaaatggtactggcagtgccatcaaagaggaattggtagatgcagccaccaaagcagcagcagcagcagctcctcaacaagattcaggccatgatgcaccgcatgggcagtcttcgacagccaaggcggacatggaaatcgatggttgatttgtaggttccagagtggtaagaaagggaatccccctctaatcattatgtatactgtggtcagaatgtgcgctatatattgtaacatcaaagaaagcacctccaggcctgagggtgttactgctaatgcgtttggtttacttgttgtccttgtaatatgcatacacatttagaactcatgcagccattttgtgtgctcgaaccggtggatcgctgccctgttgtcttgtactgtgtttagggcctgtttggatacgaatggttaattataagacggggctaaagataagtacggataagtacggattagctatagttggctagcttgttggttaacaattagctaaactttggctagctagatggtaaacaattagttaaaagtttagcaaaagaattagttcacctattaactcagtttgttgcctcctttttattatgccaactaatttg

SEQ ID NO: 35091 - DNA, 1940 bp, Zea Mays
tgaattcacaaaacaactgtttgttattttcttctcccgttcacttctctttggcccgaaaccgagagctagtgcttgattcggtcgtttttgggcaccgaacacgttcttgggaccgccgccgccgccctacttccagtcccagctgctcaggtctccatcggcctcgagccctttgccggcgacgagcactcacaacaccagggtgtaacaatgtcttcttcaatggaatcgtcataccttcctgctacaactgagtcattagcccaagctcaagaggctaaggatgcttcagagtccatttcaatcctttaccgtgtcattcaggacccatcttcttctgctgatgcactgagaacaaaagaagttgcaattacaaatcttacaaactacctcactaaagaaaacagagctgaggagctgcgtaatcttttgacccagctcagaccattttttgcagttattcctaaggcaaagactgcaaaaattgtccgtggaataattgatgctgtcgccaagatacctggaacatcagatcttcagatttcactctgcaaggaaatggtagaatggacccgtgcagagaagcgtactttcctccggcaacgtgtggaggcaaggttggcagctctcctgttagagaatcaggagtatactgaagcccttaccctgcttactagtcttatcaaggaagtcaggagacttgatgacaagttacttcttgtggacattgaccttttggaaagcaaacttcacttctccctgagaaatctgccaaaggccaaagcctccttaactgctgctagaacagcagcaaatgccatttatgttccacctgctcagcaaggcactattgatctccagagtggaatcctccatgctgaagaaaaggattacaagactgcttacagctacttctttgaagcatttgaagctttcagtgcactggaggacccgaaggccatctttagcctgaagtacatgctcttgtgtaagataatggttaaccaagctgacgatgttgcaggaataatctcgtctaaggctggcctaaaatatctgggtcctgatgttgatgctatgaaggctgttgctgatgcatactctaaaagatctctcaagtattttgaaactgcccttcgtgattataagtcccagctggaggaggaccctattgtccacaggcatctttcttctctgtatgatacactgctggagcagaatctctgcaggttgattgagccctactcaagggtggagattgcacatatagcggagaggcatctttcttctctgtatgatacactgctggagcagaatctctgcaggttgattgagccctactcaagggtggagattgcacatatagcggagatgattgaattgccgattgaccatgttgagaagaagctgtcgcagatgatccttgacaagaaatttgctgggacactagatcaaggtgctggctgcctcattatctttgaggattctaagaccgaggaaatcttccctgccactctcgaaaccatttcgaatgtcgggaaggttgtggacagcctttatgtgaggtcggccaagatcatggcttgaaagcagctagtcttacctgtttgctctgatttcatttccagtctgtcgatgtcctcagacatttattccttcaatattgacagtttattgtgaccgctacaggttcatgtgaccaaaggctagctatttttacgactgaatgagttatgcatgtattggtcttttaatatcagcgtgcagagtcggacggatgttattgtgtgttaattaatctaccatgttatcgaaatgcatgtctttagctccactgcggcttctgtctacagatggacaattagcacttatacgatgtgctgaattaggcacaacacaaaaaagcaccaggctaaccgtcatctcggcccgagcac

SEQ ID NO: 35092 - DNA, 1218 bp, Zea Mays
caaacttcaatgcagatgcacgagctgtcgaacagacccgcggtatcgccaagtattcccttgcaggagtaacggataaccaacccctcaaacggttaaacccatgccgctaatcgacgccgccgcctcggcggtcgcgccgcccccaccccggcgagtggctcaactccgcttcttcagcactcgcagacccggaatcctatccctaactgccaccagctgctccccctcccctccgcccccggtcgctgcggaggtgcctgcgccgccacaggaagcgaagtcgaagccgaggccacggcggtacccgaagcagtaccccggcgagtcggtgggcgttgctgaggagatgcgctttgtcgccatgcgcctgcgtaaccccaagcgcaccaccataaaagacaagtcggggacggaggacgcggacgccggggcgggggtgtcggagggcgaggctgaggaggacgacggcggcggcgtgaaggaggaacacgaggaggaggatgagggcgagctcgaggaaggggaatggatgcccagcatggaggggttcgtgcgatacctggtggacagcaggctcgtcttcggaaccatcgagcgggtcgtggccgagtccaccgatgtcgcctatctgcgaaaagattctggaaggaagggatctggagttctacaagtgggatactgatgctgaacttctactaaaagatgccagggagaagctgaatgagctcagcaagcactggactcggaaggacaggaacttgtgcttgaaagaagctgcaaaatgcttccagtacttgggaaagatggtccggttaattatcttgtgagccgttgtgtttgttggataaatcccagtttaagctcgcggcatgcattagagggacactagtatggctggaggcggcgcagtgcagttactcttgaggagttaatatccttatcaactaaataacatgtcagaagtctggagggtcctttttggtgtaatagatgaagagggtcagcgagcactatatgattgacgctgaaatggcagaacgcaattgcttctttttttattccgcgtgcgtaactgcatatttaggaggtatttggttagagggactaaagattagtctctagtttttagtcccttttagtctttttttttgccaaacactaggactaaaatatggactaaaatgatttagtctgtagtccttcacataggtgcta

SEQ ID NO: 35093 - DNA, 368 bp, Zea Mays
caacacatataatgaccaagtgtttagagataaatgtcataaacattattacaaagcggaagtgtcttaaaaataaatgataacaaataaagcaagctaatattatttccttgatgtcattaagtcaactgggagacgccgcctaaacttcatcaaactccacatagtagtcctcctcctgggctacctgctcttcacctatggaggggggttatatattgcaagggtgagctcacaaaagttcatcgctttacaagtgtggggaataatatgcatgagcttgccaaaagtgggggtaaaagtcacctagagggggtgaatatacgaaacctgaaaattaaaaactttgaacacgcactatgcccggg

SEQ ID NO: 35094 - DNA, 1369 bp, Zea Mays
cgaatcgatttcctgactgaaccgggtagagagatttcaccagagatcacgagcaaacaagggacggcggcggcggcggcggtggatcatggaggcccagctgttcctcgagcgaagcgagcgcaagcactgccaagaaaagcagagctgaccggccgtcgtcgaagcggagcgccgaacgcgctcgccgagggaggaataatttcgacctagcacgcctgacagaagtgcaagattacaggatcttcgctgcgacgtggaacgtgggtggcaagtcaccacccagggggctaaatctagatgaatggctccatacttctccttctgccgatatctatgtcttagggtttcaagagattgtccctttgaacgcgggaaacgttcttggcactgaagataaccttccagccaagaagtgggtgtcccttatcaggcggacgctgaacaagaatcctggatctagtggctgtggtggtggctaccatacaccctcaccagtcctggatccggttgtcgagttagacgccgacttcgaggggtctgcgagaaggcaggacaacttctcattcttccaccgtcggtcgttccacaatctcagccgtagcttaagaatggacggggacttgatgttcccgcagccaaggctagatcgcaggttcagcgtctgcgatccagtcaacctaggaggcagaccaagcgattttgatggaagtctgcgttgccccggatcacctgatgaggatacaatcgatatggaaatgggtgacagcgtacaagtttcaccattccctcatagctacagtgcatctgcaccttccgaacagaacgatgaccaatcaaacagctccaggtattgcttagttgccagcaaacaaatggtcggcatatttctcacggtctgggtgcgcaatgaaataagagacgacgtcaggaacttgaaagtctcttgcgtgggtagaggattgatgggttatctcggaaacaagggttcgatttcagtgagcatgtgcctgcaccagacgagcttctgcttcgtatgttgccacctgacctcgggggagaaggaaggcgacgagctgcgcaggaactccgacgtcctggagatcctaaggaagaccaggttcccgcgggtccgcggcgccggtgacgtcaggtcacctgagacgatcctcgagcacgatcgggttatatggcttggggatttgaactaccggatcgccctgtcttactgctcggcgaaggctctcgtggaaatgcatagctggaagcagttattggagaaagaccagttatttcagaagtggagggcttaaaaaatttattccttgcgacggcacacctttgagcttacctcttctgaaactgaaac

SEQ ID NO: 35095 - DNA, 2920 bp, Zea Mays
tataacgcccacaatcccctcttcccagccgcgccgccgccgccgtgaacgagatggcggcagcccttttgctccgcagtctccggccatcggtgagccgggcacatatccaccttctttcccatgcctcctccccgacggcgctggggtctccccttttaccccgcctctactcctctgcggcagcgtcaaccgccgcctctcctgttttcacgcccggcggcgtcatggacccatcccgcatccgcaacgtagcggtgatagcccacgtcgaccatgggaagacgacgctcatggaccggctccttcgacagtgcggggccgatatcccccacgagcgcgccatggattcaatcagccttgagcgcgagcgcggcattaccattgcctccaaggtcacttctgtctcttggaaggaaaatgaactcaacatggttgatacacctggccacgctgattttggtggtgaggttgaacgagttgttggaatggtggaaggagctgtcttggttgttgatgctggagagggacctttagcacaaactaaatttgtgctttcaaaagctttgaagtatggcttgcgtccaattcttctcctcaacaaggttgataggccttcagtttctgaagaaacctgcgatgaagtagagagcttggtttttgatctttttgcaaatcttggtgctacagaagaacagttagatttcccagttctttatgcatccgctaaagagggttgggcttccttaactttcaccaagagcccccctgataatgcaaagaatatgtcttcactgctcgattccattgtacgacatgttccttcaccaaaagctgatcttgaggctccattccaaatgttggtttccatgatggaacgtgatttttatctaggacggatactcactgggagagtaaggtccggagttgtccgtgttggtgacaaagtccatggtcttcgcagtacagatgatggagttcataaaattgaggatggaaaggttgtcaaactcatgaaaaagaaaggcacaaatatggtaacagtagaggctgcaggggctggtgatataatttcaatggcaggattggctgctccagcaattggacatactgtggcaaattcagagatattgagtgctctgcctacaattgagttggatcctcccacaatatctatgacgtttggcgtgaatgattcaccgttggctggccgggatggcactcatgacgggttcatccatcattttcttggaatggattcattccgcagaatcgcctagctgttggcttgcgggagcactgtgctgctgtgcagaatgccatgagttcagcttgtgctgcaaaccaaacagctaagggaggttcggtttctggttccgatgattccatatagtcatcacgtgaaccaaatgcgctataaaggaacccaaaaaacaactgctgatacggctttactttcaataattttgcagctaactggagcaaaaattggtaaccgcctgatggcagaggcagaaacgaatttggctattaatgttctccctggaccattatcagaatcttatgaagttcaaggaagaggagagcttcagttaggaatattaattgaaaatatgcggcgtgagggatttgagctttcagtttcacctccaaaagtgatgtataaaacagagcgtggtgaaaggttggagcctattgaagaagtgactgttgaggttggtgaagagcatgtgggattcgtcttggaaaccattactcacaggaagggtgaagtagttgacatgggcccggttcctggcacaactggaagaactcgaatcttcatgacctgtccatctaggggtttggtgggtgttaaaggaattttcagcagctttacacggggaactggatttatgcaccgtgcttttcaggcatatgctaaatacagaggtccactgggcagtgtcagaaaaggagttctgatatctgttggcaagggacttatcacttcacatgcccttatgagtttagaagctcgtgggatcctctttgtatcccctggaatggaggcatatgaagggatgatagttggtgagcactcacgtgacagtgatcttgaggtgaatcctgtgagaactaaagaacttacaaatatccgagcccctggaaaggatgaaaatgtccgtttgtctccaccccgattgatgagtttggaagaggcaattggatatgttgctgcagatgagcttattgaggttactcccaaggtcgtacgtcttcgaaagaagtacttggattccactaagcgtaagatgatgaaaaacaagcctatgaattagaactccagagacaacaaaattacatcaagcactgccagcactactatataagtttatcatgcaagactcttgcagcaagagtgttgctgtctcttgcagcaagagacagcatttatgtataggttggtgttcaatgttgcaacctgagctctttaccagcagcttcacccaggttttacgtgcacacaggattggctgacagaataagcccaccgtagcagctactggaggtaggatcctcgttggttatatctatttagacttttttatggtgaaatttcagacacccacaggttctttgaaggttgtattattctttggaagttcaagaaatgcaggccaatccccataggtattttgtttgaaccggcttctttgttgacaattttatgaccatgtgttattactgattaagtgcaagaaaaaacaaatgaaattggcctccttgctctaggacaattttacgaccatgtgttattactgagatagtgtcggacaccaagaaattggcctccttgctctaagcggtgtgttgcagacttaaccatttcactcagcaatatgcaacattcgtgcaacaacaggcttgtcaaccggga

SEQ ID NO: 35096 - DNA, 1047 bp, Zea Mays
atggtacttcaacttctaccagtgaattccctatctttggatgcattgatcattggcctgcaaggaaaaagtggaaggacataaagtacctagagagtgtagctggagatcggactattcctgttcaggttggaaaaaattatgcatgtactgagttgaaacaggagcttatcacattttctcaatttcttgagaggatgtggtcaagtgattctgcaaacttggcatatattgcgcagcatcaattgtttgaccagataaaggagctccacgaagatattgctgttcctgagtactgttcagctggtggtggcaaactccagtcacttaatgcttggttcggccctcatgggacaataactcctttgcatcatgacccacatcacaacctttttgctcaggttttgggaaggaagtatgttagactctatcctgcttctacatctgtgggcctataccctaacacagaaagcatgctaagcaatactagtgagattttctcctggacgccctgatcaaccctatcattcacgttcaacttttgcttcgttacaatccaaatccattccgtagcgtgttgtgatcctgaagctgctctctgcaccgcccaataaggtagacctcgacaacactgacggaaaagagtacccggagactgcagctcttgagttcgtggactgcgtattggaggaaggtgacctgctttacattcccccgaaatggtggcgttacgtgagatctctctctattagcttttctgttagctttcggtggcgaacatcacagcttccttgaggggaggttcataacgatggttttgacaaatttgatcgtacgtccacgatgtcgttccaatcatcctattggtagagacttaataagaagacttcattgagctgagcccatatttcgtggtctaagtgttgtgtgcggtcgcctcactagactgggattgtaaattgttttcacgacaatgattggtttcaaacatactaagcggtactatcaggtactagtgtggccgttttatattgtgaactgattctg

SEQ ID NO: 35097 - DNA, 672 bp, Zea Mays
taggtgtcagggtccggcgcacgtcacgggcccggcggcgcctggagtacgtgcgcccgaccatgaccgcgaccatgacaatagatgaaaagcctgtagagaggtacgtcacctcaagcttgtcctttctgctgcctcactcatctccctctttgccacgataccattggatctgggctgaaccatcattgtcggagaaagatcagaaggaaagggttcaaaggagcaaattcgtccgagggcttgtgctctcgacaatatttgatgatgataacttgtaaagggggtcatcaaacttgataacagcatcacaatagttaaggaacacgaagagaatcatcagactctgctgctgttgtcgtgatcacacaagaggcccatctaagttcgtatatgtacggatggaatatttatgcatgtatgtatttatgtttatctccctgcatttacccttagtgcaacagggtggtaggggacggttgtagtattccaaatttatgtatcaaataaatgaggacactgtccttggggtgcaattgtgtatataatataataatagggagctactcgccatgatttaggatattttatttaactgttgtaataatatgcagtgttttgtatgatgaccccatttttttatatataactgttcattttagtcctttaatg

SEQ ID NO: 35098 - DNA, 3009 bp, Zea Mays
tgttgatgctggacagggttggaggacatgtagacagcactgatgttgtcacaatacatcagtgtggcgcgacggagaggggtgtggagttctaagaggagctggcgcagccatgtagcttctgcaactccatttgccacagcgcgatactcagcttcagcactagacctcgagacggtgttctgacgcttggaggaccaggagacgaggttgtcaccaaggaacgcagcatagcccaaggtggacctgcgcgtatccaggcaacctgcttaatcagcatcagtgtagaccacaagatcagtcgatgtaaatggttgcagcagtagggcaagatcaagggtgtggcgaatgtatcaaaaaatccgcttcagcgcagcaagatgtggctcccagggagcatgcatgtgaaggcaaacttgctgaacagcataggcaatgtcaggccgagtgaatgtgagccactgtaatgcactagcaagattgcaaaaatcccaagtgtcagtcaccggtgcaccctctgctgaggcaaccttcgggttggtgtcaaccggtgtcaggcagggcttacactctgacatcccagcgcgatcaaggagctccaccatgtactgcttttgagaaagaagactcgcatgagggctgaacatgcataccatgtaagtgatgcagcacaccgagatccttcattgagaactcctgttgcaggaccaagatgatccagcgcaggagagcagtcgaggaagcagtgaggacaatgttgtcgacatagagcaacaaataagcagtgtcaggtccacgctgaaatacaaagagtgatgtgtctgacttggcctcaacaaaaccgagggagtaaatatgtagcaaatttgttgaaccatgcacaaggagcctgcttcaacccgtagagagacttgttcaatcaacaaataagatttggatgtgcagggtcttcaaatccggatggttgaacgcagtacacagtctcgggcaaagtgccatgcagaaaaagcattcttcacatcaagctggtgcgcgggccacctctgggatagagccagggagaggactgtgcgaaccgtagcttggcttcaccacaggacttaatgtctcatagaaatccacaccaggacactggatgaaacctcgaagaacccagcatgccttataccactctagtgtcccatcggcattgaacttatgcttgaagacccatttgcctgtcaccacgatggcttgaggtggccgaggcacgagatcccaagtgtggtcttgggcaccgaggagagttgtgtagcatggaacagcaccggaatgtgaatatgcttagcgtgcgtcgccatcgggtgttggttggtcactggctggacagcagcagcaccgttgagaagcgacgtaggagatgatgcgggtggtgccggaacaggatcagtgtgttcccgacacgtgtagatgttggtgatgacgcgcgccggagcctgaagaggtggaaagcccggcagtgggccgcgcgtggcggcgcccggggacacctgcgccatggaaggtgctggcaacgtgcaagcggggcgcaggtacacatcaggcgatgtcgacaaagtcacatgtggcacgggaaggggcgtcgaggccacgcgtggcacggataaattcagcggtgccacaaggtcctcgagcgcaagcacggaggtgcctgttgtagctactgtcgatccaaggtcgtcggggagagttcctaaagaatgtgttgtggtccaataggactaggcacagtgtcaggagcatcaagaatctccaaagttgaaggagagcctggtccatcgcgatcaccaaagggaaaagcattttcatcaaagatgacatgcctcgagatgatgatgcaattggaagaaagatcaaggcagcggtaacctttgtgatggtcggaatagccaaggaagacacacagggcaaacctgagagctagtttgtggggagctgtgatagacaggttgggataacacttgcaatcgaaaacccgtagatgatcatacaccggtggagtgccatgcaaagcaagatgcggcgtagagaaagcaagggtcttagttggcaagatgttaatcagccttgttgcagtggatatagtgcctcgacccaatacgagggggcatggatgcctggaacaatagagagcgaacaacattattgactgactgaatgatgtgttcagctttaccgttttaaggcgaggtgtaggcacaggacatccagagtggatgccctagctgagacgtaaggtacgggcgctagagttatcaaactcacgcccattgtcgcattggatggccttcacagaggcgcataactgagtggaggtgtaggcaatgaaggtcgtgagcgtgctgaaagtgtcagatttaatacgaagaggaaaagtccacaaataatgtgcaatcatcaaggatgaccaaataatatttataactagacacactgacaattggagatgtccagaggtcacaatatataagatcaaacttattagacacacgggaggtaaacgcatgaaagggcacatggcacccgagctgacaagcatgacataaggtggagcagtcctgtaaatgagtggagacactagacgcgagcttcaacagagcttcatgaccaggttgaccgagacggcggtgccacaggggagaggtggtcatggcgaccaaagactgtgctagaggaaggtgcagggggtacagggccctggagctattgtacctgacgatcacgttccgagtttgcagatccttcacagaaaaaccactagggtcaaactcaacagagcaattgttgtcgatagtaaattgtcgaactaaaataagattcttaataatttgtggagacacaagtataatattaagaaataaagagtgggggtagtgttgttattgctattagaagtgttggtttggagattgatctttgggttttggttggtgcaaagaagctgtccttgcttactgcccccatcccagg

SEQ ID NO: 35099 - DNA, 5341 bp, Zea Mays
gccaccggagtccggcggccagcccccgcccaccggcgagtccctggctccctgcgcgtgcgagaccagagatccaggcagcggacgagccctctccgtccccagccattagcgaccagctggtgccggtcatccctgctgcgacgagctggtgccgtgaagccgccctccaggcctacagatccaggtgtccctttgttcagttgttggtcgtgtgtgctgcccgtatccctacaaccatgctggtgcctggtgctgctgccttgagctgaccatgcaaaacaaccgtgctggtgcttctgctggtgacatggtgaaaactccgagatctcctgttaccacaggaacaagaagatgcagagcaaagccacaaaagaaggaagaggaatccacagaaaacaacaagctggagaatggatctctggatgcaacagaagaggtgcatcatggagtcgaaaaaggtgatggacatgttacccgcaagagaccaaggagatcagcggcctgttctgatttcaaagagaaatccatacgcttatccgaaaaaaaatctgttgtcatggtcaagaagaatcggatggaggaggaagaagtagatgctgtcaatctgacaaaacttggaccagaagatccaccaccttgccggaagttgatcgattttatcttgcatgatgcagaagggaacccacaaccctttgaaatgtcagaaattgatgacttctttataacagctcttatcatgcccatggatgatgatctagaaaaagagcgtgaaagaggagtacgctgtgaaggatttgggcgaattgaggactggaatatttctggttatgatgaaggtactcctgtaatctgggtgtcaactgatgttgctgactatgaatgtgtgaaaccatcaaccaattacaaatcttattttgaccacttctatgagaaggctcaggtgtgtgttgaagttttcaaaaagcttgcaaaatcagttggtgggaatcctaaccagggcctggatgaattgcttgctagtgttgttcggtcaaccaatgccatgaaaggatatagtggaaccatgagcaaagatttggtgatatccattggagaatttgtatacaatcaacttgttggtttggatgagacatcaaacaatgatgatgaaaagtttgctaccctgccagttcttctttctctaagagaccagtgcagatctagggtggaactgaccaagttgccctctaacttctcgaacacaagtctgaaaattaaggactcagagtgtgatgagacagcagaagacgatgatgatgcaaaattagctagattacttcaacaagaagaagaatggaaaatgatgaagaaacagaggggtaggcgtggaacaccatcccagaaaaatgtctacataaaaatcagtgaagctgagattgccaatgactatccccttcctgcatactataagccatttagccaggaaatggatgaatacatatttgatagtgatgacagcatattttctgatgatgtgccagttaggatactcaataactggacactgtacaatgcagattccaggcttatatctttggaattgatccctatgaaatcaggggcagaaaatgatgtggttatctttggatctggtttcatgagagatgatgatggcagttgctgttctacagctgagtctgtgaaatcttcgtcttcctccagcaaagctgaccaactggatgcaggaatccctatttatttgagcccaatcaaagaatggattatagagtttggtggctcaatgatttgtataaccattcggactgatgtggcctggtacaagctacgccaaccaacaaaacaatatgctccatggtgtgagcctgtactgaaaacagcaaggcttgctgttagcatcattaccctgttgaaagagcagagtcgtgcctcaaagctttcttttgctgatgtcataagaaaagtagctgaatttgacaaaggaaaccctgcatttatatcttcaaacatcacacttgttgagagatatattgtggtgcatggacagataatactccagcagtttgcagattttccagatgagactatccgtcggagtgcatttgtcagtggtcttttattgaagatggaacagaggaggcatacaaagttagttatgaagaaaaaaactcaagtgatgaggggagagaatctgaatccaagtgcagcaatgggtccagcatcgaggaaaaaagcaatgcgtgcaacaacaaccaggctcatcaacagaatctggagtgattactatgcacatcatttccctgaagattccaaggagggagatggaaatgaaacaaaagaaattgatgatgaacaagaagaaaatgaagatgaggatgctgaagatgaagggcagattgaagagaacatctcaaagactcctccatcaacacggtcccggaagttgctatcacaaacttgtaaggaaatcagatgggaaggtgaaacatctgggaaaacattgtctggagaaactctatataaatgtgcttatgttagggaactcagaatacctgttggtggaacagtggctctagaagatgattcaggagacacagtcatttgttttgttgagtacatgttccagaaagttgatggttcaaaaatggttcatgggaggattctgcaaaaaggttcacagacaattcttggcaatgcggcaaatgagagggaggttttcttaactaatgactgcttagaattcaaattagatgacatcaaggaattggtaatggttgatatccaatcaaggccttggggtcacaagtacagaaaagagaattctgaagctgataaagttgagcaggtcaaagcagaagagagaaagaaaaagggccagcccatggtatatttctgcaaaagcttgtactggcctgagaagggtgccttctttgccctctcccgagataaaatgggtcttggtagtggtttatgtagttcttgtgataatatagagccagattctgatgaattgaaaatattctcgaagaccagctttgtctacagaaaggttacatataatgtcaatgagtttttatacataagacctgatttttttgctgaagatgaggatcgtgcaaccttcaaggctggccgaaatgtgggtctaaagccctatgcagtttgtcaaatattgtccatccctgaaggggctggatctaaaaaactcaatccagcatcagcaaatatcagtgctagaagattttacagaccagatgacatttcatcagccaaagcctatgcatctgacatcagagaggtctactatagtgaggatgtaattgatgtgcctgtggatatgatagagggaaaatgtgaggttagaaagaagaacgatcttgcaagttcagaccttccagtgatgtttgaacatgtatttttctgtgaacttatatatgaccgtgccagtggagctctcaagcagttgcctccaaatgttaggtttatgtctatggtgcaaaggacaagtgcgttgaaaaagaacaaaggaaagcagatctgtgagcctgatcaaatagattcaggtaaatggttggatgtgcctaaagagaaccgtctagctactcttgacatttttgctggctgtggaggtttatcagaagggctgcagcaagctggtgtatcttttacaaaatgggcgattgaatacgaagagcctgctggtgaagcatttaataaaaatcatccagaggctgtggtctttgtagataactgcaatgtgattctaaaggcaattatggataaatgtggggatactgatgattgtgtttcaacttctgaagctgctgaacaagcagcaaaacttccagaagtgaacattaataatcttccagtccctggcgaagttgaattcataaatggtggtcctccgtgtcagggattctctgggatgaatagattcaaccaaagcccatggagtaaagttcagtgtgagatgattctagcattcctctcattcgctgagtatttccgtcccagattctttctgttagaaaatgttcggaactttgtttccttcaacaaagggcagaccttccgtttggcagttgcatctcttctggagatgggataccaggtccggtttggaattctagaagcaggggcttttggtgttgcccagtccaggaaaagggcgtttatttgggctgctgcacctggagagatgcttcctgattggccagagccgatgcatgtgtttgctagccctgagctgaagataacactgcctgatggccaatactatgcagctgcaagaagcactgctggtggagcgcctttccgagcgattactgttagagatacaattggggatctgcctaaagtgggaaatggtgccagcaaactcacgcttgagtatggaggtgagcccgtgtcttggttccagaagaagataagagggaatatgatggtactgaatgatcacatatctaaggagatgaatgagctgaacctaataaggtgccaacacattccgaaacggccgggttgtgattggcatgacctaccggacgagaaggttaagctgtcaaatgggcagatggctgacctgataccttggtgcctgcccaacacagccaagaggcacaatcagtggaaaggactgtacgggaggctggactgggaaggcaacttccccacatccgtcactgatccccagccaatgggcaaggtcggcatgtgcttccaccctgatcaagacaggatcatcacagtccgggaatgtgctcggtcacagggctttcctgacagctatgaatttgcgggcaacatccagaacaagcaccggcagattggcaatgccgtgcccccgcctcttgcctatgcacttgggaggaagctgaaggaagccgttgacaagcgtcaggaagccagcgcaggcgtgcctgcaccatgagaagttttccttccatcaaaccatgacccatgaagctaagcgctgaggtcgtccttgaggaccagttaattttggttttatcagtcttaatgcactcctgaatgtatatgttagagaagtgtcgattgctgattgttaccctgattcagggtagcggttatatctaaaaacttgagaaaatctagtgtactctagttgtcatgtgttccattttgttggctctaaactttcaactagttttggtgattaatgacaacatgagattaaattaaattttgtagaggcatttaaattaggccactaatagtgactatttagtcgctcaatttttttgcccctaattatggaatttgttttttaaaggatgaacaacaagattaaatggattagttcaagtgtcgattgggg

SEQ ID NO: 35100 - DNA, 2041 bp, Zea Mays
ctctctgcaaaatgcagggttcaagagcctgacttaattggggtgagtcatttactagttgacgaaattcatgaacgcggcatgaatgaagattttctcatcataatactgcgtgaccttctaccaagacgtccagatcttcgccttgtactgatgagtgcaactataaatgctgaactattttccatgtactttggagatgctccagtgatgcacatcccggggttcacttttcctgttgctgagttgtttctggaagatgttctagaaaagacacgttacaggatcaattccgaacgtgataattttgcaggtagttcaaggagaaagaggttttcatcagttaagagtgatccactatctgatgtttttgaggacattgacattactaaggagtatggaaattacagcagttcaacaaggcagtcccttgaagcttggtctgctgctgaactagatttgagccttgtggaaaatacaattgaatatatttgtcgctatgaagcagaaggtgcaatccttgtgttccttactggctgggatgaaatttcgaagcttctggacaagattaaagggaataatttccttggcagtcctaatagatttcttgttcttcctttgcatggttctatgccaactgtgaatcaacgcgaaatttttgacagaccaccagctaatatgagaaaaattgttttggcaaccaacattgcggagagtagtatcactatagatgatgttgtctatgtgattgattgtggtaaggccaaggagacaagctatgatgccttgaataagctcgcatgccttcttccgtcatggatatcaaaagcttctgctcatcagaggagaggtcgtgcaggccgcgttcagccaggtttttgctatcggctctatccaaagatcattcacgatgcaatgccacagtttcagttgcctgaaattctcaggactcctttgcaagagctatgccttaccatcaaaagcttacagcttggagcagtatcctcctttttagccaagtcactgcagccaccagatccactttctgttaagaatgctattgagcttcttaaaaccattggcgcactggatgatatggaggagctcacttctcttgggcgacatctctgtactctcccactggacccaaacatcgggaaaatgctgcttatgggatctgtattccagtgcctggatccagtattgacaattgctgctgctctcgcatatcgaaatccatttgtgctcccaatagatagaaaagaagaagctgatgctgtcaaaagatcatttgctggtgactcgtgcagtgatcacattgctcttgttaaggcgtttgtagcatggaaggatgctaaaaggagtggtagagaacgcactttctgttgggaaagttttctgtcccctatgaccctgaagatgatggacgacatgcgaaatcaattttttgatctactatctgatattgggtttgttagcaagacagcaggagtgaaggcatataaccgctatggtaatgatctggagatggtttgcgctgtcttgtgcgctgggctgtacccaaatgttgtgcaatgcaaaaggcgaggcaagaggactgctttctacaccaaagatgtgggaaaagtggacattcatccatcatcagtcaatgcattcgtaaaccaattcccgttacctttcttggtttacagtgagaaggtgaagactgctagcatttatgtaagggactcgacaaatatatcagactatgcccttctactctttggtggttcgcttagtccgagcaaaactggagaaggcattgagatgcttgggggttatcttcatttctcggctccaaagcgtaccatagagttgattcaggttattttcagggcgacatattgggcacgttcttggtcgctgctgcttagagacgaggacgcgaggaccgatctgaacaaggcatgccacttatcggagtcggtcgttatggaggtgttcgctaagtttgggtggaagttctcaaatagaattacagcctagtcgtctagctagg

SEQ ID NO: 35101 - DNA, 1239 bp, Zea Mays
tctatatagtaaaacgcgaagagagagatacttctgcggaaacgaatggcagcagcaatggccaacaccacatgcctccgctcccgcctcctcgtcctcccaccgccaccggcgccccgcaccgtcgtgtcctttcgtctccgcccatgcgctactacgatctcctcgtcctcccgaaagaggagaccccgtctcgcggcacgggcggcgccgcccggcggcgctgtggccccggcgtcggccgcgtcgaaggaggatgaccagggggagatgggcagcggcgggggcctctctgcggatgatgcagagaggctgtgtcagtttctgcgggccgacctgccgcacctgttcgacgacgtcggcatcgaccggtccgcgtacgatgaccgcgtgcggttccgcgaccctatcacccgccacgacaccatcgacggctacctcttcaacatccgcctcctcaagctcctcttccgccccgacttctacctccacgccgtcaagcagacagggccgtacgagctcaccacgaggtggaccatggtgatgaagtttatgctccttccctggaagccggagctggtcttcactggcctgtcgatcatgggcgtcaacccgaagaatctcaagttcaacagccatgtggatctttgggattcgatacaaaacaacgagtacttctcttctgaaggactatgggatgttttcaaacagctacggatttacaagacccctgacatagaaacaccaaattaccttattctaaagaggactgcacattatgaggttaggagttatgcgccattcttagtggttgaagcaaaaggtgataaactgacaggatcgtcgggcttcaacaatgtaaccggatatatatttggcaataatgcttcatctgaaaagattccgatgactacacctgtcttcactcaagcttctgacaacacactttcagatgtatccatccagatagttctgccaatgaacaaagacttggacagtttaccagctccaaatacagcagttactttgcggaaggtagaaggaggcattgctgcagtgaaaaaattcagtggacgaccaaaagaagaaattgtgctccagaaggagaaggatctgcgctcccagttacttaacgatggattgaagcctcatccaggctgtttgcttgcacgttacaatgatcccaggacaaagagcttcttaatgggttggctgaagccacttggatgttttgacaat

SEQ ID NO: 35102 - DNA, 1658 bp, Zea Mays
atcgagctgtcccctccctgtgctctactgctcttgcgccttgctagcttgcttgcttccctgctccctccctcctcctcctcgtcgcctcttctctggttcttcctggtgtttgccggagcgaggctaggcgcaaggggagggagctgcgctcagccagagctcatcggcgctacgcaagcgcgctgcctggtgtgctgcattgccgaactatcaggggaaaacactgaaataatggaaatcagcttattgcataatgaatctgatgcaggaagcaccagtttgctaccgctgccattgttgtcatatggtccaagatcaatggttccaatacaagtaccaccatcatcagactttgagagtatcctgtcaccagagccaatctacagtgatcttcagttgaaagagatgaactacaatgcagcagcaatggatgaaagcactgagttccttcacttgattcttagtggcaatgatgaaggatacaatagcacaactgaattacaagtttgggatgttgtggacttctatgtctcagaaaacttttctgctctccaatttgatagtttgatgggttttacaaatgaagttagtacttcctacaatgattgtatgaatttagttgatatggtagagcggcccgtggctcgtctgtctctagatgatacaccaaaacccagtaacagtgatgatgcggttccggcagacaatgtcacaatggaccctgatgaaacatccttataccttcagacaaaaccaacagattcagaaacagaaagtagttctgccgcaggagatgttgaaactgaatatctagatctaaagctactttctagatgtatgcctgatttaatggatgttgactcgcccaattgcttatcgaaaacaccagtgaaaaaaaagcatgtgactcttgtgcttgatttggacgagactctggtacattcaacattggatcactgcgacaatgctgattttaccctagaagttttctttaatatgaaaaatcacacagtgtatgtgagaaaaaggccttacctgaaaatgtttcttgagaaggttgctcagatgtttgaggttgtcattttcacagctagtcagagagtctatgctgagcaacttatagataaacttgaccctgatggaaaatatatctcacggcgtatttatcgtgaatcttgtgtattctctgacggttgctatacaaaggacctgacaattctggggatcgacttggcaaaagttgcaatagttgacaatactccacagatcaggaactgatcgagttgctcccgttcttggagagcctcgtggattcagaggacgtgaggccaataatttcaaagacctttcatgacaaacttgagcagaattagtttgaggcgacagatgtatcatccagtgaacctgtcgctgaagttagcttcgctccacatggtgcaggccatcattcttgggaagttagatataggatgaaaaatcacaatttctgttatgttagctgttacaaatagcaagcataaactgcggtcgttgtctcgtcgatgaaaatggcttgtatatgtatgtccctttgggcttccgtgtcacggatcattgtacagagacgaacattagtgctgaataaagtgatctgagtgcaattttgctcatgagga

SEQ ID NO: 35103 - DNA, 2250 bp, Zea Mays
ttacttgacaggaaatgacccgtttaattgcatcttgtacaagtcttggggcgtttggtgggagagtttatttttttctcgttgatttccgttatcggggggcttccatcttggttcagttctgcaggctgtgtttgtgatcagtgtgactgagaggggagggtttccagtcagtcatttatgaatcctgaggcctgtgcttactagagggagggcaaggctcgttgggatccgggatgaaggggagaaatgactcggggcacagcaagaggccggttgtgctgtgctgtgtgatgattgtgtgcctatgtctcctcttcttgtatttctcgggctccaatggacaggctgggagcgccgcatttgagtacgggaccaaattctcacggtcacttggatggggcagtgatgatggtgaggatggctctgaagagtccatttttggaaccggggatgcagatgatgtcaagcccaagagctttcctgtgtgtgatgaccggcactctgaactgatcccctgcttggataggaacttgatatatcaaatgaggctgaagctggatttaaacctgatggagcactatgagaggcattgccctccacctgaaaggcgttttaattgcttgattcctccaccacatggctataaggttcctataaaatggccaaaaagtcgtgatgtagtgtggaaagcaaacattccacacactcaccttgcaaaagagaagtcagaccagaactggatggttgaagctggtgaaaagatcaagtttccaggtggtggaacccattttcaccatggagctgacaaatatatatcaaatattgcaaatatgctaaatttcaaggataacaatataaacaatgatgggatgcttcgtacagttcttgatgttggttgtggagttgctagttttggaggatatcttctttcttctaatgtgatagcaatgtctttggcaccaaatgatgtgcatcagaatcagattcagtttgcactcgaaagagggatccctgcatatcttggtgttttgggaacaaaaaggcttccgtacccaagtagatcatttgaactagcccattgttcacgttgtaggatcgattggcttcaaagagatgggattcttctgcttgaactagatagattgctcaggcctggaggttattttgcttactcctctcctgaagcatatgcacaggatgaggaggatctccgaatctggaaagaaatgagtgcccttgtagaaaggatgtgctggaaaatcgcagagaaaagaaaccaaactgttatttgggtgaaacctctggacaatgattgttacaagaggcgagcacatggtacaaagccacctctatgcaaaagtggcaatgatccagattcagtatggggagttccaatggaagcttgcattactccgtatcctgaacaaatgcacagagatgggggaactgggctagctccctggcctgcccgattgacagccccgcctccccgtcttgctgatttgtacattactgctgacacatttgaaaaggacacggaaatgtggcagcaaagagtagaaaactattggagtttgctgggcccaaaggtaaaaccagacactattagaaacatcatggacatgaaggcaaactttgggtcatttgctgctgcactcaaggagaaagacgtatgggtgatgaatgttgtgccacatgatggaccaagcaccctcaagataatctatgatagagggctgataggcagcaatcacgactggtgtgaagccttctcaacctatcctcgaacatacgatcttctccacgcatgggcagtcttttctgaccttgataaaagaggctgcagtgccgaagacctgctccttgaaatggatcgtatcctcaggccgactgggtttgccatcgtgagggacaagggcaccgtcattgagttcatcaagaagtacctccacgcacttcactgggaggcattgactgtcgtggacgctgagcccagcccagaatcagaggagagcgaaatgatcttgataatccggaagaagctgtggctaccaaaagcaggcccgcaggattccggcacgtagttcttctcgtacctgttcctctcccagcacctgcagctcagaagccaggcgcagctgcaccatccaaaatgagcctcaaggctgcgggtcctcagctcgaaactactcgtgcaaatctcaaccgggagagcacttcaatataaacaggtaattttacagcaca

SEQ ID NO: 35104 - DNA, 1154 bp, Zea Mays
tttaattaattactattattttagaagatgttctgccagaactacagaatatctaacaagaaatggaagagtacttgtagttaccttcagcagtgtgataacagcaccaacagctcttcctggtgcctgaatagccttattatatgcctacaaattattaaaaaagaatgcaaatgagatcaataaaataatatagaatgacaattcgagaaccaaaaaggataaaatacataattcaaacaaacctgcaggaaaagtaaagcaacgacttttggaagaaaggcaacaggatcattctctgatgaaacttgtgctgtcaaatccttcattcacatatattgaagtgtcaaataattagcaatagacggtttaggcataaaagcaattagcatgccagggcgccaggcaaataacaaattcattgttcagtacactgtatactatattggaaattgaaatcaactttttcccacacacaataccttgagcagtctaaactctaaacatcatcgtatcaatctaataacttatgtaatatgatcataaaaattttgacatgtgttctggtacttgtgtttgcactgcaccatttccaagctaaatacataagcagcattgtagcacacggagtgacggagatacaaaaatatcactgatatactgatatgtaacaaatatcgtgaaagggtctctagcgtaatagttaagattttcgagtaccgcctccaggtcctaggttcgatcccctcgggggcgaatttcgggctttgttaaaaaaaatccacttgttgtgccccgcccgctcccgggttacgtccttattaagttgcatgtaccagtcaatccaacctaaaaacttaagctgataggaggaagtggtcaattcgcttatattatattctaacactcctcatcacctcgagcctctcttgggtctcagacgtggaatatgagcgagtaacaattattttattttaattgcgctaaccaggattcgaactcgtgacctctggatctgataccatattaagttgcatgcatcaaccaattcaacccaaaagcttaaactgataggagaaggtggtcaattcacttatattatattctaacagtcatgtgcgccaccctccgactgggtcgttgcagagcgggcg

SEQ ID NO: 35105 - DNA, 105 bp, Zea Mays
gggcgataattatggacacccaaattaccccctaacaaacgcgctcagagacataaggactaaactcccaaggggtgacagccgagccacctataaaaacccgag

SEQ ID NO: 35106 - DNA, 950 bp, Zea Mays
ggtcctcgcttgggtcggccggctctatatcatatagcaacgcatctatagccgccgtgccacaaacacacaacagccgccgcgcacgcgatcgacgacgacggccgccggatagttagctcctccttgcagctagcttctctagctaataattctagctagccaccaccacctgctgccttagccagagacaaagagagagccatggccaccgtgaacgccacgacgacgacggcagggtccggcaagcagaccgacgcggcgccgtcccctccggcggcagcggcggcggcgtgcagaagcctctccggcgccgacctggccctcagggtgctcctgttcgcggtgacgctgtcggggctcgtcgtgctggccaccgccaagcagaccgtgcgcgtcccggtcccgcagattccagggctcgtcctctcgctcccggccaagttcaaggactcgccggcgctcatttctatgcagctatcatggcttcggcgaccggctcagcgggtggtgtagcgtggatcgggctcaagggcaactcacacaccaactggaacaagatctgcaacatctacagcaagttctgccgtcacattggcagctctgttttcctgggcctcatcgcctccgtcgtcctcgtcctgcttaccatcctcaacgcccactccttataccgccgcagtcgctagttaaggaattgatgaatatgcatatatgcatgggatgtgatgagtgacatggcatctattttgtattgcagcagtagtctctgcaatcgaacaatgtagagcgtgagctgtatcttgtactgcatgttagaaaattgtgtgcttttaagattagaaattacttcctaaatcaatcattacatgaataaaggataaatcacgtatagcaaataaaagtgtgttcacctagtagattaaatctatcctaaataaagtcatcat

SEQ ID NO: 35107 - DNA, 2963 bp, Zea Mays
tccctaccgtcgccgtttccgcactttcctcgtcacacaagtccacctccaccgccgcacgccgccgctcctccgcatccgcgaccgcgacctcgaggtcgccctccctccgcgccagctgcaatggcggcctcgccggaccaattccgggggcatgcgcgcctcccgcacttcgcggccccgctccgctacgacctccgcctccgcccggacctcgccgcgtgcaccttcacgggcgccgcggccatcgccgttgtcgtgtccgcgcccacccgcttcctcgtcctcaacgctgccgagctggatgtcgatcgcgcctccatccgtttccaggatttggcgccgacagatgtggctcagttcgatgaggatgagatcatggtcatcagcttcgaccgggagctgcccttcggagagggcgtgctcaccatggacttcaccggcacgctcaacgatcagatgaggggattttacaggagcaaatatgtgtacaatggagagtcaagaaatatggcagttacacagtttgaagccgctgatgcacggaggtgctttccatgttgggatgatcctgcatttaaggccaagttcaagctaacactagaagttccatctgacctggtagcattgtccaacatgccagtggctaaggagactgtcagtggacttaccaagactatttattatgaggaatctccacttatgtcaacctatcttgtggctatagttgttggcatctttgattacatagagagttcaacatcagagggaactaaagttcgtgtttatactcaagttggcaagactaatcaaggaaagtttgcactagatgttgctgtaaagtcgctggatttatacaaagattattttgccactccttatccattacctaagttggacatgattgctatcccggatttttctgctggggccatggagaactatgggttagttacttaccgagatacagctttgctgtatgatgagctactatcatcagcatccaacaagcaacaggtagcaataactgttgcacatgagttggcgcaccaatggtttggcaatcttgtgactatggaatggtggactcacttgtggctaaatgagggttttgcttcctgggtaagctatttagcagtagaatctttatttcctgaatggaataactggacacaatttcttgatgagacgacctctggcctcagattggatgcacttgcagagtctcatcctatcgaggttgaggtaaaccatgctagtgaaattgatgcaatttttgattccataagctatgacaagggtgcatctgttattcgtatgctacaaagttaccttggtgcagagtgttttcaggaggaatctggggagcctgttaaggatttgatgactacatggactaagcaacaaggatatcctgttatttatgcaaaaatcaatggacatgatttggaacttgaacaggcacagtttctatctgatggatcgtctggtcctggaatgtggattgttcctgtaacagcatgctgtggctcatatgatgcacagaaaaagttcttattgaaagataaaatggataagataaatattaaagagttttctgactctcaaagtgctgatggggagaagaatcaaatcatttggatcaaattgaatattgatcaaactggattttatagagtgaagtatgatgatgaacttgcagctggacttgtaaatgcaatcaaagcaaagaagctctcattaatggataagattggtatcgtggaagattcatatgcgctctctgttgcttgcaagcaaacactgacgtcattgttgcgactgctgaatgcttataatgatgagtctgattacactgtactttcacatgtaacctctgtatgtttaagcatttctaaaataacagttgacgctactcctgacttgaacaaagatatcaaacagcttttgatcaaccttcttctcccagctgtcataaagttaggctgggaccccaaggatggtgagagtcatcttgatgtaatgcttagatcactgctcttgactgcgctggtcagacttggacataatgaaactataaatgaaggagttcggcgtttccacatcttctttgaagacggcaaaacttcccttcttccaccagatactagaaaggctgcatatcttgccgtgatgcgaactgttagcacctcaagcagatccggttttgatgctctccttaaaatctacagagaagcatctgaaccacaggagaaatcacgtgtcttaggctccctgtcttcatcaccggatcaggatattgttttggaggcattgaactttatgtttactgatgaggtgcggaatcaagattcattttacatccttggtggcattagcttagaaggacgagaaattgcatggacctggttgaaggaaaactgggatcacgtgttgaagacatggaaatcgagttcactcatatcagacttcattgagtccattgtcccacggtttacctccgaggagaaagctgtcgaggttaccgagttctttgctggccaagttaagccatcattcgagagagcactgaagcagagcctggagagggtgcggatcagcgcgagatggatcgagagcattaggagtgagcccaagcttggtcagacagtgcaggagctgctgcaggccgatgcgtaaacatgtggcctggaaggtagcggttcctcagtgtgatcatctcatacgggctgttcgggtcagattaaagtcggttgtttagattgctgcagttataatctatagagataaacattgtagaaacagtagaagtcggtataaattaaacctaaacgaccaggcctataaattcttgaaaaggttcaggtgggcttattctacattgtattggcagttgcttgcgtatgatttgttgagggaaaaaactgatgcaatgacgtttgtttcaaagagtggtgtactga

SEQ ID NO: 35108 - DNA, 2210 bp, Zea Mays
gcatggcatccccagctggatcgcgcagaagtaaacgccgcatcccaaatccccatcccacctcgtcctcctctccactctctcttctccctccaataattttctcctctctgcttgctccagttccaagcaccaccgaatcagggcgagtgggagcagagggaatcccatgtctccgcccctcgctggagtagatcctcggggagccggcgtggagctgccgcggtagaaagccagctgagcctgcgagcgcctgatccagcccgatcgggatcgatgggtggggaggcgccggagccgcggcggctgacccgcgctctgagcatcggtggcggtggcggcggctgggttcccgatgagatgctgcaactggtgttggggtttgttgaggacccgcgcgaccgggaggccttgtcgctggtgtgtcgccggtggcaccgcatcgacgcgctctcgcggaagcacgtgacggtgcccttctgctacgccgtgtccccggcacgcctgctcgcgcggttcccgcggctcgagtcgctcgcggtgaaggggaagccccgcgcggccatgtacgggctcatacccgacgactggggcgcctacgcccgcccatgggtcaccgagctcgccgcgccattcgagtgcctcaaggcgctccacctgcgacgcatggtcgtcacagacgacgacctcgccgagctcatccgtgccagggggcacatgctgcaggagctgaagctcgacaagtgcaccggcttctccacggatggactccgcctcgtcgcccgctcatgcagtacactttcctcaccaccgaagaccattgccagctcattgcaaaatgcccgaacttactagttctcgcggtgaggaatgtgattggggatagaggattaggagttgttgcagatacgtgcaagaagctccaaaggctcagaattgagcgaggagacgatgaaggaggtgtgcaagaagagcagggaggggtctctcaagtgggcttgacagctatagcggtaggctgtcgtgaactggaatacatagctgcctatgtgtctgatataaccaatggggccttggaatctatcgggacattctgcaaaaaactctatgacttccggcttgttctgctcgatagagaagagaggataacagatttgccactggacaatggtgtccgggctttgttgaggggctgcaccatgcttcggaggtttgctctgtacttgagaccaggagggctctcagatgcaggtctcggctacattggacagtgcagtggaaacattcaatacatgcttctcggtaacgttggggaaaccgatgatggattgatcagtttcgctctgggatgtgtaaacctgcgaaagcttgagctcaggagctgttgcttcagcgagcgagctctggccctcgcaatactaagtatgccttccctgaggtacgtatgggttcagggctacaaagcgtctcaaacaggccgagacctgatgctcatggcgaggcccttctggaacatagagtttacacctcccagttcccagaatgctggtcggttgatagaagatggggaaccttgcgtagatagtcatgctcagatactggcatacggctctcttgctggtaagaggttggactgcccacaatccgtggtcactttgtatcctgcgtgagtgtaaatagactgagggcccgtttggtgcccatggaaccgttgtctggaacaatttctggtaggattgcttgctgatttgtataggctttgatcagctggaaacaaatgaacaaggcctaagctcgtgtctttctctcacgtccttgctttcttagcctcatggtcaacaagaatggtgttgataacacgatatgtgcttattgtattgatctagatggctagctgctacgtactgcaatcagctactagtagttgagatgacctggattctggaataagcccttgctatcttcgcctgtactgctatctaatcctaggaagcatgtatatgtatactggtaaaagtaacgatggaagatgtgagtctgattgcccgccctgatttgtctcatgggaggtataagactatctccagcaacttacccatctctgtacttatattcaaactttattgagcgaacagtgcagtctatagtgcaggagtcggtcaaagattgtttttaagatattttacattgcatattgcatcgatcataaa

SEQ ID NO: 35109 - DNA, 1713 bp, Zea Mays
ataacatctcggcaagaggagacaggaggtcggtagtttagttttcagaagccaaattaaattaaaggctgtctgtctcactcactcactcactcccagaagagagaagaccacaccacacaaacaaacacctctttggtttctacaaatagaggacgcactgccactgactgagctacaccggtaaaagctgccaaggatatatatcccaccagtcaggaatgcccgcaaccagacatttcagtacataacaggagctgaacaactaacgtacagaggccacgccgaaaaccatcatgaggctcatggggatccctggactcaccctgtaccatctcaagagccatctccagaaatacagactcagcaagaacctccaggcccaagctcatactgccagcgcaaagaatgcgttggtaggctgccggacgggagcagacaacgccctatgccaagggagtgcttcaccgccgccaccaccgccgccgccgcacctgaacctagaaccgccgcagataaacaggtcaatgcacataagtgaagccctccagatgcagatcgaagtccagagacggctgcatgagcagctagaggttcagagacacctgcagctgcggatcgaagcgcagggcaagtacttgcagtccgtgctggagaaggcgcaggaggcgctggccaagcagagcggcggcgctgacgagacgacgacgacgacgcagcagcagcagcagttgctgctgccggatctcatctcgagagccacggcgacgaggcgcggcaatgtccagcaggagcacctccaccagcagcaccacctcggaggcgacgggtcggtggacagctgcctgaccgcgtgcgaggggtctcggtgccagagggagagggaccaggacctgctgtccatcggcctctcgtccgctccgcctcccactcccactcccagcagaggctacaacgacagaggaggcggcggcagcgccagctgcgaggagttcctgcagtttcttgacgagcccagcagaagaggagcaggaggaggagggtcctcggatgagcagcaggagcttgacctcagcatcagcggcggcaggagcaatccaaggcctcgcggcagccaaagccaaaggatcgacctcaacggatccagctggaactgaatggtcgtccttttagcaatggtctccttcctcgtagctttagctgcagtagggaaaatggccagggtcacagcaggtgccctgtgtgtgggtgcacttccatgccctgcagccatttgcagcaaataactaagcagtgactgatgatgatggtgaattggcatgcgagaaagagaacccagatgcacgttctcctttgacgtctgattagttaactctatagatctgtattccagacatggaaaagtacactgctgagatcctctcatcagtttcaggaatgtacagaactcgcagcggatgcacacgaatccatgctgctgcttctgccttggcccaccagtcagtaagctattcctcgctcggccaagccaacacaagcgatggaaatatccagctcggagctcgctattccactgtagcatgcttcttgtttcgtttgtctgtgcgtggccatcttcgtcccactagtcgctttctgtattcttttcttcctcttttcaactgcccattgctggtttgacacacaacgttgctctgtatttctggaataata

SEQ ID NO: 35110 - DNA, 1478 bp, Zea Mays
ctccagttgctgaagtcgttcctgatcggcctccatctccagttcgcctctcttccctgagctccctcccaccgcgcgctctcctgctgccgctctttcccggcgtgtccctgctccagcgccgcggagctcccgcgcgcgcaagtccctctggtgggcgtcgcgctggtcgcatcccctccggtctcctccctcaagcgccgcttcttcgtgcccgtgattggagatcctcgcccatggctctgggctgccagctccgagctcctccctgcttctctgctccagcccgaccgccctcacctcatccccttcctgacgctcgtcctcggctccctctctcgtctggtggctggtgcgcgcaggcgtcaggctcagggagtccccgcgcgagctggcgctgtgtgggccggcggcggcgatggaggtgctggctgccgctcctcgtaggcgttgccttcctcggcctccttgacatggcgaagaacgtcgaggtggtcgagagctgcaccacctccttttaccgctgctcctcccatgggggtgaagccgtgggtcggggcgcggtcccgtggtcaggcgacgacggcgagggcgaagagacccggcggtgcgagcagcggtccgagagggaggacgccatgccctacgaccgcgacgttgacatggatgccgtgcttgtcggtggcgcagccaaggactggagtaaatgctacataggttgtgaatttggttttcttttctgccagtaagacaccttatgctacttttggaattgcaccagatccttctatagagggtatcctcagatcgatggagtcatctcaatattattcaaagaatagtattaatgtggctcgagggagagggtacaagattgtgattacaatcagcctttcttcagacttcccagttggcaactcttcatgggctgaatatgatgctgtggcacctgtgcctccaaagactgaagaagctcttgctgcagcctttatttctaactgttgtgcacggaactttcgtttgcaagccctcgagatgcttgaaaatttggatgtcaaaatagattcgtatggtggttgtcatcgcaaccgtgatggcaaagtggacaccttgaagcgatacaaattcagcttggcatttgagaattctaatgaggaggattacgtaacagaagagttttttcccaatcactggtacgataattgatcacgtgatgcgaaagaagagccaagtcgaccccaagatgacgtaacgagtggactaattcgcaaggtgatgcggatggacgaacctgaaggtggataaactgaacaagtgccaaaacaaaggatggtcgccaagtggacgtcacctaacaaacactaacgtagtgttaatccagggaacactttcctggactggttgagtacgaaggagtgatagacccagcctacaccttagaccactacgccgtcgcccacgatgcagtagaccgggac

SEQ ID NO: 35111 - DNA, 1048 bp, Zea Mays
gttaatatgtgttctgatattgtgttgttattatgttcaaattttagaaagtatgaagaaatatgcccacctctggtagaagaactctgttatattactgactattcatacaccaaggaagaggttttgcaaatggaagcttctgttctgaataacttgaaatttgagatgacagtacctacagcaaaatgtttcttaaggagatttgtacgtgttgctcaagttcctgacaagggctcatctctgcatcttgagttcttagtcaactacatttgtgagctgtcacttctggagtacagcttactttgctatttaccttcaatggtagctgcctcttctgttttcttggcgaagtttatccttatgccaataaaaaacccatggaattcctcactttcttactacacgcggtatacaccatctgagttgcgtggttgtgtaagggtactgcaccggctcttccgtttgggccctggaagcaatcttcctgcaattagagaaaaatacagtcagcataagtacaaatttgtagcaaagaagtactgcccacagtcaatccctactaagttcttccaggatctgacaagttagaagccaagattacttctagttactcaatgaaaccttcctgaggtacttagtgtgatactatgatattgatttgacagatagttttgaatgcaaggcatgcgcgcggccttgcgtttagcagataaacaggttcaagtaaactgtatgtcacttgtggcaatgttgtttcagtgttgtgctttgattgcttccagcatcgtcttatacgttgctgttgtggtcttctcacgctgtctagaacttttattgtatagttctggaccttgctcataacaagggtagatagtttggctaaagataaagtgtactcattctctcattgttatctacgtgttgcttctgtattctgaagattctgctctgaaacccagcaaatgtattatcaggcatcagaatagtagagtctgagtcaatttttgctattgggaataagtgggagggtaactttggaaagcaa

SEQ ID NO: 35112 - DNA, 1734 bp, Zea Mays
tgtgtgacactgacacctgagaccagctctcctgcttcgcggctgtctctttcatcggccacccacggcggcggagcatagcactgatagcagtaagcaagcagcggagacgccggagagcggtgaagaagcatggagatggagcagctctgctcgctgctccgcgacctcgacgcgctcaagcagcatcccgacgacctcacttccaccatcgatcggatgcgggagcggctagtggcgatgatgaatccggcagccggtgccgcttctcgatccaagattaaggacatgagtgcagaagtggtggacaacaatccctacagcagacttatggcgttgcaacggatgggcgtagtggagaattatgagcgcatcagggactactccgttgccatcgttggcataggtggcgttggtagtgttgctgcggagatgctcactagatgtggaattggacgactgttgttgtatgattacgacacggtcgagttggctaacatgaataggttgttctttcgcccagaacaggttggaatgaccaaaacagatgccgctgtacagacactttctggaataaatcctgatgttgtgttggagagctactcattgaatattactacagtcaaaggtttcgaaacatttttggcaagtttaaaagcacaaagttctcatgagcgtagcactggagttaatcttgtcttgagttgcgtcgataactatgaagctcgtatggttgtaaatcaggcatgcaatgagcttggtcagacgtggatggagtctggcacacaagggaaactgatttctgtcaggattctattttactgtgttactgtttattttttttttggtgtctcagaagatgctgtttctggtcatatacaactgctggttcctggtgaaactgcatgttttgcatgtgctcctccattggttgtagcatctggagtggatgagcgtacacttaagagagaaggtgtttgtgctgcctctttgccaactacaatgggtgttgttgcgggtctcctggtccagaatgctctgaaatatttgttgaactttggacaagtttcccgttacttgggatataactcacttaaggattatttccctgcaatggaaatgaggccaaatccacaatgctcgaatccagcatgtgttctcagacagaaagaatatatggaatccaaacctgctagagatgcagcagcgaagactaagatggaagctgaagcatccacagaaaatgaatgtcctgtccacctagacaatgagtggaatattagtgttgttgatgatgaaactgagacatcaagcattcgaaacactccaggaccagctgctccagtgagttccagcgctattgatgatgatgatgatctcgaggagctccagcgtcaacttgatgccctaaacgcatcttagccttaataagtaggctagttcatctgcgccttaattggcttctccccaatcccaacttggatggggaagatgatttacatactgtttttcggagttggtaaattcatagcaccgtggtaaaagaaaaaggagaaaatgatagctatactggttttgggagttttgacttacagttttggttgagatctgagaacatgtgcatgtctgagccagacagctcgtcggtaatggtactaatgtctgaatttttgttgctgttgatattcaaaggttttatctggaaccgtcatttcttattgagaggttccacta

SEQ ID NO: 35113 - DNA, 1226 bp, Zea Mays
cggcaccagatctcgccgcctctccatttacaaaccaccacccgccgctttcctcagttggtctcctcctcacgcagcacaatccctcctagagcaaaagtcctaaaggcctcaattagattagacaaaaaagacgcgattggatcactggcgagggaggcgtgtttaggggggtggcgaccgaagctagccgccgagctcggcagcgttttgcgcgaaggacgtacgacgacgcggacgcaccgtcaaagtctacaggctgcgcaatccctttctccctcttatccccaaggcgaggagctgagggggggcccttctgctgctgttcttgtttccccgctctccaagatgtcgtccccgagcaagcgccgcgagatggaccttatgaagctgatgatgagcgactacaaggtcgagatggtgaacgatgggatgcaggaattcttcgtcgaattcaaggggccggccgaaagtatctaccaaggcggtgtctggaaggttagggtagaactgcctgatgcatatccttacaaatccccgtccatcggcttcatcaacaagatttatcacccaaatgtcgatgagatgtctggctctgtatgtttagatgtcataaaccaaacatggagcccaatgtttgatctagtaaatgtttttgaagtattccttccacagctgttactatatccaaatccttctgatccattaaatggggaggctgcagcactgatgatgcgtgatcgtcctgtttatgaacagaaagtgaaagaatattgtgagaagtatgccaaaccagaggacgctggtatcactccggaagacaagtccagtgatgaagagcttagcgaggaggaagacgactccggtgatgaagctatacttggcaatcctgatccctagtctgagttggaagaagccagtccagctcatcaatacaatgtttattgcagaaattgcaattaaacaaaaactgaaaaacaaaaaaactttggatggcatgtaaataagtgtaccttgtatgttctccaatgttgtttccttcatttggctgatcgaaattctgattgctcttacatccccccccccccccccccccttcccgcactcccacgcgtcatggtttgcagtcgatctgtgctttggtttcggaggaatggaaaagacaaggctgttactttctgttctccattggatgttgccgtggactcaataggtgtggattgctt

SEQ ID NO: 35114 - DNA, 373 bp, Zea Mays
gggaaagtcaatctccattttgagacctaatcagttgcctctcgacactaaaaagctccaaggtttcacctttacacaaaggatgtaaagtaaacttctatgcatgcagtcactatcaaggtcaaggggaaagagaccacacaagtaaggggtatgcccttttgatctaacagagatgatagatgttgcttgatcacttgacaaacaacataaaaattgttccaagggagaagtccacggaagatcacatatcagtgtagttccacaatggatcatgactagagacatcgataccagcatgcgccaagcagcataaccttgcgtgtacattcacaaggggctctcagtttcgctgcggcaccataagtcctta

SEQ ID NO: 35115 - DNA, 3786 bp, Zea Mays
atttgcttctcgcaccatttcacactgctgcgacaacacgcctttggatctgctctgttttagtgctgccagtttgggaaatatcagtctttttcactaattattattatgtgctaccttaattacctcccattttcagtaggttcttgcaactggctactatcaactccactcatagttaagactaattagaaccactgcagcaaccataaacttgaaccactttccattactctgctatcagatcctgaaccagtgcagcaacatgcctagttatgccctcccgtttttctgatttgagcagttaacctcgcaatccaactgggtggctgtcttaactctgttactaccgccaccaataccttcggttactcaagttaacactgctgctgtgtgacaggagaagctgcgtgtcgctgtgctcgtctcaaaggctgcactgcagtttctacatggcctcacccttcgaagcgagtacgtcgtccctgaggaagtcaaggctgcagggtttcagatctgtgccgacgagctggggtctattgttgagggtcatgatagtaagaagctcatcacccaaggtggagttgatggaattgcggaaaaacttgcaacttcgaagacggatgggctaagcacagccgatgatagtattaagcgcaggcaagacatatatggagtaaacaggttcacagaaagtgaggtccgtagtttctgggtgtttgtatgggaagcgcttcaagatacaactcttataattcttgctgtctgtgcgttcgtatcgctggttgttggcattgtggtggaagggtggccaaaaggtgctcatgatggtcttggaattgttgcaagtatcctcttggttgtgtttgtcactgcaacaagtgactaccggcagtcactgcagttcaaggacctggacaaggagaaaaagaaaatccatgtacaggttacaaggaatggttttaggcaaaggctatcgatatatgatcttcttcctggtgatgttgtccatttagcaattggggatcaggtccctgcagatgggctcttcatttatggattctctctgttgatcaatgagtccagcctaactggtgaaagtgaacctgttgctgtaaatgaagataaccctttccttttgtctgggaccaaagtacaagatggctcctgcaagatgctggtaacaactgttggcatgcgcacccaatggggaaaactgatggccactctcagtgaaggcggcgatgatgaaaccccactgcaagtcaaacttaatggagttgcaactattattggccagattggattattttttgctgttataactttcattgtcctgtcgcaagggctattcagcaagaaataccatgagcagatgcttttaagctggtcaggagatgatgcattggagctgctggagcattttgctattgcagttactattgttgttgttgctgttcccgagggattgccgttagcagtcacgctgagtcttgcatttgccatgaagaaaatgatgaatgacaaggcacttgttcgccacttagctgcatgtgagactatgggttcggctactaccatctgcagtgacaagacaggaacactgacaactaatcatatggccgttgttaaggcctgcatctgtggaaacatcaaggaagttaatggttctcagaatgcatccaagttacgctctgagcttccagagattgttattaaaactcttttggagtctatatttaacaatacaggtggtgaggttgtaattaaccaggatggtaaatatcagatcctgggtacccccacggagacagctttactagagtttgcattgtcactaggcggagattttaaggcaaaacgtgatgaaactaagattgtgaaagtggagcctttcaattcaacaaaaaagaggatgagtgtcattcttgagcttccaggaggaggatgccgtgcacactgtaaaggtgcttcagagatagtcttggctgcctgtgataaattcgtagatgagacaggtggtgttcatcctctggataaaataactgctgacaagctcaatggtattattgatagttttgctggtgaagctcttagaacattatgccttgcttataaggatatggaagaaggtttttccaacgcagaccatataccgctacaagggtacacatgcattggaattataggtataaaagatcctgtccgcccaggggtgaaggagtctgttgctacttgccgggctgctggaattatggtgagaatggtcacaggagataacataaatacagcgaaggcaattgctcgtgaatgtggtatacttactgaagatggcatagctattgaaggaccagagttcagagagaaaagcctagctgaactccttgaactggttccaaaaatacagatattggacttgcaatgggcattgctgggactgaggtggcaaaagagagcgctgatgttataattctggacgacaacttctccacgattgtaactgttgccaagtggggacgatctgtttacatcaatattcaaaagtttgtgcagtttcagctgactgtcaatgtagtggcactgctagtgaacttctcttcagcctgctttacaggtgtctcctagcctcacaattctattaacctcagtgttttaagatgtctctctgtctaatcacgtgcttgtaatgccaggaaatgcaccactaacagctgttcagcttctttgggttaacatgatcatggacacccttggcgcgcttgccttagccacggagccacctaatgatgacttgatgaagagagagccagtaggaaggacagggaaattcattacaaatgtgatgtggaggaacattcttggtcagtctttctaccagttctttgtgatgtggtatctccaaacgcaagggaaaaatttctttgggcttgaaggctctggtactgatattgttctgaatacgataattttcaactcattcgtcttctgtcaggtgttcaatgaaataagctctcgggagatggagaagatcaacgtgctcaagggcatgacaaggaactacgtgttcatggctgtcctcagcagcacggtgatcttccagttcatcatggtgcagtttctaggagagttcgccaacacgacgcccctgaccatacaccagtggctagccagcgtgctcctcggtctggccgggatgcccatcgctgccgccgtcaagctgatcccagtcggctcgtcatgataccattgaagattgctgctgcctgggatgggaagcacggcatgaaaagcgtcaggctgtccaagctgcatggtattcggtggagctgagctctctctctgtctctctgtgtgcgtaaacttttggaatgcacggagggcaggctagggaaatggagcagccgctgcagtttgagaagttttgtagcctggaaatgtggctagattgcctcggacctgtaagaaacatcgtgtttgttggcgccgggaaaaaagcagctagctgtggtggtggtgcagcagagttgttagattgacttcgaaatggaatttagactgcaggatatttatggtggatgaatggacggaaaacatggttcgttggttatttttactcttgcttattagagctctggtttggtctttttaccttagtagttgaaaaagagtaaaatttagcatcgggtcgtcgaagccaaagttgtcttgaaggcgtcatttatgtctacaaaaaaaacgtaaaatgtatttttgggctccttaagatcgcctcttgttccactcgag

SEQ ID NO: 35116 - DNA, 3120 bp, Zea Mays
cggatgtgttgctactcccggtgtttggcggcgctcaatcaccaaaggttctgacaccacgttggactccccttcctcctcgtccgcgacctccgcagggtggctgttgcacttgcacctgcaccgtagtggggattccagcttccaccactgccccccgtccccgtcccggcgccggcagtagctcggaggccgggaccacgctcggtggcgtgtcgtacgtcagcacgcccatcccgacgacgacgcgttcgattcaggcggcgacaaatacctgctggccaagacctatttcgactgccgggagtaccgccgcgccgagcacgtgctgcagaaccaggtcggtcgtaaggctgtgttcctgcgatgctacgccttctgcatgagtgcatggtgagataggatcggcttctcttgatgtgtttattttcaaggtacatctgcaagttttcagaggatagggcgagtggtgtttgatgaaatgctcaatagagctgctgcattgtaggtgatatttggttagatatggagtgcctatggcttaattgatacttctttggcttttatttaggtggatcgacatgttttagtggcccagaagtctgtttagttacttccatgtgcaagtggagtgtttattaaaatatggtttcctgtgattttacctaaaagactgaacagaacttgattgcgggactaacgagtaataagagttgttccaacttgcagaagtccaatttattatgggttctttatagtgctttgtgctcatgtactttaagctaacagaatggtttgacatttgtaaaacctctggtcatgtattccacacggctattgatttgctatttattgataagttcttagctccacgggcatcagaaataatggaagatgtgaactaattattccttccaactagtagggaattttcactgtgatgatagaatttgatggatatattacattcaagaagttataattatgagggcttaaaactaagtcccttaaatgattggcaatttctattcaatattgatacttgtacatgaaagctatgtcctgccataaattcttgctacgccacatgtaagttataattgctaaatgaaaaattattcatatttgttctagaacaataaaacttctgccagcatcaaaatcttttatgctggctggtaatatttgtgtaatgtgaagatttgtaacatttatgagctaaaactctattattggtacttattttagtttttattgtcaattgtttcttttactgagtgtgcatgttttgggattgtaagggtagtagtatttgtgacattgtctgtaaatttccataatttaatcttttaaatgatttctgtgtgcaatttaatctgcccccttcccttgtccactgactctatgaaagttcgctaatgccccaaggtgttttctgcttggtccatagattaattaatgatctatttgctctgcaattttagtctggagggaagcggaaaatgctgttaatcaggaactagttgctttggagaaagagctctcaacacaccgaagaactggctctattgattcgtttggactttacttgtatggcattgtcctacatgataaaggatgtgaaggtctaactcgaaagatcttggtagaacctgtcaatagctatccttggaactggagtgcttggtcagagctacaaactttatgcaccagcagtgacattttaaacaaattaaatctgaagaatcgctggatgaaagacttctttcttgctagtgcatatctggaactagagacgcatgaagaagacttctttcttgctagtgcagattctttctttggcttgtcttgcacaatagatgctggaccgcagaccgtcttgctaaaagaggactttcccatcccagtgcgtgtcccctttgtgaccaagaagaggaaacaatacaacatcttttcatctcttgcgtctttgcaagacagttctggtacttcttgttgagcaggtctgggttgcctaatctttcaccggacaacgctttttgcagcctagatgactggtggagcagggctgtggagaagattccccgtgatctccaatcaggagaaggagactgctaaaaatatattgcaagggataaaaatgttacagtcaggatttccatcaatggatattgaccattttgcactgtaaagtccacccgcagataagttggaacattggacatcaatagccaaaaagccaacagccggaagtcaaaagctagcttcgagccaaaatcccaaaactgcagtacaaacaaacaggccctgaagggaatgattctaacgagggctgcccaactgatggaagctcaattgcacatctcgatcgggaattacttccaatcttcggtcacaggctcacagcgtgatgcttattgtttgtatcctcgtcacgagactccatgctgctggatacgatgacctaccgcgcatgatgctggctcgtagttcctggagcttggcaacaaggagaaccaggcgcctacatggcgcgaagatgagcgtcattggaatgagccagacccctaatgcaagtatcaacatagctgtcttctgtgagtagagctctaaatatctgcgggtttggcttccttcaccggacagctatctggatagtgttctccccatggttgcttgcatatataagcttcattggaagaccttgccttgccttgcgtgcaatgtgcatgtcaaattattggttatctgtttatcagcacacttgtccaatgccttacctttgacatttcgtaaaactaagcactgcagattttaaaataaaaggctagagtgtagggcaacggtgtggtagtactttgcacagtgtgcatgatgtgctactggaataaaacaagtctgtttagtgatgatgcgcgatgcaagttgtcattttagcctacgtcaggatcgcgtgctgctggtttctcaccctattaggtttggtttatgtactctagtgtttaccccaattttttttgcatgtattgagctagattagagtgtttaccataattttttacatgtattgagctggataagagtgtaaaccaatccatttcaacacatgtggattgagat

SEQ ID NO: 35117 - DNA, 554 bp, Zea Mays
gagagctttacccgacgcccaggacgaatcctcctggagcctagcactgtcattatgccctagctaggccaggcctagggttcacaggtcgcaatacaacaaaaaaccagattgggggcctcactgcattctactgctgcgactagtacggcacacacacctccctttttcattcgagttcgaggagaaggcggcggatgcggccatggagctcgacgagcaggccttcctggaggagatcctctccctgcgcagggacgcctgggactgcaatgtgtccatgggggacctcttcgccccggcggcggccgccgccattgactgctccttccacaaccagcaggcgcccaccgtcagcgtcctccccaccttcaccgcctcctgcgccgagccgccggccttcgactgcctcagcgaggtctacggcgccgccgccgcgttcggcgggcccaatgccggcgacgagatggcgttcctccacgtcgcggagcccatggatgcgctgcagctggacaacaacgccggcctcggggttgtgcaaggtggagcccggc

SEQ ID NO: 35118 - DNA, 1475 bp, Zea Mays
gtcagatgggaccccatcccggcacggcagccagccagccagccaggccagacagccatggtggtgctcgccaaaccgcctgtcgtcgaccagatcccgctcctgcggtccccgggccccagggacagcttctcgggagtgccggtcgtcgacctgtccagccacggcgcggcgcgggcgatcgtcgacgcctgcgagcgcttcgggttcttcaaggtcgtcaaccacggcgtggccgcggccaccatggacagggccgagtccgaggccgtcaggttcttcgcgcaggcgcaggcggacaaggaccgcgcggggccggcgtacccgttcgggtacggcagcaagcggatcgggctcaatggcgacatggggtggctcgagtacctcctcctcgccgtcgacgccgcgtcgctctccgacgcctgccccgtgccctccagcgccgcgttccggagcgcgctgaacgagtacgtcgcggccgtgcggaaggtggcggcgcgtgtgctggaggcgatggcggagggcctgggcattgcggacgcggacgcgctgagctccatggtgagcggcgccgggagcgaccaggtgttccgcgtgaaccactacccgccctgccccgcgctgcagggcctgggctgcagcaccacgggcttcggcgagcacaccgacccgcagatcatctccgtgctccgctccaacggcacctccggcctgcagatcgcgctccgcgacggcgcgcagtgggtctccgtgccctccgaccgcgacgccttcttcgttaacgtcggcgactcgttgcaggtgctgaccaacgggaggttcaggagcgtgaagcaccgggtggtgaccaacagcctcaagtccagagtttccttcatctacttcgcggggccgccgctggggcagcggatcgcgccgctgccgcaggtgctggcggagggagaggagagcctgtacaaggagttcacgtggggcgagtacaagaaggccgcgtacaagacgaggctcggcgacaacaggctggcccagtttgagaagcgtagcaacatctagctaagctagcaaggcgcgcggcccgggcatgcacgccgcgtcttcacaggacaacaataacaaccaccatgacgagcgagttacttgcaagaaatgatgacaaggaagaagaagaagaagaaggtgaagacgatgatgtgaacagccagggagcgtagtgactactccagtagctagatttttttgtgtggtgggtgcagggtttccgcaaagttgctaatggcctgttctggtgcttgcggtggggttagttgcctatttcggtatgctggagctggacgggcgatgagccgccgcctgtaattagggttaaccatgatagcatgcagcgaagcgaaggggacgatcctctctggctccgtagcttcccacgtttgcttccttgtgctttccctttcctggtttatatatattttcgtata

SEQ ID NO: 35119 - DNA, 2672 bp, Zea Mays
ccggtgcctgcgcagcggtcgcggaaattccccgtttaattgcatattggacatgtcttgtggcgtttgattggagaatttaattcttcccaacgatttccgttcttcggaggcttccatcttggtttcagttctgcagatctgtgactgagaggggaggaattccagtcagtcgtttatgaatcctggggcctgtgcttactagagggagggcaaggcaagttaggatccgagatgagggggagaaatgactccgggaacagcaagccggttgtgctgtgctgtgtgatgatcgtgtgcctatgcctcctcttcttgtatttctcgggctccaatggacaggctgggagcaccgcatttgagtacgggaccaaattctcacggtcacttggatggggcagtgatgatggttctgaagagtccatttttggaaccggggatgcagatgatgtcaagcctaagagctttcttgtgtgtgatgaccggcactctgagctgatcccctgcttggatcggaacttgatatatcaaatgaggctgaagctggatttaaacctgatggagcactatgagaggcattgccctccacctgaaaggcgttttaattgcttgattcctccaccacatggctataaggtccctataaaatggccaaaaagtcgtgatgtagtatggaaagcaaacattccacacactcaccttgcaaaagagaagtcagaccagaactggatggttgaagctggtgaaaaaatcaagtttccaggtggtgggacccattttcaccatggagctgacaaatacatatcaaatattgcaaatatgctaaatttcaaagataacaatataaacaatgaggggatgcttcgtacagttcttgatgttggttgtggagttgctagtttcggaggataccttctttcttctaatgtgatagcaatgtctttggcaccaaacgacgtgcatcagaatcagattcagtttgcactcgaaagaggaatccctgcatatcttggtgttttgggaacaaaaaggcttccatacccgagtagatcatttgaactagcccattgttcacgttgtaggatcgactggcttcaaagagatgggattcttctgctcgaactagacagattgctacggcctggaggttattttgcttactcctctcctgaagcatatgcacaagatgaggaagatctccgaatctggaaagaaatgagtgcccttgtagaaaggatgtgctggaaaattgcagagaaaagaaaccaaactgttatttgggtgaaacccctgaacaatgattgttacaagagacgagcacatggtacaacgccacctctatgcaaaagtggcgatgatccagattcagtatggggagtgccaatggaagcttgcattactccgtatcctgaacaaatgcacagagatgggggaagtgggctagctccctggcctgctcgattaacaaccccgcctccccgtcttgctgatttgtatgttactgctgacacatttgaaaaggacacggaaatgtggcagcaacgagtagaaaaatattggagtttgttgggcccaaaggtaaaaccagacactattagaaacatcatggacatgaaagcaaattttgggtcatttgctgctgcactcaaggaaaaagacgtatgggtgatgaatgttgtgccacatgatggaccaagcaccctcaagataatctatgatagagggctgataggcagcaatcatgactggtgtgaagccttctcgacctatcctcgaacatatgatcttctccacgcatgggcagtcttctccgacctcgataaaagaggctgcagtgctgaagacctgctcctcgaaatggaccgtatcctcaggcctaccgggtttgccatcgtgagggacaagggcactgtcatcgaattcatcaagaagtacctccacgcgctccactgggaagcagtagcggctgcagatgccgagcccagctcggaatcagaggagaacgagatgatcttggtgatccggaagaagttgtggctaccagaagcaggctcgcacacgtgattcccttcccggcgtctgcagctcagaagcgaggcgccagctgcaccagccatgatttatttctagccctactgcacacatggagatagatttattatttacgaggatacggaaaatatgtggcaggcctggattaaaaaaaggctatttttttctcattctcgacagatatgggacttgatgtttgttctctagtttggttaggaaataaacattctttttcgtcttaatgttgaggctcatttaggtgtttgatgtccatcaatggaagtctgatgtagtctgtagctagtgtatttagtgtttacttgaaagaactactgtacgcggatacgtggtttgcactagagcctcaagcctgcgggtccctcagctcgagacccactcatgcagatctcaacagggataacactccaatataaacaggttacagcgcatccgacaaagttgctctgaaattacatggatttatgctatacggtcaaaattcagcagcttaactatctctatctctatatttaaactctgccctataaacattgcagtatatagtataaaggcatctccaacaacctgtcctataaaaataccatataatttaaaaataa

SEQ ID NO: 35120 - DNA, 2480 bp, Zea Mays
ccgctctcgtcttcctctcccaatgtcaatagccacttccactcccaaagtcacaagggtccgaacccaacaaaaaaactctccaaaccccatttcatttttcaaatctgctcctgccccacctccgccgccggacttccaaacgatcaaaccccacccagtcgctgtctccagccccaaatcctcgagctccctccgtcagtggcgcgatggggttcgtggatccggcggcgccgctgctggcgacgtgcggcggcgacacggttaagcttttcgacgtcacggtggagaccggcgacccctgcgtcctcgcctacacccccgcgcccgcgcaccccgtcaacgccgtcaagtggaaccacaccaatcttattgtagcaagtgctggcgatgataaaaagatctcattgtggcataagaagggtcaaaatgtaggacaactaccaacatcaactgtcgaccgtggtgatgacatagaggagtgcatttattctatcagctttagcaacaaaggttctcgatatctctgttcctgtggaagtggccatattgttaggatatgggatttgcagcgtaagagatgtatcaaatggctaagcggtcacactgacacaattactggcgtaatgtataactgcaaagatgaacatttggcatcgatcagcatgaagggggacctgattcttcataatcttgcttctggagcacgtgtttctgaacttagcgatccaaacggacaggttctgagagtgcttgattattcacgaaatagtaggcatttattggtgacagctggagatgatggttctgtgcatctttgggatacaactgcaaagtctcctaaggtttcatggctgaagcaacattctgcacccacaagtggtgtttgtatttcaccatccagtgataagataattgctacagtgggccttgataagaagttatacactttagattcagggtcaagacggccggcccacactattcctcatgaggccccattctcctcattggcgtataatgatgatggtactataatagcagcgggcactaacagtggacgtgtggtgttctatgatattcgaggaaaaccaaagccattgaccatccttcgtgcatataatacttctgaggctgtgacaggtttatgctggcaacggtcgaagcctgtcgttgttaatgagaacagttcttctgaagttgctcttcttgggggaactaatgaagagtctgttcttatgccagatcccttgccttcagcaacacctacaggccttggttctggggtggccactacaagtcttctctctttgacagcaaacacaagtggctatctttcggcctcaaattcttctactatggaggaaacaccatatagaactcgtccgctgactggtggaccgttatcaaagctacaggctcctcttagtaactataatctgaaggatgatatggatgtattttctccacttgttgatgtccagcctttcacaccatctagtggcaactggtgggatgagcatggaagtgatgatgcaaaaaaggatgataaaccaggagaaaagaaattttcaacaaccaggaagtattcgtatatggaaggcaatgatgagccacatccgattgcagattggcggtctactgcaagacaggatagcatctcatctgtgactactacatccatgccatcatggaagagcgaactgtctgtatcttcgccagagccagcaactggaaatgcattaccagacaggcttactcaacgtcaactgatctcacgctttgggtcttcagcctttccaactggtggcttggcatttacagcctcacaagatccagcttcagcacccagtcactcactgaagggttctcttacaagtaacattttaatgaatctacaaaacaagggcatcttgaacaatgtatcctcttccctggacgcatcctctcctaatcttcagagttcacttccctcatcatatgtttcaaaaactatgccatctgtgattcctgatcaactaggagcagcacaatccacttctttgtggagacccacaacatatactgatagaatgagctcatcatctgtttttagtgatggattagcttcagcatttggctcacccaaatcaaagaagacaggagcagaagcaaaagatgagttgctcagtaacattttgtcaagacaaacagcagctggctcttcatctgcaatccctttagcaagcaatggggtagtgccaccacaactggcgaacacaggttcttcatctgatcaactcggcgcttcttccttctcacttcagtatgtgcagcgcatgcttgaagaatctcttgggtctgtccagaagtccatccatgaggatgtgagaaatctccacattgaacttttaagacagtttcacatgcacgaggcgaatgtgtgttccagtggttagaacctgagtgtgggaggttgaggttgatggatcgaacgccag

SEQ ID NO: 35121 - DNA, 281 bp, Zea Mays
tcgataaaacaatgatgtgattatcaagaacaggcaaactggaattagggatatcagcttgcgccaatcgaataagggcatggtctaagatgaaaatatgagtcgagattcttattttaagcttaagtaccctttttgtccaacgaagaaattatctaaacatttatttgtataagtttggatcaaggaggggtaacggaaaaatcaactttggtcatggttcaccaactaagaacatggcctagatttgggtttaggcaaacaagtcactaaccttctat

SEQ ID NO: 35122 - DNA, 2406 bp, Zea Mays
cgccgtgtttggcgggtgagattagattcctgctcctggccgcttcacttcttccttagaagatcgctcggggttgggttcttctggatgtgaggtgatgaggtgaggcttcaatccgttcctcctctagctccggtggttggtcgtgctggctctcagaagatgggagcttcccaaaggaaagcagccatggtggctagggtttgcgtcgccggcgcattctgagatgcgctgctgcttgcgcgcgcgcgcacgctccatcgccctgcatccgccgtcctcacgcgcccaagctgctcgtcgcccctctccatcgctgggacctgtcggcagcggatcagtgacgcgagcacaggtaaaaagaaaaggatgaggcttgggagtataaacggcttgcggttcacgcagcttaaacttgtcatccttgcgttcttcatgttgtttgttctctggaaatgggagaagggctcgtcatactacgattccgaaatcctccagccagatccgttggttctgactcatccaggtcatctttaaagcacacagagacgttacctctctttaagcttcttcttgctacattgacctctgttttcatcttccttcgaacttgcagctaacttgaagtttgtagaccagcatacatccccagaagaagacttttcaagtgcagatcgatcacaccggtcagtaggtaaagtagaaaagccggttactagtgcgctgccaccattgtctacgataggctattctgttgatgttgcagatgggaatgaagtgccacctcctgagaagaaagaatgcgagtacaggaatggaaagtgggtttctgacaatcgtagaccactatactcagggtttggttgtaagcagtggctttcagagagttggtcctgcagactaacccagcgaaaagatttcgcgtatgaaaaattcagatggcagcctgaagcttgtgagatgccagagtttgaggcctcccagttcttgagaaggataaaaccatcgcttacgtgggcgattctctagggaggcagatgtttcagtcgatgatgtgtatggtcactggtggaaaggagaggctggatgtagaagatgttggcgcagagtatggctttgtgttagcgccgggtgcaaaaaggccagacggctgggcctaccggttcccgagcaccaacacaacaattctataccactggtcatcaacgctctgtgatttggagcccctgaacccatcagaccgagcgaccagttacgccatgcacctggaccgcccgcctgcttttctgaagagcaacctccacaggctccacgttctggtcctcaacaccggccaccactggaaccgagggaagctgagggcgaacaggtgggagatgtatctcggcggagcgccgaacagcgacaggaacaccgccgtcatctggaaggccaagaacttcaccgtccacagcgtcgtcagatgggtggacacgcagcttccccgccaccccaagctgaaggcgttctacaggtcgatatcgccccggcacttcttcaacggtgactgggacaccggaggcagctgcgacaacaccagccctctggccaagggagggagcggcgtccacctcgaccgttcggaggacgccgacgccgagggcgccgtgaggggcaccggggtcaggctcctggacgtcactgccctatcgcggctgagggacgaagggcatatttcacggtacagcatcaaggccacttctggcgttcaggattgcctgcactggtgccttcccggcgtgcctgacacctggaacgagatccttgcggcccagctatagcctgtagctgaatttgaagatgccaagggttatgtcgaattgtttatgggtgaagctcgtatatacagtaactaccacggagtactacgtcgttgccggagacccaatgctgctggtagtgaaacactgagctgcagtacattctttcgggaccgtgcttaactgtagaaaatacagggccttttttttgtgtaagtacatgttgtgtttgcctactgttacctgtgtacgccagttgttaattggagaactggattgatagatagtttggaagtgttgcctgagaggtagggcaacgcatcttgcagcatccagtcctttgagaactcatctgttatgtaccaaacacgaacagagagcatcatgcattgctgatccatgtgatgtggttgttggtacgttgattgttgctaggttcgtcctctcaccccttgtatcaccattgtttatggtacatgtggaatcatctggtaagttctgaatgtcataattaattactgaactgttcttctgatgctgagacctcgaacgtctgatgcaatttgtattcaagatcagagtcccagcggtacttgcacgtgcaaaa

SEQ ID NO: 35123 - DNA, 3329 bp, Zea Mays
cgggcgcagggcacacggctagagcctaaaagggagggagggggaggcgcgcgagccgccaggacctgagagcggctgctgctggcgaatcgacctcctgggcccgggaagagattgggtactgtagagagaccgggtagagatagagaggccaggatgagagtggcggtggtaggcgccggcgtgagcgggctggcggcggcgcacgagctggcgaggagcggcggctcccgggtgaccgtgtacgagaaggaggactacctcggtgggcacgccaggaccgtggccgtcgaggacgccgacgccgccagcaccgtgcagctcgacctcggcttcatggtcttcaaccgggtaacatacccaaacatgctggagtggtttgaagggctcggtgtagagatggagatatccgacatgtccttctcagtgagcacggaattgggggccagcggcagcagatgcgagtggggcagccgcaatggcatctcaggactcttggcacagaaaagcaatgcactcagccctagtttctggcgcatgattcgggagatactcaagttcaagaacgatgctctcaggtacttggaggaccatgaaaacaaccctgatatggaccggaatgagactctcgggcaattcattcggtctcatggatattcacagttcttccaagaggcttaccttaccccgatctgtgcgtgtatatggtcatgcccatcgcaaggagtgttgggattctctgctttctttgtgctctctttctgccgtaaccatcatcttcttcagttgttcggtcgcccccagtggctcaccgtgaagggtcgttcgcactcctatgtacacaaggtaagggaggagttggaaagtatgggttgccaaattaaaaccagctgtgaaatcaaatctgtttcaagttctgagggaggtttcagggttacagtgtttgatggttcagaggagacgtatgacagaatcatatttggtgtccatgcacctgatgctctaaagattctaggagctgaagcaacacatgaagaattgaggatcctaggagcttttcagtacgtctacagtgatatatacctccactccgataaaagtttgatgccacggagtttgtctgcttggagttcctggaacttcctggggacgacaagcaagggggtttgtgtaacctactggctaaatctgcttcagaacatagaatctacaagcagaccttttctggtgacgctgaatcctcctcatgtcccagaccacgtctttcttaaatggtacactagccaccctgtcccatctgtggctgccgcaaaggcttctcttgagcttcatcacattcaaggaaacagaggaatttggttttgtggggcataccaaggttatggtttccatgaagatggactcaaggctgggaaagctgcagctcaagatttgcttggtaaggagagtgaccttttggtgaacccaaaacagatgatcccatcgtggtctgaggctggggcgcgtcttctggtaacaagatttcttggtcaatatgtgtctgtcggcaacttggtcttgcttgaagaaggaggcactatgttcagttttggtgaagtaggcaaaaaatgccatgtgaaatctgtcctgcgagtacatgaccccatgttttactggaaggttgcaactgaagcagaccttggcttggcagatgcctacattaacggttatttctcatttgtagacaagagagaagattctcattgcgaacagggacgcaaacaagagtagtagcagcgctgctggtaaaaggggttggtggacacccctgctattgacagctggggttgcctccgctaaatacttcctgcgtcacatagcaaggaggaattctgtctcacaaacacgtcaaaacatctctcaacactatgatctgagtaatgaattcttctctcttttcctggatccatcgatgacttactcttgtgccatcttcaagacggaggatcaaagcttagaggcagcccagctacagaaagtttgcctcctaatcgataaggctaaagtggagcgagatcaccatgttcttgagattggctgtggttggggcagcttagcaatccaattggtgaagcaaactggttgcaaatacactgggatcacattatcagtggagcaattgaaatatgcacagagaaaggtgaaagaagctggattagaggaccacataagcttcatgttgtgtgattaccgtcaaataccaactcagcgcaaatacgacaggatcatctcttgcgagatgatcgaaggtgttgggcacgaatacatggacgatttcttcggctgctgcgagtcccttttggctcaagacggcatatttgtcctgcagttcatctcaatcccagaagaacggtatgaggaatacaggcgcagctcagacttcatcaaggaatacatcttccctgggggttgcctgccttcgttagcccggatcacgtctgccatgtctgcagcatcaaggctctgcatcgagcaccttgagaatattgggtaccattactacccaacgctgatacagtggagggacaacttcatggccaataaggatgcaattttggccctgggcttcgatgagaaattcatccgtatatgggaatactacttcatatactgcgccgctggtttcaagtcacggacacttgggaactaccagattgtgttttctcgccctggcaacgacaaattaggtgacagcggtatacactccttaagcaagctttctggcagctaataatgcgaggatctatatatatgtggtggtagctggatcagtcggagcctacacacctgaacttgagcctttttatttgtgatcgaattggacacgcagtgctgtgtacacgtcgctaactaactgtacttgcagcggcggatcattccattgcttcgatccaatttgacgtttcatcactttctgtttctgttggcgcaacgtaactccaatgattaaccttggcacatggccggctgggacgcaggagagactcgagcattcactttcgctggatatacatttgtgtattgtgtccagtctccagactccagcgctgtatgatgagctcaagaacgtagatatattgtcgtcagagtaagacaccacggtaccaaagtgctaggaaaaatcagagatatagaaagatagaggagcgcagacctaaaaccgctggatcagagtatcgatatagctgtatgcacacgtacaatataaagaggtttggactcttaagcataataccctacgtcatctatgtggtgattggttaggtgcaaatgtggatacagcttagact

SEQ ID NO: 35124 - DNA, 239 bp, Zea Mays
ggattgggatccttgcatgcatggatgcggcgcagtggcatcagaccggccggccgatctctccatttgtatagctctgaggagacgccatatctgctgggccatcatcacgaaaccaagaatcttccagccatgaaaagcactaggagctagctagggccgtcgtcgtggagaaaaggagaatgaaggaatatgtatgtatggcaaacaccatgcttttgcacctgcgctgtctgctg

SEQ ID NO: 35125 - DNA, 2341 bp, Zea Mays
gtccaaccatttgtggcggctgccgcaacaggctcaacgctcacgcgcacacacaatccatagccgcctcccacatctcactctcgttccgagcttccggccatggcggtgacctccggcgcccccaacgacaacggccgggacgctggcgccgctgcgactgacgatgagcaccgcgtggatctggaagttaggcacaaggacgccggcactagggactcgccagcaccgatagcggcagctgcgcctgcgtcccaatcccgagtggctggaaagcttggcccctcagatccaaagcacctcatctatgcgggatccaaattaaagcatattaaagctgcacctgctgcaccagacaagaatcgccgaccacctttgtctccaccagcacctgccgtcaatcgtggtcgtggatctgtgcgcacacctttgggattaaaaaaatgtctaccgaaagtggcagtcaatccccattatctcaagcatcacaagcaccgatgtctccatctcatgaacctgaatcgtctcgtcctgagtcagataatgactcgatgccaatttaaatagatgacaatgacaacattgaagtagaagaggaagaatacgacgctgaagctggttctaagagaaagctcacctcaactgtttggaaagagttcaagagagtgaagttcaatggcacagtccgggcaaagtgcaactattgcttcaagcaactttctgcgtcaagtaataatgggacaaaacatcttcatgttcatttaaaaagttgtgtgcaaaggaagattaagttgaacgggaagacattggcacaagcttctttgagatttggtagaacggatggtggaacagtttcaatagagaattacacatttgatcaagaaatagctagaaatgaacttgctgcgatgatagttctgcatgaataccccttaagcatggttgatcatgtgggtttccgaagatttgttggtgctcttcaaccacttttcaagatcggaaccagaaacatgataagatctgatattatgaagcattatgaggtggagaagaaaaaagccattgaatacatggctggaatccagtccagggtagcggtcaccacagatttgtggacgtctgacaaccaaaaaagaggttacatggccataacagctcactttattgatgaatcctggactcttagaaatattataatgaggtttatctatgttcctgctcctcatactgctgacgtcattggtgaagaattgtatgagtcattggttgaatggaatcttgatgagaaaatatcttctgtgactcttgacaactgcacaactaatgatgcgtcctattgatatgttatgaggacttacttgttgtgtccggtagtgaatgtgaagatagagttgctaatgtgaagaacttgctagctgatttgatgaatgagtaccatataactgagaatattgagaacaatgagtcatcaacaccatcagttggaaacagtgatgacttcttatctgacattagtgcccgtattgcaagtagaaggccaacaagcatggggctcaaatctgagctagaccggtacttggatgaagaaatggtgaacatgcaaaccaaaaacttcaatgttttagattggtagaaggtagctggaactcggtttcctattttaagaaggattgcaagagacatatatgttatccctgttacaactgttgcttcagaagctgctttcagcactagtggtagagtacttagtgagcatcgcagtaggcttacttcaaagatgttggaggctctcatgtgctctcaagattggcttaggaacaaatacaaagttgatgagaaaactaaacaacctgccaccttttggtcctgtctccaagacatgcaagagggcctccaggaacttgcactttgacattttcatttcaaggatttaggtggcgttaatcttttggctgttgacatgtagtgaacaagtcaagtacaagtagcaattgacaagatcacaagaaccttttggctctcatgaacacttgatatggatcttttggttctcatgtttttactcaatggtgaacttgtaatgaacttgtaacagatgtgcttttgggagcggtttgcacatctgttgatgcgcacctatgttgtaagcacattgtatgtgttaatttggaaatttggatgtttaatgtggtgaactagtggcgccatgctaggggtggtggacactaactggatattaatctagctgtgaacatctgatgtctgatgtgatcaatggtgttatgatttgtgaaacacttaacattgaccactctatcagtcttattgttgatgtttctta

SEQ ID NO: 35126 - DNA, 793 bp, Zea Mays
ggcggtggcgacatagcatcagcaattgtttgaccagctgcatgagatccacgaagctgattggcaggtgcagcaggagattcagcggtggcatcgacaccgactagcctacgtccacgaggggaacgacgggatcgatgctatcccttcggtggatgcttcttgctggtcatgtatgacttgctagttgtggctgctggagagtctcctcaattggtgacattttattttggagcccaagttatacaattcagttcaattgttcatttgttttttgaatcggtttagttcatttgtttttatgtttaattatttcaatcaattcagctcatttgttttttaaaaagatatacaattcagttcatgtcgtcagttaaattcatttgttcataaagatatctaattctttgtttttagcttttgttttagtatccacatcagcccacttcttcaacgatgatgagtcaccaaacaatgccccaccattgcgtcttttttaaaagcaattgattactaagatttgctatttgcttgctgcttcatttcctatttgcttgttttaaaaaaaaagaaacatagagttggagattttatggatatgccattttgctgatatgaacacatgtcattttgtagattattccctactggctagaattggagaagacgagctaccagcatccatgggatttttccttaaataaatgagcacactttactatttgaaatctgaatgtatattttcatgttgcatatctaataggagtgtctgccctacatttggttgcagggt

SEQ ID NO: 35127 - DNA, 6400 bp, Zea Mays
cccgcccaccgcccaccggcttccggcctccgcccgccgtgggcggcctctgccctcagcccacctggccatctccgcatccggcccccggcctccggtctccagtcgcccccggcttctggtctctgcccccgcagtggtcgtgccccactgggctgaggaggaacagcttccggttcctggtgctgatcttgaacggcgcggcgctcaggtcggaggaggcgttgccggcgagactgaggtcgcagaaggagccataccaaaaaaaatcgtcctccgctactgcctacgtgacaaaaaatcctgcggagacctggcagaagtcgcccggtctcccccgcctctggcttggcctcgccatttacgctacaccttgagatttttattcactccatccaatctggccctgcgtttctagattttgcgagggaagacgccaattaggagcctgagggtgcgacggcctagggtttgtagctactggtgtcgtcgcggcctgtggaggcggtaggggacagcgacatctgcagccatggacgacagcgagctccatgaagaggagaacccaaccaatagtgccatgacgatgacgacgaggattatgaggagcctggtggaggaaatcacttattggggtttatgttcggcaatgtagatgattctggtgatttagatgctgactatcttgatgaggatgcaaaggaacacctttttgcactggcagataagcttggtccatctctcaaagacattgacctaatgaagtcttctccagcaccaactgatccttccgaacaagactatgatgagaaggcagaagatgctgttgattatgaagatattgatgaagaatatgatggacctgaagttgaggcaactacagaggaagacaatgtgttgtcaaaaaaggattacttctcttcatctacagtgtatgcatcagtcaacagtacagtttcagtgtttgacgatgaaaactacgatgaggaagaagaaccacccaatgataatgagcctcctggtgatagtgctgcccaaaatttatcttcagtttctatcgagcaggcagatacgacaacctcaagcgataaccttgccatggaaaagattggcttgttatcacatccagaggaaaacatggactttgaatatgaagatttggagaatgaaaagggcactggggaaggccagcttgagcctgaaagtgcaacttcccttcctgttttatgcatagaggatgggaacgctatcctgagattctctgaaatttttggtatccaagagcctgtaagaaaagtgaagacagatcaccacaaacgaccagtggataaagagcttcagatcgcaaatgttgctgacaatgttgaagaagatgaggaactaattctccggagcactatgcaaaatttctcaactttgaagcacattcatgtgaatgaagattttgttgagagtgacagtgatgagtctatttctgatgtcactttaaggctaaaggattcatgtctttcagaacaaccaatgaaagatgtgcatatggatattcgtattgtccagcgatctccaacttgtcctgatttttatccacttgagcattatgattgggaaagtgatatcatttggaacaattcaccagcaactgatcagcaggcttatgcaaaaatctgtgaatctgaagagagtgaggacactcatggtgaagaccagggtaaggattatggccaggcctccaggtgttgggatgtacagagtaaaaccaatggttctccagtaattaaagagactttttgttgtacagaaatgcctgctccagctaactactgcccccctgggaaaagttaccctccattgacaaacgaagataacttagatcacataatgccaaataacttagatgatgcagttaaaattgacaccatggtgcgtttaaataaccttagtgtactaaacagggaattattagaaggatcatggttggacaacataatttgggatcctaatgaggttaccccaaagcctaaactgatctttgacctcaaagatgatcatatgctttttgagatcctagatgaaaagaatgtggaccatctccagtctcatgctcgtgctatgattgttagccagtcaactaagacttcaacaccaacagttgacaattttggcgatcaaccaaagccattgagtggcaggttcaacatctccaatgacaagttttattcaaataggaagactccacaacaagctaaatctcatactaaaaaacgcgctttaatgggcataaaggtggtgcattctgctccagctcataagctgcaaaccatgaagccagtgttgagcaataaggaaattgcaaactttcatagaccaagagctaagtggtacccacatgaaaataaaattgcctctcagttacaaggacctgcttgtagccatgggaggatggctgttttacttatgtcattgggaggaaaaggagtcaagattctggtcaatgctgaggacactccggtctctgtcaaattaaaagcatcaaagaagttcgaattgaagccttctgagaagatcaaattgttctgttctgggaaagagcttcaggatgacatctcgttagcaatgcaaaatgtgcgaccaaactccattgtgcatgctgttcgcactgaagtgtacctatggccaaaagcacagaaattacctggtgaggacaagcctctacgccctcctggggctttcaggaaaaaaactgacttgtctatcaaggatggacatgtttttttaatggaatattgtgaagagagacctttgcttctctcgaatgcaggaatgggagcccgtctctgtacatattaccagaaaactacccctactgatcagacagctgcatcactgcgaaacaacagtgatggactgggcacagtgcttgcaattgatcctgctgataaatccccttttctaggagagatacattctgggtcccaccaatcttgtcttgaaacaaacatgtatagatcacctgtatttccccataaggttgcaccaactgattacttattagttcgttcagccaaaggggctctttccctccgtcgcattgacaagctatatgttgttggccaacaagaacctcatatggaagtcttttcaccagggactaagaacatgcaaaattatcttctgaaccgagttcttgcatatgtttatcgtgagtttcgtgctagagagaggcctgatgctattcctcagattcgagctgacgagttacccatacaaagtcctctgacagaagccatagtgaaaaaacgattgaagcattgtgcagatttgaagaaaggaccaaaggggcattttttctggacacagagacctgatttccgggttccatcagaagaagaactgaggagattattgacgccagaaagtgtttgctgttatgaaagtatgcaagctggtttgtatcgtctcaagcgcttaggaattctgaagcttactcagcctgttggattggcttctgccatgaatcagcttcctgatgaggctattgagcttgctgctgcatcacatatcgagagggaactgcaaatcactagctggaatcttacaagtaatttcgtcgcttgtactaatcaggacagagaaaatatagaaagattagaaatcactggtgttggagatccatctggtcgtgggttaggattcagctatgtgcgagtagcaccaaaagcacctgcctccaattcagtgctcaagaagaagtcagctgctgcaaagggtaccactgtaactggcactgatgctgatctccgcagattgagcatggatgcagcccgtgagttgctgctaaaatttggcgtacctgaagagcaaattgataaattaacaaggtggcatcggatcgctatggtgaggaagctttcaagtgagcaagctgcatcgggaattactatcgatgaaattcctgttagtaagtttgcacgtggacaaaggatgtcttttctgcaacttcagcagcaaactagggagaaatgtcaggaaatttgggacagacaagttcagtcactttcagctttagatggtgatgacaatgccagtgacacagaagctcacagtgatctagactcatttgctggggatcttgagaacttgctagacgcagaagaatttgatgatgaggatactagtacagcagacttgagaattgacaaagcagatggaatgagaggacttaaaatgagaaggtgctctacgcaagcccaaattaacaaggaaattgaagatgatgaaacagaggcttctctggcaaagaaactacttgaagacgatggcaatgatgtgaagaggaaaaaacagcctgtggaattgacaaattgtggcacctctttagttgccaataaaatgaagcagagtaagactgggcaaacgatcaaatcatctggttatgctggtgcattaaccccaaaggagaacacaccaagagaaggaaaagaggttgaaaattcttttgttgagggtggtttgtcctcaaaactaaaaccaaagatggcactcgatgtaaatgagactgttctagttaaaaagaaaagtgttccaggaaaggatggacctaaggaaaagaaacagggtgcaagaggggatagtcttgtttgtggagcctgtagtcaggttgggcatatgcggactaacaaactgtgccctaagtatcgggaggatccagaaatgtcagaaatggatgctaattcagttaagcccaactctatggatataaaccatttgcaagcaaagacacctaaaaggttgataacaaaagtttcctctgaagttactgaaactgaagggccagaaggtattgagaagacaaaatctgtcccagtaaagttcaaagtaggggcacctgataaatccttggagaggaacatgtcagtctccgtttcactcgtttctgataaacgtgtcatggatgttacagacagtagatctaccggaaaggtaaacaagatagtgatacctaataagatgaagtctgatgatttccctcctgacactccaaagccatctgttgtatttcggcctcctgctgaagaaaaggatgtacctcgcaaaaagatcaccatcaagcagcctaaaggcatagaccagcaaagacatgttgaatctaggagtgttcaggaacccaccagaaagacaagaaaaattgtagaattgtcgagttttgaggataaaagtagagaggatgatcattgggttggtggggaacccagccaggtgaattcctcacatgggaggaggctgggtctggaaggaaaaataagcaaagccacaatggaaaatgaaagatcctggagagattttgaggagcgaagagaaatgccacaagcaaggctctttgatgctacgatatatgcatcaagggaggaagatcatctaaaggcaaaaaagaaaaacaagaaaaagaaaaaacatgaattcaaagatgatgacttacttgatcacaggccatacagaaatgacaggagggtacctgaaagacatcgagcactaaaacgatctagtccagctcctgtggttggatatgcatcatctgccaagcgtcgcagaggaggagaggttgagctctccaacatattggaaaaagtagttgatcacttgcggggtttgagtggatcactgctgtttttaaaaccagtgacaaagaaagaagcttctgattaccttgatatcatacggtacccaatggatcttggtaccatcagggacaaggtgagaaagatggtgtacagaaacagggatgaattcaggcacgacgtagcacagatacaactcaatgcacacatatacaacgacactcgctatcctcacatccctccgcttgctgacgagctcatggaggtctgcgaccatctgctttacgaaaacgcagatctgctcaccgaggcggaagatgctatcgagtagcaatataaaaagctagatttagcatttggatcttgctatatcctaacatagatgatgtatctatcttctgatctgtaggaggggaaaaggttgtacattttttgggcctagcagcaatctacatgtgatcccgaatccagccagcttctgttggtattgtgttgagaggtagtggaagtacaaaatgtctaggttagccactcaatggcctcatgttgtaaaaatgtagaatgtaatcatgtccatatacatggcatatatcggtccaataatccgattgtgttgcagtatttgatatgatatggaatggcgtttcaattgcagcgtgaatcaagcacgggcctgtgtgcacactttcttccaacttgaaccttatttcttatctggaggtgtatatgcattgaaccctgaaccgcaaagctgatggacaattttttttccaaacatgttgaag

SEQ ID NO: 35128 - DNA, 526 bp, Zea Mays
atgaccgcacaccacctcgcagtgtgcatctcgaagcccgcaaagcacagcccaatgccagaatcactcaccaggaatccgccgccacccggcagctgggtcgcttcgaacagcctcgcggggcgggggcactcctgagtcctgcctagcctcaccagctcaggcgctgcctgagccacggaacaaggcctgaggaaaccagcgggccgggagcgagcgacgaacaagtcaggtgaaggcggagcataggagctctgggcgcaggatgagagaagtcgaaggcggtgcgagcctgtgaggaggatggcttcaggaccacgccacggaccgaccgaacgcgagcgggcgaataggcgccgtgccggtgtcgcggggccggactcgctcggccagtctcttttcttttccctgccgtggcggagaagagaagagtcgcggtcgggctgcgatgtgcgagggtgggtgtactgggtaggtgggtgggtgggcgggctgccgttgggttggccggagcagcggccgcgcg

SEQ ID NO: 35129 - DNA, 1548 bp, Zea Mays
caccggacagacagacctaaccctacctgtcattgactacaaactgcacagcaccccctcgttttccattctgctctgcatactcgaagtcgaaggcagcgcggcaggtagcagcagtacgccagcacgcacaccaccagcagcagttgccggttggccaccacccgacgccggaggcctggacgaggaggcggcggcgatggcggggaagcacgggcgcaacggcttcgacgacgacaacgtcaaccccttcgcgaataacaatccagctgaagctggtacaaaatataaaatagtatgatcactgagctgagtctcccaactattccctatcttgcagggtggaagtgttccacctgccaccaattctcgtctctcacctctatcacatgaaccggctgatttctacaatgtggacattcctctcgagtcgtcaaaggatctgaagaaaaaggagaaagaactccaggctatggaggctgagctaaacaaaagagaacgggaattgaaaaggaaggaagatgcggcatcccgagctggcattgtgatagaagagaaaaattggcctccctttttccccctcatccaccatgacatttctaatgagatacctatccatctacaaaggatgcaataccttgcattctcgtcatttttgggattgatagcgtgcctcttttggaatatcatagcaactacaacagcatggattaaaggggaaggtgttatgatctggctgcttgccattatctacttcatatctggtgtgcccggggcttatgtgttatggtatcggcctctttataatgcaatgagaactgagagcgctttgaagtttgggtggttttttctattttacatgattcatataatcttctgtgtctgggcagctgtggctcctccatttcctttcaaaggaaaatctttggctgggattttgccagcaattgatgtcataggcaagaatgctattgtggggatattttacttcgttggattcggcttgttctgccttgaatcacttatgagtatcggtgtcattcagcaagtatacatgtatttccgtggaagtggaaaagctgcagagattaaacgtgaggcagcacgtagtgctctaagttcagccttctgatgaacatctttttgtaaggtctggttacagccagtcgatggatagaagggaacgagatgtgccgattgagccacgggacggtgtcttgtacatcactgcagtacgtggatttggatctctgaaagcgtacagctgatacctgataatctttttgcacttctgtaaaatatgaactatcctcatggatgcgtcagtgtgctggtgccatttcttgtcatggtttaggtgtggttgatagggaaaacggtgttttttttttagtggcgaatataatgtatcttcacgtgagtgtaatagccagtttatttttgtggcatgaatgcagttcgctgtgttttttggccaagacaatccacatgtcaggacacttctctgcccgcacctgtacctgaggcttgcagtcctacagttctagc

SEQ ID NO: 35130 - DNA, 1632 bp, Zea Mays
gccacgcccgcctcgaactctcgaagcttcgagcacgccacaacccaacggcgcgcgggcggcgggcccgtgagcgtgcagtgctgagtacacacgccgagcggcgccactccgggttagcagcaacaatactgtgggattatatgagatgagaaggagactactagactagcagccgtatcactcactactcgctgcccgcgcccgatcgggcgcactgccctgtggtgtactggtgtgtcacgcccctcgtcactcaccccgtcacccgcaaccccatcttctattcttcccgacggcgctcctggcagcaggtctcttatgacccacaagcgaggtttaaccagatagcagaccaaattgacaaggatgctgggatgacacggcttaacctattctcaccttgcaaaattaatgtgttcttgaggataacgggcaagagaccagatgggttccatgacctggcttctctatttcatgtcataagtttgggtgatactatcaaattctcattgtcaccaagtaaaagtagagatcgcctgtcaaccaatgttccaggtgtcccagttgatgaaagcaatttgatcatcaaggcactcaacctttaccgacagaaaactgggactaataacttcttctggatacatcttgataagaaggtcccaactggtgctggtcttggtggtggaagcagtaatgctgcaactgcactatgggccgctaaccagtttgctggctgcatagcttcagagaaggatcttcaagagtggtctggtgagattggatcagatatcccctttttcttttcacgaggagcagcatattgtacaggtagaggagagattgtccaagatatcccaaatcccttgccggaaaatttaccaatggttcttataaagccacctgaagcatgctcaactgctgaagtttacaagaatcttcttgtgctgcagcgattcaggttggaacaaacaagtcaagctgatcccatgaccctgctcgaggaaataactcagaatgggatatcacaagatgtttgtgttaatgacctagagcctccagcttttgaggtgttgccctcacttaagaggttgaagaaacgaattattgcagctggccgggatgattatagtgctgtttttatgtcaggaagtggaagcacaattgttggtattggttcaccggatcctcctgcattcgtgtatgacgatgaagactacaaggatgtttttgtgtcagaggcttgcttgctcactcgcgacgagaacgagtggtacagggaaccaatctcggccaatgccacgtctggcaaagaaggtttgcaagcctcggttgctgactgatttaagtcaggttctgtatcagttttgtgactattatacagatacaggatttgatcaacgcctcgacatggtaggaaagaacactacggtataggcggggattgttcacaagacaatctggttctggaatggaccattttcagtatagcaactattgatttgagcaacagtcagactaatggttccaggagaaatttatcccgtagatgtataaggatcaaatgaacaagggaaaatgactttctccgtgaatttttaacaatacaagcacacgtagttttgaaacaat

SEQ ID NO: 35131 - DNA, 1790 bp, Zea Mays
cttgtgcagttgtgctccttccttccttgccccgtaccccgccggcgcgccctgagccaaatcgcaggctgccattgtgccatggacgaaggtgcgacgacgagcgactcgtccgctgccgagacatttgatccgcaggacctgattcacgccatcttcaagctggtgtggaggcggcgggcggggaagggggccggcggcggcggcagcattgaggacatcgatgcggagcgtgctccagagacatcgaggagaaatcggagcacaactggtaagcgagtcttttttccttctttattactagagctggcggcatgaaaaggtttccaggaagtgcatgtgttggtgcagtcatatcaaatgtctcatggggccacccatttgaacatcggctgcaagaaggctgtgtcagccacgctagggcatcagataaagatttaattcgctttgttgtcaagttttagcttggtttgattgttaggattggaactgggtttgttagacatgcacatcgttgttagcttggatggattgtaagaatgactgaactgggaaatcaagcatggaaagaacctccttccccatgttgcatctaatgcagctcaaaggctcgtgttgtttctccagtctccaccacaacgcacaacataatgagtagtgctatttttttaaaagaatttctgttcttttgtctagattggaactagatggcgtaaggttcccatatactatgttaaaactggcttttaactttggtatttgtcctttttatgtctcagcgacttaattctgctgtgacttggggtaagagtatcagtaagacaaaacttggtgaataaaagatttctttaggtctagtttgagaactccatttttccaaatgattcctattttctcaagggaaaataaactaatttcccttgggaaaatggaaatcctttgggaaaataggatttccaaactagcccttaacgaaattgcgggactggttttctttctttttttattaagagatgaagaattgacactagaaagagttccaaagattttttttttgagaagtcaacgggagggaagatactcttcacctgaataattttctactgataccgggaaagtcagaaattgagggtgccaggcgtcagttacacggttgggtcacgaaccccagaggtgcaaagtaaaaggcgaggaagatgtatttaacccaattagtcaattataatcacgttttggtttctagcggacaatatacagttcaaagtaacttgactgagttctcgttcttgttcatgatatgctgacacagtatgttcacctgacagccaatgcgactgctcttaaagtcagctgcgaacttctacggatatttgtaacagaggctattcaacgctctgcttttatcgctgaagcggaggatggtgctgttattgaacccacccacctagagcgtgtgttgccgcagctgctcttggacttctgaggtaccccatggagcctccaaaagcatttatctaggcgtgtctgctatggaaggatacagatgcctggatgcatcaacagaatcttattgctgatctatgtcttgtaatctgtaaacacacgagatttctatatggctttataaaaatgcatgcatttcttggaatgttttcctgttcgtgttgtgtttgacgagattattgccattataaaacacgacagagttggtttcgatgaaatggagatgtagggaagggcttcgacggtttggaggcgcagacgactgcgaagcgctgatatagacatga

SEQ ID NO: 35132 - DNA, 2366 bp, Zea Mays
attaatcctaggcaggcaaagctcgttttttcttgtgcgccggttgattgggctctctgtttgcggagtcttgctctccctctggtcggttttcgttgatccctcctgcattggtttgctccggctcagatccgattctctaggaagagagaccaaagtatcaagtggaacaacagaattttaggtactgccgtgccgctcaacaagggaagagcaagagctccagtctctgtctcacttattatgatcctctatgaaccataccctgcaacagatttcattccaaacggggcataatcattgaagaccagttaaggggggcagtgagaagggatggcggtggagttggccaagcaattgcttgcggttattggaagctatacaccacctctctgggctaccctcatcgccggggtttttgttatcatctccgtctcgctgtccctgtacttgctgttcaatcatctgtcagcctacaaaaacccagaggaacagaagtttcttgtcggcgtcattctcatggtgccgtgctatgcagtcgagtcgtacatatcactggtaaatccatcaataagtgttgatatcgaaatcatgcgagatggctatgaggcatttgctatgtactgttttgggcgctatctagttgcttgcttaggtggtgaagataggacaattgaatttttgaatagggaaggtggttcaggttctgctgcaccacttttaggacaagcatctgaacaacgatacgtaaaccatccttttccaatgaactacgtgcttaaaccgtggccgctaggcgaatggttctacttggtcatcaaatttgggctagttcagtatatgataataaaatcaatatgtgctattcttgcggtgattcttgaatcctttggagtgtattgtgaaggagagtttaagttgaactgtggtcagtcatgggccttatactgtctcgtccagttctacaccgtgataaaggatgagttagctcatataaagcctcttgcgaagtttctgacattcaagtccattgtgttcttaacatggtggcaaggtatagcaatcgcattgctcttcaactggggtttgttgagaggtcctatcgctcaagaactgcagttcaagtcaagtatccaagacttcattatctgcatagagatgggtgttgctgccgttgcccacctgtatgtcttccctgcgaagccgtacgagctgatcggtgatcgtcttgttggagatgtttctgttcttggagactacgcttctgtcgactgccctctagatccagacgaggtcaaggatagcgagcgcccaaccaagttcaggcttccccagccagatgatcatgtccggtgttccactgccataaaagaaagcgttcgcgatgtcgtacttggaggcggtgaatatatcgtgaatgacttgaagttcactgtgaaccacgcggtggaacccatcaatgagaagctgcacatgatatccgagaacataaaaaagcgcgagaagggaaagaagaaaacaaatgacgatagctgcatcggttcacccacatccttgaccagggtcatcagtgggattgatgatcccctcctgaacgggagcctgagtgacaacagtggcccaaagaaagcgcgaaggcagcacaggaaatcaggctatgcaggcgcggagagcggcggagagagcagcgaccatggcctaggtgggtttgagatccgagggaacagatggattactagctagggagtgacaactaagagcaacctgtggagatgctatacaaatgtcacaggagttagcctagccagtgggttcaagtgtaggatgaggtatctggcatgatgttgtagcatgggcaaatcgagatgagtgagcaatcaggttgttgtctgttgattcttttagctgagcgcctgagctgctgaggccttgatcctgtatttaagatgtcaggccttgattctttcagcaagcgttggaaggaaggaagcaatgtgcctgttctgagctcccgtcagcatcacttgtaaagttcttataagtacagactagaactagtcatgcatacaagagaatagacagtcgatgtttctatctgtttttgtttcattctaaggcccttgtcacacgagcaccagaattttttttctttccttttggtaccatgatggtgatggacgtgagagttccttgagatgatcaaagcatctatctttccaattccatgtgtatcctgataactgaagatgatcgtttggttttccttttggtacgcaacatgccaagtgcaggatgaactctgccctgcaagaaaaaccacaggcaagtttgtccgattaacaactatctgcacaggtcataaaaag

SEQ ID NO: 35133 - DNA, 1688 bp, Zea Mays
gacccgcatcgcagatctcccccttccctccacgcctctcgcgtcgccgcgatggccgacgaggccctggaccagccgccggacgcgaccccttctccgactccggcgacgccgccggtacccgccaccccgtcccccacggtgctgctccgcccgcggcgggaggcattcgagcacgggctcttgcccatccccaagctcatcttcccggagggtacgctggcgcagaccctcgcccagctcaaggagaagctcgctgcctcggccccggacggacgcgtgcgcgccgcggccctggcggaggcgttgcagatcccgcaggagcaggcggcgctcgccctcgccacgctcgcggctgtgctcccggcagaggaccccgcgctcggcgacggcgccgtggatggttctgccgcggacatccgcgacatgctgctcttcctctacatccagtcttacaaacgtctcgtcccgcggagtgcgcacaaggactcgcccgtcgtggcggacgtctggccgtccacctccgcgttcgatgggtacctctccgcactctccccgatccagcttgttcgcagtaacagccgtcgttttatgccttctcaagctgatgaagaaattcatcagttgtcctatctgcaaaagcatatggcgaatattcttactctcttggcagattctgttgagggtgatggtgatgattcactggtgttgacaatggagacttttgagcaccttggatttctagttcaattctcagaaggaacttctttaagccaggctgctacattttttgcatgctcagatccagacatgcctgatgtgcctgtccctgctgctcaggttcttgattggatgtcacagaaaatagctttttcactggaatattctgctgagaggtccgcagcaaaggaaagcaaccagcaaaccatgtctgatcttgatgtgaccatggctgaggccaatacaagtcacccacggaacagtacaccaagtgccaatcctgcatactacagaaatgtaacatttgtggagggcttttccaaaacctctgttgtcaagcatgcatctgatgtcaaagggaattctataaaggttttgaactgccatgattctgttatctacatattagcaccgctgaagtatgctactgtgtacggttgttctgatgctacagttgttcttggtgctgttggtaaggtagtaaaagtggagcattgtgaaagagtgcatatcattgcagctgcaaaacggatttgtattgccaactgccgggaatgcatcttctacataggagtaaatcaccaacctcttgtgttgggggacaaccataaattacaagttgctccattcaatacgtgctacccacaactgcatgaacatatgatacaagtggctgtcgatcccagtgtcaacaaatgggaccaaccttttgtgttgggagttgttgatccacatgattcattatcccatcctgctggagtttcagatgttaaagctgaatcagcaacatgtctggatcctgatctattcaccaattttttgattcctagttggtttggggatgaaaggcaagggactacaaaccgcaatcctttcccactgcctgaaatttatgggacatcccaaagcaaaaagctagttcatatttcaccatgctgtattactaaaggtcagatgttcctaagtac

SEQ ID NO: 35134 - DNA, 1019 bp, Zea Mays
tctttcgtagaggagaggatttcacactgatgcaagcgctcatcaaggcagatttctggcttctgtttttctcgtctaccagataatcaagaaagattttagtattgcaagatttgctcagatgatgtggaggttaaatttctttgtggcattctgttgcattgggcatatataatagagcatgagatcattgtcaaggatcacttggtctgtttaacacatacaatgagtcatgctcaggagttcaggaccaaccttaattatttcctattcaggctataaaattcatcaccatccaaggcacacttacccctgctacatgagtggcatttccgatctggcctcgatcgatacatatggattattggaatgatttatgcttacttccatcctaatgttgaaagatggatggagaagctggaagaatctgagactaaggttggctttctatggtatgaacatatatacaagctagacaaaggtacatacaacaagtagcatccctacacatcatggatccctataacaagccccgtgcaggtcggctcaggcttcttatgtttcagattctcctgcaaccatttggtgttgtttttggctgagttagaagctccgtccaggataaacgatgctccataaatcatgaagcagatgcccccgccacctaaggatttggagattgctatagttcggagctcgagctgcccttcgatcgaaccaagaataaccctgctgccctcacaacatcaaagtttggtatcagcaagatggagcttctcaaggcatgcttttgtagggagtgactgctgatgaagaggaactcatggatgaagatcattgatccctttcatgtcatggtctattcaaaaggaaaatccacttctgagattaacagttgagaactgtgagttgtccagtattggtgtgattatacttctggactgcctcacaaatgcgaagcaactccttgatgtgttatctattgcagacaatcatctagggagtcctgtggcagctgc

SEQ ID NO: 35135 - DNA, 1708 bp, Zea Mays
ttcaaatcccctttctctctctactcccgtctctagtaatcaattccactgcgactgttgttgaaagagcaaatcaaaccaacccatcgaaaaccaaaatccccgcacgagctccggtttcaaattccctcggcagagctcgccgccgggcatggatgcggcgcgggagtccatggcggcgctcctcgacgccggcctcttcggccccgcccaaacgctggggtgtttccttgtgtcgtcagctggtgcgggcaacgatgctggtatgtccatgaaggtggaaagcctggtccagcatggggatgctttgtatggagagaaagaattccgcagggcactgaatgcgtacaagcaagctatgcaatatagtagaagtatccctaggcaagcaacaagtaacaccagaagttcagtatccgtcacaggccggtcaccttctccaaactcttcaaatctcttatcattcaatgaaaatgaggtgaagttcaagattgctctttgccattctgctctatgtgagcaccgtgaagcacttcatgagatggaaggtattccttcaaaagtgagaacactgaaaatgaatatgatgttagggaagctttatcgaatatcaagaaatagccgtacagctgtagtctgttataaggagtgcttgaggcaatgcccttatgttttcgaagctatcacagctttggcggaaatggggctttcagcaaaggaattttctttattattttcacaagcaccaaatagaggaggcaagctatcgggtgacttcgtagacacacaacgttggtggagtcggtatgttgaggcgcagtgttgcattgcttcacatgattataaaggtggccttgacatatatctagaactaatgcaacgattccccaataatgtgcatatcttgttggaaattgctaaggttgaagccatcataggcaggaatgatgaagcgataatgaactttgagaaggtccggctgattgatccaaacattatgacatatatggatgaatatgcaattcttctaaagtcaaaatctgactacatcagactgaataagttggtacatgatatgctacatattgaccctgcaagaccagagacatgtgttgctcttgcagcaatgtgggaaagaaaggatgaaagaaaagctttgacatatgcagaaaagagccttcgagttgatgacagacatataactggctatataatgaagggcaatctgcatctttcattgaatcgaccagatttggcagtgacagacttcaggggggctcaagaattgagggctgatcttcgttcttatcaaggattggtgcgtgcttatctagcactttctaaatgcaaagatgcattattcactgcacgcgaggcgatgaaggttatgcatcagtctgcaaaagctcttaagctagttggtgatgttcatgcaattagttccagtgggagggagaaggcaagaaagttctatgaatcagccattcgtcttgaacctggatttcttggagctgcactggctctggctgatctgcatgttgcggaaggacggaataaggaggctgttatgctactggaaagatatatacaacaatggtcagatgattctctacacataaaggtggctcaagtacatgcggcaacaaatatgctttcggatgcactttcccattatcaatctgcactaaggaactcaattgtgtttcag

SEQ ID NO: 35136 - DNA, 2949 bp, Zea Mays
agcgaggcccgaacgccatccgcgtccggcagtacagatcaaggagaccggttctcttgagctggggactgcaaaggatacgtggcttcagtcattgtgctctggatttttagatcaagggaccaatgcctccaggataatggcggggaaggacggagtttctctgaaatctgtgtcatacggggcaaggctgcgcaggagttgtgatgcatcactgagagaggcagggtccatgagagacccattcttgaaacacagagtaaagaaatttgatctatctagcctagattggattgatgagattccagattgccctgtattttctccatcaacccaggagtttgaggatcctctggtttatctcagcaaaattgcccctgtggctgcaaaatatggtatatgcaagatcatttcacctgtctctgcttcagtacctgcgggcactgtactaatgaaggaactaggtgggattaagtttacgaccagagttcagcctctccgtcttgctgaatggaccaaggatgacaagtttgccttctttatgagtggaagaaagtacacatttcgggagttcgagaagatggcaaataaagaatttgtacggagatactctagtgctgcttgtcttccatcaaggtatatggaagaggagttttggcatgaaatagcttttggcaagatggagtctgttgagtatgcatgtgatatcgatggtagcgcattttcttcttcttctcatgaccaacttgggagaagcaaatggaacttgaagagattctcacggttgccgaactctacgctgcgtcttctcagagctgcagttccaggaataacagatccaatgctgtatattgggatgctctttagtatgtttgcctggcatgtggaagatcattacctgtacagtattaactatcaccactgtggagcccccaaaacatggtatggtattccaggaagtgctgcttctgattttgagaaagtggtacgtgagcatgtatatgatcacgaaattttatcaggtgaaggggaaagtgcagcatttgatgttctgttgggaaagactacaatcttcccacctaatattttactggatcatcatgttccagtctatagagccatacagaaacctggagagtttgttgtaacgtttccccgagcttatcattctggtttcagccatggtttcaattgtggtgaggcagtaaattttgctacgggcgaatggtttcctctaggagcagttgccagtcaacattatgcacttcttaagaggataccagtattaccttatgaggagcttctttgtaaagaagcaacattttgtgctaatgagttttccttgtttgaacacggaaatgtaacattaactggaggcacacatatacagagctatatgaagggtccctttgtgcagttgatgcggttccaacaccgtgttcgttggttgcttgtgaaaatgggtgcccgtacatgctataaagcagacattgatgccacagttctctgtgggatatgcaaacgtgactgctatgtagctcacattatgtgtaactgcagagcagatgcaatttgcctttgtcatgaggaagagattagtaagtgttcttgcaactgcgaccgtgttgtttttgtgaggaaagacatctttgaattggaggaaatatcaaagaagtttgaggaaattggaatactggatgaagtaggaaaacaaatgtctcaaaatgatggctataacatgcatccttacttgtccaatggcattgaccacaatgctaaatactttccatactgcaagatcctaattgatacatcccctgaacttcgtaccttttcagaggtagatgttcttggatatgatctgaataagccatatcctacattatcaacaataacttctgcacatggaccccatgagtattctacacaaagtgatgagtgtactagttctaagcaaagaacatactctagctcatgtccagagaatggaacgcttagtgtttatcctttatgtacatctgatcaagcattctcaactgacaaattggctgctcaggatactgatgattctgactgtgaggtatttagagttaagagacgatctagcatagttatggagaaaagatgttcagaagatctaacaataactttaactgagaatcaggctttaagacggttaaagaaagcctgttcagatgacagacaagagaacgcaactgaatcacattgccttgacttcatttctggaaatacagataatttcatcaatcgaagcaaacaaaaaatgaatgtagatcagctagatgcaaaaaatgtggaagatgaagttgctttcggccagaaatctatcggttgcagttacctgtctccatctgtagatcttgggccgaaacgcttgaaaattcgtggcccatccttcccaagcactgtttctgaagtggaaatatcttataggttccaggaggacattgacttggctagtcagcatactcaatgaagtatgctgctcttggtgctaactgctaacatcaatcgtaacttctggaagatgaaagctcttttttcattggatggttcagaactgattctatctacaggtctccaatggaggcactgttatggctggattttatgattctattgccaggaattcacttccactgactgtcatgttgcatatgcaacaaagtagatgctttgtgataatgttgaagcgcatgcaaatgctcgaatcaatcatgttctatagaaagtggatacaacagaaggaataaaggagcaacttcttgctgttagatcctggtctactgaaatctgtcacataagatttactttctcttttaagttcaggatataatatttggttagacaattattttaatttgatcatatgtctggttggttagcaaagtaggcaatttgatttgtcccctaagtagcttctatttg

SEQ ID NO: 35137 - DNA, 425 bp, Zea Mays
ctaggctctgcccggatccttcgcaaccgaccttctcagcgcggggatcggtcatagtgactccgccctcaactataaataggatcgtgacttattacgccgttgcagccgcgtattgggggtgcggtgagctgagtatgcgaagaaagggagggccgccgtgatccgtatcgctgagcacacaaagagaaacatgagagagaagagagaacggtgaagtccgtccgcaccgctgcctcgtcctcgggcgtgagctcgcgggactcgccgtcgcgtgtggttgtcttcgtcaacttgggctcggcgcatgaaccgtataggaattgggaaattgttcgccggactgggtgaattggtgcgatttctccgcggtccggtggtactcgtccccagactcgtcgatccaagtgcgaggtcacgtgtca

SEQ ID NO: 35138 - DNA, 748 bp, Zea Mays
ttagaatgtaattcaattcaaatgatccgaaatgaatgaaaatggggatatcatgtgttcgggaaaaaaagtatttcacatggaatcagacgctagctatgtgatcgatgttagctgtatttgacttgcatgccgcttgacagccttgccagtgttccgtggtccagccaaatggttatccgcatgatcgctgatcggtgcggccagccaaattcgtcatggatgcctgaaaattcttgcaatgtacagatgtgctcataaatgcgaatgatatatggaactattggaaggacgacaggtgcttaacgtaaatatattggagcccccgccaagccattaacggtgatccgccggcggcacctccaccaccacatgaccccggcaagggttgagatttgggagaggactggcactccggatcccgagaatcgcgctttgcacgagaccacggggctggatggtcgcggcatgctgaaacagcagctgcagcagcagcgaagtcggcggataccttgcctcagcctcgccattggcaaggaccagccagggaggcggtttggaagttcggcggaatcagttaatcaccggcgtccgaacgatgccgctcaaggcggccaaggtcacgcaatctcgttcccgtaaccttgttgggcaagaaagaaagggatgttcctctccctcctgcgaggaggtggtggcgcggaggccggacacgaacggagacgaacggtgggcgctggcggcaacc

SEQ ID NO: 35139 - DNA, 3647 bp, Zea Mays
tatgtatagctctttgtgaacctgtaaattaatgcgggtgtatgatctactaccatcttctaggcaaggtcaatctgacagctaccaactactgtacttccctgcgctgcctcgctccgtccaacggtcagccggtggtcgtcgccgggttcgggtaagggtcggtccagcaccagtcctctgccacggccttcttccatctcctgttgaacagctgcggctcggtgtaggaccgctacctgaccgctaaccggtctgccgtccccaatgccgacgtggcagccgtcatcgtcgccttgccgccgtcgccgagcttagggacgttgcggctccggtcgccctgcgcgcagtagctaagcttgtagtccatgccccaggcgtagatgaggtcgttctggatcatgtgccacgcgcaccgccacgccgcgcgcgagaacacgggcaccatcatctccacccaccccgcgcacggcgggcccatgttgttgccgtagcaccggccgtgcccgctcgtcttgtagtaccgccggtggacgcccccgctccgcgcggcgcgcgccgtgagctggtggtggatctgcgaccgccggtcgagcgccggctgcgagatctccagccgctcctccctcacgacccgcaggtaccggagcgggtcgacggcgagatggatggggtagcggaggggagcgcggggatgggatcagcggctgctgggcgccattagcggctgcgcgctgggagttgcgcgagatccacgcttggcgtgctggcggtcgcggatgtggctccccatcgtgggaggcaaggtgggctaggtcgcggatgtggcggtcgctgatggcgctccccatcgtgggaggcagggtgggcgaggtcgacggcgagatagatggggtagcggatgggagcgcgggggcggcgcgggatgcaggcgcgggcaggggcgggattgcaggagggacgacgttgagggcaaggagagggtttcgggggaggagatgggaggtcgggggcgacggtttccagacgagagggtttcggggcgcgataggagcgggatcggttgcaaacagtgtcactcaccacgccgagaacaactcgcaaacggttcgtggccgcaatacacggttccgatccaggctgcaagcgagcgagcatggcggcgtagtcgtaggcccgccctccagatggaggcctgccgcctcatgccgtccactagctgagcaggtcacggcaagcgtgcgtccgtcgaccaccagttcagttcggttgccgagaagtgaatacgactgtgtccgcccgtgtgagctggacgtacgcgaggctgcggcggcggcggctcagctagtcgtcgtcgacccccccgaaatcagataaacaccagccacgcaaaaaatcgccgtatccagtcagatcttcctcctcccaaatccatcgctagccagcctgctgctagcacgcacagtaccacacagtacgtgctcaaataatgctcgctcctggcctcctgctaccaaggaccaagaaaaggagggccggcgaggacgtctggccgtctgggtccctatatatgagacagcgaggaggtgggtgtgaaggctgtgcccagtgagctcagctcgatccatcgatcggagagcttttgcactgcaccagctctgaagccatggctgctgcttcttcctccatggacaggatcgcccagtgggtgtcgtcccaggaggtcccgaccgacctcaccgtccgcatcgccgactccgtcttctctctccacaaggcggtgatggtgcccaagtgcggctacatccgccgggccgtggcggcgagccagacgcagggcccggggggcggcgccgtcgagctggacctctccgcgctgccgggcggcgctgacgccttccagaaggcggcgcgctgctgctacggcgacagcctcgagatcacggcgcgcgacgcggcggcactccgctgcgccgcggagttcctcgacgcgccggacctggcccgccgcgccgacgacttcctcgcgcaggccgcgctgcgcgcgctccccggcgccgccgccgtcctgcggtcctgcgaggcgctgctcccggccgccgacgagctcggcgtcgcgcgccgcgccgcggacgccgtcgcgctcggggtctgcaacgaggcgctgttcccgacgccgcgggcgccgcccgggtggtgggcggccgagctggcggcgctgtcgccggcgtcgttccggagggtggtcgcggcgctgcggtgccgccgggccgggcccgaggtggtggccgccgcggccgccgcgtacgcggagcgcgtcctggccggggtcctcgcggcgcccggccgccgggacgcggaccagcgcgcgctgctggaggccgtcgtggacgcgctgcctcccgccgccgacgcgcccctcccggccgccttcctctgccgcctcctccgcgccgcggtcaccgccgaggcgtccgccaagacgtgccgcgacatggagctccgcgtcgcggccgtgctggaccaggccaccgcgggggacctgctgggcgtcgcgctcgacggcgccggggagcgcgtcgtcaacgcggacaccgtccgccgcgtcgtcgccgcgtgcgtcgagcgccagcagacgcagcagggccggcgggcgtccctggccggaggtccggcaggtgagctcagcgcgctggagaaggtggcgaagacggtggatgaggtggcggcggagatggcgtcgcacgagtcgctgcctatctccaagttcgtgggcgtggcgggcgcggtgcccagggacgcgcgcccgtcgcacgactgcctgtaccgcgccgtggacatctacctcaagacacacccggggctggacgagatcgagcgggagaaggtgtgcagcgtcatggacccgctcaggctgtcgtaccaggcgcggatgcacgcgtcgcagaacaagcggctgccgctgcaggccgtgctcagcgtgctctactacgaccagctgaagatccgtagcgcggacggcagcggcggcacggaggaagggtgggagacacagtcggccgccgggaaggcccgtgcgcaggcgcgggcggacgtgtcgctggcaagggagaacgaggcgctgcggttggagctggcgcggatgcgagcgtacgtgtcagggatgcagcagagcagcaaggggagcgggtcgaggccatcgtcgtcatcgctggtaccaggcccagcgacggcgacggggaagaaggcaagcttcttagggtcggtgtcgcggacgttgagccggctgaacccgtttaagggcgggtgggccaaggacacgaccagcattgccgatgggcgtgacaggacttccatgcatgtggtgaagcccaagaggaggaggttctccatcggctaattcttttgtgatatatcgatatgatcgtgtcatcgtgtgtgtgacttatattaaatcactgtgattagaggctagaacaaggggtgtggatgtttgtactttctctgtcaatgaaaaaacaatatgcactacaaaggcaaaagtgtaggttaaaatagtggactaaggagtaaatattaatagtactgttggggtcgtgcttcggtgcgccgaaggtctcacacgaagaagcagcttcggctgaagt

SEQ ID NO: 35140 - DNA, 8449 bp, Zea Mays
  misc_feature (1)..(2): n is a, c, g, or t
nncagcactcggggtaagcttgctgttggagaaggtgataaagttgctataaaggatgtgggacaaatcattggacagcctactgcagcacctattacagcagacaaaaccaatatgaagcccctttccaggaatattgtccgctttgaaattgtccatttagtttacaatccattggtggaccattaccttgctgttgctggatatgaggattgccaagtgttaacattaaatagtcgtggtgaagtaactgatcgccttgccatagaacttgctctgcaaggaccatatattcgtcgtttggaatgggttcagggttctcaggtacaactcatggtagtaacaaacctgtttgtgaagatatatgatctctcacaggataatattagccccatgcattattttaccgtagctgatgatgtgatagttgatgcaaccctcgtcccctcctcaatggggaaattggtgctacttgttctttctgaaagcggtgttttatataggctgaatgttacattggagggtgatattggtgccaagatattgactgaaacagtcttggtcgaagatgtcatatccatgcatagagggttatcattgtacttctcatcaacctacaggcttctttttgtatctcaccaagatggtacaaccttcatgggacgtttgaatgctgattcttcatcaataacggaattgtcatatataaatgaggatcatgatggtaaatctaagccagctggactctactgttggagagagctagtagctggcagtggtatccttacttgcctatcgaaatctaaatcaaatgctcctcttgtggcgttgttgagtcctcatcaattggttgcacaaaacatgaggcacaatactggtgcaaattcctcagtggttggtgttgctgcctataagcctttatccaaagataaaacacattgtcttcttttgtatgatgatggaagccttcatatttactctcatacacctagtggaggtgacggttcgatgaaccttacagcagagcaaacaaagaagctgggcagcagcatactcagcagtagagcttacactggcacaaaaccagaatttccacttgatttctttgagaagacaacttgccttacatgcgatgttaagttcaatagtgaaacaacaaagagtggcgattctgaaagcattaagcaaagattgacatcagatgatgggtatttagagagtttgacacctgctggcttcaaggtggctatttcaaatcctaaccctgatatagtcatggttggttgccggattcacgttggcaacacatctgctagcaatattccttctgagatcacaatttttcatagagtcattaagcttgatgaaggcatgagatcatggtatgatattccatttactactgctgaatcacttttggcagatgaagagttcacaattactgttggcccaacattcgatggttcatctatacctaggatagattgtattgaaatttatggccgagccaaagatgaatttggatggaaggaaaaaatggatgcagcgcttgatatggaagcattgggtggtaatgctactggtggtagatctggaaagagactccaaatcgtgaaggctgctcctatccaggagcaagttctggcagatgcccttaggattctctcacgaatatacctgctatgccaaccaagttgctttactgacatggttgatggaggcatggaacttgataatatgaaatgccgagctttactggaaaccatttttcaaagtgacagggaacctctgctacattccgccgcatgtcgtgtccttcaggctgtgttcccaaagaaggacatgtaccatcatgttaaggacaccatgcgtctccttggggtaataaaatcactcccagcaataacttcaagaattggagttggaggtgccgcatcgagttgggtgataaaagaatttattgcccagatccatacagtttcaaaagttgcattgcacaggaaatcaaacctagcctcttttcttgaaagtcacggtacagaactagtcgatggtcttatgcaggtattctggtgtatattagatttagacaggccggacacacagacaataaatagtcttgttgtgccttgtgtggaatttatttatagctatgctgaatgcctggctttgcattccaatgaaaaaactagtgtgtcagtgggacctgcagttgctctgctgaaggagctgctctttgcaccatatgaagcagtacagacatctagcagtttggctatctcatcccgatttcttcaagtccctttccccaagcagacaatgatagctaatgatgatgctcctgaaaaccaagctaaagcaagtgcttctgctatgaattcaaccagtgcaaactctcaggttatgattgaagaagatcctgtcacatcatcagtgcaatattgttgtgatggctgttccaccgttcctatacttcggcaaaggtggcactgtagcatatgtccagattttgacctatgtgaaacttgctatgagatacttgatgcagatcgtttaccagcaccccattctaaagatcatccaatgtcagcaatacctattgaagttgatacatttggaggtgaaggcagtgaaatccatttctctgtcgatgagctaacagattcaggtgttcttcatgctgataggagtgttcagacctccccatcatcaattcatatatttgatgcaagtgagtctgcagacttacctgagactattacagaccaggcaactgtttcgatttctgcatcaaaacgtgccattaactccctggtacttaaccacctaattgaagagcttagaggctggatggggaccactgctggtactcgagccatacctttaatgcagttattctacaggctttcttctgctgttggtggtcctttcatggatagttcaaagccagaaaattttgatttggagaagtttgtgaagtggctaatggatgaagtcaacataaataaacagttccctgccaaaacacgatgcacatttggtgaagtattgatccttgttttcatgttcttcacacttatgttccgcaactggcatcaacctgggagtgataattctcattcaaagtcaagtgggagctctgatttgacagataaaggtcctgctcaggttctgggatcaacaacaataactcttccgtcatctagtgctgacctggataaaaatgagtttgcttcccagttagtccgtgcctgttctgccctcaggcagcagaaatttttgaattatcttatggatattctgcagcaacttgttcatattttcaagtcatcatccataaatggagaagctggttcttctggttcaggctgtggatccctattgacaataagaagagagctgccagctggaaatttctctccctttttttcagattcatatgctaaatctcatccaactgatctgttcatggactactacaaattattgttggagaatactttccggcttgtatatagtatggttagaccagaaaaggagaagtctgctgagaaggatagatgctacaaggttcccaacactaaggatctaaagttggatggatatcaagatgtgctttgcagctatattagcaatcctcatactgcatttgtccggagatatgcaaggaggctcttccttcatttatgtggcagcaagactcactattacagtgtgagggattcgtggcaatgttcccatgaagttaagaaacttaataagatcataaacaagtctgggggtttcagaaatcctgtgccttacgagagaagtgtcaagctcataaaatgtttatctactctttgtgatgtggctacggcaagaccaaaaaattggcaaaagttctgtttgaagcacatggatcttcttccatttctcatggacaatgtttatcatttcagtgaagagtgtgttattcagactctcaagcttctaaatctggctttctattcaggaaaagatgctaatcataatgcacaaaaagcagagactactgatctaggaggttctacgaggactagctcacagtctccagatatgaaaaagaaccggaaggctgatgatggttctgaaggttcctcagaaaagtcgtgcatggacatggaacaggttgtagagatgttcagtgataaggaaggtgacatgttgaaaaactttatcaacatattcttactagaatggaactcagcaggtgtccgtcatgaggctaaatgtgttctatttggagtgtggtaccatgcaaaaaaccgacttagggagacaatgctatcgattctgctacagaaggtaatacatcttcctttatatggacaaaacattgttgagtacactgacctcatcacctgtttacttgggaaagtgaacgacttcagtgcaaagcagaatcactctgaacttgtgaataaatgtttgacatctgaggtcataagctgcatctttgacacactccattctcagaatgagctattggcaaatcatccaaattcacgtatatacaacacattgagttgcttagtggagtttgatggctattacttagagagtgagccttgtgttacctgcagctgccctgatgttccgtattcaaggacgaagcttgaaaccctcaagtctgagacaaaatttactgacaacagaattataataaaatgcactggaagctttactatacagtcagttacaatgaacgtttatgatgctcgtaagtctaaatcggtcaaagtacttaacctgtattacaacaacaggcctgtgactgacttatcagaattgaagaataattggactctttggaagcgtgctaagagctgccatcttacatttaatcagacagaattgaaggttgaatttcccattccgattacagcatgcaatttcatgattgaacttgattcattttatgagaatcttcaagcttcttcccttgagtcactgcaatgcccacggtgtagcaggtctgtcactgataaacatggcatatgtagtaattgccatgaaaatgcatatcagtgccggcagtgtagaaatattaactatgaaaatcttgactcttttctctgcaatgagtgtggatacagcaaatatggtcgttttgaattccacttcatggcaaaacctagtttttcatttgacaacatggaaaatgatgatgacatgagaaaaggattggcagcaatagagtcagagtcagaaaatgctcataggcggtaccagcaactgatgggatttaaaaagcctctcatcaaacttgtgtcaagcataggtgaacaggaggtagactcgcagcagaaggatgctgtccagcagatgatggtgtccttgcctgggcccacatgcaaggtaaatcgcaagattgcacttcttggtgttctatatggtgaaaaatgcaaagccgcttttgattctgtgagcaaaagtgttcagacattgcaagggctccgccgtgttttaatgacatatctacaccaaaaaagttctagtgacaccaatgcattaccagcattttcaataccaaggtctccaaatagttgttatgggtgtagcaccacgtttgttacacaatgcttagagttattacaagtgctttcaaaacatgaaaactgcaggaagcagcttataagtgctggagttttgtcagagttatttgaaaacaacattcatcagggccctaggacagcacgcactcttgctagggctgtgctatcttcgttttctgaaagtgatgaagatgcagttcatgaattgaacaacttgattcagaagaaagtgatgtattgccttgagcaccatcgttccatggacattgcacaatcaacacgagaagacttactgctgctatcagagacttgtgctcttgtggatgagttttgggaggcacgattacgtgtcacctttcaactgttgttctcttctattaaggttggagcaaaacatcctgcaatttcggaacatattattcttccttgtttgaggataatttctcaggcttgcacgcctccaaaatctgattgtggggacaaagagtcaggtttgggagtatctagcttgacgttgcactctaagaatgatgatacaactggtaacacagcatctaataaccccaatactaagattcagtcagatatatctggaaaaatttatgatggaagtcgaagagaccaggatattccacttttgagctattctgaatgggagggcggtgcgtcatatttagatttcgtccggaggcagtacaaagtatcccaggcagtgaaaggatctgctcagaagacacgccatgattcatataagtctgactatctggttctcaaatatggactcagatggaagcgtcgtgcatgtttgaagtcaagtaagagtgacttctcaaaatttgccttgggctactgggtatcagacttgatcttgagttcgtgttcccagtcaataagatctgagatttgcactctcataagcttgctatgcccatctaactctcctagacaatttcagttattgaacttgctcatgtcactacttcctcgaacactctcagctggtgaaagtgcagcagagtactttgagttactagggacaatgattgattcagagtcttctcgtctattcctaactgttcgtggttgtttgacaacattatgttctttgataacaaaagaagtgtccaatgttgaatcacaggagagaagcctaagcattgatatctcacagggattcattctccataagcttgttgagctcctgaacaagtttcttgaagttcccaatatcagagcaaggtttatgagtgataggttactatctgaggtgttggaagcttttttggtgatccgtgggcttgtcgtgcaaaagacaaagttaattaatgactgcaatcatcttttgaaagaccttcttgatagcttgcttcttgagagtactgaaaacaaacgtcaatttattcgtgcttgcatctctggattgcagaggcatgtgaaggaaaaaaagagacggacgtctttgtttattttggagcaactctgcaatctgatttgcccagtgaaaccagagcctgtttatcttttgatactgaacaaggcacatactcaagaagagttcatcaggggttctatgacaaagaacccatactccagtgtggatgttggccctctaatgcgggatgtgaaaaataaaatatgtaaccagcttgatttaattggacttttggaggatgattatggtatggaattattagttggtggtagtataatctcacttgatctgagcatttcccaagtctatgagcaagtatggaggaagcaccatggtcaaactcaacattgtttgtccaatgtcagcgcaataactggtgcttcatctatcagagattgcccaccaatgacagtgacctacagactgcagggtttagatggtgaagctactgagcctatgattaaagagctggaagaggaaagggaggaatcacaagatcctgaaatcgagtttgctatagcaggtgctgttagggaatgtggaggccttgagattattttgagcatgattcagagcctgcatgatgatgagttcaggtctaatcaagaagagttgacttctgttcttaaccttctaaaatattgttgcaaaatccgtgaaaataggtgtgcactgttatgtctgggtgctttgggtttgcttcttgagacagctagacgcgcattttctgcggacgcaatggaacctgctgaaggtgccaaaaaatcaaacaagcaacaaaggaatgaggagatggtggcaaggatcctgccgtacttgacctatggggaaccaacagctatggaagctcttattcaacattttgagccctaccttagggactggtctgaatttgatcaattgcagaagcaacatgaagataatccaaaagatgataatataagccaaaagctgtcaacacagcgatctgctatcgacaactttgttcgtgtatcagagtcactcaagactagttcatgtggtgagaggctaaaggatattattctggagaagggcatcacaaaagctgctgttgagcatgtaaaggaaagctttgcttctgctggacagactggcttcagaacaagtgaagaatggacaacaggcttaaaactgccatctattccacccattctgtcaatgttgaaggggctggctaagggccatctgcctacacagaaatgcattgatgaagaaggcatattaccactgctccatgctctggaaggggtgcctggtgaaaatgaaattggtgcaagagcagaaaatcttttggatacactagccaataatgaaaataatggtgatggcttccttggagagaagattcaagagctgcggcacgctacaagggatgagatgcgtcgccgtgctctttgagaaagagtgatgctacttcagg

SEQ ID NO: 35141 - DNA, 1981 bp, Zea Mays
aaaggcaaccaagcgaaccagaccctcccaacggtcacctcacctcgcccgccgcgccgtgtagccagatcgccttcaggttccacgacctgaccacaacccctcggcgctcatcgtcatccaccgccgcccgcgaggtccccctccagccttcactgggcgaaggagaaggagaaggtgaagggaaactccgcgcgattgccgccattaactccctccccccacccttctcgcaagcgccaccggatccggtccctccccacccgccctttctccccacctcacggaaccccgcccgcccttttaatagtttcgccccacatgcgtggcgcgagtgccgccgccttccgacgcagcagccgcggccgggatgtcgcgtatccgtagcggggtggaggtggtcgccagtagggggtgcgcgcggatggtgatccccgggatgcatcacaacccctcatccgccgcatccgtctcctcctccgcggcatcgcgcgcggcccccgccgccggttccgggccggcggcgcatgccgatgggcccttcgcaggcctcgtcatctgcgtcactgggctgtccaaagaggcgagagttcaggtgaaggaggcgacggagcggctcgggggcgagtacagcgggagcttgcaccccaagtgcacgcacctcgtggttcagagctttgccggacgcaagttcgagcatgcactgaagcatggtccgaggaatgggctattcctcgttacgctgggttggtttgtggactgcgtgaggaggaacatgaggttggatgaatccttgtatgccatcaagagcattggggagaatggtgtgccgcccggggagttcagccgccttgttggagttcctgttaacgagaagtcttgccttccaccgttgatatttcaggacaaggcatgctcagatatgacccagaagcattcgctccagactcctgggaacggtggtggtcatgatgggttggtttttatgaatgacacaatctacattgaccctgggatatctgatgagatgaggaaaaagatttctgacgctgttactagagaaggtggaaagttgctggagcactggtttattggttgccctacaacttatattgtctgtgaggatgtttgcgttaagagatatgtaggccactcagaaaacattgttactccgctttggatcttgaaaacagtgaaggaaaaaaacttgcagcgtcttgtccatttgtcttccgacctagctaggcatgttgccatggttctggaaaatgttcagacatctgaagagaataggaaacttggaagtgtaccttctataaacacaagctcatgtggtcgtccatcaaccaaagaggagatcaatgaagtccatcaagcgaagcaaaagtttgttgaaggagcaaagaaagaagtccgagaccgccgtgcccgtcgtatgcagtcatgtgaagtaaccattcatccaatcacaccggccacacttctggattcaatctgctggacaatctctgagccaacttcatctgcgtcaatttatatggactcttcgtggtccgatgatgccaatgagcagcaaagcaccacttactttgatgcaaatggggacgtgagggatccagatcaacctaatgacaatttttcccgtccactgaaagaaaggtgacacactgatccttagttggaattgaaattgatcaagcctcgtccgatctgctattttagttgctttcatttgttcttgcagtgagcgaagtgagctgatcttcaagaatcacttccttaccatactcttccctgttgatcgttttggagaacttggaccttcctcaaagacgttctataacaatggtggctttacgtgtatacaagtactgaatcacatttacaacttctaccaggtatataactactgcacactcatcgctcaagtttggactctttttgtcttgtaaaacattgatggcagtaaaactattctcga

SEQ ID NO: 35142 - DNA, 2360 bp, Zea Mays
ccggccgctgccggcttccccgaggccgcccgcgtcccgaggagtggaggaggtcaccccgagacagtcgcttcaccgccggtctctcctccccacctccacgcggctcgcggccggccatacaccgcagcactaccttggtgggggcttgcgccagagctcgcgaccactgcccgtgacgcctgtctttgactcgttgaccgcggagtgagcgcgcgcgccggagccggccagccatggaagtgcgcggcggagtggggcagggttcggcggcccggcacccgcccgcgccggagccgtcccgggcggcggcgcgggttcaggcgggggacgcgctgccgctgccgatacggcacacgaacctcatcttctcggccctgttcgcggcgtcgctggcgtacctcatgcggcggtggcgcgagaagatccgctcgtccacgccgctccacgccgttgggctcgccgagatgctcgccatattcggcctcgtcgcctcgctcatctacctgctcagcttcttcggcatcgccttcgtccagtccatcgtctcgtccggcgacgacgacgaggacttcctggtcgggtcgggagctccggcctccgccgccgcgccctcccggcagcatgcgcaggcgccggccccgtgcgagctgctcgggagccccgccgcggcgcccgagaaaatgccggaggacgacgaggagatcgtcgcctcggtcgtcgccgggaaggttccgtcctacgcgctcgaggccaggctcggcgactgccgccgcgccgccggcatccggcgcgaggccctgcggcggatcacggggcgggacatcgagggcctcccgctcgacggcttcgactacgcgtccatactaggccagtgctgcgagctgccggtcgggtacgtgcagctgccggtgggcgtcgccgggccgctgctgctcgacggccggaggttctacctgcccatggccaccaccgagggctgcctcgtcgccagcaccaaccgaggctgcaaggccatcgccgagtcgggcggcgccaccagcgtcgtgctgcgggacgcgatgacgcgcgcccccgtcgcccgcttccccaccgcgcgccgcgcagccgagctcaaggcattcctggaggaccctgctaattttgacacgctttccgtcgtcttcaacaggtcgagcaggttcgcgaggctgcagggggtgcagtgcgcgatggcggggaggaacctgtacatgagattcagctgcagcacaggggacgccatggggatgaacatggtctcaaagggcgtgcagaacgtgctggattttcttcaggatgacttccatgacatggatgtcattagcatatctggcaacttctgctccgacaagaagccgtccgccgtgaactggatcgaggggcgcgggaagtccgtggtgtgcgaggccgtgatcggggaggaagtggtgaagaaggtcctgaagaccgacgtgcaatcgctggtcgagctgaacacgatcaagaacctcgccggctcggccgtcgccggcgcgctgggggggttcaacgcccacgcgagcaacatcgttacagccatcttcatcgccaccggccaggaccccgcgcagaacgtggagagctcccactgcatcacgatgctggagcccgtcaacgcagggagagatctccacatttccgtcaccatgccttctatcgaggtgggcacagtcgggggcgggactcagctggcgtcgcagtccgcctgcctggacctcctgggcgtgaggggcgcgagccgggaccgtcccgggtcgaacgcgaggctgctggccaccgtggtcgccggcggggtcctcgccggcgagctctccctgctgtcggcgctcgccgcggggcagctcgtgaagagccacatgaagtacaacaggtcgagcaaggacgtctcgtccacgacggccaccgagaagacgcgtcaacgtgaagtggacgtgtgaacagcagggattttagtttttgttcttccttttggtgtgttcataagaaagagctctggccgtctaggcgcagaaagaagtgttgtttgcaggtcgtggttggttggttggtagattagatctctctctctctctcctttgttgttctttcggcttggttgatctctctccttccctctttgcgtcaggaagcagcagcttgcaaacctggtctcagcactgtaattatttcttctgttctactaccacatcttttgtttgttgctcgatcctcttctcgctaaccaaacaaacaagtccacgtggacggcggctggtacttacagcaggcaacctggctgccggcctagagcgcgggcaaggggtgcatatcgtggtcgcact

SEQ ID NO: 35143 - DNA, 1473 bp, Zea Mays
atcgctaggctttgaagcgcgacacggaagacgacgtgttgctcagagagtgagtgtgccgcgagctgacctccacgaggaccgaaacaattatcgccagattggccgcttcacctcgacagccacgccaccaccactgcgggtctgcggcagtcggcacatggagctcctgcgggacagcatctccatggtgtccctggctgtcctggtgaccgcggtgtgcgcgcgcgccgcgtcctcgtggctccgccccggtctccctcgcctggcgtcgttgctcccgatggtcgcctttcttgccgcggctcccctggctttctcctctgcaatcatccggggacttgcaggcttcttcctcgggtggctcggcgtgttcaaggtcgtcctcctggccgtcggccgcggcccgcttgaccccgccctccccgttctcccgttcgtcttcaccacagcgcttcccgttaagctcagatgcagcagcaccggcgctgcagcagcgtgcagggccaaatcggtctccctcgtctcgtgcgcggtcaaggtcgcggtcatagccgccatcctccatgtgtaccagtacacggaccagctgcatctctacactcgcctcgctctgtacagcgtccacatctactgcttcttggacttcctcctcccgtgcatcgcggcggctggcggcgccctcggcatggatatggagccgcagttcgacaagccgtacctggcgtcgtccctacgcgacttctggggccggcggtggaacctcgtggtgtcggacatcctccggccgtctgtctacggccccgtgcgcgcgcgcgccgggaaggcaccggccgtcctggccacgttcctcgtgtccgggctgatgcacgaggtcatgatttactacctcaccctgcgatcacccaccggtgagatgacggccttcttcctgctccatggcgtctgctgtattgccgaggagtcgtgcgcgcggcggtggatgcagtggggttggaggccgccgccgcgacccgtggctacgctgctcgtggtggtgttcgtggccggcaccgcattctggctcttcttcccgcaaatttgcagggaaggaatggaggagttactgctcgaggagtgggcagcggtaggggcgttcttcaacgacgccgcccgaaagctgctccagatgttcacgtgaagacttgaaagtcggcagtcggcaccagcagactcgttccaatcctctagagataattagtagctatggttttagctgtgttcacagagctaacaacaatagcaatagctatttgagaaacatatagtgtgtttggtttgagaaacgaagtggtgtatctctttctcacttttcacttttttatttggtttgtgaattttatttggtttgtgaaatagaataaattgatccatcatcacctcattcctcataaactaataattagtatataaatgaggagtggttgattacac

SEQ ID NO: 35144 - DNA, 4525 bp, Zea Mays
ccttcctcggcatccttcggtcccggaatatgcccccggcgtctccctcctcgcgttcctctcgtcggtgagctcctgccgcctggctcgcacagccgatttgcctcagtccagatcgtgcctccttcttcctagatcgggtccgaattcggctaccctcgccaccgccctacgccaggtgccgaggcctccgccgatctcttcgccggcgaagagcggccaccagcttgtggatggaggaggaggcgctgggtcgtggtggtggtgaaaagctttgatttcgtagccgtggtggacgccgctgctaatgcccttgccgtgcctcgttggtggcgtgcaagatgtatgccgtggggaaggtgggcagcctcatctcccgcagcgtgtacaccgtctccggcccgttccacccgttcggcggcgcggtcgacatagtcgttgtgcagcagcaggacggcagcttcaagagctcgccgtggtacgtgcggttcggcaagttccagggggttctcaagtcgagggagaaggttgtcgacatctccgtcaatggcgtcgacgcagggttccacatgtacctggacagcaacggcgaggcttacttcctcaggaacgcggacccgaatggtgaggaaggggagttcattgtctcccccgcctcgtcgggagatgagcgagaggtgccgatccaggaagctcagctgaggaagtcgaagagcacttcgtgtgatagctcgacgatggaagccgacgtcggtgagggcaagattcttgcgaggacaacctcgaggcggataaccatacttgaaaggatgtttggccggaaatcgattaagaacaatgcccatgctgtggatagggtgagttcattggagcgtgcagaggtcgctgcagaactcctagataccaagtggtcaacaaatctcccacgtagttcaaaacctaatggttcaaatgatgagccttccaagagcaacaatgatcagatggaaacctcaaaacctgtattttcggaacatagtttggatcatgggaaagagatggactctaactgtgacaatgctcactgcaattcatgcagccctcgtggaggaagaaacagttcagcagatgaaaccgatccgtgtttacaagccactattgtgaagaaagaggtggttgagatacacgcgcgtgagagcagcgacttcactgataatatcacttcaatcacacatcaacaagggtcagaatcttcgtcaaatgatctgggaacagataaacttatgcagcagtctgtcgatactcaagatgagttgctgcatgatgttgaagatgtaactgaaagggagacacatgcagaggaggttatttccaatgacatttttgaaatccatgttgttgagacagacattacaagtggtaagagcgaggtggattctgagattgttactgtggatccagaaccagatcgagctaaccagaattttacagatacaaattaccaaaattatggcaccacagatatttcatctgaaagacatgaggtttcattgatcccttctgcacaggatgcagttcaagagaaaatagttatcctcagcagttctgaggctgtggagggctcactagatgcagttccagagaaagtagtcattctcagcagttctgagactgtggatagctcatatgctgtgtcctgtattttggatgacacagttcatgatgcttctgatatctcacaggctgacggtgtacaacatgaggagcactctagtatctctgatgggagtacagaaaagctaatttctgaggaaagttcattagtatgctatggtgttcccagcaacaaaaaagacttggttaatatagctgttcaagaaagtaaagcctttatcttaaaaaatcctgcctcccaaatcttggaagagagtggtccaggtttggatgtatctacagacagtgtttccctttcacatgcagactcagctcctgatttagcttgtcagcatgtttctcctaatgttgaagatacaacaagttatgagcctggcattggtcctgaagatgtaacaaaaaactcagttgtggaaaatggagcatgcagcggggaacttgttgtttctgttattcagacctcagcgggagatggactgacaaaatgcattgctcatccagctgttttttctaataaaatagaagtagaaggctcaccaacttctgctggattttccagtttgatcagtgttgaagtgcaaaacacaaaactagaagatgacacaaacaaatctagttctgtgattggagatgaagctggttttgtgcctgaggctacagctgagcttgatgaagaagcagaaccagttatatcattatctgaatatacagaagaaattcagtttcaatttagtgatgctgaaaattttgcagatagaaaggccacggatgacatggtggctaacaaaacaacaggtgaagtagaacatgatgaatctgattgtgacacagagaaacaggaagaaggtgatgtaggtcttgtaaatgacttggagaactgttctgcgtcattaaagcctgtgagtagccctgtttctattcctgcaattgacttccagtcaggaaatagtaacagagaggctaaatctctaccaaatctccgttctcatatacatgatcttgaaaggtcttatagttttcagctaagccgctcactgcaatcaactgctgaaaataatggaattgatctagtcaagagcatgaattatgcttttcttgagcagaaatcagaagctattggtgatttttcagaagaaaataacagccctcctgaggttaccaacactgtagcacttgatggcaaccatgctgatgatctgaaagttgatgcgttcattccttttgcagaattatcactatgcagacacctgttatctgaaggcatgggggaggatgctgcttgcagtgcatttgattctgagaaggtaaccttagaggagttccgtaacatgaagcaatcactgatgcgaaacaacaaactagttgttaggattgctggccgctactttccctgggatgctgctgcacctatagtactcggtatgatttctttcagtgaggaacaagtttttgaacccaaaggaatgataaatgtggagcgagttgagcaaagtgcagctccaggtggcagctggagcatctggccatttagtttcagacgaacaaggactattactgctatccagccagtttgtgaaagtattgttgagacttctgtatccactcctaaagaattgacacattttaaagaactagatagagaaaggaataaatccagggtaaagaggattgagaggaaggtgcgatcactcactccaacatctgacgagcttgcatctcttgatctcagagagggcaggaacgtggtaacatttacgttctcaactgcaattgttgggaaacagcaggttgattgccacatatatttatggagatggaatacacgcattgtaatatctgatgtggatggaactatcaccaagaaaatggataccagcttctatttctgagtgcacgcgctatttcacaagcccacatcacaagacagtttcttttcaacctaaagcaggacggcaaagcacttcctgatggccctgttgttatatctccagatggtctcttcccgtcactttacagagaagtcatcagaagagctccgcatgaattcaagatttcgtgtctagaggccatcaaagatttatttccacacgactcaaatccgttttatgctggatttggaaatagagacacagacgagcttagctacctcaaggttggtattcctatgggcaagatcttcataataaaccccaagggtgaagtcgcagtgaaccgacgggtcgatacaaagtcgtacacatccttgcatgctcttgtccacgggatgttccctccaatattgtcgtcatctgagcaggccagcattcccgaggactacaatgcttggaattactggaagatgccattgcctgatgttgatttgtgaggtacaagtcgagtctgcacaacagcactgcactaattttatgatgtgccgtagtgatcatgagaaggccattacttggttggctacatgtggatgctcctgctcctgatataagttcctgcaagatggaattttgtatatataggatcataatagatgtagtagctatttcttgtgtctcctgttgttgttgttgttgtcgtcgtaggactggaaatcatacctccgtgtgtcctgtaactgaaggtacaaaatttactggatggagggatctgatagtatgttgcagccccccctttttcgtttcatccttgatgtaattgtggtaccgatgtattttgtacaagaacaaatcaataataatgcaatcgaaagcgagctgttcatacgcagacacaacatgttgcattgaccctaggtgcattcggtaactgaaaatcggagctgtgtatactgtggacatgtcatctttggtatgcctgcgacttttagctgcagctaatgtgc

SEQ ID NO: 35145 - DNA, 1447 bp, Zea Mays
atctccagcggaaccgcatgccccaaaagcgaagccaaccagcacaaaaaggagcacaaagctctctctccctcccccctctctctctctctctcctgttccccgcgagagtcgctcagggccgcgacgaggagaagcggcagcgcgtcacctctccaatggcatccccgtccctcctccgtgcaacctgtgcaccctcatgaggactagttcactccctgctgtcattgaggcttctggcaatgatgactggaagaaacgaaaggaagcacagagcctgaagaggctcgaggttaagaagaagaggattgagaggaggaactctctcgcctgcaacacttcaaaagaagctgctgggcagagtccaaaagagatgaatgcaaacactgacaaattagtaagttctgatgaaactattgtcagcgctaacgaaagtcatagcagtggcaagcatctggtgaaggggcttccaccaaagtaccaggccacaattacatcagaagacagttcgtcagcaatgcgaaagaagccaaactcggccttcaaagccatcactgaggagcagaactcatcatcgtctgttccttcctccggtgaagctataagtagcgtgacggcaccaagtctgcctctgttgtctttggtccccataacagcaacccttggttccagggaagaccaaagcattttaggcagggctggtgcaagggcaaacggcatgggggacgtggaaaggaggatgatgcaggagatgccgggcgtgttcaccaagggcctgtccaacggcagcagggtcgaaggcttcctgtacaaatacagcaaaggagaagtgaggatcgtatgcatctgccatggaagcttccttactccttcggagtttgtggagcacgccggcgccggcaaggtagataacccgctgcgacacattgtcgtcagcgctaccccgaacctgtgactgtgaggccaggcagacccgtgcacaagctatagtgttctgtagactcaggacctgagcctagcgtcagagcaatgtcaccgttagactgtgtggtgcggtgcttatgcccgattaaattggtgggcattgtggtaacataacctgttgataatgttttgacaatgttttgatccttcctatgcgtgatttagttctgcagcttcttcttctttttttcttttgtgttcctatcgtggtttcatacctgggcaagtagatttgtaggttagtgaggggcttgcggtgccactgtcccaatggccttgctctgggtgagctcgaagagaagttttttagactcatttgggcaagttttctacgtccaatatggtactgaagtttttgttgctggtttcgggtgttacaaagcagagtctgaactcttcgtgcttatgtgagatgaatacagactaagcatgcttgtgtttttataggaggccacctgtattc

SEQ ID NO: 35146 - DNA, 1942 bp, Zea Mays
aagaagagattatcgctcacagcatgcaaaacagaacaatctcctctccgaattcaatcatccctccgccgcaccactcttcctccgcctctgctccgcttctgcactcagcgtcctccggttgctgacggatccctcttcgccgccgccgccgcggacccaccgtgggagaggaggcgatgcgaggcgaggaggcgggagcgatggaggccgccgactacgggaagctcttcgtcggcggcatctcatgggagacgagcgaggaccgcctccgcgagtacttcggccgcttcggcgaggtcaccgaggctgccatcatgcgggaccgcagcacggggcgtgcccgcgggttcgggttcgtggtcttcaccgacgcagcggtcgccgagcgcgtcaccatggagaaacatatgatcgacggacgaatggtggaagcaaagaaggctgttcccagagacgaccacagtattgtgagcaagagcaatggcagaagcacagggtcacctggaccgggacgcactaggaagatctttgttggaggcctgccctcgagcatcacggaggctgacttcaggaggtattttgagcagttcggtgtcataactgatgtggttgtgatgtatgatcacaacacgcagagaccgaggggctttggattcatcacctatgattcatcacctatgtacctgggtcattatgaccctttattttccctctactttaatatatgggtgcgcagtcctcctgcgctctttcgagaaaaaaaaaagccctgcacaagagctttcatgagctaaatggtaaaatggttgaggtcaagaaggctgttccaaaggagcagtctcctggacctgttgcacgctcacccgtgggagtggggcagaactatgctgcgaacagggttcatagcttcctcaatggcttcaaccagggttacaatccaatccccatgggaggttacggcatgagggtggatggaaggtatggcttcctttcaggtgcacgaaatgggttctcttcttttggcccagggtatgggatgggtatgaatgttgaaggtgggatgagcggaacatttggtgcaacctctggtttcatcagcaactccaacgggaggcaaatgggttcgtacttcaatgcaagttcgaacagattgggtagccctattgggtaccttggtcttaatgatgttcctgggtcaatgttgggttccatgtctaggaatgtttggggtaatgggagtctaaactatccgagcaatcctgcaaacatgagtgcttttgcttcaccaggaaatgggggccaagtcagtcttacaggtgacaattggggaggtcttccttctgctcatgggataggcaacatttcaggccttggatcagggaaccttggtcgtggagctggagataataactttggtttgccttctggcagctatggaagaagcaactcaactggtacaattggtgagcctttttctgcagcaggcaatacatatgatgtaaacaatgcagatacatatgggagcagctctgtttatggtggcacagtctggaggttcacatcatctgaggttgacatgcattcttttggtcatgatattggaaatgttggtccgacaatcaaatgagacatgtcagcaagtcacatgggcaactaccctgttaacaacaatcagccaagcagaggatatttgactggaaatggacttttggcgacatgattatcagagtgctcgtgcagaatgctacctgccagtcatggccagttgacgctcacggaggggtgctccaggacgaacggtaattcaattttgacgtgggaccttggccgccagcaatctacaacagttgctggaaccaccgagcttgccttctacagcgggtggtttctcactgcacatcggcttgtgtctgtgtgattagccccctcttgattttgg

SEQ ID NO: 35147 - DNA, 4621 bp, Zea Mays
aaaaagtcaggcgtcgggtcctcagtcgtagcggcggcgatggcgcgcggcggcggggggcggtcgaagaaggaggatgaggaggagctgcggggggcgaagcgcggttacaaggaggcgtcggcggagggtaatcgggaggaggaggcgcgctgggctaacgtcatcggcgacatctacaagcgccgctgcgagtacgtcgaggccctccggtggcttcgggcggactacgaggtctccgtaaagcacctcccgcagcggcacctcctcccctcctgtcagtcgctcggcgaggtctacctccgcctcggccgcttctcggaggcgctcacctaccagaagaagcatctacagctcgcaaaggagtctgatgaccttgttgagcagcagcgagctaccacacagcttgggagaacataccatgaaatccttctaagatctgaaaatgaccatagtgccataaggaatgcaaaaaagtactttaaatcttcgatgaagctggcaaggattctaaaggagagatccccttcccaaaagtcggactttctaaaagaacttattgatgcgtacaataatatgggcatgcttgagctggaacttgataattttgaagaagctgagaaactacttatccagggcctgaagatatgcgacgacgaagaggtagattcgtatgatgatgctcgcactaggctccatcataatctcggaaatgtttatactgaactacagaattggaaaaaagccagggggcacattgagaaggacatagagatatgtagaaaaatacgccatcttcaaggtgaggcaaaaggattcataaatctgggggagttacattatcgagttcagaagtatgacaatgcaaaactttgttacaataaagctcttgaagtagcaagatccttggaagatgaggatgctctaattgaacaaattcaccagaatattgaaactgttacgaaagcagttgaagtatttgagcagttgaaggaggatgaactgaagctaaaaaaacttatccgggacacttctaatgctcgtggaacatctaaagagagaaaactcctacttgatcagcatgcatggctggatagtcttattgagaaggccaggatgatatgtgcatggcaaaaacacaaggaattctcaaaagggaaaaaaagggtagcaaatgaacttcgcgataaggaaaagttgagtgattctcttctgtcgataggagaatcataccaaaagcttagaaacttcagtaaagctcgtaagtggtacatgaaaagttggaacatatatcggtcgatagggaacttagagggacaagcattagcgaaagtgaacattggcaatgttcttgattcttgtggcgactgggctggtgcattgcaagcttacgaagaaggctaccggattgctgtggaagcagacctacctaatgtgcaactttctgccctcgagaacatgcattacagtcatatggtcagatttgataatatcgaagaagccaagaaaatgcaggaaaaaatagacaatctgaagcaaacactgaatcaatgtgaagcaagggatactgttagtgactactgctcagaaactgacactgaaggtggttgcacatctgataacacgcttgatgctcagaatgaccatggacaggctgcaaataactacgaggaacctgatgatgatgttacgcttgcttcactcgttcagaggagtgggagctcatccaagattaaggtacccaagatacggaattcttctaagaagtttgatgaactatgtgatgtgactgaagacatacataattcttctaagaaggttgatgaactaggtgatatggctgaaggcactagggcagttttaagtagatcacgttctgatcactctgttggcagaaaacgtgtccgtgtgatcttatcagatgatgaatccgacgagaatcatgaaaacgttcagtttaaaaagacatcaactagtcctgcagatagtatgtcagtctcagaccatggagcaagcagcagcagaaaccaggatactttacaagttaatcaaacaagggatgcaccctatccagctgaggagagcatttgttcattcaaatcaagtagtcctattgatcatgcttttgaaggcataggattaggtgcttccagtgcaggaaagggaccaacctccaaatcagcagcaagtttttccaagctcagtacacctggctcaaacagtctgaatgaaagccaaaatgctgttggttctcaatccaaagatgctgataatcacttctgggccttcagaatcggcggccatctggtttacttggatggacgtgcttgtgtacatgaaggtgcttttagcattgactctctcaaagttgaagtagcatgtgtatattatcttcagatttctgatgaaaaaagggccaaaggtctattgcctatcattggggagctaaagtttcgtgggaaggtattggaagatgcggtatccatatattatgatgatcagctcgcttctgaacagaagtgtgttgatgttgttattgatgattgggtgccaaagcagctgatgaagttgtatgttgatttctgcatgaagtcattagaagcacccaataagaagctgctgacgaaactatataatcttgaggtctccgaagatgaaatcattgtttctgattgcggactgcaggatatgtcaattgtcccctttcttgatgccctaagatctcacaaaacaatagcagttttggatctttctcataatttactaggaaatcaaacagttgaaagacttcagcatatatttgcttcatcaagtcacacatatggtggcttgactctggatttacattgtaatcgattgggtccaactgctttatttcagatatgtgagtgcgctgttttgactgatcgattggaagtacttaatctatctgggaatcgcctcactgatgcatgcagttcttacctattcacaatcctgaaaaagtgcaaagcactttatagcttgaatgtcgagcagtgttctatcacgtcaagaactgttcagaagatgacagatgcactccatgaagagtctgtcctttcacatctctcattaggaaagaacaacccaatttctagcaatacaatgcttaaccttctatccaaacttgcatctctcacaaggttagcagaaaatgtccatatcagttgtatagttactaaggtgttggcaagtatagaccagccatgcatgttgttcttgcaggttttcagaactaagcctgactggtataaaactgaataagttaatggttgataagttgtgcctccttgcacaatcctcgtgcctatcaggacttctgctaggtggaacttccattggaccggtaatttgctttccattttcttttccaaagaaaggctttgcgttcgagaaaaaaaaggctttgctttccatttgtggttagtgtttgcaacctgtacacaagcaatggtactactgtttatgcaggtggagacaactaggcttactgaggcattgtcttgtacatctcaagatttcctaaggttggagttgtctaattgtgggctcacaacacctgatttcacacaaatctgtacaaatctctcccggatcaatattcttgagttaaaccttggaggaaatccaattaacctggagggatgtgatgctgtacagcgaatgcttgtaaatccccaatgcagtattagatctctcagccttgacaaatgcaatcttggacttgctggaattgtccgtgtcattcaatcattaccaggtgaggaacaattttgtggaagcatcagtctctacattaagttaataatattctactttcagaaaacagccaattagaggagctgcgcgtgtctaagaacaccaacttggcgttggagacaacaacaaagtatgacgaagacatgcaggaagtatcaacagcttctgagcaaaagcaatgtaatgaccctgaaacaacgaatgatatagctccagggaacatagattttgcgaacatgcaggttccagacagtgaagatgaagcagataatgatgcccaccgtgccagatctggttcacgcaggagctgtgcaagttcatcgcagaaaaactcttactcttcttgtcagatgattgaagaactggcgaaggcccttatttcagcaaagcagttgatggtgcttgatcttagctgcaatggtttgtcggaggaggcagtccagtcactgtattctgcttgggcgtctgttccgagaggcgatggaatggctcggaaacatgtaaataaggaggtggtccacttttcagtggatggtatgaggtgctgcggcctaaaaccctgctgcagaagagacctgcaaatgtgaaccctggacgaccttccgatgctaaattatggttgcactctgtaaataaatcatgagtgaatcaactaggcgttgaagcattgtcaatgcaacttcacactagtcacgatagtttggtgagtaattatgctgattcgcgggaatgtatacactacaatactagatgcttgagatttgggtatgcagttgtttcctgaggtgcagttactccttcgaaatcgtgccgtgtgacaagtttttcaattaaaaggaag

SEQ ID NO: 35148 - DNA, 337 bp, Zea Mays
caagccttgaacaaccatcgtcttgctgcgacgcgtgcgtgcggcactcgccccacgccgccgtctttgtgtttgggtagccccgtcgcggcatcgtcaaaccttgcccctcgtcgtcatgttctccctgctgcagcaccatcgatttgtacttgtgtggaatcgcagtagtgcatatggatgtcaagggaagtgaaagctccatgcgatgctagccaagaactcgacgtaaagcatgaactagggtctcatcattgttcttgtgaagttcaagccgaatatatagttttggagggagatttggtgctgaagccgaagccagcagcccccttattct

SEQ ID NO: 35149 - DNA, 1646 bp, Zea Mays
caagcatctgtgcatctgtttcttcaccgccgctcgcaaggcagtccgcacgccgctcatcttctctacgtagctgcgctcaccggctcgcatgctcgcctcgccatcgctcgcctcgagtccgcctctgcgcacacgccatcgttcgactctacacgctcgccgtcgctcggctcgcgcgcacacgctcgaatccgcctctgcgcgctgctctgtgcgccgagtgcctacgcggccgctgccacgactccatagacggcagtgtccggcacttgaagcgacaaccactacgaccagatcaaagtcctgaggatttgcaacgttggaagccggctcccggacgcgcaactgcgcggacttttcctgcaagcttcttctgcaaccgaagcaactcttcaatccagaagtggctgctccagggcggcatggcgccaaaagtctccagcccgttcctcctcggcctaccctgggtcgtcgcgcacgttggatccatcaaatcttccaatgcacgctgcgccggcccgggtcgtcacgcaagagagctcccttcttgctagcgagtagcgactagcgagaggtcgccggcgcggcaaaaatccgaaaggcgagccgagatggcggggtcgcagtcgcaggcgatgctggagaagatggagctgcggcagagctaccgcaacgtctggcacaccgacctcaccaacgccgtcgccgcggacctcccgtggtgctgcctgtctctgtggtgcggcccgtgcgtgtcctacatgctgcgcagacgcgcgctctacaatgacatgtcaaggtacgtgtgctgcgccgggtacatgccgtgcagcggcaagtgcggcgagagccagtgcccggaagtatgccttgcaaccgaggtgttctgctgcttcggcaactcggtagcttcaacccggttcctgctgcaggacgagttcaacatccagacaacgcagtgcgacaactgcatcatcgccttcatgttcttcctgcagcagctggcctgcatctgctccctggtcgcctgcatcgtcggcaacagcgagctctcggaggccgcgcacgtcatctcctgcatgtcgaatctggtctactggacggtttgctcgtgcatgcagacgcagcacaaggtggagatggacaagagggacggcacgttgaacaccatgtctgcgcctccgatgcagcagatgtcgcgttggtaggtgcgagtgagattatgtgccgacctcgatacggaggagggtagctgctggagctggaggctatcagcaatctcctactctggttaggacggtccatttttcagatttgggtgagataccatggctagtgtgtaaaccatgtcccgtttgtttgggcaaattttcgtgtttaatgagttgtgcatttttcacaacttctgttatacctcttacggctagatgccgaaattagatatcctaataatttattttaattgactacaatagtatgtgcacttgtattttatttagaaatgagacgagagcaacgagtgtagaggctcaacttatcctccgggtgctttgtgcctattgagtatcaaatttggcactttccctactattttttttatctcttcggctctacatcgtttgaaagcgttttggcacaataca

SEQ ID NO: 35150 - DNA, 1627 bp, Zea Mays
gtgacgtcacctcttctaaggcccctgtggtgccaattcagatgggctccaggatgaggccaggcccatgggggcacgattcggccttttcttgtcttgctcgtcaaaagaataaaatcccaacccataggaaagcgtagcatagcaggggaggccgggaggggagaaaggcgaactcgaattgggggaagagagcgagagacgaatcgcatcgagccggagaggaagtcagagacagggaggagggcggcggaatcggcgccggcgggaggcaggcatggaggacctgagcgtggaggagctcgcctccaacctctccacctacaaagagcagctacgcgaggtcaagaagcttatcaaggagaagaaggatgatgctggaatttctgaatatattgatatggagaaggagcttcaagaggagccatgcccagcaaggtagcatgaaaaggccgcttgcaacagaagatttgttttggggaatttagatttttgtaaccttgaaaggtcataacgttaaccgaagagattttggcaactgcaaagcaaactgagagtgcccagaatgttgcaggtctatcaccgccaagctattcagctggagtgcagtctgagggactggatgacctttcacattcccataagtttgccgttggtactagagttcaagctgtgtggagtgaagatggagaatgctgaattgccaggtataatgcaaccgttgaagctttgacaccaaatggatactatgtagcctacgatggctggggaaacagtgaagaggtggacccagataatgtgaggctgcttgaggaagaagcagctgatgccttgggacaagctgaaaaggaagctgaagctacaaaaatggcaataaagaggaaaattgaacaagcagcaacatctgattttcaggcgcgtagcttgccggccaaacttcgtatcgaaccaagtgaccctgaggatgttaaagctgcaaagcgtaagaaaatacatgctttcaaatcaaaatcccgctttgagcagcttgaatttgcccaaaacaaaaggcagaatgcatggcagcagtttcaaaccaaggggaaagccaaaaaggtggggttcttctccggtcgcaagaaggagagcatcttcaagtcaccggacgaccacagaggtaaggtgggtgtcactgggagtggcaagggcctgaccgacttccagaggagggagaagcatctgcaccttaaaggtgggtccggggatgcagcggatgatgacgaggagtaaactgaagaaccgagcctctgtttgtatcccgccgaacagacatttccatacctgttctttagcgccgacatggcctcgaggggactcttgacttaaaccagaaaatttcaatgtttgtcccattctcattgttgaatgtcgctgccgttttggagctgcattctggtggcgaggtcacgctgctagaggagggcgtcctgagcgtacagatcgacttgtcttgctagtctgtagtgaagtattaatccttaaacgtttactaaaattgtcaccggcctaagtacagatcctttgccccaaccaagtccattgaagaagatcaataaactcgctactgctgagtgtactctacaaaccg

SEQ ID NO: 35151 - DNA, 1470 bp, Zea Mays
tatctaaccaagctggcaatgcaaatcttttgttgccatggattattatttaggaaaatgtacacgaagtcacaaacttgtagttactggttaagtatccgaaggaaccaccacatatttatgctgtggaaagtaagggccttgatgagaaccgacagatatatcttatcaccagcatccagaacaaggcaaacgaactttcaaactgtccaatgcttgtgacgttatgtgaggaagctggagagatcctctcgaacatgaatcatccagcaggggattgtccattgtgtctatatcctttaatgggagaggataaggttggctcggagttgccatttatgaagttgatgtcatgctaccattgcttccacagtgactgcattatgagatggtgggaatggctccaacatggtgacacaaacccaaaggagcccaatactggagggtctcgatttgtccagctcagacaagcattataatgtgaatcagccaagaggattttgtcctgtttgccgcaaagtgttcgatgagaaggatattgagcatgttcgtgatttgttgggtgacaatacttccaggctggcatcactaacagttgaccttggtgaagatgaaaaggaattgctccattccgaggctgagcaaaacaggagaaaaagaatcgagtcacttgttaatctgcagcaagaactaaacggcctgattgaaccaaagaaagaccttgccatacaaccaggaatgtacgtttccgttcctcccagcacgccagacacagctgaagaagagaatgctgatcccagccaaggcacggctacttcgacctcagaaactgagcaacgtggccaggcaagcaacgccagcagcaacaagccgaagaatccaggccatcgaaggagaaacagagctaatgcatcaagacgacagcctcacggccagggccagccagctaggcagcagtggcagaggaaagaagcaggcacttcacaccaataaaacaacatcgaagcaacgaggaggatgtgacctgtgagttgtttttgtcggctatgtacatcaatgtcgtgccttgctttcgtctcataataattgcgagccatggtatgacaatgttttggcgctgctatggaagttccatgcaagtgatactctggaaagaaccctgcaccggattctatgggagtagtataaagcacatgcatgcttggctagtacatacaatatctgattttttgtgtgtgtgtcattgccaggtactatgttcaaactgattgtccatagtcagaaaagcaactgattacactgtttgttactctttgagttgcatcatgtgtttgaaatacatacattacagcttaggtcatgtgggacattacaatataaagcactgcatgcagaatttgcaggggtcggctatgttggtaacccaataacaatgcatacctgtaaggtgctattgttttgtccgctact

SEQ ID NO: 35152 - DNA, 2631 bp, Zea Mays
atcagtcggatttggaggagccgaataaataaccaaggatactgcgaagggactcctcccggccccaaaagcactttccttgcgtccccgtcagggagggagggagggaggggagcattgctgtgcgggatggcgaggaggaggatgaggaggggaggcggtggcggtggcggtggcggtggcggggtggtggatgtggtgcgggtgcggcggctgctgctgctgtccctgacctgctgcagcagcatttggccaggcggacggatcttcgctgctgcggacactgaccccaacgatcttaacgtcctcaacacgctcttcaccagtctgaattctcctgggcagctcacaggttggcaggcgaatgggggtgatccttgtggccagtcatggaagggcattacttgctcaggatcaggggtcactaaaattgacatgagccaaaataaccttggcggtggaggtcaaatacagtacaatcttcccaatatgaagcttgagaaactcaatcttgcaggaaatcaatttggtggaaatttaccctactcaatttcgacgatgcctaatcttaagtatttaaaccttaatcataaccaactacaaggaaacatcagtgatgtattttccaacctttacagtttgtcagaactggatctgtcctttaattcccttactggtgatctaccacaaagtttcactggattgtcaagcctgaaaaaagtgtatttgcagaacaaccaatttactggtaatatcaatgtcttagccaatctcccccttgaaactttgaatgttgcgaacaaccatttcactggttggattcctagtcagcttaagaagataaacagtctacagactgatggaaattcttggagcacaggaccagcgccacctccacctccatacacagcgccgcctcctcctccaaaccattggaatgctgatggttcatcaagttcatcaagttctggtggaagatctgggataggtggtggaggtgtagcaggaatcattatatcgttgctggttgttggatcagttgttgcatttcttgtgatcaaaagaagaaaacgcaaagctgctatgaaagaacattttgaacagcaccagccattcacttccttcccttcaaatgaagttaaagacatgaagcctgtctacgaggccaccacagtagacatagagtctttggcttcacctgcttcagttaatctgaaaccacctccgaagatagaacgaaacaaatcatttgatgatgacgatgatttttcaaacaagcttgttgcaaagaaaagtaatataacacctataaatgcaactgtttattcagttgcagatctacagatggcaacagatagctttagcttcgacaaccttgttggagagggtacttttggacgtgtttacagggcacaattcaatgatggaaaggttctggcgatcaagaaattagatagtactgtgatgccatttcaatcatctgatgactttgctgaactggtctcgaacatttcaaaattgcaccatccgaatctgaatgagcttgtgggctattgcatggaacatggccagcacttgcttgtgtatgatttccacaggaatggatcacttcatgatctactccacctttcagatgagtacagcaagccacttagctggaacactcgtatcaagatcgcactcggctctgcccgtgcactggagtaccttcatgaaatatgttctccatccatcatccataagaatttcaagtcgtcaaacattttgctggactcagaattcaatccacacctttcagatgctggacttgcaagctttattcctgatgctgaattccaggcagcagaacaaagtgccggatacactgccccagaagtggacatgaccggtcagtacaccctcaagagtgatgtctacagctttggagttgtcatgcttgaactattgacaggacgtagaccatttgacagctctagacccaggtcagagcagtcacttgtgcggtgggcaacaccccagctgcatgacatcgacgcattggacaggatggtcgatcctgcactcaagggtctatacccagccaaatctctatcccgatttgctgatgtccttgccctgtgtgtccagcctgaaccagaattcaggccaccaatgtcagaggtggtgcaagcattggttcgacttgtgcagagggccaacatgacgaagaggatgcttgatggggatacttctcggcgaccagatgacctggaccaagatttcatatgacaagctgaactcttgtcagattgtatttatttcgttcgactagcggcccagcagagacataatcacacaagaggaagaaacagaactctgtcagcttcgccagtacataatcacaagtttttcttggtagcaaagttgtgctatatggttgtactgtgtctacaaaatagtaccttgatcttacgctaatggcatattgttataattctttggtaacttatatgcaaatgccccagataaacaaaactatggtgaagtgtgccgaatgttaaaataactgattagtccagtactgctgcatcaactgaaacaagttgcacagtggaaatatttatcttggtccctcaactatccccttgaggc

SEQ ID NO: 35153 - DNA, 2679 bp, Zea Mays
ccgcaagtgccacggataaaggtggggaaaagatctttgacggctgtgttatccagtccagtatcctcgacggtcgacgccggcgcgagcagcaaatggccaccgcggcggtgacgatgaccatggcgacgcacaacccccgcgcccgcgcacccctccgcgtctgcgccgcctgggacatgaacccgggagccgccaccgtggccacgcccaagccctccaaggccaaggccaagccgccgccgccgcccgcgaccacaaccccggcccgcccgcctcctctgacccacgccgatctcttcgcgcgctccagcgaggcgcaaggaggggtgaagaagagcacatatatgggctttgagaaatggtggttgccacctgcgccagtggtgaagaaaccccgatcgctctacagtgcggtgtcactggcttacttgggagactgcatatatgaactttatgctcggaggcacttcttctttccacctctgagcatcaatgagtacaacaaacgtgtgatggatgttgtgaagtgtgagtcacaggaccttttgttgaacaagcttcttggagaagattttctaactgaagaagaaaggtgaatattagattgctaaacttatacaatttatgcaacattaccaggaatataatttctacagagaaatgttcgacggtagtcttaagatgcatgcctgcacttttacggaatgttagcattttgacatttgtcaagactagcataggtatttggatgttaccgtatttgtttttgggaaaatgctgtatctctctactttttctacactgtccaggtccagggcctcgagcctattcagtaatgagccttgaagacgtactttgagttacatgattaagcacatttgtagggacatacttcgttgggggcggaatattgttagcagcaaaactcgcaccaggaagcgtgcaggaattgctgtctacaaccgggcatcttcactcgaaacactaattggatatctttacctcacaaatttcaaacggttggaacaactgatgtttcaattgggcttcacaagtggtgcctcatcacagcatattgcagacgagctgcgctcaagtttccagaaaacaacccccgcttcggccacacctccacaacctgcaacacagtgaacaggtctgaggtgtaacggtattggatcgtgctcccacaaaggttatctttagtcttcgaccctaacgacggagaaaggacgcaagagtcacggcgtattcagatgcaatagcgaggctgggagcagatggttagcgaacaccaccaccgtatattcatcagcatgtttctgcgaatggagcaacatagatatgctcaaactctgaagatatgcgaaaattaagactcagaatgtctgggctgacctggggtttgcgagtaggatagcttgatgtttgcaaagaagctcgagtgtgggagataggcccgacttggggtgttgtaatcgacctaaattcgtgtaggtaattaaccacttcatgttacttgttgccaaaaaaaaagtgatgattctgcttgtacacacgccttgtttttttttcctgttccctgtgacttctgttgaacagcaaaagctatgagcgctaagatgctgtgggaatgaatagaacaaaataccaaacctgtgggcgttactataaatccaattgatccaattgcttcattcggggtagtaattttacaaagcccagttatggggatacattggtttcaaaaaaaaaaactcgaaattctcccgcctatccaccttgaattggattggatttgcttcgagcagtcagtcttgccgaagtttttaggagttctccgacctcgtagtcaatcactcagtctcggagacacacattgccactgcgatggccgcccaccaggactcggcggcatcggggagcgggcctcctcgtcgtcctcgcgtcctcctggcagcctccggcagcgtggccgccatcaagttcgaggtcctctgccgcagcgtcgccgagtgggcggatgtccacgcggtggcgaccgcgtccgcgctggaattcatcgacgtggcctccttccccggcggcgtccctctctacaccgacgaccaggagtggtctagctggaagcgggtcggcgacaaggtcctgcacatcgagctgcgccggtgggccgacgtcctggtcatcgcgccgctctcggccaacaccctcgcaaaggtcgccggcgggctgtgcgacaacctcctcacctgcgtcgtgcgcgcctgggactacagcaagcccgtttacgtcgcgccggccatgaacaccttcatgtggggcaaccccttcacggcgcgccacctcgccgtcctgcgcgacctcggcatgtccgtcgtcccgccggtcaatggcgcgatggcggagccgtcggagatctgcaagaccctcatgctcttcttcggtccgcaacatctttagcagtcgccaagctcctcagttctttgctcctttatgtatgatgagatgtgtcccttgcttgacctagcatagcaatcttgccacaaaccacggggtagaattagatggcaattgttctacgcaatgcttgcaatgacatcatacatggcagtggagcgcttctcgtctttcatttccccgtacagatcgtcaagcaccctgaaaacctcctca

SEQ ID NO: 35154 - DNA, 2736 bp, Zea Mays
gtgattgatagaagaactaaggaaaagccgtagcaaggtaaataaatgtttatacttgtgatgtcctgttgtgttggttaattaaaagcagtaatcgtcgtccttccagtggtgttgatgttgtgtgctcgatgaagtgtagatatctaattctaacatgtggttgttttacggagtcttccaatttaatgtttagttcgccaatgtgtctttgtatatcttgtgctagtttcattatattcatccatatgcatcttgcatctcatttaggaccgagagatgatgatcgtgcaagtgatgtggtgccaaccacaaggtgcagtcggtggacgacccaaggaaggatgaacttaaccagtggatgctcgccgagcgagtacctcccccagcaaacactgtctaagtgttaaattaaaggcaagccccggttttatgcataaccgtttatatatgctattttactacacttaatgtttgtaggcttgtactgtgcacttaagtgtaggagttgcctgaaaccctagttgcatgaactcaggtttcctttgagatggatactagtatgctaggtcgagtagctgctttgctaattagggatcttggtagaagacgagtgatttttctagcactcgcgcgaggtcaggaattggttgtatccactttgataacagaatgatgatggtctgtggacacgggtccatggggacgcgtggtctacgagatgaaaattggaataaggattaacgtgtggatacctgtgtcaagcgtttgaacgtactaaacacataccgagaaatatggtaaatcggtaagcctagtacctgagtgaacctgcccgcagacatatcccctaacgcgacctgagacgtggtctcccattccggttatggtgggtacaagtgcggtcactgcacgacgacagtcggggtcagtgaggcattgtacgccaaggcggtgagccctgatctgttgccagggaatcgatggggacggttgatgtgtgtggggacggagtgcctcgccacgtcgtgtgtttaggtttaccttgcaaggataaaaacttgatttgaatcgtctgcttctcgcagctaatgagactgcttgatccattgtactgcattgagtaataagtggaaatgagatggcaaaagatgttgattgataaaatgtttgataccatgtatgactagctaggtacacatctagtaaagaggttcatactaaaacttgaaaagctaaaacttgattttagactcaactagtgcttttggcaaaccaaacccctcagccaaatagctgcatgtctagaggtagaggagtagattcctcacaccgggtaagtctagctgagtattagtatactcagccttgcttgtggcacaatttttgcaggtaccccccttgatttggttgatggtgtaacttggcctccatccctgccaccgggatagacagtcaagtgggttattgcttccgcaggagaggaccaggaggagtagtgtggacaggcttcgccatgttactcggttcttctccgttagttatttccgctgcattaaaatttatggttattatttctgaaactccgataatgtaatcactaatgatacttattaaatttgtggtattatgttttattgtatttctctgtgcctcaccttcgtgtgagctagtggtattcgattctggataagtggctttatcggactagatccgagggactgacgttttattcctatttaagtgtggtctagcatgtaaggtgggacttaggcacttaagttggaataattcgggtggttccgccacaactgccttacattctgaccccttttgtttgattgtctcctgctagatatgactcggcagatttccacttttgaagaaaaacattctcgagatcaggctgaactggtccagcggtgctctgattttgaagaaaagtattctcaaagccagactgaactagcttaggtctccgctgccttagatgacgccaatgcactgagctcttcccttcgcactaagcttgattctgaaaaggtgacttatgaaactgtgccttgccttattgtgctcctattgcttgcttgatgtttgaaagagttgattcttgtttgcaggaagaaaaatgtgtccttgttgcttcccgcgacaatcttgacagactgtatcgtgattccagcaactcattgaccatattggagaggagtcatcgcttcaccatggaggagttagacaaccatcgctgtaagctgcaggaatccgcggatgaggtgatccggctcaagcaattgatatcggcgaaggatgctactatcaaagaactccgtgcttccaagaaatccatcgcccaggagctagaagccgctcggttggctgccaaggttgctgaagaaacttccattactctgagagcccagcgcgacagagccatggataaggccattcgggcagggcaaatcttgatgaggagacccggcgtggttgttcccgaagatataaaggctgacgtgaatgctgctcctgattccttgagtcgcccttcctcgtcgattgctcctgagaaagatatcacgaaatagagaaatattttgcgtgctttgagcgtgcggttagcatggtcggacatttgttagaggacaccggtttagcacttgaatgatattgttgttctcttattgtttcagaattcaacagtacgtaaatttgaagtagtaaaatgatgtgtgatgg

SEQ ID NO: 35155 - DNA, 2194 bp, Zea Mays
aactattactagtagattattcaaacacccgtctagttctacttgttggaagggtgccgctctccacgagatccaaacccccgcacccgcggcgccggcgacgcagggaggaggcgatgcacggccgcccgcggcgaccggccaagctcgaggacgaggaggcggcgtcagcgaaagccgccaagcttcgggacctccaggcccaggtcctgcacaatcaccatggccgcacgtacacaaaggaggcaattgggctgagcttcaagctgctcgagataaatccagaggcctacaccgcatggaactaccggaagcttgcgtttcagcacaatgtcaaggagctttctgatccggaggccatcaagtctgctgttgatgatgagctgagagtggttgaggttgctttaaggcaaaacccaaaatcctatggagcttggtatcaccgtaagtggttgctatgccaaaagctagcgcccgtggatttcaaacgtgagtttggcctcttggataaactgttgaaggtggacgccaggaattttcatggatggaactacagaaggttccttgcaagattcatgggtgtgtcagatgaggaggagctaaagtatactatggataaaatcagcgacaacttcagtaattactcagcatggcataatcgtagtatacttctgtccaacctactgatccagcagagcaaaggttttgagtcaaagcagaagattttttccgaggagtttgaacttgttactcaagctctttttacagatccaagtgaccaaagtggatggttctatcacctttggcttttagctcaaacgtcttgtccagataacccccagctgattgcttcatggccttctaatgctgcaaagctcagttcctctttgatcaaggaaaaagctgagcagcacagacagtcatccatcttgtcaaggactgtacccattgttctttattttaatgagcctgtcaaaggattaaatcaatcaagtgttaacttaaagtctgatttggagttcagtaaggatattatatggaggcccctcacaatggcagactctgggtattctaactgttgggccacagatctccagattataaatgaatgtagcagtttgcaggaatattctgttgaagtgagcataccctgctcgaatggcattgtatctagaagtggctctaactacaattgtcctgtgcattttacatttggcattgaattgatcagcaacgatccagtacagggtttagatatgtttgataagccagttgcctggaattgctcagaatcattccagcctcatgggaaccgtgatcctatcccttttgatctgctaaagattactagtgccttgatcgagcatgactcaaattggcattttgaaagactatctgaggaaatagatcttttcagagagttacctgatgacaacagttaacatgtgacatggagactttcatgaagcactgttcagttcaggttcaaccaaattcagctcccctgaatcatgtgcagctttgcagattatctctaacatgcattggatttgctgaacgcctgttgtgggttcaaatgctggacctaagccataatagtctgagatcagtcgaaggattggaggctttgcagcaccttgtgttcttgaacatcagcaacaaccagatcagtggtttcacagcacttgaatcccttacgaagataatctcattgaaagttctggatttatctttcaacaagattggagctcactcaattgacacaacacggtatatctgctcgtctccattctcacacaaaatggaagcaagtgaagcttttgaagcgtaccagaaggtaaatatcaacgtggaggaatactgggatgccatactgtttttcagatctctgaagttggcacagcttgatataaaaggaaatgcagttgcaagcaaggagaacttcagaactattgtcatgatgctcattccttgtctaaaatggtttgatggtgaagatgtcaattaaaatggagttgagcaatgatagtgtcaaggctcacgctgtaaaccattttttgctagaaggcattgatttgcatcatatgtactgctatatttgtttaaaaaactcggccggtaggggaaagaccgtccccctcctgtattatattaataagaagttcaatcgcagccccgatcgagtaagatcacg

SEQ ID NO: 35156 - DNA, 1369 bp, Zea Mays
ccgtttcggcctcggatgggcctcatggcattacgctttccgtgaccaaaaggccctggcccaataaagcccatgacacgattaagagctttacccagcggcagcgacgaggagacagattcttctccccccacggccacacccacgcaccgcagcgccgcctcgtctcctctcgccggcgatggaggaggtgggcggggacatgcctctcccgaaacagaagctctccgctgcaccgtacagggacggaggtggcgtcgtgctcgtggccactgggagctttaaccctcccacctacatgcacctgcgcatgtttgagctggcaaaggatgaactcgagctgcgaggttattctgtgttgggcggctacatgtctccggtgaatgatgcatataagaagaaggacctcttaccggctgctcaccgaattcgcttttgtgaacttgcgtccaaaagctcatcttttgtgatggttgatccgtgggaggcaatgcagaatggttatcagcgcactttgaccgttctttcgagaatacgaaactcactatgcaaggatggtgtagctgaccaaggtagcctcaaggtaatgcttttatgtggctctgacttgctcgagtcattcaccactccaggtgtttggatcctagaccaggtcagaaccatatgccaggactttggtgtcgtatgcatacggcgagaaggaaaggatgttggaaaattgatagacaacagcgatatattgcaagaatgcagggataacattatttcggttgatgagattgtgccaaatcagatcagttcatccagagtaagagactgcataagaagatctctatcgataaagtatctcactagtgatgaagtaattgaatacatcagagaacacaagctgtttatggaaggcaatggcggcgacatagcattgctgtaatagaggtatttggaggtaaactctgtaatcgacaaggatcggctgtggacgtctacctcaggagtcaggataccatctggaccgtgcattctgggcaattacttcgcacaaacacagaaataaacggaactggccacttaaattactactatatttttgttaaatttgattctggaggttgaagtgagttgcatgttgattaattttgcttttgtgccagaatcaagtgctacatacaacatgaattctgacaaccatataaatgccaaggttattctgacatagcaatcgtggatatagcatcggttagacaaacatatcataaagaattaagcctcatttgcagacagttctgatgtatataagcacagacaaaagatgtctctgtaacggattctattgaacagaacacatgccattatacaactgatcaactgc

SEQ ID NO: 35157 - DNA, 2191 bp, Zea Mays
gcggacaccggtcctcatcacagtccgttcctcccccgctccctctcctccacctccggccctccgccattcccattcacaaagcacgctccgctttccttttgtttatttactcttcctccctccgcatcctcctcgcgtcgcattcccccgtttccgcccatgcgtgtccgcctcctcgcatccgccgtcgtctcgcacctcccccgcgccccaatctggtccgggcggagttagggatgaggacacaaggggaggggcatgtggaggaggccacggggttcgaggtgggcatcgtggtgcccaggctctcccgcgccgccgcggcgggggccaccgacaactgcgtggcgcgtctggtgcgggagctcgagggcgccgggctgctcgtcgagcgcgtccgcggcgtctccgctgagttcatcaaggtccgtgacccagcaccggcgtgccgctgctgttttttattattattttatctccttgtctttttaattctgtatctgggctacgcacaaagtttgagcggacgcaagcaacaaaccggcgatacagaagagcgcgagccctctattatctgcctcgttcggaaattgtgcagcgcgtgctgcttgtttttttttctctctctcgttctaatgcttgtggccctgctgtttgaatttagctagccgcaccaatggggaccctggggagagctgctgctgagatgcatatgaagaagctaacctacatcggtagctggactgctgtatctacggagcatttgaattttgaaatgtggttggtggtgggtgacgtgtttcatgttgctcctaatttcggtctcagggatggagcttcagtttcaatcggaccaggttgcagcattcgttaggcagacagacggttccctgttcagctggagagaacgctattcctgcttccgctacttgatatatggcattgtgaacaagacaaactctgaagtagtccttaaatttgatgataaggagttccattggaagcaaagtgagtccttattaacaaggctggaagctgaaggagttgtaaagctagtattccctttgcatgatgaaattaaaaggaagcaactcctgagaaattgggcgcttaattggcttgacttcacatggcagcctatcgatgagatttactcctattttggaacaaagattgcaacatactttgcgttcctaggaatgtatgcgcgatggcttttcttcccagctgtttttggactggcaactcaactcatagattttggatcattgcagtggttggttcttcctggtttctttatctttgttatttcttgggctgtcctctttctgcaattttggaaacggaagaattcagcacttcttgcaagatggggtattcattgttcactatctgaatacaaaaacctggacaacgtcagcttcttgagtgattctcttactgttgaggaaaaggagtttggtgttgtgtctgtggttgtggagaaaagaaagtttcaaaggaacgaatggttcggtgtcctccttagaataaggaacaatgctatcattgtgctggctatcatttgtcttcagctgccatttgagttggcctatgctcatctatatgaaattgcagaaactgaggttatgaggtatttgttaactgcagtatatcttgttgcaattcaatattacaccagaattggtggcaaggtgtctgttaatttgataaagtatgaaaacaaccaaggagaagagtctagttccgctagtttagtttataaggcctttggcctttactttatgcagtcatatattgggttattttaccatgcttctttgcatcgtgatatactggccctccggcgagtcctcatccagcgtctcattgtgtaccaggtattagaaaatctaattgagaattccattccttacctcaagtacagttacaaaaagtacatagctgttcacaagaaaaagcgtgggaaagaatcgacagtgggtaggtcagtccggttatcaacaagagtggagaaagagtatttaaaaccctcttatactgcaagcattggagcagaactcgaagatggtttatttgatgactttctggagctgactcttcagtttggaatgatcatgatgtttgcctgtgcatttccattgattttctgctttgcagctctggtttgtgctctttcaaaaaatca

SEQ ID NO: 35158 - DNA, 3172 bp, Zea Mays
accaggacgagcctataaaaaccggcgaaatccttggctctcctctcctcacttggccaccataaccacaacctcttctcccctgtttcctctcgtgcgttctccgcaggagcgaggagggctcgcggcagcggcagggtctccgggtacgtcgtgaatgagaagagaaagggttggaggaaatatttccgaatctgtttccattacgattttggtggcgtagaatttggtttcaaacgcgcagttatgcgcacactagatcagatccgacttgttctgcggcattccgattgcttggcccttttttgccgattagttatctacgtaaaccatggtcggcataatgcgtttttgtttattgccttggtctctgaataaaggtagttattatttggttcttgggtaatggagtgccattgaatggtccctgcatagcgtggtattggttctgtagatttagatgaatcacagtgtcaagagagacaagattcacctgaatcctctgctaaatctgaaaaatagagatgatccaaggtcctctgctgaaaatgcagttttcttgttaataccaagcattctgccgtttcctattgagatagatattctgttactgatttttaccctagcttggtctcctctcctcctagtgtttttgttccagaatctgtagcaaatggctgacggcgaggacatccagccccttgtttgtgacaatggaactggcatggtcaaggctggttttgctggtgacgatgcgccaagggctgttttcccaagcattgttggacgcccacgtcacactggcgtgatggttggcatggggcagaaggatgcgtatgttggcgatgaggctcagtccaagaggggtatcctgactttgaagtacccgatcgaacatggcattgtcaacaactgggatgatatggagaagatctggcaccacaccttctataacgaactccgtgttgcgcctgaagagcaccctgtgctgctgaccgaagccccactcaacccaaaggctaacagggagaagatgacccaaatcatgtttgagactttcaatgttcctgccatgtatgtcgccatccaggctgtgctttccctgtacgccagtggacgtacaactggtattgtattggactctggtgatggtgtcagccacacagtgccaatctatgaaggttatgcccttcctcatgccatcctgcgccttgaccttgctgggcgtgacctgactgacagcctgatgaagatcctcactgagagaggttactccttcaccacctctgctgaacgcgaaattgtaagagacatcaaggaaaagcttgcatatgtggctcttgaatacgaccaggagctcgagaatgccaagagcagctcatctgtggagaagagctacgagctgcctgatggtcaggtgatcaccattggggcagagaggttcagatgccctgaggtcctcttccagccttccttcattggtatggaagctcctggcatccatgagaccacctacaactccatcatgaagtgcgatgtcgacatcaggaaggacttgtatggtaacattgtgctcagtggtggcacgaccatgttccctggtattgcggaccgtatgagcaaggagatcactgcccttgcgccgagcagcatgaaaatcaaggtggtggcaccgcctgagaggaaatacagtgtctggataggaggatccatccttgcctccctgagcaccttccaacagatgtggatctcaaaggctgagtatgacgagtcaggacctgggattgttcatcggaagtgcttctaagctctgggtcccccttcggctccattttatttattccttgagtgtttttcatataagctactatgtttgggattgcatgcctttgagcaggcaatgttgttgaatttatattttgggatttatattttgtggctcactacaatgcatacattgctccagctcctttccatgccaaatttgttgctagtggtgaaaacatcaaccacaaaaaagagaggatggaaattaataaagtacctaggatcatattataactgtacttgtcgagtaacactattggttctctttgtacatccatctctgagacatgcaattcatttgcgacgtgtttggtttgatgtagtgtaagggtataggacagttatctgataacgttacatgtgtttgttatgagttctattggaatcggatacattagaatcggataccacagtatagaaaactcaaaccctccaaccctagccggaatcaacgacccgattcactcgctcggcgccgctcgagccttcctcctcggacgccagtgccacgccgcgccgccacccagcctccctcctcctcggacgctagccgccggcgccaagtattcgccgccgtccaggtaacaaatcctgttctctccgaatctcaagtttgcacagagtccgtctcaccgaattccctagagtccgtttctccgtctctccgggtctggtggccacacctccgaaaccggctccttgttcctgtcgcctgccatcggcgacagatgcaacgagacgcagcgggatgctagctagagcgcgcgccaccactgtttccgtcccgctcagggccgtgacttgactgagcctcaagattgctgctgctggaatcattcacgggcttcggtctagatgatgactgatgagcgacgactgggacttgtgcgtgttcgccagatctagctagcatcccgttgtcagcctgttcctaatctaaacggagcagcaatggacagcattcttggacgacgacgtggggcacagtgggcagctctgtccatgtatttatctgactggaatagccaaagccagctctgtccatcagctctggatagctctgccatcagctctgtccatgtatttatcctcaagaactcatttgatattcagatttatcctcaaatctgaaaccgactgcagtgagcagccatgtcgtctgtttaatttatttgatgtgcacaatgatatccagatttatatgaaactcatttgttgacctccagatttattctcaagaactcgacgaaggaatatggcatttaggggtatcttgagttctctccttgtcacgtactattatgtctggttgctcatgggattagcatatagaagaaaatgtctg

SEQ ID NO: 35159 - DNA, 1747 bp, Zea Mays
gtacaaagttactactatacacttgtgaagtggaacttgatgatatcttcattttttgactttttgtgctttaggctcctcttcttggatcgactgcagcagttagatctgcacatgtatatctttgtttaattatcgtctccgtattgtaagattaatttgagcttccattctacttttgctccacatatgaaacattaaaagatactctaattatgctatttaactccaagggtggaggtggaatgggtgattataaccacctgcaggatggcattttctgctcaatttgtccgttgctgatttcagtcggagattagattagattagatatgtcgctgatggaagtccaactaatagcgaactgaagaccgccgaccttgtgtctacacccgcacattctgttgcatctatacctccttctacaccagcacttcatgttgctcctgcacttttgtctacccctgtcagatgctcatctccatttatcacgccaccatattgttcctcagttgattgactggcatgagggtggatacttgactgttgatttaccaatgtctcggggagaagttgtcattgggggtccaaatgtaactaaaggctatttcaaggatgaagctaaaacaaatgatgattgtgagcccatatatggagaacattataatcaatactgatcctttccataattactgtgttgcgcttgtggcagctgcacaaattgagctgtaaagctaggcttcccaacaaggagttaaaacaacaattcctcaaatttgtgctagaagcaagaggctgttaaagaagtgctctttagcaaaggtttcgtcattcttgcctaccgctgtccctttgcttcagaatacggtgaaacagaagtccttcattggctcttctcatcttggctcacatgcagtacttgaataccagtttcttcctgagcagccaagtgatgcatatgagaggggaagccagttgcgcttctatgatgctctagcagaagtgttaaactcaagggtagattcgttttctataggatcacactttacccatgtagttgagcaggcacctagctatacatttcacagtcaatcatctggttctagctgtttgtcaaatattattgctagcatggctcaaatccaaatattattgctagcatggctcaaatccacggtcaaaaattggcatccctcaagttgtcagatttgaaagctccctcgcatcccctaaaagattgggttatcatgatgaagaacatgtcacgtggacagaaaaacacaagaactatatttatggatatactatttttttcttcttttgtattattatattcatatccttttttacctttatattattattttttatatatgttgtatttgtctaatattacttcatcataatgaggaagctaagattgctagggaggttgaggctcatgaaaagagaattaaaaaggagcttgagagttgagaagcaaggtctactaaatagaaagaaagaagaacaaatgtagagggaaatggagagacatgatcacgagagatgtaatgaagagaggttcatgcgtgaaaggcaaaggaaagaagaaaattccattagcaacagagacgtatacttataactattatggtagataaaaaatgttacaatgtctctcttctatagaacgaaactgggatatcattcattgatatatgttcgattttattcaataattattatataattgtgcaccgtcgca

SEQ ID NO: 35160 - DNA, 2096 bp, Zea Mays
gaaccagcccaagttcgatgctttggtgctgcttgcatgttggcgtggggcttggaagcttagccacgtgtttgagccatgttgtgctggcgccatcaaagtcttctctactgtgaaccggccgagctcaatcactttgcactacccttttatctagtcgctgcagggccagggcagtgaagtctcttctcgttcttgagttctagcgagagtgcatcgtgtgagtgttgtggttcatgttcacgtcggtgtttactctccccggccatcagtgtctcattgggaacgccgcggtgccgccggtgaacgccgctgggaatgatctcgacatggcagaccttgtttggggccggttgcgtgcgtgatctagggttggtctgctctatggtgagtcgctagtgcctgctccaccgtggttgggaactctactgcgtcgtcgttccggcttaacaccgtcagagttgggcgccgccggcacgcgcagaggaagcgcgggcgcgcgtggtgctggagcctagggctgtaagcgctatctgagtgggccagttttgcctggagttgggctggctggagctcccaaaataaagagtgaagatttaagataaagtggttgctggagaggagtctactccagtgcctgttcatcaagtggatggagccatctaactgatcatcgtgttagaagtatctagaacctcttctctgcaacaaaggcaagccccggtgcatttgccccttccttgtgttttaaatgctttatcaccttaaatgatgcattaggtgataggagttgtgtgatgaacaattgatgcattaccattccttggaatttgaatactataccttgatccctgatttataaaaagaactgatagtgcttaaccctgcttagaaactgaaaaatcatttgttttcaaaaagaatgattgtggaacattggttatgggctttttgattcaaaaatcaaagcaaactaagtgatgactccacttcggccggagtgggctcatcattggaaaagagtacccctgccgggtaccaaaaatggggaaatggttaataaatctagaccaggcgctgagcagacagagtcgcccgtctgtgtcgattaaggaccgtaccgttgactggcctgttgtggttgagactttgccactagccacataccctggtatgggacagggtaagcttgaacccggctattccatacgtgaagggacaatcgcgcactgggagtggagagatggcgagagtagcatgtaccctcctggcacagagcacgcctggtaggtaatgtgctctcgggtggcgcggacctgttcatgtagtggaggactccgtgggaacggttgacatatgcaagggttaagtgctacatatgtcgtgtggttagagatcctcagctgggtataatcggttcgaatcgtcgttgctcctcggttatggagactcatcccggtgaccatcatcatagttagcaagtgaaatatgagaatgaataaaatgcagctagtataggctaagtgcttgaactagaccaggcaaatatagattcaggtaataacctaactagtgaaacaaaatttggcttaaggatcaactggtagcaagcttttctgcaaaaaggagtctttgatcattgataaactttaccttgattcccaatcagctagcatacccttgaaagtcttttctttagtcgggtaagtcttgctgagtaattgcatactcagggttttattccctgttgtttttgcaggagaagttttattcccttatcttttggttagttacttcatgtggaggccttgaagcttagaatgtttatgtatacatcttatggaaaggcttcacccttccaattattgtaataagttatgcactttgggtactatcaggacttgtaataattacaattcttcttatgttgtaaaacttgagatttggaaatgtaaaatatattttgtaaagtcttccgctctatctctgaagtgtgtatgtatcgagtgtgattactgtaatatgcatgaatgtgggagatccttgggataatgagttcaagttgttgaactcgtgatagccttgttaagttaccc

SEQ ID NO: 35161 - DNA, 3169 bp, Zea Mays
cccccccccccccccttcacagcatcttctctctctcctcttcctctctcctgactccgccgcgtcgcgatctccccacctctcctgccgctcccacctccccgcactgccaaacccctcgccccccccccctcctccgctgcgctccgatccagtctgccgcgtccccggcggcgcgccctgagctcgtcgccccgcgcgcacgcgagttgccctgcccaccctgacccgcgcaggcgagcgagcccccattgaagcgcgccgcctcccctgcgcgcggcggcagggctcggtgaacgaggccagcggtccgcgcgcgcctggccgtgatggggcggtgccggcgccggggctgatgcggaggccgctgccatgtcggacgtctcgtcggatctcggcggcatccgggcggggcccgtggagcgtgacatcgagcaggctatcactgctctcaagaaaggagcatacttactgaagtatgggcgtagaggaaagccaaagttttgtccctttaggttatccaatgatgaatctgtactgatatggttctcagggaaagaagagaaacatctaaggttgagccatgtatccaggataattcctgggcaaaggactgcaatttttcagaggtatccacggcctgagaaggaatgccagtctttttctctaatttcacatgataggtcattggatataatatgcaaagataaagatgaagctgaagtatggttcgctgggctgaaaacactgatttcacgttgtcaccaaagaaaatggagaactgaatctagaagtgatatcctttcctctggtgcaactagtccgaggacttacacacgacggagttctcctttgagttcacctttcagcagcaatgacagcatccacaaggatggcagtgacaactaccgactccgtactccatatgggagccctccaaagaatggattggagaaggcattttctgatgtcatgttgtatgcagttcctcccaggggtttctttccatcagattctaatgctggatcagtccattctatgtcttctggacaatcggataacacaaacgggcactcaagaggcgtcccaatggatgctttccgagttagttattcaagtgccgttagttcatctagtcatggttctggtcatgatgatggtgatgctttaggcgatgttttcatatggggagaaggaactggggaaggaattcttggcggtggtggttcaagagtcggaagctcctcaggtgcaaaaatggactgccttgtaccaaaaccattagaatttgccgtgcgacttgatgtgcagaacatatcttgtggaggaaggcatgctgcacttgttactaaacaaggtgagatatactcatggggtgaggaatcagggggacggcttggtcatggtgttgattgtgatgtgtcacagccaaacttattgatgctctttctcatatgaacattgagcttgtagcatgtggagaataccacacttgtgctgttacactatctggagatctttacacatggggggatggcacatttaaatttgggcttttgggtcatggaaatgatgtcagtcactgggtacccaagcatgtgaatggaccattagagggtatacatgtttcgtcaatttcatgtggaccttggcatacagccctagtaacttccgctggacagcttttcacatttggtgatggatcttttggggtcctgggccatggagatcgtgagagtatctcggtccccagggaagttgaatctctcaaagggttacgtacggtgcgggcagcttgtggtgtttggcacactgctgcagttgtagaagtaatgtctgtgaattcaaattctagcaattgttcttctggtaagatatttacatggggtgatggtgataaaggtcgcttaggtcatggtgacaaggaaccaaaacttgtcccaacttgtgtggctgctttggtggagcccaatttttgtcaggttgcttgtgggcattgcttgacagtagccctaacaacttctgggcatgtgtatacaatgggcagtgctgtctatggtcaacttgggaatgcacaagctgatggcatgcttcctgtgcgtgttgaaggcaagctatacaaaaactttgtggaggagatttcatgtggtgcttatcatgtggctgtattgacttctaggactgaggtgtacacatggggaaaaggtgcaaatggccggttaggtcatggcgatactgaggataagaatactcctacattggttgaagcactgaaagataaacaagtcagaaatgttgtttgtggaattaatttcactgcagcaatatgcattcacaaatgggtatctggagttgatcaatcaatgtgctcaggttgccgtcagccattcaacttgaggagaaaacgccataattgctacaactgtgctctagtattttgtcattcctgcagcagtaaaaaatctctgaaggcttcattagcgcctaatggaaacaagccttaccgtgtctgcgatacctgctacagcaaactgacaaagggacttgagacagatatgcatttttcagcgaaacgggctgctaccgtaccaggattcagtgatacaattgaggaggatctggaaacaaggtcaaatgctcaactatcaaggttgtcgtcaatggaatcttttaagcatttggatagcagatattccaagaaaaacaagaagtttgaatttaatagcacccgtgtttcccctgtgcccaatgggagttcacattggagtggactaaacatttcaagatctttcaatcctgtatttggatcttcaaagaagtttttctcagcatcagttcctggatcaagaattgtttctagggcaacatcacctatttcaagaagaacaagccctccacgatctacaacaccaacacctactctgggtggcctaacgtctcccagagttcccactgacggcaagccaacaaatgatgcattaagccaagaggttctgaatttgagatctcaggtggagagtcttaccaggaagtctcaactcctggagttggagctggaaagaactaccaaacaattgaaggaagctatttccattgccggcgaggaaactgcaaagtgcaaggcggcaaaggaagtaatcaagtcactcactgcacagctatcttctga

SEQ ID NO: 35162 - DNA, 3356 bp, Zea Mays
atccaaccagaaggaccaatcttagtgtgccagaactgtatcacaattccaattttaggccaacatttgggtctaagaaacattaattaactaaggtcgaactcgaggtgagaagtacctgcaggggaggaatctattagttcctgtgcatcctttaggcagctgtggtaatccctattgggggaggtaccaatggccggttaatttggtgatccattgagctgtgcaagcaagcaaataccataggattacaagatgagatggcagaggagcaaattcagttggctcctcagcgcatgcctcatttgtctgctgctgcagctggttggtgcgatcaggactagcttgttctggccacaatcttgcctgccgtctcctgcaatcccaagagaagatgaatcggtggaacaactgtggcacagttgtgctctcgacttgagaattcctcaagatgttagaaacaagttccattacagccttctgttcaacaccatcagcaattcgtatagagaaaatgataataagtcctatcctcagaaggtcggcattgaggaagcaaccacggcaaccttttcacctgcagaagttgccaacacttttctggattgcttaaacaagcataatttccctttctctgatcatggactgcagaagcatcaggaggaaaccataagcttacttcccaactctaacagcatcaaccttccttttgcgatgaaaagaagacgtctacttgaagaagattcagccattgctccaccccgacctaaagcaaaacaggcaataagaagcgttttgtcttccgaaggagaggctcacttgctagtcactaccgtgaaaaagtccggtaaaccagagcccaaaaacaagagcaaggacaacagtggcactattattgctggtttgtcagtggcttgtgttgcattggtggctcttatatgtctgtgttgctgtgcttgtcgtggaagcgaagacccagaatcatcatatgatgacaaaccactgctgagtttgaatatgagtgatttatcaggttgggggcattgtcaaccagttcatcagcgagccagcgtaaagaatttaaatttcctcctataaaggcagaagttagagaaatgtcaatgaagtcagagtttgagcgacgcagcaatgtgcaggcgatgaaactaagttctcatgaaataactaccattgctggacgtccggcgacctctactaattctcaggatgtgaaatctgctgttgctgcagttccttctagtaatgccagcgacagcatatgtaaacctgcagctggtccagcaccagcaccaccaccaccaccacgtccaggttatcctctcccaaaggctcctcctgcaccatctgcaccaacaccaccggtaccacctccaaagatgcctacagctgctggttcgagcaatccacccccaccaggacccccaccgcctcctgctcccaggcctgcagttggacccggacctccaccatcaccaagtagtgccggacccggacctccacccccaccaggtagaggtggagctggacctccaccaccagccatgcctggtggtccaaaagcgcgtggtccaccaccattgaagaaggcagggaatgttgcaggtcctcctgtggcagacaataaaacaaagctgaagccattcttctgggataaagttactgcaaatccggatcaagcaatggtgtgggatcaaattaaagcaggatccttccagtttaatgaggagatgatcgagagcctttttggttgtcatgctgctgacaagaaaaatgctgacggcaaaaaggatttagcagcaaaggatacccctcaatttgttaggatactcgatgctaaaaaggcacagaacttagcgatatcactgaaggcattgagtgtttcagctgacgaagtacgtaatgcagttatggaagggcatgaactccctattgatctgatacaaaccttgataaggtggactccaagcagcgacgaggagctaaggcttcggttatacaccggggagctcactcaactgggtcctgcagagcaattcttgaggaccatcattgacataccttacctctatcagcgcctggatgtgttgcttttcatgtccactttgccggaagaagctgcaaatgcagaacaatcatttaaaaccctggaggtggcctgccatgagcttcggaacagccgtctattcaagaagctgctagaggctgtactcaagactggcaaccggatgaacgatggcacctttcgaggtggggcccaggcgttcaagctggacaccctcctgaagctctcagacgtgaagggggtcgacggcaagacgacgctgcttcactttgttgtccaggagatcattcggtcagagggcgtgcgtgccgttcgggccgccaaagagcagaacaacagcagcatatccagcgtgacttctgacgatctcaccgaggatgtcagcgatgacacggagcactacaagcagctaggcctgggcgttgtttcgagcctgggagacgacctccagaacgtgcggaaggcagcaatcctggacgccgatacgctgaccatctcggtggcgagcctggggcacaagttggtgaaggcgaatgagttcttgaacacgggcatgaagagcttagacgaggacagtgggttccatcgcaagcttggcgagttcatcgagcagtcccaggtgcgtgtgacccagcttctggaggaggaaaagaagctacgggcgctggtacgcactactgtagactacttccatgggagcacagggaaggatgagggcctacggctgttcgtcgttgtccgcgacttcctgggaatcctggacaaggtgtgcagagaggtgaaagaggcggctgccaaggctgctgctaataacaagaaaccttcagcggcaggatcaggatcaaagggaaggcaaccgtcgcagtcttcttcgtcgttccgtgatcctcgacagcagctggtgcccgcaattaaagatcggaggagtgcagcggcacgcagctctagttcatcttctgattctgactgactgacagcaaagaatttgtgcagatcacaccagattgatgaggtgatatgggagcacagcaggtagaagagttagcggctatctagttatggattgactcgcttacagcagaatgaaaaagagttagggacactacgccctggtaggttaatttagtatgcacatgatctcaggctctcagctttcgcctccgtaaatattattttatacaaatgtacatcctagatatgtatacaaagatcgttcatggcttaatgaataatattattttatacaaataccttataatatatattgtttgtg

SEQ ID NO: 35163 - DNA, 1564 bp, Zea Mays
ccgatccagcacagacagacacacaccggaaggaggcgcaccttcccccagccccactatacgacgaccgccgcggtcgaaccaaaacagcttcctcctcccggcgtcgcctccgcgacgatcctttccgccgccccatagggttctgctgctcccgatccgggcgccagatctcgcgtggcgacgcgcggatctcggatttctctagaggcggcggcggcggcggccggagcaggaggagatggcgctctcggggatgcgggggctctcggtcttcatcagcgacgtacgcaactgccacaacaaggagcaggagcgcctccgcgtcgacaaggagctcggcaacatccgtacgcggttcaaaaacgagaagggcttgtcaccatacgagaagaaaaaatatgtatggaaaatgctttacatttatatgctgggttatgatgttgattttgggcatatggaaactgtctcgttgatatctgcaccaaagtatcctgagaagcaggttggttatattgtgacatcttgcttactgaatgagaataacgatttcttaagaatggtaataaatacagtaaggaatgacataatcggacgaaatgagaccttccagtgcttagcattgacaatggtaggtaacattggtgggaaagaattttctgagtcactagccccagatgttcagaaacttcttatttcaagcagttgccgtcctgttgtcagaaagaaggctgctctatgccttctgcggctttataggaagaatcctgatgttgtgaatattgatggctgggctgatcgaatggcacaacttctagatgagcgtgatctaggtgtgctgacatctgtcatgagtctttttgtttcactagtatccaacaattctgaagcatattggaattgtcttccaaaatgtgtaagaatattggagagattagcaagaaatcaagatattccacaagagtacacttattatggaattccatctccttggcttcaggttaagacaatgagagctcttcagtacttccctaccattgaagatcccaacgcaagacgggctttgtttgaggttttacagcgtattttgatgggtactgatgttgttaaaaatgttaacaagaacaatgcctcacatgctgttctctttgaagctcttgctctggtcatgcatctggatgctgagaaggagatgatgtcacagtgtgtggctcttcttgggaagtttattgcagtccgggagccaaacattcggtacctcggtctggatgctgttagtaacagatgtgcaggatatcattagaaggcaccaggcccagatcattacatctttgaaggatccagatatcagcattagacggagggctcttgatttattatatggcatgtgtgatgttacaaacgcgaaagaaattgttgaggagttgttgcagtaccttgatacagctgaatttgcaatgcgtgaagagttgtctctgaaggcagctattcttgcagaaaaatttgctccacaactattgtggtaagattttgatcacaggatctgccaattctccagctacta

SEQ ID NO: 35164 - DNA, 2500 bp, Zea Mays
caaaaaatcaccagaaataaaataaataaaaatcccacagaagaaaaaaaacaccccgaaaattctccctcgctctctctcagtctctctctccgtgagggaggaagttgggcttcgttctcgagtactcttcgttctcaggcggcccccggctgcttctgctggtcgccgcccagctccagttattagagaaataagggccagcctggttgcccgaggctgacccagcacctgcgatggaggagaaggctgtcacaaatggagcggcagctgctgatgttgctgctcctgataataaggataacaccaaggaagaggttagcaagagcaaggagccagtagcgaataaggatgctgaagagcagaacaaaggctcggaaaatggtgctgagggccattcaggtggagatgtcaatatggcagaggctgagatcactgaggaaggtggtggtggtgatgctggtgcggcaaagcaggtggattctggagatgtcaaaacggatgccgatacaaaggaagatgccaatgcgagaacagaagaaggtgaagatgccaagatgactgaggctgacgtaggaagtacagaggtcaaagataaagaagagaaggaagatgaagttgagaacacaaatgagcaggatgaatcgaaggagcaagagaaaggtgcttcggctgagcaagaggaaaacgaaggaaaagaaacggatgctgatgagaaccaagaagaagaggaagcagaagaaaagggttctgctgataagaaagatgaagctgaagctgaaggtgacaagaagacggaagagaataaggagactccgaagaacaagaaagcaaggagtgccagggatagaagccagggaaaagataaggagcaggatggatccaaatccaaggaagccaaaagtttgctgaacactccaagcccatatggtaccaatcgccctcaacgtgagaggaaaatagtggagaggttggttgaggtgattgataaagagccaaacaagaatttcgtggttgagaaggggactcctctgaaggatataccaagtgtggcacacagaatatcaaggaagaagccttctgatcttaaatttcttcacagtattctttttgggaggaaaggcaaggctgtcgattttaaaggacatatactccaattctctggatttgtttggcatgagagtgatgaaaagcagagagccaaggcaaaagagaagcttgataagtgtgtaaaagacactctgctggacctctgttggacccttggtattccaactccgaaagcaaacattagaaaggaagatattgtgtcaaagctgttggacttcattgctgaacctcactctgcagctgaatcttggggctctgatgatcagggatcaaattctaaaaaacgcaagagaggaggtgaaagtgcaagtaagacgcctgatggcacacctagtaggtcgaggaagaaatttgtcgatgacggtacttctagtaaaaggcagaataaagcgctccagtatgatactgaggaggatgaatccatgaagtctgacagtgaggaaaacatagatgaagattcagatgaagctgctgacaaacaggaagttgactatggatctgggaaagaaaaggcagggaagaagttatcggaggtaaaagaatcttcaggtaaaaagaagtcaaacacagggagtggccacaaatcaggtcctccaaataaaattataaaaaatctggtaaaaaaagtatcatccaagattcacgaggaaaaagaaagccccaatggtagtgccaaggttttttcgagaaagaagaaacccacagcagaaaaggagatcaaagagaaaaagtcgtcaggaaaaaaggtgacaaaaggtaaaggagaatcagctgaagcagttcttcccagcaaggacgatctgaggaagaccattactgaaatcctcaagaaagttgacttcaacacggcaactttcagtgacattctgaagaagctcgacaatcactacaaaatggatctgaccccaaagaaagaagccatcaaagttatgatccaagacgagttgaccaagctatcagaggaggatgaagaaggagagggagacgaagacgccgggaagaaacagcagcagcctcaggcgcaggagatcgaggcatgagggatccgcggaaccccgtagctgtagtagccactgttaattatcctgtacttagtgcgtatgtgtcgcatgtacaggcatcctttgttgatttcagccaccaacttgagaacctcaccccctgattgtgtatgctaaaagacatgatgtgtaggcagcctccacaccttttagctgactgatcggagagttactcttaggcaacaacttgtgtttctagatttgcaaatggtgtctgaaagactgaaactctgcattcgctgtggcagggcgtgtacttaattgttcgtgataggtctgaataacacatggatggaccctagttgttcgtgttgccttgagcttttact

SEQ ID NO: 35165 - DNA, 1703 bp, Zea Mays
tagctttgttagactacattgcaatttttacttgaatgacatgtatgtttaaaggacaatggtgaagataattctaaatgcatgcatatagaagctttctcttcatttggtcatatattcttcaaggcctgaaatattagagagttacatagctaaatgtactacatgctacgtgaaatggtacatttaagtagagtgcaccccaataggctttacattgcacttgcgtaagttttctccttttcaccagcacctaatttaccacaggtggaacaaataggtaatcttcaagatgaaagacaagatcgctacacaatgcacacaatagctcaggctcatgtgtgtgttgcatcccacagtctcatgcgcatgtttacttacagaagttcatgaaaagacacgtgcacttgcttctggatacttcttctgcctagaggaccgtgcactactttgtagagactgtgatgttgctatacacacagtgaattcctttgtttcagtacatcagagattcctgctaactggagttcaggtgggtcttgatcctgctgatccagttccacctattgctgaaaagcacgttaatgctgctggtggatcagtaaatcaaccagtgagacatcagccaaagagaagcccgacagttcaattttcagttgaagggagtgcttctgttcctactaaaaatgtaacaaatggagattgttcaaggcagaattttgtcccaacagccaggggagaagtggttgattggactatgaataatagtacaattcggtcagtagaatctccgcctaagtacatttcagaggaaagcccgacacttctgcaatctagccagaccacaacagtcttctccaaccaaattaatggcaacagtgatggggcctaccacttgtcattctcaggtggtaatgtgacagacagcctaccagattggcccgtggatgagttcttcagtaactcagaatatggtccaaactttggcttctccgagaatggttcttctaagggtgataacgctaagctggggggcgctggtggatctccacaatgccgtttggctgaaggctcagttgctgaggaactattagggcaggtgcctggattgatcaccgatgaatatatgagccgagtacctgagaattcatggacagtgcctgaggttccctctccaccaacagcctcggggctcaactggcacgggaatttgtgtttccctgcgtatgacagcaccatgtttgttcctgaaattacctcccttcagaactccgaaagtcacttcaccgtaccttccagtttcaagcgccggagaagagagtactgagaggcgacaagaagatcactagacaccactgtccggtctaggctatcttgagaaaggcttcttggtgggctaaatgacgaaagaaaatatccaggactgggtggtcattcaaacatcaactgagctatccagtagccaggttttaagtgtgttgtaatgcttcaatgtgtttcattttccaaagacctgagcttcgcttgtgatttgttccgagctgtacggtgtcgattttgtgtatataatataatataacgaaataaagggtacccagtatgagtatgatcattccgaaataaagggtatccagagtatgagtatgagcattcgcgagtacatcgcacactggtggtggcacatgaagttacttctgcaatac

SEQ ID NO: 35166 - DNA, 6016 bp, Zea Mays
cccagtcccagtcccaccaccagggcagcacgctctcctccctccggcctccgcccactggatccgagacccacgcgcaaaactcgggccgggaaaaactcgccaggaaagagaacgctcggaagggaaacacaggctcgggctcgagacgaaaccctaaccctacctccgcttgcctcgacgtccctcctcgccggaggcctcccccggagacgcagcctccgctgagggctccggcggcgatgcgcccctcccagttggaggcgttatgagcggggaaatggcgcgcgccgaggccttgccagagggggaggcccccgggttcggtgtcgacctgtatgcgcaagccaccaaggctgtgtccctgcggacgccgttcgagggcgatgaggcggcgcccagggttcccacgctgcccgcgcggctcgtcagctgggcagggccaggggacgcccggaagaagcacaagaagattctgcctccccctcctgatgatgctgctccggagcctccaccacagtcacctgtagtcacccctgcgaaggttggcttgtgggaccagtttgaggcgtatttccgtcccgtaacactggctgacgtcgaaatgttaagaccaaagctcccatttggctacagcaaggttgactcatgtatgctagtaccatttctgggcagtggcaatgagtcaacaacccaagctgagacatatgacgtggctgtggctgaaacaaccttgtatttgggtgttggtggtgaagaagtggtcactaatcgggagcgcggcgtgcaaagtgtgcatctggctagtcagaaagagaggaatgatcaaagcattgaacatgacatacatgatgtggttgtgcaacagatggtcagcgacaaagagcttaataggcacagaggggtacagggcatacacgaagtttctattcagttgggagggagatcatctggagtggatcaagctgggagcagtagtggcattgttttaggacaatttgtcaatgaggaaggaacttcacttaattggctgctaggagcaacaggccggtttgttctcacttcagagcgacccaacaagaagagaaagcttctgggtgtcgatgctgggttagagcagcttgttctgcttccacgcgtaggggctgaggcatctgcaagctgtgatgtttgttgtcttggagaaagttccatggagtccaataggatagttaactgcagcaactgcaaggtgtcagtgcaccagaagtgttatggtttgcatgctgtgcctgatgggcaatggttgtgtgcttggtgtacatatctagagtctacagggtggtcattgaaggaagatgctggtaacacccagtcgatgccttgtgctttatgcccaaaggagaaaggagctcttaaacctgttaaagtggagtctactcgaaatgagggtattggccaccaaaaatttgtgcacttgtactgtagtctctgggcaccagaggtttttgttgaggacatggagtcaatggaacctgtacttagccttgaaaatgtccaagagaatcggatgaagttgacgtgcagtatctgcaagattaagcatggtgcatgtgtccgatgtagtcatgggacgtgtcggacgccctttcaccctatatgtgcaagagagtcaaagcatcaaatggagatatgggggaaatccaggcaccctaatgttgagttgagagcattttgctcaaagcattctgcagttgaatacgccagttctgtagataccagtaaccttgcatctgaacagaatcctagaaaatctggcccatacaataccaccctcaattctgggaaaattccagtaattaggttcacacgcaaaaacaaggacaaattcatcagttgtggaaccagtgcctctagttctggtaacctgatcagagtcaagacaatagagcaagatgctttagctaacacagttagaaatgcaaattctcaacctattcgaatatgggaaacaggtactggtcatccctctgttagtggtgatcatatcagaagttctggtgatattgctgtagtgcttagaaagctaattgacagtggaaaagttagtgttagtgatgtagcatctgaagtcggtatttcttcggaatccttggaagctgctcttgtgggtgaaactaccacgttttcccatggtttgacgctgaaaattatcaagtggctccaaaattctgtgcatatgcatgatgatgacaagggtgtacttgttgatgtgccggatttcgctgtaactgaacctgcacgaacaagatctaaaagcaacagcaagatactgaaagaaaataatgcaacatgcgcaacaggggttttctccaagcagcagcaaggatgttttaaaggacgaacatggaatattgatactgaacgacacctctggaaacaaagaatctggtacctccacacagataccaaatgaaaagcaaggtgcattacttggaagaaaaaataatgacttaactgaggtcgaactgggtccatgcttagagaaaggagtaccttcacatggccattgttttgttcagggtgataatggtgtagatggggtaggttcagttgaaaatagcttcaacacttcaaattgctctcatggacaaccttttttcaactttgatgattcacattcttatattcacccattcattaagaaaaaggtatctcatcattgggacattactttcaatcagaataaggaaactctgaatcactatatacaagagtcatcatatccttcacatgagaaaataccaactgattccttggtagaagtagagagtacagcagatacaaccgtgacagatcaagttttgaaagcaaggtcttcaaaaattcttgagcattcacctgatgatgaagttgaaggagagatggtgtacttacaatctaggctgcttgacaatgctgttgttctgaagcacagatatgaaaaattgatagcaaaggttgtccaaaatctttgtcgcgagctggatgctttcagtaaaagaaaatgggatcttatctttgtgaatcagtttcttcgtgatgttagagaagctaaaaaacgtgggagaaaagaaaagagacataaggaagcccaagctgtactagctgcagctgcagctgctattgcatcctcctcacggaactcaactgtgagaaaagatgcaaaggagaatgcaccagagagttctccaaaacttgttgctggatcttcaagggttggtcaacggactttttcattgccacggattaatgattcatcaaagtcatccaacaacaaagtatcatcagataacaaatttggaagttttcatatgccaatttcttcaaaagaaaatgggctatactgtgatgtatgcatgcgaactgaaactctgttgaaccgaatatttgtctgctccagatgcaaggctgctgtgcacatagattgctacagaaatctggaaaattctattgggccctggaactgcgaactttgtgaagatgaagacatttcatcagaagctacaagtacaaccgttagtgataaatcacattgtaatggcaagttaccctttgcacagtgtggcatgtgccatggcacatcaggtgcttttagaaagactgtagatgggaagtgggttcatgctttctgtgctgagtggttgttggataccaagtatgtaaggggacaagatagccctgtagaaggaatggaaaaccttgtagagggaaaagacacttgttgtctctgcctctgcaatgttggcatgtgcttaaggtgtagtagtggggattgcaacattactttccatcctacttgcgctagaagttctggtttatacatgaacacgaaagggtttggtactacatcacagcacaaagcatactgtgacaaacacagcgtagaacagaaagaggctgatgcacagcaatatggacctgaggagctcaggagcatgaaacgaatgaggtatcagatgcaagagctcattactcactgccacttatgaagagatcagtctgaaaccaacaaattatctttagctaccttgtgaaaactctgtggtttgcttgtatcattcgagttagctatttacagttttgggaatacattatgctgccacagcacttcatggggcagaactcatcagtcattattcatagaggaaacaatatatttaggaattgtttttcttatgcaaccaaccttgtgcattcctgacttcccgtactcatgttccatgcagtacatgtttatttggatgttattgaataccgagtgaagctgcacatagtatccttttagactatcctcctgactccgtcccatggttttgagaagctcaacttacgttgaattggagaaactacgcctgttgtgtgagagaataattaagagagagaaggtgaagagagagacggttatgtgtgatcatgatatacttgccaaaacaaaggacactgttattttctcctaccttgcgtgtggagcaagctcagaatctgcaactacttcagttaataacaggtcgtacatgcaaagatctgatgatgtcacagtagatagtactatttctgggaagaagaccataagattttctctgaaaaacagagatgttgatagaaacacagctgacagctcaagaacattgatatcattcaaacgcaagttgagtgagaggggaccacgagctggtaagcaacttccacagaggccaactattgcagcagagaaactggaagatgaagacaagaagacaactgataagaagagagaaatgtttcaaaaagagctcgttatgacattagatcaagcttctacacagaatcaacgtcttcctaagggatatgcttatgttcctcgggattccttatcaaaagagaagctatggaatcgaaatacacagccacttaatccgcaggagcctggtggataggatcagttgaaatcaagtcggttcatttctctcgaggaaggtcatgagaaacttgtgcaggcatgttctttgcaactgaaaacgacaagcggcaagcaggggctggccagtgctattgccgcaagggttacagccaatccgtgatcttttttggacccaagttgcataatggtgcagactgaggtattcgtgtgaatgtatggtgtggcaccataacaagaaggctgcccccacccaggtaacgcgaatgatcagcaatatgggtgaattgacctacttgtgctataccaaagacagcgtgccaactgtatatatgagttttattagtgtgcagatttcataaaattgccctgtacattctttcctttgcaaatgctagtttagttgtgcaggagaaaaagaattataaatccgttttggttggataagaaaagaaattagtttggttctttatcatggttcagaagaaaatgcagtggtgcttgcgggcaacgttgggcagctgtttgcctgatacatgtactctgtaaggatggtgaaggtgccaaaaataaggtcatgtcactgcttttcgccaactatttgttggtgctaactgggaagtggtatcatacaggctgagaaactgtgttttagctcttgtcgccggtggtttccgagagccccctttttttaaggggaacagtggtctctttaccggtttttagatatcaagatagcaacaatgttgaagttgggctgtaagttcttaggttgagaaggtatgatagctgagctttttttttttcaatttacatgtggggtatattgtatctgagacaggtttttttcctgcttgccgtccagattataaccttggttgggcctgtttagtaatttgttcggaagcggttcatgttttcaattctattgctcgatgtctgcagagatcgcctattacatgcaaaatttatttccaaattttaggttacattagctttgttaagtcaaccatttgtaattttggcaagtcataatgcatgtggtatcacaacatttcatggaagatttaaagaagctaatctgaatttatagatggt

SEQ ID NO: 35167 - DNA, 1878 bp, Zea Mays
ctacctctgtctatgagagagaaagagagcgtttaaaaaaattaaaagaaaaaacagaggggagagtgaaccatcatcaatgctccaatgatcccccttcaagactccgattcctttctcccccctctctctatctcgagccttttctttgaccgcctctctctctaacctcttatataagatgagaagattcgctcttcaccgcctcgcagggctacactccattctatccctctctatatccccccgcaccctctcctggtcctggccatctccatctcccgtctctctctctctctacgaactccacctcgcgaacagccgctgcttgcctgccgcgttggagagaacggaagaaaagcgagcgagggagagggacagcaactccctcggtcgctttcgacggcctggatctccccgcacgcgggatcgtacgaccggcacgctgttgtcgctttccaccgcatagtaaattgccaaggctgttgtaatgggggtcaacggtcatcacgaacctcgcagaggatgtaatggcaccgtctgcaatggtagtgtaagatcactagatcattttggtgatgtagatccatggacggcatgggcatacaagcctcgaacgatctcgctcttgctgatgggaacatgctttttaatttgggcaagtggtgctctcgatccagaacggagctcatctgctgatcgtgtttcgtcagtcaagaggggtgtatttgcgatgattgctgtttttttggcttactcttttcttcaggcgccttcaactgtactcattagaccacatcctgccatttggaggctagttcatgggatggcagttgtttaccttgtcgccctcactttcttgcttttccaggggtgctttcaccccctcctgccgaagattgaaaccagatcaggagctatgcactgctgtatttccaccatgtgaagccaatctcagtcccaaattttccctcatctctactctgatgttatgttgtattattactcaatggctcatcctcataagataaaacagtatttcagcaagtcagacttcaatggcaaagattttaaagagaagagcggcaaaatgtagtcattatgtcatttcatattttcatgaactttgttttgcagactcgtgatgatgctaggcaattcatgaagtatcttcatcctgatcttggtgtcgaattacctgaaagatcatatggaactgattgccgcatatatgtacctgaccatccgaaaagcaggagataatttttgatgagtttgttatcgctcatatcctcggatggtggggtaaggctataatgatacgaaaccaaccacttttgtgggtgttatcaattgggtttgaattaatggagctcacttttcgccatatgttgccaaatttcaacgagtgctggtgggacagcattgtcctagacatattgatctgcaattggtttggtatttggactggaatgagaactgtgcggtacttcgatgggaggacatacgaatgggttggtttgagccgccaacccaacattatcagtaaggtaaaaaggatgctgggacagttcacaccagcgcagtgggacaaggatgagtggcaccctacgcggggtccttggagattcatccaggtgctgagcctctgcgttgttttcatggctgtcgagctgaacacattcttcctcaagttctgcctgtggatccctccgcggaaccccttgattgtctatcggctggtcctttggtggttaatcgcgataccaaccatccgcgagtacaatacctacttgcaagacaggagcaattttggatgctcggtctgctgagccctgacttttccactatttgtcgtgctcacatgctatcgctgac

SEQ ID NO: 35168 - DNA, 2084 bp, Zea Mays
atgcccgacaacacccaacccatgcagtacggtatcgaagaagaagaagtcccatacactgatgaacgcatcacgtcgttatgctcttcagttcagctacttttggagcaaggtggtaattttgtggtgtctgcgcccaacatggcccatttatgccaccgtttcactgtgggctgcttcgtagccacggcacaaatggtcacgcaggcccaacccgaattcatcgatctgggccacggcccagcgccatcaggattcgtgaatcaccgaatcaggagttcaggacaggaatcgtgctgcggatgctccgtccgtgcagtggaggccgcggcatgtcagtttggcttcactaccaagcctctggcctcaagcctgcctcggccttcagcccagccgtgcccagcaccttcggacgccaattcacaacttcgttgttccttccgcagctccgagctccggaatcgagcaaagcacccgagcctgcgccgcgtcaagccgtcaaagctcccccgcttcataccattccctcccccgatccctcgcctcagccctcagctccgcccctcggtttccgaagcgccaccgccgacgtggcctccctcggctccaatggcgttgccctacctggaggccgtgctttgctttatgattttcatgtacatatttgagacatatcttgacatccgtcagcatagagccctcaagctgccaactttgccaaaacccctgctgggagtaattagtgacgaaaagtttgaacgctctagagcttatagcctcgacaaaagctatttccattttgttcatgaggctgtgactattttaatggatactacaatactatactatagagttcttccctggttttggaagaaatctggagagttagttaccagtgttgggctgagtgctgagaatgagataatacacacccttgctttcttagctggttccatggtttggtcgcagattacagacttgccgttctctctctattcaacttttgttatagaggctcgacatggttttaacaagcaaactatatggctcttcattagggatatgatcaaaggaattttactatccatgatattggggccaccaatcgtggctgctatcatctacatagtacagattggaggaccttacctggctatatatctctggggttttatgtttgtattagctctactgatgatgacaatataccccattgtgatagctcctctgttcaacaagttcactcctcttcctgaaggagtcctcagggaaaaaatagagaagctggcagcttccctcaagtttcctttgaaaaagcttttcgtggtagatgggtctaccagatcaagccacagtaatgcctacatgtatggttttttcaagaacaagcgcatagtactctatgacacattgattcagcagtgtagcaatgaggatgagatagtttctgttatagcacatgaacttggacactggaaactcaatcatactgtctattcctttgtagctgtccagctgcttatgtttcttcaatttggaggatatactctagtaaggagctccaaagatctatttggaagttttggcttcaaggaccagccagtaataattggattgatcattttccaggctgatgcctttgccaagaaccttggatatgcccctcagctccgagcagcccttgttaaactacaggaggagaacttgtctgcgatgaacaccgatccttggtattcggcatatcactactcccacccaccactcgtcgagaggctgcaagctcttgaagattcagacagcaaaaaagaagattagtcgatccttgtatgaggtttacatatggatttttccctgccacatgcacaccgattcagtgcttggatggtgagggttttgacataggagtgttgtcaaagctttagagtgcatctttcggtcaggtgtaacagcctttcggtcattgagacatataagcgaattagctattaaaaaaaacagaactgttgcatctttctgagttgtgcaattgttcacgtgtcacgtcacgtttcgagcagcagagagacgcctctgagcagcactca

SEQ ID NO: 35169 - DNA, 2899 bp, Zea Mays
atcgccttcaccgccacacgctgccacgcgccatatataaccagccgttccctcctctcatgctcccctttccaaatccgtctccgccctcacgcacgcggcccaactagcctaacaaaccctagctagatttagaaaaaaaatttgtccccaatccgaaccgacgaggagctcgccgccgtgagatgtccgagtacgacgagcgctaccagggcaacggcgacatgcccgcagccgaaggcggctatccgcaggccgagtacgccgccgccgccgcgcctgccgccgggggttcgccgcccgcagacagcaagccctccgggttctccgaccacgccgacggccgctcctcccagcaccagcacgagacacaatcacatgacagtggttcctcgaaatctcgagaaagggaccgagaacgcgataagggcaaggatagggagcgtgacagggatcgtggccgagaaaaggggagggaccgagacagggataaggatcgtgaaagaagtgacagagatcgcgatcgccaccacagggaccatcgagagcgcagcgagaaaagggaacaccgtgatcgttctgatgatcgtgaccgtcaccgtgatggtcgtgaccgccaccgtgatgatcgtgattctgagaggagaagagatcgtgacagagatggtcatcgtaggcatcgctcccgctccccttctaagagtcgtgaccgtgaccgcagatctagatctcgttcacgctctcgatcaaagagcaagcgcgtgagtggttttgaccaagcacctccacaacatgcacttcctattgttgctgctggtgctatccctgaaggcaaccttggcgcactttgtcacctgctgccaatggattgagctgactgctgtagctttgatgtacgaggacactatctggtttggtatcttgttcgtcttcatatcagcatgtgttatattttcgttagtttcatagtttgatttccttgaaacaatatgctacagctgatatggagttttaagaaaaaaagttttatatgtaggctttttagcaatggtggttttctattattttgttctataatatcttttgctaagcaattttcatcattttcataaattattctgttgatgtattgtaggtcagcttcctggtatcactgctcctattcccggggttggggtgcttccgaacttgtataatttggctgcaggacagttcaacccccttgttattcagccacaagccatgacacaacaggctacccggcatgctcggcgtgtctatgtgggtggacttcctccaacagctaatgagcagaccgttgccatattcttcaatggagttatggctgctattggaggaaacacagctggtccaggtgatgctgttcttaatgtctatataaaccatgacaagaaatttgcttttgtggagatgagatctgtggaggaagcaagcaatgcaatggctttagatggcataatgtttgagggagcaccagtgaaggttagaagaccaacggactataatccttccctagcagctgctcttggcccgagccagccaaatccaaatctcaatcttgctgctgttggcttaacacctggctctgctggaggattagaaggtccagaccggatctttgtaggtggtctaccatattatttcactgaggctcaagtgcgggagttgctcgagtccttcggacctctgcgtggattcgatcttgtgaaggatagagaaactggtaactcgaagggatatgccttctgtgtttaccaggatcttaatgtcaccgacattgcctgtgctgcccttaatggcatcaagatgggggacaagactcttactgttaggagggcaaaccaaggagcttctcagcctaggccagagcaagagagcatcctgctgcaggcacagcagcaggtgcaaatgcagaaactcgtataccaagtcggaggtgccctgccgacaaaagttgtctgcctgacacaggtagtgacagcagatgaactgagagacgatgaggaatacaatgacattgtggaggacatgagggaagaaggacgcaaatatggtaacttggtgaaagttgtaattccacgacctgaccccagcgatgctccagttgctggtgttggaaaggtgtttttggaatatgcagatgtcgagggctcgaccaaagcaaagacggggatgcatgggcggaaatttggcgggaaccaggtggtggccgtgttctatcccgaggacaagttcgctgctgagcagtatgactgaaagttgtagaacctgttctagagttgcaacacacaatgtgtgtgttttttttaaaatctttgagggtaccgttttctcttgaatttgaatcttatctagttataagtttggtgcaggaccagtcgataagcgataagtttgtgcaggaccattaggctttgtttgggtaattagtattgatcccaatccaaatctatatatgttaatgccttgttcagttattcttattccatatggattggagtgtatcggaatgagttttgacttgctatagatttaaacaaactcaatatcatccattccacatggattgacgaagaaatgaacaagccctaaggccttgttcggttattgatattacatgtgtattggagtgtattgggtggaattgagatgaattttgacttgttatagatttaaaccggctcaatcccacccaatacatgtagattatcaccaaaacgaacaagccctaaggtggattggggtcaatactagagtacccaaactaggccttagttggagggtttgtacttgctactagggcagctaagatgaattcattcgctgtttgttctgggtccattgtttgctcaaattaacaggtgttgttatggtgctg

SEQ ID NO: 35170 - DNA, 2799 bp, Zea Mays
ccggccgcaattcttaaaccatgggcgagtcgtgtgtggtttggctagttttccatccatcatgaaactgaagcgaaccacagcacacaagcgatgagcaaacccagcaaagctggtggtggaagcacaagataactgaaggcaggaattaatgggagggaaattccacattgcaaggatgaacaccttccatctttgcagccgcatgcattcggatccccgctcctccccaaatcccccttggccctgcaataaatctcacctccccctcgcactcgctgcattgctcttcgcccggaaatcgtctcgcttacttcgttccttctctgcctctgttgctccccagaggttcttggctggaaaacattgcagcaggagaagagatggacgcagacaccttcccagtggggctgcgcgtgctcgccgtcgacgatgaccgcgtctgcctcaagatcctagagaggcagctgaagtgttgcaactacaacacgacggtggtgacggatgcccagacggcgctggacatgctcagggagaggaaggacgggaaccagttcgacctggtgatcagcgacgtcgtcatgaccaaaatggacggcttcaagctcctcgagctcatcggcctggagatggatctcccagtcatcatgctatccgcaaacagcgagacacagactataatgaaaggtataaagcatggggcctgtgattatatggtaaagccagtgcgcctcgaacagcttaggggcatatggacacatgtggtgaagaacagtaagattgatccaaggaacaacatcggcagtgacagtgatgatgttgttcagaagttgccatctggggatggtgataaaggtgagaaggttggagaaacccgccaaaagaagtatccaaagaaaaacaaaaagactgtggatgttgctgatgaggataacgaaaaaacatcagcccagaagaagcaaagggtccaatggtgtggtgaactacatcagaagtttgtacaagctgtccgtcagattggcattgatagggctgttcctaagaaaatattagaaatcatggatgtggaaggccttactagagagaatgtcgccagtcatctgcagaagtaccgaatctaccttagaaagctcggtgatggcacactgaggagttctagtccatttgctgatgaaactgaagcatttcggagaaacatgaatgtcccatccttcattagctcttcgagctcaagcaaccattttgcaaagatgaattcctcatcactaattggaacggagacattgctacccacagagtcagtttatatcatgagcccccagaaaaacttgggcatttctcggtcaaacatggaaccagttagccatggtgttaacttacccaaagatgttattcctatgccagtgcaggatattagcagattcatttcttctggcaagtcctatgcacctgtatggagtgatgggctgctaggtagaagccagtgcttcccttctggtccttctggcagctcctttgcaaatatttcaaatagtgtggtgttgaacgcaagcaaacctttctctgttgatatttctgggagatcattagcaaatggctcaaatgacaggccaccattgacctcgaacatgtgcttttcttcgtctcattcttgcagctcctatgcgagcatattgggtggcaagattttgggatcaagcagacgtattcctttcgaagacatagcagatggtgagatgttggctcctggtaatttaccattgcagtctcctcagttggtgaaacagccttcttctgctggcctatttaacgaggttgccagagacgttcaccaatttgcaggacttagcaactcctggaaagttgctgtgccgccaaggttttctgatcttggtcataatgttggaacatctgaaggtcattcgcagggtaacattttcaagatcaaccggttgtcaagacttgcacgctcctctgcacagattccaacgttcagaaatgagtatcagaagaaaaccacaggaatcatggggaaagccgtaccagtggtaggtttcagagagcaggtggcaccattcagctttgaaaacaacacacgctctacagtgacgctgataggcaattctgctttgtctagttcttcaagcaccagacctggccttaacatcaacaattctgccatgctgacccaggtgctgaatggcggtggtgcaaatgacaacctccatggagttagcaccgttaatcagcaagctgttaatgaccaagtgaataacgaattcttcatgggaacaaatgaggcacataatgcggagagtgatgatttggatgatttccttgcgtacttagttaatcaagatttcatcaacaatggtgattctttcattgacagggactgagaatctgccccttgactctggaagagagatgctgctgaccaattcatggttcttgcatgttgtatgaacaaatttgcactgtttgtagtaggctagctaggagcaggccatcttggatggaatccccatgtttctctagtgtagtcatgctggttctcttatgtatcagttgtagcttttaacctgtggtgttcagtttggtgggaggtgtgggtgccacccctgccaaactcagaactatgtgttcctctttggcttgaattttggtggtcacttttagttttatgtaaaacaacctactctctcatagtccttcggatgcatggggatcataaaggattgaggaggattaaatctcttcctattcaaaattaagtaggaaggaatttaatccactcca

SEQ ID NO: 35171 - DNA, 1575 bp, Zea Mays
aactacctttgtggtcactcttagaacaaattgcctcagaagagttagaaaggacagaaatgacttgctttggaagatcaggaagcagggactgcccggcaatgtcatggaaaaggtcagatctgctgtcaggagcgtcatatctgatgaggtagagaaactcaaacagtccaatacagaaaacgaggaccaagaaatggatgtcatatgggagtatcaaggactgcatgctgctaagcctgctgaaattgaaagtgaagatatattgcttgaaatggaaagacttgtttgtgaagatattagagaagaagtaatcagaaaacgtgtgaactagaggcacttgatgaggaagatgcatatttagctcaaagtgttttggatcatatgcaactaaatgacattgaggctgccgaaactgctaagctctggtgtccagtatgcaagcaaggagatctacgagaaacacgtaatctcatatactgtactctctgtaatctacggcttgaccttggagaagataagatgacgctggagttcttacgagaacggttggccaatgcacatatggatcactttgacagaggatgcaaatcagcacccaagttctgtttacagactatgtttggcctgactgcgctctacatacagtgtgcagaatgcagtacatttgatatcgtggtataaccaacaagatgctgatatgaatcaacacttcaacggaggaaagaaatgttacaaaacttacttgaagttatttcatcgcttcatgtaagattagctggtgaagttatggcaagatggctgcaatccgaaaggtggcacacactcagcacctgaacacgttcatccattccagcttctggtcaaaacaattgacatgcatgcatgcatgtggaatttccacgtatgtccaatttaaatgttgcaaccggtgtaaggtggttagtaaatatgcacttgactatggcaacatctagtttccagcttacttgaaagttgaaactgcaactacaattggaaccaaacactacccaattgatcttgaagtcgtctttgggctagctcgcattcctttgcagatctgctaccggtggcgagcgtgtagagatggcaatggttacccgcgacccgatacctgatgggtatttactctattagggtatatatgtaggctaaataatctacccgtgggtctgttattggacaaaaatcttcacccaatgggtaaacgggtattagaacattccgccttcacccatacccgttaacccgtgggtataaaatacccaatataaacttagcccaagcataaacttgaactttattcattcatcttttttactatttaacaatcttttatgccataatgtcatagaaggtttaacggcaatttaatgaccatgtaatggaacatgtaatatactatgtagtactatcctagtgttactactttatccaattatctttggtgtgttgaatgtgtggttaaatgatgctagaaattttgtaatggtatttatatggatatacttgacatttgtataatataatattttgatagatgtacaatttttg

SEQ ID NO: 35172 - DNA, 2403 bp, Zea Mays
cttcaacccgccatggcgttcgtcgttctctgatcccagcccgaaccatccgtatgctcgctccttatccatcaggttttggcgtgttcgcgtttatcgtcgagtcgtcgaacctgtcatcctctgctcaaacccacctcatcagctcgctccagacataatcctgtcgttgttccgtgcgtcgggggaagacgaagctagccgagtaatattcaccgagtgcgcgaccaaaaagctcgaaccagtcgtcaatcgcctcaacaacaaccgtatccacgactcccaccgttccaataattttgccgcatcacccttcaaatccgagacctcgtccgtaggatcgtcgttgacctcgcaacttcagctcgagttaattatggacgataaataatcgcgtgatgcggaaaagatgacccaagtctagcaaacttaggaatgagctaaatattcttgattctcggaattttgactgaaacattgcacacatagctcatttatatacccttgatcatatctctttcatgactacgactaatgtgttttcaagtgtatttctatgctaagtcgtagattgaaagggaaatggagtcttcggcaaagacaaggcttccactccactctaacggtatcatttaccctttgttgtctctccacactactctcaaattggtataatctttcactcatatttacttgtaccaatgggggagaaaataaaaagggctcacaaagtctccgtttttggcgattaatgccaaagggggagaaagtattagcccaaagcaaaaggaccgcaccaccaccttttgaaaaattttaattgatatattttggtatgtttactttcaaaattggtatctatcaaaacccccttgaaaactaagaggagaattttattcagggggagttttgtttagtcaaaggaaaagcatttgaaatagtgggaaaattccaaatcttgaaaatgcttcctacaatcttattcatatacatttgactatttgcaaaaagatcttgaaaagactttccaaaaagattcgcaaaaaaagcaagtggtgcaaacgtggcccaaaatgttaaaaagaaagaaagcaatccatgcatatctagtgaaatcattaaattggttcaattccaagtaacctatgcacttaccttttgcaaactagttcaattctgcacttatatatttgctttggtttgtgttggcatcaatcaccaaaaagggggagattgaaagggaaatagggtttaaccttttcctataaacaattttggtggttgaatgcccaacacaaataattggactaactagtttgctctagattacatattctacaggtgcataaaggttcaacacaaaccaataaaagatcaaagttagggttcaaaagcaaaggagcaaaggaaccgcggaaggcgcaccggactgtccggtgtgccacccgacagtgtccggtgcaccaggaccgtacaggatcaaactcacagtctcaggtttttccagtgtcgctccgctataattcaccagactatccggtgtgccacctgaaagggaaataggcttacaccttttcctaaattgattttggtggttgaattgcccaacacaaataattggactaactagtttgctctagtctataagttttacaggtgccaaaggttcacaacaagccaataaaaagaccaaagaagggttcaaataaagagagctaaagacatcccaaaggcaccctggtctggcgcaccgaacagtccggtgcgccaccggacagtgtccggtgcaccagggaacttgacgctgaactcgctaccttcgggaaaatgggaggccgctccgctataattcaccggactgtccggtgaagcaccggacagtgtccggtgtgccagcggagcaatggctacttcgcgccaactgtcgactgcaaccgcattaaatgtgctatagtgcgtgccagagtcagagcacgcgcagaaggggcaccggacagtctacaggacctgtccggtgcaccaccggacaacccagaggcctcaccagtcagagctccaacggtcagaacccaacggccggctgacgtggctggcgcaccggactgtccggtgcgccatgcgacagacagcctcccaacggccacttttggtggttggggctataaataccccaaccaccccaccattcattgcatccaagttttccaacttcctacaccttacaagagctatatcattcaatacaagacacaccaaagagatcaaatcctctcccaagtccttagttcattccaaatcaaatagtgactagagagagagtgacttgtgttcatttgagctcttgagcttggatcgcttctttttctcattctttcttgtgatcaactcaattgtaaccgaggc

SEQ ID NO: 35173 - DNA, 3999 bp, Zea Mays
ccaatgtccataagccgtcttgagaatggtgtggatgctgagtcacttacccatttgaagggagaaataaaaaggctttttataaatgagagaagacgtcgagtagagctttggattaatgggactgtcaaatctagcctaatgttgccaaggattaatccaaactttatcggaagtgaagaggatcctacatgcattatttgtcgacagtatctgtatctttcagcagtctcctgtaactgtaggctgtcttcttatgtttgccttgagcactggaagcacctttgtgaatgcagtccgaagaagcattgcttactttatcgacacacccttgcagagttgggggatttagtgtgcgaggtctctttggttagcccccaaagggacaatgttatgcagaatccacacttgctcaatgatgtttatgtgccgtctaaaaaggtcaaagatcactatatattatatagacagcttgcagaagattgggtttcaaactctgaacatattctccagatgccatttgtggaaaggtcttatgccactgctttggaagaagctgaacaatttctttggggtgatcatgccatggattctgtccggaacataacagtaagactaacaaaggctatgaagtgggccttgggtgttagaaaatgtctctccaaaattcaggactttctgaaagatggctgctctgaaaaagtaaattatgtggaaatagaagaactagttgctacgaaatgtgccccgtgctgtgagcctagtcttacaaaattgcaggcgtatgcagaggaagcgaaattgctgattaatgaagtaaacaatgcactatcatctttcttaacagtagacaaattggaaacattatactcaagggtttcagaattcccagttaagctaacagaatcatcgactttgttttgggagttatcttctgcaaagtcctggttgaagaaagcaagtgattgccttgaacagaataaactgggcattatcgacatagatgtcctcaataaactaaaatcagagataatacaacttcgagttctacttccagagattgatcttatctcaaagctgtggaaagatgtggaatcatggcaaacccgttgtcaattatatctccaagacttccctgatctaaaggagctggagggttttctccttgctgcggatggtgccaactttagcattccagagctgaacattcttaagcaacattactcaaattgttgctcttgggtgagtcgtgctaagaacatactcagaaaactttatgctacgagtgactatcacaatgctgttgaggagttgacagttgatgaattgcctattgtggagaaagaactaaagaggtccttatgtaggaagcaagcatctgaggcacttgcaacagtaatgccaatggaggtggttgaagaaattttaaaagaagcttcgatactacatattgaagaggagcaaccatttgatgatctgtctcggatgctcaaagaggccacttcctgggaagagaaggctagacttattcttgaacgatcagcttctctctctgagtttgaagaccatatgaggtgttcagagggaataagagttatccttccgtctaaactgcatatgaaagcagaggttgatattgctaaattgtggatagacaaatgtcaggcctatttgagaccaggctgcaataaacttgcatttggagactttcttaaagttgatgatatcaaggatttaatcaatcagcctgcaaatttgaaagtcattcttgacacttcagaacttaattctgttctcaacaatattgaaaaatgggaacacagttcactaagtctactcaataattttagagccttacttcatttgaatagtattggctctacagttgacacacttcaaagaaaattggaggagctgcaaggtaaaatgaacacagaaatagaagttggattatctcttggttttgagttcaaggttctttgggaactgaaggattcttcgttgatgctaagatggatattgaatgcactgtctctgtgctgtatgattcctttattgcaggatgttgatagattaattgaagaagcagtccaccttcctgcttccttagcagattgttctttggttacattgttgatgagggcattgtcttgtctaagaaaatcacttattttgcttcctggttctggaacatctgcaaaatccaaattggaagatgttgaaaatattctagcagaattcaaggaggttgatgttccttatcctatcatgactgccaagctggaggatgctgtaaacaatcataattcatggatagagcaatgcaataccttcttcatgctgtctgatggccagtcgtgggctatgctgcaaaatctcagggacaatgggcagtctgttgcatttgattgccctgagatggataaagttgttgatgaggttaaaaacgttgaagagtggctcaatcagtgccactgtactctacttctagatggaaataatagttctttgctctccatacttgtaaagataagaggattattggatgatgtttgcacgttatatgctgaggattgtatgaagttaagattatgtgctgtatgctcatgtgacatcggagataggctggcatctagatgtgtgacttgtcaagactggtaccatggctcctgcgtggaaaacctgtctgctactacacaaacgacaattgaatggatgtgttcattttgttcacttttacagagtgaggaccaattgaagaaccaactatctgtaaagatgtctaaaggaaactgccctgcacttgccgcacttgatgaactcatctcttctgcaaagggtttatacactgggattgaggaaattaatttgctaaaagaaattgttgataaggctcgtaacttgaatgcctacttgatgcaaattctggatgattcagactgttatcatggagaagatcttactgtcatattcaaatctcttttagttgctctcaaggcgacatcagcttctggcttgtatgatgacaatgtcagttgcagaattgagtctgttttgagcagatatttgtggaagaaacaaatacataaactattgtatggtggtaaaaagtcatcgattcaagaagtactgtgccttgatgaagagggttcacatttagagatatgtgatcaagatttcttcaagttggagattagtaaaataaaggaaaccagcctgcagtggctggctaaagcagaggaggttgcatgtgattctggtgagcttgcactggatcttgtgtatggacttatagctgaaggggaaaatctctctgtagactttgagaaggaactaaagttactgagggatcgcagtgtcctctactgcatctgctgtaagcccgacgataacagggccatgattgcatgcgaccagtgtgatgagtggtaccattttgattgcatcaacctgcttggaccccctccagaaagcttcttctgccctgcttgccatccaaacaatggtgaagaatctgtatcacttgcacgctcagaggatgatgaggatagatcaagcactggagccggagctcacacgccgccggacagagtggtggagcgagacttaataaagcttcttagctgccatagcggtagctcatggagcgagagcagaagggctcctcatcgaacagctagaaggcgtagtagtttcgtcggattgttatgatgtgcaggaaccttcttagcaccgtgaattgattctttttagttaggttagaagcaggaacgatccatcatctgctgttgtaatttgtagctgttgacaggaggtagatgtagcaaggcagagctgtaagaacccattattattgatcttgtagcagtctgaggttttggaaattgtatcatatactaccgccgttcttgaatatttgtcgcctattgtttcaaaaaacgacaaataaaaaaattaaaaaagaatggagagtatttttatgctgctgctatgcacggc

SEQ ID NO: 35174 - DNA, 1348 bp, Zea Mays
aagattttgcctgaaataggaggaatgcacaaggatcccacgaacgagatgatgaggatgtctactttgatgacgagtcagctgaagtagtaatatcttcattgtgtttgggggatgatcaggacagcagttcactcttcacgaattcaaactggtttacgtttgatggtgatagaggaatcaatgaccgcctagctgcctctgttcctccatcatccccggattctgaagcgatttccttaaacactgagaatactgatgaagcgctaactggtgaaaccactggaggcactgagtcactgcgggaaagtgcatcccttgccaatgaactagcagaagtcgctaacgacaatgatgctgatgccacggacggtgagaaaattttgtgtacagaagaggacagtcaagcctccgaggggcctgtggatgctaaagaggacaagactggaggagcgtctaaagcagcgaatgaatctgtgcctgacaatgccttgcctgaatcccaccacactgattgtcggtgcgctgactcatctgaatcaggaacagaagaagatgtggagattgatgatgagaagaaatctgagactgctatgacaaatgaatgagcgttatgggcttggaatgataggatggcggatcagattcttttgctggtgagcaatgccactcaagcaggggcgccgtacaattttaacagcgctgctttgctattgaggagtctggttgttactgcatactcgggcacgcacgctcttttatcatctcacctcatcaccatcatcccacatggaccaatgtcgtctggcggctcctgattttggtctcttcgaactgtaatatctgcacatcgcttggaggagttggagaaggaaaaaaggcacatatcggcacatagaaactacatgtccttgatctcctgcctcgagagcctcgcaggtcggatctgggagctcaaaattgaatacttctgccgggggatctgtcaggccttcgtcgttgttacgtcccatatcgaaggcggaatcgaactggaggccctaagtgaaggttactgcgatgcctggagtgatacagagcttgccgaaatggtgaaagctgcggagccctttgctcggaaactgggagtcgccctgcttgattgcgctcccccacgaggggttaaggaaaatttgtgtctttgtaatggtttaagggatataactttttttgacatttcttcaattctatgaacatccgtgttggttggcactgggccgagcctaggttggcgttcgcccccttttcctgtgtccgaccccaagaatagttctgaaacatgttttattaataaccatcaaggaattac

SEQ ID NO: 35175 - DNA, 3624 bp, Zea Mays
agaaaagctactcacaccaataagccaaagccaaacagcccttccttcgcagcgatggcggcggcggcgccgccggtggccaagaaggtcccgcggcagctcgttgagcacggcgacgtccgcgtcgacaactactactggctccgcgacgactctcgatccgacccggacgtcctcgcgcacctccgcgccgagaacgactacaccgccgccgtcatgtccggtcagtcggggacttgggatctactcacatgcgagatgcctttagcgtgctattaggcattagcttgagatctacccacatgcgatctattgttttgacatgacaattgacaatcacttgccagtgtttccaacttaccagattgtgctattgatattatatatcacttagaaattggaatgtagttgtatagcgtctgttcagacttcagtgtggttgctagctctctactcgggaacgtagtactctataatgtagtagtagacagtactactactacacgggttgtttccagtggattggtagtgcagatgattctgtgctgtcgtgagtagcctcagtcctcttctgctaaccctggtaactctcttggagatgtcaagcaacttgaggatgaaatatatgctgaaatcagaggaagaataaaggaagatgatatagatgcgcctcttcgcaaagggcggtactactactatgaaaggacattgactggcaaggagtatgtgcaacactgtaggcgtcccgtatcgactgatgctcctattacagtccacgatgtgatgcccacaggacctgatgcccctgatgagcatattatcctggatgagaatgttaaggctgagggccacgactactacagcatcggagctttcaaggtcagtcccaacaacaagctagttgcttacgctgaagacactaaaggtgatgaaatctacacggtctatgtcattgacacggagagtggagaatacgttgggcaaccacttaaaggaattacttctgacattgagtgggctggtgacgaccacctcgtttacattacaatggatagtatacttcggccagataaagtaggtcgcttgttcctccgcttcttctaactcctacatggcatacctctagttttgcgagttcagttgaaacttctggtgatttttttttcagattctttagttatggttgttgtgactgtatatgctatgttatattgttattgaatctttttctttaatttttttgtagtgttttatacttttacatttatcttacctttgtaatggcttttgcaggtatggctacataagttagggtctgaccaatcaagtgatgcttgtttgtatcatgagaaagatgatacattttctctaggccttcaagcttctgaaagcaagagatatttatttgttgaatctggaagcaaaaacacaagctttatattctacctggacatacccaaacagaacaaggaacttgctgttttgacacctcgtgtgtatggcattgatacaacagctagtcatcgtggaaatcatttctttattaagaggcgaagtgatgaattctacaattctgaattggttgcttgtccactggataatgtagctgagaccactatactgctaccacatagagaaagtgtgaaaatacaagacttccagctctttgacaaccatattgctgtatatgagcgtgagaatggccttcccaaagtgatcgtatatcggctacctgctattggagagtcaattggacaactccagggaggtcgagcgattgattttattgatccaacatatgctgtggaccctgaggagtctcagtttcattcatctgttctacgatttcattatagctcaatgcggactccaccctctgtttatgactatgatatggattcaggggtgtctgtgctgaagaagatccatactattttaggcggattcaatgcatcaaattatgtaacagaaagaaaatgggctgctgctgctgatggcactcaggtccccatgtccattctatacagaaatgatcttgtgaagcttgatggctcagaccctatgctactctatggctatggctcctatgaggtacgttctgtttgtttattttcttttttgctatttggtaaactgtaataaggaatctttctgcaatttttaacacttcgaagtttgaacaaatttcaagattggcatgtacactgcgctagctgcagttataaatgcaggcttgtactgtagcatggcttgctgcagctgcaaccgcagcaagcactgctgagcaggctgatagtgatagtttatgtcaacttcctttggttcgtttgaaagtttgtgttcttctttatatgtgcatcatgtacagactatacttatttgctaatgtgctatcatgcattcattagctgttttattcatcattgttttcaaatgacaacaattctttagcattcagttattctagtgtttcctcgctgagaaagattccttggcaggaaccagcaatgtctaactagtagtaactgcatgtgacaacttggcatcgagactatgagatggttccaggtttcaggaataaatataatagaagttattgtgataaaaccgtgctcttgttttctttgttcttatggctacagatatgcatagatccgagttttagagggtcacgattctctctggtagataggggctttatatatgtgatagctcatatccgcggtggtggtgaaatgggccggaagtggtacgaggatgggaaactgttgaagaagaaaaacactttcactgatttcattgattgtgctgagcacttgataaaaagcaagtactgctccagggaaaagctttgcattaatggcagaagcgcaggtggcttattgatgggtgctgtcctaaatatgaggcctgacttattcagggcagctgttgctggagtgccttttgttgatgttgtcacaactatgcttgatccaactatcccactgacaacagctgaatgggaggtgatggcgcaagagtatcccaacattcttgtcactgcaggcttaaacgatccacgcgtgatgtactctgagcctgcgaaatacgtggcgaagctgagggagctgaagagagatgacaatcttgtgctgttcaagtgcgagctgggagctggacacttctccaaatcgggaaggttcgagaaattacaggaggatgcgtttacttatgcgttcatcctaaaggcgctgggcatgactcggaagctggcatcactgtgaattcgattggtgtgaggcacctggactggatttgtatcatggcctgccctcttggttgggggatggatggattctgatggaatatgcatttagatttgaatagggacacagatgttatgcaaaagagattgtttgaaactttgaattctgatttgcatttggatatctgtcctagaataattgtgcttctattattcaatatttgccccatttttaacctatggaccatataaattttgctattttctcctttcaaagtactacaatcattacatgttggtactagtattattttacaggagcatgtatgtaattttatagtgactggtttatgcacatcatataaatacgtttattt

SEQ ID NO: 35176 - DNA, 1117 bp, Zea Mays
ccagcctatagcgaggatgtgatatgcggtgtaacaagggtttcaagttgaccaaacagagtggatacagtcctgctcaaagttgggaagctgtgtcaacaagcaggcccttatctgctactcacttcatgggcatgcatcaaagcctcggtattcagttggcacagcttgggaaggatgcatctgcagcaggagctgcacgtagagttagtgcccaacgaaaggcagtcgaggttgagtctgttgcagctgctggtaaacaagagattcgagaagtagtgaagaagttattccgtgctgagtttgtcgagaagcgatatgaaggtttagatgaggatatcgatttgagagctttggagaatggatttatatctgtcacccctctgaatgttcatggacaagtggagcttgaaatcggagccacagcttctgattggctctcagcagctgtatcactagacaaagaaaaggtagctgcttcagctacagctgaccaacaagatgttgcagctgaggaaaaggaagctccctcagcagcctaacaaacacgcagacatgtccacactccgtaggtgtctttagttcctgtggtgatgtcgatcttttattacctcttgtcagtttggtttgtctagtgttttgccctcaatatttgtttgttgcaatgtctattttttttgttcaccttctctgccgattaccggcttccttggccctacaaatgatttggtgcaggcagccctgcattttggatgtaacgatgtaggctacggcaactaccagatgaatactgcccagcccccactatttttttcagtgtggtttgttataggaaggtgttgtattcagcatggggtatgtgattgattttgtcttgctcccgtctgaaccatggcaaccaaatgtggccgtatggatcccttcactttacaagaattgaaatttacggccccgtaggaattggaatcttactattgaaatagtatattttttttgaatgtgacattccaccactttccaaagttatcatataagtttatctcaaatttatagtgtgggggatagaaattgattttatgtatctccaaattatgattctactctgcaattttgtaac

SEQ ID NO: 35177 - DNA, 603 bp, Zea Mays
tcgcacagttcacggggttgctgtgaacaccatggctgcccttgccgcgaccgcctataaaaaggggctcgagctgccctcgacgccacgcatcttcccgagctgagccaccaccagtcctccgttcccgagctggttcgccgccgccgtccgtcgtcctgctgttgcagcaccttcggagagccgatcctggaggacgaccagctagagcctgctgaccaggagcccgacgtcgaggaggagtacgcgagtgaagaggatcctgactttgtgcccgacgagtagcgcgttcctacacccaagtcccctgtggtgccattgtgttgtagcagacgccatgtccgatgaggagctcgcagtcgcgttcttcgccaccactattttatttctagtttctattatcgtattattagaatgtgctaaataaaagccttgtatgttatggcaccacttgagcattttactggaactctgtattctattaaatctatgcatatttagtttcggtcattagaccgggtcgcttcacttatttgggcggcctcaccagaatcgtaatcctcgttgcctacctgtggtacctgtgctccatactcaacaata

SEQ ID NO: 35178 - DNA, 5666 bp, Zea Mays
cttttttcttctctgtgctctagaagattagtattgtagggcttctgtgcagcacccaagcaggaattcagaaagaatgcctggaagcatccacatctcagagctgaagacaaaagagattgtggagtcaggaactatggacacagtatttgctcttgatagcgggggagaaatagttcttcagattcagttcttgctcaacgatgatgaccgcaagcgaatccaagaaatgagaaattctgcgatgaagatgaagcagcaagggctgcttggggatggcaatgaactcaatttttcagacagcgcattgtctaaacggctgacggagaagatttccaacatccgaagcaaagcagctgaacgatctgagcttcagaagagcatgtcactggatgatttgcaagagcgggccgtgttccctggaatcgatgcggatccacgggtgaaggcctcaagggactcgttgctgcaagggggtgtaaggttggaagatcccggtggctccaagcagcggctgagccaggccgaagtcgaagccttggcatcgccggtggaaggggagaggcggcgcctaggcctggacgtagcatccggcggcgggcgaggggtcgtgggagaggcggagcaggaagtcagcgacggggcaggggcagtggatgcgatcagcacgtggccgccggacaggccgggccctggctccaagaaaggggacagcataccagagagcagcaaatcaagtagtgcagtgaagacgatgataagtagctttgaaggcaccaccaccccacagggtatcgtttcagaaaccgactcaggcagccgcagcacgcaggcaggcaaaacagccatcatccctgttgatgatcaccacaaagcttcaaatcacaggtctcagcatatactagtagaaacgatcgcacctgcacaactacaaactattaggacgccaaaagcagccgaaagcagaagccgacgcagagcaagcaagcagcacaacgagctgcatccaagaactaggaggaggtcacaggcaaagcagatgcagatgcagatgcagccaagggactacgtggagcgtcccttgaactatctggttgcgacgtcgagcacctggatacacccgcacatctgcgtcacgggcgcgaccaagcaactgaaagacctccttgagcttgagcacctcaacttccaacgcaccgctactaagggacagcaaggtacccgagagagaaaaagcgacgaatccattgccgccgccgctgctcgggctcgcagcggtggtttcctgatgataaacgggtggctgatagttcagggggtgcgtgctgcagttgtgctcacggtttgctgcggggccatgttcttcagcagcagcagcagatgaagaaatctagcagtgcctacccctaatttttgcatacacaagccacagccacaatgtaattgtcaagttttactgatggatctggctagcactgtaacttacttcaccgaccgacatattatgggtcccacatgcagaatacgacgacctctcctgctcctccgaatcctgaaaccaaccagatcacacgaaccaaaccaccgcctcctcccccgaccggagaggagcctcaccgccggcgcccatggcgacacgctacttgatcgtgtcgctgcccgtgcagtcgcccggcgccaccgccagctccctgtggtcgcgcctccaggactccatctcccgccactccttcgacaccccgctctaccgcgtaagcgatcccctccgacccgtctccttcacccgccgggatttaatctcgcgtagcctcaccgtccgcgcagttcaacgtcccggatctccgcgtcggcaccctcgactcgctcctcgcgctcagtgacgacctcgtcaaggttccccgcacgatctcgatcccctctcccctctccagctgccccggggcactagcctctgattccgtgccatcgtgtgtttgtctctatatgtatacccgcagtccaatgtcttcgtggagggcgtgtcacacaagatccggaggcagatcgaggacctcgagcgcgccggaggggtcgagaccgggaccctcaccgtcgacggcgtccccgtcgacacctacctcactaggttcgtgtgggatgagggcaagtaccccacaatgtcccctctcaaggagatcgtcggcagcatacagtcacaggttgccaagatcgaggatgacatgaaggttcgagcatcggaatataataatgtaaggagccagcttagtgcgatcaacaggaagcaaagtgggaggtcatctaaaaagctctatgaagacaatgaatatgctctctacactgtaacactgtttgctaaggttgttgacaattttaaggtccgtgctcgcgagaagggttttcaggtccgtgattttgagtacagtcctgaagcacaggaaagtcggaagcaggagatggagaagctactgcaagaccaagaagccatgaggaccactcttcttcaatggtgctatgccagctacagcgaggtattcagttcctggatgcacttctgtgctgtgcgtgtctttgtagagagcatccttagatatggtctccctccatcattcctgtctgctgttcttgcaccatctacaaagagcgagaagaaagtaaggagcatcttagaggagctctgcggcaatgcccatagtatttattggaaatccgaagacgacgtaggcgtcgccggtctgggaggtgaaacagaggcgcacccttacgtctccttcaccataaattttgtctgagaccggcatgttcctggccgtctgcggcccaggcaatatttcgagcagaactgccataaattctttgttgatttgtcggttcatgtgctcctgtaattcacatcacagagagaccagccgatcaataatgtagtttctgaggacatgtttccctgcagtattgtaccttgggagcgcattgtaaatggcctggaacagttgtctactggatttgtttatttatttacaataaaagccatgtgaaaataagtaactaaaatttggattgtcagttgatgaaaaatggaatgtggagctagctaggctctgggtttgtggcgcagacgatttttttccagtggaatgtgtacgttctggttctggagagcttcctatcctaccggccaggccatctctaccttgagccccttgcaattgaacatcacgaaactgggtgaaccagaatagattggcgtgtttggaacgcatggctgacaaattaaacccaagtcttatggaattttctcagttcccgaattctcgagccaagaggagcgagcagtactggatgccgagaactgccagccgtcgtccccgcgccgccgcggcgtccgggcgtttacaccacccatgcacgcacggacgaggtacccttcatcgtcgtcgtcgccgccgccgccgcccgctccaaaaccagaaagcggatgccactccaaggaagggcagctcctttccacactagtctcgctcgggccgacagcgatgtctccgtgcgcctgctcctcctcctgctgctgctcttcctcctcgcgcgcgctcacacccacctaacctataacccgctccgcctagctccttcctacccgttacctgctgcggagcggagacgacgaccacttccacctcctcccccccttccgcacccaatcccatccccctttccaaattccaatttccagcaggccgcccgcgatgcccaagccggcgacggcgaaccggcgccggaagcgcggcggcggcggcggcgaggggggcgccgccgatgaacaggccagcagcaagaggaggcccgccaccagcgtgctcacctccctggacgtcaacgacgccccgcgcccggagctccccctcttccagctgagccgacctcgccagcaggcggaacaggacgacgaagaggaggaggtgaccggtgggggcggaggaggaggagcggggtcgtcgttgtcatccgtggtcaacggccacgggcagagcccgcaccagcagcggcggctgtgggtcaaggaccggtcgcgcgcgtggtgggagcagtgcagcagcgccgactacccggaggcggacttccggtccgccttccggatggggcgcgccaccttcgcgatgctgtgcgacgcgctgggcgcggccgtggccaaggaggacaccgcgctccgcgccgccatccccgtccggcagcgcgtggcggtgtgcgtgtggcggctcgccacgggggagccgctccgcctcgtgtccaagcgcttcggcctcggcatctccacctgccacaagctggtcctggaggtctgcgccgccatccggggcctcctgatgccgcgcttcctccgctggcccgatgacgccgccgccgaggcgttcaagtcccggttccaggcggagtccgggatccccagcgtggtgggcgccatctacaccacccacatccccatcatcgcgcccaaggtgtcggtgaccgcctacttcaaccgccggcacacggagcgcaaccacaagacgtcctactccatcacgctgcagggggtggtggaccccgacggcgccttcaccgacgtctgcatcggctggcccgggtccatgcccgacgaccaggtgctggagcggtcggcgctgcagcagcgcgcggcggccgggatgatggcggggtcctgggtggtgggcggcgtcagcttcccgctcacggagtgggtgctggccccctacgcgcaggccaacctgacgtgggcgcagcacgccttcaacgagaaggtggcggaggtccggcgcgtcgccgtggacgccttcgcgcgcctcaagggccggtgggcgtgcctgcagaagcgcacggaggtgaagctgcaggacctcccggtggtgctgggcgcctgctgcgtgctgcacaacatctgcgagtcgcgcggggagggcatggaccccgcgctccgatgcgacatcgacgacgacgagacggtgccggagaaccccgtgcggtcggacggcgccaccaaggctagggacgacatcgcgcacaacctgctccacagcggacgagccggcaccaaattcttctgaattctctcagtcggttcgttcgttccatcagattcttctactatgctgctgctgctactctgtctcccgactccctctcctttcattggattggaaccgtccatggaattgatcattcgttgggttgtttgaactgtactgggaagtgggaagatcacccgcaatccgtcatcctcatcctcgtagaacgctgaacacacggagagaaaggtagatcaaagacaaagagtgggttgggtttgcttttgatcataggatttttagtctagtagcacgtggtacagttgttgaacaaacctacgtatccaagagccaagtcaaagaaacagcaacaagaagcagtagcacatctcaatccgtgcgttttccttgtgttttacctatggcattggcatgatcatgtaaaacaatattttgggatgaccgtatggccaaaatgctgaacgtgttgccgatcgggccgatccgatcgatatccactggtcgttaacaataacatgtttggatgagctggtcgaaccggacgttaatgactgactttcgatttttatttatgaattatttattttt

SEQ ID NO: 35179 - DNA, 2235 bp, Zea Mays
cggcgcggcccggtccaccgcggcgggaggagtagagtaggcctctgccgacgagggtgcgctgcttgctgggagcctgggagtgtgcaggagatggccttcgccgtcacgctcacgccgcttcgggcaactgctgtccttgccggatggaggcggcgcccaggggtgactcctccgcggttcgccgtagtcctggcgacgtctaccggagtcggcggcgaacggaccccgccgacgttcaggcgcctaagggaggagctcctccagctccacgccgaagccgacctcacccaatccaaagcaaatagcgagagggtaagacttgtgcggttgactgaggcggctgagaatcttaagaagcgagctgcaaccagtgtccgaatgggcaaagagagcgaggctgtggatttacttgtgcagaagaagaaattgaccaaagccctagagaacattaaagagcgcattgaggtgcttgacatgctttcggcaaagattagtgaggtgaatggcatggttttttatcttgtaaaatgtgactaatttatttttctagaatgttgtgtattcgttagcttcattccagttactaaattactgaacaagccattgtttgcatttgtgtaagataatttgttgctcccttttgaacttttgctgcagcacagaattggtattttggtcagctcttgctgtccatctatagtactgtagaggtatgtgaataggccatccttctagtggcatacatcagccatgtagtagtagttgggtgctgagctaagtcatgtagtagtgtaccatagaggcgctagatttgtatatatactagccgattactaggcgatgcaatagagcaaggcagttcatttgctgcacattcagacttgtgctatgtgtgtgctctgttctcaagtgttcttcttctacctctaaccgtgagttgtgagagtgagtttgtgagctgattgctcacctctgcaggtgcctgggttgccaacaatttgtatgttacactcactgttcatgcagtgattcttctgatcacaatctgaaattgacaagtatttgcttcaactatggataagtgcagtactcgggaacttattgttgtgaatttctgttcttaaatcttatggtatatgcaaccctgaatgaccaattttgttggattcaggtaatttcgatgaagcaaaacatgttaattgagtatgccttgcgtccagagacatctaatggtgaagactctgatgacaagataagggttttctccagtacagtcaatgttggaaccaatggagctgggagtagcgattcacacccaaaatcagttgaaaaggaatcttttgagttgagaaatgaggcacatgcaattgcaagcatggctgacgacgctgagcaaagtgcacttcagatttcatcaattcccaatcagttgaagaggtgggcagtgagaagcagagaagtgacaagtggcaaaggttatctgacatacagatgcttataaaggaaactagagaaaagattgcgaggattttgggtatgatagtagaagagactgaatctgggacttaagatgatagcaaactacaaaacagtgaattagtgtcatccatccaccatctttttcgtgggtacccaagttgacaatggcttaccagtagttggatcttgcaagttggtcccagtgccatattccgcaggactactccgcctaacaactagagggaatgcggggtaaccttcttctctggatggaagcatttcgatttgttgctgtgctgagatcgcattgtcggctatggatatacagtacaggtcgcacttactgaaagcttctgaagccgaaaaatcttgaccggatgagcttggttgccgaccatatccaggtcatccctctgcgtgcatttgcatagagaaggctgcaggcctgcagcctagatatttcacgagcacttcataattttcaatgccatccaatgcttcaagctttctgacatgagtgtgcagatgatgaaaaactccaagatgggtctctgtacctactatacaacaagaagaatccatgtactaaatgagaatgcgagattgttaatttgttattatatgctccttgataatttttttctggttctattttgtttcctgaaccttgcataccgcatgtattatgttactagaaatagaacgtctatcagcacagcagacagcagctccctttcactggatttgatgtcg

SEQ ID NO: 35180 - DNA, 6334 bp, Zea Mays
aagagagagaaagaggtgatattgataagacgggaaaataccctaggctctcgccagtctccggtgcggctcaacaccgaccgaacccgtgaaaaattcgttctcctttcgatccgtttggcggggggctcggccggatccgaccggaggggcgccgccgatccatccggtcgcagccgcgtctgatttggtgcggattttggcgagataccccgctcctagctccgctgtttcaaggataacaaagatggcgtcgccgcggggcgggttcgatgagcaagatcgccggacggagaagggcaccgaggtgttcgtcggcgggctgccgcggtcggccacggaaagcacgctccgagagatattttcttcatgcggagagattattgacgcgcgcataatgaaagatcagagtggtcactcaaagggatatggttttgtgcggtttgcaaagagggattatgctaatactgccaaaaggcaaaagaatggtattgaggttcaaggaaagaggcttgtggttgagctttcaatggatcaagatacagttttctttggaaatctttgcaaagagtggactttagaagaatttgaagaattgattcacaaggcattcaaagatgttgtttcggttgaccttgcaatggcgtcaaatcttggttcttcaaacaagaagaatatcaatcgaggctttggatttgtgagattttcttctcatgcagtattggccaaatattattgcctcttgttttctttttcagtttaattggataaaacaaccttatacaaatatcaagatatgtgcaaaattaccttaccctactgtcctttctagtaggaaaagaagcacatatgccatttgtctcatgcattatcaagtgacgatatatccttaatgcccctatgtcctaataaaaatatggagccaaatgatgaatcggcaccaaattatcaaaataccttatgatctgctgaaaaactatggaattcacatctttgacttcaatgacttgtatactttgacattgattttggatttctatggcaaaatactttatgatcagctggcaagctaaggaattcacatccctgatttgtatacttgacattgattttggatttacatggcaacataatttctccatctcttatgtcataaatgactgactaatgttgcaaagaatggattttaattgttaccgttttcacatgaaaattccctgttgcattgtgggtacttttgaagaagccacagacattgaagaatcctttgttcaacacagttatagagaaaaaattggtacgccatataggaaagggacatggcagaattttcaccttagtcatatcttgtatctttgatctgctcttcatatttacatttatatccatggttgaagttcattataaagtgtacgaggatgaaataatgaccactggccagtgtttgtctgaaatgaattcccaatctttctagttcactgggtggtgctatatctgatgaaacagtctggaaggatgatgattggttagccaagccaaaggttacttgcatgcgtgccttttctgatctgcaacattcacaatctgtactgtgtactccatgcccactagtatttaactacatgaaatcaccggcatttgtcatcatttatctggatgacctttgttctatagagacctgtgagaaccacataatgccatagaggtaatgtcgttccagagtttagccagagtttttagcaacagcaaaacccaaaacccatatgtaggatatttagaaacacggatggggaaatcaacatatattttattaatcatctacttccatgtgatgtagaagttcccttgcagttcctctctctctctctctcagaccaagagtcaaataagagcttacaacaaattaatggttgcaatgaagtttaacagttcagttatgaaggcctgaagattactgttgattgaagcaacactgttacttgacagcttcttctgttgcttgtgtttgcgctccattaaaatttggcattctttgacttgcctatatatttctttaattcaagtaaaagtagactatatgccccctcgttgaacagataagatgactgcatatcgttttattaagaagaaaggtctgaaacaggaagaaatcccaaaccacattcacacccacaacactctagaagactagaacatactttttctctctcgaaaacacaggagagctgcgcttcattatttaagaagcagcaaacaaggtcccaaaatgggccagcacaaagggtggcactttacagtagccagcacctgacatagacaaacttatccataaaaacacgtcacagcactcaaacacctaaatcaggcccatatcccggctaactcagtagccccagcaagggccaattcctggcatcctctccgatatctcgcagcacctgggacacatccgccacgccttcttcgaagatagtaattgcgatgtttccacaaccaccaagccactaaaatcaccacagaattgaactcatttccctgcggtttggggactcttctctctgcttgattccaccaatcctgaaaattgacctccctgggcattgggctaaggtgctgtaagttgattagagaaagaacttgaaaccagacctgtctaccaaacgcacaggccaccaacaaatgctgaactgtttcctctttctgatcacataacaggcaaagttcaagatgctcaagtcctcttctagcaagccagtccacagtccagcacctattgaggctcgcaagccaaatgaaaaacttacatttcggagggccccaggttttccaaacccttttagccggtttaaaggctactgaccctacgaagaacctttcatatgctgacttggaagagtagcacctggaagcagaaggggtccaaagatgcacgtcttgtacacccggagccaaattgaactcatttaggatgacctagagctgtagaaattccatctacgtttgagcattactgcacctcttatatgtctgacaccaacaaccattgttcatagtgtcctgtactgtttgtatctgctgaaccttactggggatgagcttgataagagagggtgccaagaccgacaaggattgcccatggagccacctgccataccaaaacgtgctgctagcaccatctcccaccgcagttacaagcgaagcagtgaacatagcaagaccagaacatactgaaaagaaagaccaaaagcaacatgaccaaaactaccacactattgcctgtgcccctcctaaaggtctcccaataagcttcaggaggccctttgctctagctgagtaccaaaggatgcactcataagttacagcttgcaacaccgttgtaaggcttggagtagagccgttaaaaacacagttgtcctgtcccaagccaccaatattgccagtgaattgaaccccttctgtagtccattgttacctctttaactgcctggtaggctggtaccactagcttgagaatctatgggttgatggttgggctgcaatggagacaaaagcaattttctgcaacctgcaaaatggtgaactagattttccaggcgaaaacacatgaaatcaataggtgctgtgtggtcttctcttcttcatcagaaggggcaagcagctgggtgggaagtcctcttttagtgatccggtccgcatttcaagaacggttctttactgcaagccaaatggagagcttgcagcaaagaggagcccaggacttccaaattcgtttccatggagcaaagcggatggaactaaggaaaaaggtattgtaggccgactttgctagagtaagaatcgttcctagtaagcctccaaacaagctgatcagcatcattctgcttcagcgagaaaccttccatcaagtctcataagcggagatattatgtaagaacctggacagagagctcctcttatgtcagctacccaacgatgggggtacatcacttgatgatcctcttgaattccctagttgatcatttttcagtttattgccaaatctagctgtgttcttgtggctgtgaaattatatctcccatgctgatacttgattcccttatctttgcttcattactacaccacagtaatttggatctgccattatgttactatgtaactctcatttgatatcaatcacagctgccacatacaaaatacaagtatgtttatctagataagatcttgattcatcaatcaccactgatctgagttttcgccactgcgatgcgaggaaaagacagatatctaataacatcttggtgaagatgttcttaggtcctttgctttctcttcaagtcagcttcctttgatttcattcctcaaactatcaatcacaggctgcagcacgtgtaatccgcatcggttcaagaacagatttcatgcttggtgatattttgcatcctgcgataaattgggctgataaagagtctcatctggatcctgatgaaatggccaagatgaagtctgcttttattggtaacctgccagaagatgttaatgaggagtacttgagaaagctttttggacagttcggtgaggtagtacgggttgctatctcaagaaaaggacaatgtccagttgcttttgttcacttcgccaaacgttcagagcttgagaatgctatagaagaaatggatggtaaaacggtgagaggacctggtcgagggccgtctttcaagatccaggtgtcagttgctcgacctacggcagacaacgacaagaagcgatctcgtgaagaagtgagaactagaagatcaaatgcatcaggagataggcgagattattctcatggaagatatggacacgattcacttgatcgtcaagtgaaagctccaagattatctaattatgtggccgatgctgctgacccctatgaatcagctgttaattcattaccttcagctgtcaaggaagtcttgcttcgaattctacgtctaagaattggtactcgatatgatattgatatccattgtgttaaaagccttgatgagcttcctgagtcatctgctcttgctgtccttaatcagtttttgatatcaggtggagacaaacacaacaaaggagattattttgcatcgttggttgctaaggctgagacctttggcttaacacatgcattacacggtaccacttatttgtcaagaaatccggaaatgcatagcaagcgatacccacatgaagattatgattttgtgacacccagtaggtacgattcgtcagcccatcatccttcaacatactacgaagacgatccaccagtgtctgagtcaagggttagaagatatgctgaagaaaggtccaccattgtaagaagcccagaaccacgtccgcgatatgacgaaacagacataagaataaacccagaaccaagattaccatatgaatcaagacacaacgccgaaaagcatctcgatcgaagatacatacaagagcatagttcaaatattgaaagaccagctgaagaagctctcctttctagggaaaggagatttctgcctgctgcagggtacatgccgaacccaggcggctcggatttccgctccaggtcgcccgccgaatattcagcacaacgccaacaaatgaggtttgatccattcacaggtgaaccttacaagtttgatcccttcacaggggagcccatcaggccagatccgaaccagcgccgctcaggaagcctgtactgatcagattagttggagcgatatgccagataagaccctgaaacaaagctagatctggataactcttcttcttgtctgccaagtgtctctgtgattttgcttgtgggctacagatcatgtaccccgagcaccatgtgtgatccagtcggactaatcatttcggcattgaaaagtcggactaactttttttgtgcccataacgctacgtattgtttggtagattaattaaaaattcatccggtgaaaagcaattttctggtatttttctggaggtgcagtaggcgtggtaatgcagaatttcaactgctacgtacactgcaagcgctgttttacccgattcgtctttacgtgttgccaaatgtttcattgacttcatagaactgatttcgactactttggatgctgagcaagggaccatgcctttctcacatatactcatctggagaatgtcaagcaagacggcccatctggacacatggcaagaagagataaactagctagctgcctcccaatgatgctactaccttctcttcgactgcttcaacgttcacatgcccctcccttgcatggcgtagtaaactgggttgcttgaaaaaacgccacttctaagcgta

SEQ ID NO: 35181 - DNA, 1042 bp, Zea Mays
cacgacccttccagggaagagagtgttcgtgacgcgggcggcccccaaatccgcataacaatctctgttgcccccccgccaaaatcctcagatccccttgctgcagtgcagatctctctataatccgcgctcgtggcgacctctcctccagcttccgttcctgaaatccatctctagtttcgccatttgggttttttctcgagggtttcgctcctcactcatctgatttaacgaagggagctgggtcacacccacaggccgcggcttctgaaattcgatggccgtggctgcagcgcgcctgacgctcccagatcgattcgacgaggtttacatagcctctgcccggtgaaaagatgggctcgtgggttatacgcgcctcgcacatgcacgagctgaatttcttctcgccttttcgatcatgacgtctttcgtttttttgacgtatatgattttccctggtgctagcgccgagcgcaactgtggttgagatccaatgctcctcgttactccgtccacctttacctatggaccagtttgcatgtagttgcagtctttttctaatgtcgataatctgatgttgtggctagttctcctcgagtggcaatataatattctccggatgcacatgatttggatcatccgctgtggagtttagggttttgttcaggttttacaggctctgctttctggtatctagcagtgtttgtttctttcgttctgaatctcgcttttcgttctgaatcatctctcgtttcgggacatcctgagtcatctaattttttccttttgaataacgtctcctactaagacgggtatacccttttcaagcattggatttatcagttattattacccatgtctctcctttttcttttcaagaatatatctcttacttattatttatatacatcatgataagcctcagcactaagagacaatgttcatatttgtgtgtataaatagggaagtcaatggatcaggatccaaatgttttttcacaatatggttaattaattttagtttaaaaataaataaaaatata

SEQ ID NO: 35182 - DNA, 2318 bp, Zea Mays
caacgcggtcgcgtcaactccacctgcgcccctcaggccctcacgagtcacgacctcgtcttcgcgggcgccgccgaccggatcctcccgacgctatcgcggtcaaccctgcctgcaccctcacgacctcgtcttcgcggtcgcacatgatcacgtggtcaaatcccgctccgttagcaagtaccaccagcagcaagccagcaacccaatgctgtgctcctcccacctcctgctgcgcgcacaagtcaactcctgtctgcggccgccgcgccccacgccggtccccatggctcgttccgctcccactttcgtcgctgtttttctcctagtcctcgtgcttctcaccatggacgcggcgcagggtcaacagccgttcccgctgtccaccgatccatccgacgcggatgctctgcacgctgtgttccggcagtggagactggagggcggcgcggcgatggaggacccgtgcaggaagggcgtctggtcagagtcgtccggaataaacgcgtccgtcgaatgcaactgcctcccctcaagggtgtgccgcatcacaagcctaaatgtgagtgggcacgggaacatctcggcgatcccgcgggagctattcaatttgacagaactggtctctctggatttaagtaataacaacttgagtggttcgatacccccggaagttattaatctttccaaactggaaacatggcgaatatatgggacgaatcttcaaggacctattccaaaaaatttctctaatctgagcaatcttgaagtcctgatgcttggtgatcttgcgggcaaccattcttatttaaatgtcataggagcgtgggcaaacctttcagtgttatctctgagaaaatgtggtcttacaggtcaggttcctaatactcccccaaacttgcccaagctaaaatatctggatttgacatcaaacaacttatcaggatcaataggaggactcttgctttcatataagacctcaaattacatatatgtaggtggaaacaacttaagtggacctgtgccttctgaaattgttcaatcatcagtttccttggatgtttcgtataactattatgttgacggatccctttctaacaatccttctggtcagaagcagttcataaattatcttggaacatcaattgatgcaagtggaagaatcaacagtggaaatcttacaatcctgaactgccttcgcatgaacgaatgcaacataaataatttaactaatcgtgcaacttccttcgctataaactgtggtggcaagcaagtggagtattcagatctaatgccaattatgttctctgaagactccactgatcttggaggatcaggctttcatgttaatgctactagtcattgggtagttagtcatgtgggttctgatccatttaacgaatccaccggtattgtaaatacaagtgatatttttgaaaccaacatgcaagagctctaccaaacagcaagaacttcaacaagttcgttgtggtactatgtggtaggtttagctaacgggaactacacagtccaactcttctttgcagagatagtcataactcatggacctggaaagcgcttatttgacattgatattcaggaccagaatatcaggaaggactttgacattactaaggaagcagggggttccagaaaagccactaacataacctacgaagtgactgttgataactccatactggcaatacatctgtattggagtggacgcggcacctgttgtattccatatgaaggagcttacgggccactagtttcagcaataaaagttacccattcccaagacccgaaaaccagtcccccacaagcaccacattctgattctgcccgagatgatgtaaagcgaagaggagtggttgcaggcattgcagcactttccatagctgctgcggtgatatcttcatctgttgtctacctttggtggaaatgggtttcacttgtgaagcgcccaatggcatgagttcgtcagatgtttgcatatagttgattctcccacaaatttccatgtcatgcgaaggactctatgtatttgtcttttagcgttggctgctagcaactagccaactagcatagccaagatgactgatgtacagttgacgttgcgatcacggttttaggtctcaagttttgtttcacgattattgtaacctaggaaattatctaagacattctgctgctaatatgttgtttgtttgttgatcaaagtgattcaaatcgcattgtgatatattgtttgtttgtcgatcaaactcattgtaaaactattctcggacgaatgtcacatttcacgtgttgccaac

SEQ ID NO: 35183 - DNA, 1772 bp, Zea Mays
gacagacctggtggagtcaagtactctaccaaacttgccccttcccttcccagcgcgctctctctagccggcgacgattgggcgagcggcgccactcaacgccaggtcttcgtgaaaaccatcgccggcgatgagtttcaaccaggaaccattgatgcaaaagagctcaatgttgccatgagagccttgggatttgagatgactgaagagcaaattaggcaaatgattgctgatgttgacaaagatggcagtggagcgatcgactacgaggagtttgagcacatgatgactgccaaaatcggagagagggatagtaaagaggagctttcaaaagcattccgcattattgatcaagatggaaatggaaagatttctaacattgatatccagaggattgccaaagagctgggtgtaaatctcaccctcgatgagatccaagacatggtgcaagaggctgatagaaatggtgacggtgagatagactttgacgagttcatcaggatgatgaggaggaccagctttggctactaggtgtatttatctgtatggcaacttttatgtataacgagcacggcccgacaacctactaagaaaatggtagcgtaggggacggagggatggacggtgaaaacaggtggcacgccaacgactggacggagcgtgcgaggaaggggaaatggcagcgcatggcacgaatgagagatggagatagagagagaaagaatgagtgctacctttcagaagaaagaatgagtgctacctttcagaaggaagaagtcggaatagaaaacgctcgatccgtggctgggagtaatggccagaaacttctggaggctttggggattgtatgactggtgcaatagctagacggtagaatctcgtcatggagaaacaatccgatggcttccaaattttagacgacgtgtccggacttccaaattttggacgacgtgtccaccttgatttgggaagatcgggtcctggtttaatatatagaaatagaaatatgcaccagatatttggccgcagtgccccaccatccatcgtgtggttgcaaatatgagattgatgcaaggtaaaatggttcatatttgtggtagcagaagcactggcacaggtagtgtcggcaaaggaatcagaagcaatgagcctggagagcctaaaggaagcgtccgatgaaatggacgagaagaaggaagctcttgagatcgccttggagagagccgggagggcgaacgaagggaagcttggcgcggagcaggagcttaggaaatggagagccgaccacgagcagcgccgcagagctcacgaatccgcgaaacgcgcggtgaatcctttgaacggtccgtctagagtatttgtcgaacagaagagtccataccacaaggagcaggaatccaaggtgcaggcgtcggggagtagtagctacgagggcctcgttccaaaccaaaagatgcagaggaagaaatcgctgttccctctgatgggctcggttctatccaggaagacccgggcacagacgtgacgtaaacgagatcctataggcacctggggctttgccattcacattgctgtacattggtgtaataagctggttttttttcttggtcttctttggaaagagcctttttgttttgttttaaaggttggtatatcctgtggaaggtgtaatttaatttgtcggtataaacagcgtagaacacattggaatacttttatatgattttttttggtaactcatagttcttcatgaattctgcgaggagatctgt

SEQ ID NO: 35184 - DNA, 2341 bp, Zea Mays
cgctcgtggtggcggctcctcagcaatcagtgccacaaacagatagcctttcgtctctttcagcttcagaggccaccagcgcctggacgctcgcgccccggcctcgccgccatggcttcctccctggccgccctccactcagccgccgccagccacctcccacaccctcgacgtcagaggaccgccgccctcgcgcgcgcctctcctctcctccgcctgccgcttcgcctccgctcccgccgggtccccgggtcgccgccaagttggcgaccggcgccgctggcggcacggcaaccggcagggcgaggcggagcgtaggcgtcgacgtcgccgccctcgccgcggcgctgcgcgacgccagaacggccgacgacgtggagtcctcggtgaacgccttcttgagcgacgacgaggcccggctcctgccgctccaggtgtacacgtgcgtgatccgggggctcggcaagggcaacagcccggacgccgcgttcgccgtcgtcgagcacctcaagcggagaggggtggtgccgaaccagttcgtgtacaactgcctcctcggcgccgtcaagagctgcggcgagctcggccgggtccaggccgtcctcgacgacatggaggcgcagggggtgcccccgaacatcgtcaccttcaacacgctgatgtcgatccacgtccagcagggcagggtggaggacgccctcagggtgtacgccgacgtccaggggcgcgggctcgtgccgaccgccgcgacctactccacggtgatgtccgcctacaagaaggcgggggacgcgtccgcggctatccagctcttcgccctgctcagggagaggtacaggaacggggagctggtggggagccgtggtgacccggagcaggagctcgtcaagctcgagaagctgaccgtccgggcgtgctacctgtcgatgcggcggtcgctcgtcggggggaagaatccggtcggcgaggcgctgaaggtcctcctggacatggacgaagcaggtgtccggccggagcggagcgactacgagcggctcgtctgggcgtgcacccgggacgagcactacgccatcggcaaggagctgtaccagaggattcgcgacggtggcgacgagatcagcctgtccgtctgtaaccacctgatctggctaatgggcaaggcgaagaaatggtgggcggctctcgagatctacgaggacctgctggacaaagggccgaagccgaacaacctgtcccacgagctgatcatgtcgcacttcaacgtcctcctggacgccgccaagcgaaggggcatctggaggtggggcgtcaggctgctggacaagatgcaggagaagggcctgaagcccggaggcaaggagtggaacgcggtcctcctcgcgtgctcaagggcctccgagacgtctgcggctgtggacgtcttcaagaagatggtggagcgagggctgaagccggacgtggtctcctacggagcgttgctgagcgcgctcgagaaaggcaggctctacgacgaggcactgagggtctgggaacacatgcgcaggctcggcatcgaacccaacctctacgcgtacacgatcctggcgtcgatctacatcggcaagggcgaccacgccatggcggacgctgttcttcacgacatgctgtcgaagcggatcgcgccgaccgtcgtcaccttcaacgcgataatcagcgcgtgcgcgaggagcggttcgggtgggaacgccttcgagtggttccacaggatgaagatgaagggcattgagccgaatgagatcacgtaccaggtgttgattgaggctcttgtgcaggatgggaagccaagacttgcctatgagatgtacatgaaggcttgcggccagggtcttcagcttcctgcaaagtcgtatgacaccgtgctggaggcgtgtagggcttatggttccgtagtagatgtagctactctgggtcctcgaccttcgaaaggggtggaagtggaacccatcaggatagagaatagcttctcccgtttctctcagttcaaggatgtgcatggcagctctcatcgttttgcaggcgttggaatgtatgggttttacggatacagaatggcaaggtaaacaaaccaagcatgtaacctactatcaatccccctctccctcttgtaatcaccctcccaaacccaatgccacatttttaaaacatttgactcgtgtatttgtaagctcactaagttgcgaaaaaaaaatactagtgcactgccctttatgttagtgtggaccaaaaaagcgatgcaactttttggtgcgcatgtgttctttggaccaaccttttaaacaagacgtttctttcatatgaattg

SEQ ID NO: 35185 - DNA, 2396 bp, Zea Mays
cactccgtcagtctcccctccggcctcacgccgcgctcgcggtgctgcctcccgggctcccgttccagcattccaggctcgcatcgcacggcctggccccgcccgctccgacccttctcggcgacactcctcgtaggctcgtactggcacgtccccgctctgtcttctgcccaccaggcactagcgggtgcgggtccacgcttccaagggttccaaactctcggcggcgcaagcaatggcggcgcggggccgggagcactggtagtttcgcatatcgcggcggcttgttgccacctcgccatcgcagattatggggatcaacggcgaggagtgggaggagacggtactgggcgacggcgttgggaggcggaagggtggtgctgaggcttccggtttggtcgcatcctcctcctttgctgaggggatgggggaattcgtgctgaggtctatggacgccaggttctccggatcggtcgacgacgatgaatatgtctcgtctcggcagccagtatttggccatagtaaatcgacagctactacttctggtaccattaaagggcaagataacgtttttgtaaggtcatactctgataggttgctgaagtgtgacctcactttggatatgctatcagaaaatgagaagataaagataaccgagagattggtaaagatccagaatgatggtacagtggaggtagatgtgacgcgcagtgctcttgttgcctcagaactctcggagattgatgcttttggttgtgtaccacacgatattgaagaagttacacctggaatcaccaaatcagtcccaaagctgaagattgctatacttgtagttggaacccgaggggatgtacagccttttatagcattagctaaacgactgcaggaattcggtcattatgttagattggcaactcatgtcaattttcgtacttttgtgaagtcagctggcattgatttttacccattgggtggtgatcctcgggttatggctcagtatatgacaaaaaacaaagggtttttcctggcggcaccgacagagattgccattcaaagaaagcagcttaaggaaatcatcttctcacttctacctgcatgcacagaacctgatttggatactggaacacctttcagagctcaggcaataatcgcgaatcctcctgcttatggtcatctacacatagcagaagcacttggagcacctctgcatatcttcttcacttttccatggacgccaactaatgaattcccacatccattggcacgaatgcctcaaagtgcaacttataggtttggtggggctccaggggattcataaatgatttcaggaagaaattaaatttgccccctattgcttacttcagcacataccatggatctatatcacacttacctactggatacatgtggagcccgcaacttatgccaaagccaaaagattggggtcctctagtggatgttgtgggatattgcttcttaaatcttggaacaaagtatcaaccgccaccacaactgtcacagtggcttcaacaggggcccaagccaatatacattggttttggtagcatgcctcttgatgatgagaaaaaagtcactgctatcattttagatgcacttagagaaacaggacaaaggggaatcattagccgtggttggggagctcttggaagtttttcagaagttccagttgatgtcttcatcttggaggattgccctcacgattggctcttccctcggtgtgctgcagtggtgcatcatggtggagcaggtactacagcagcagggctgatagctgggtgtcctactactgtagtgccgttttttggagaccagttcttctggggcgagagagttcatgcacgaggagtgggtcctgcacctatatctatcgcagaacttactgtagaagcactatcaaatgcaataatattcatgcttgatccagaggtaaaatcacgaacaatggaactggcgatagcaataggcaatgaggatggtgtggcagcagctgtagatgcatttcatcgtcacctgccttcagaattgccgctgtcgccgcccgcacatgtggaggaagaacgcacagacttcttccaatggttttctcgaggcctggagaagtgttgtttcccattcagtttttaggtacggcagtccgtacgctaggtatatgtatgatttattcatttatgagttgaaaaggtatatcacagtaattttctaaaattggaataaatgctggtataagccaatggtgaggatgcaataaaaaagatcgacgcaattgtaaatgtttgggcagctacaattgtattcagaatttgctggtaggcctgaaatttgtgccccgatgtgccttccagtatgagtgtagtagctacagaactgagcgatca

SEQ ID NO: 35186 - DNA, 3105 bp, Zea Mays
cgtcccccacccgaccgcccaaccgcaccgaggcagccttcgaccaatccaccacccctccttgctgcactagaggccgaaagcgacgccgcagtttcggtctccgctccactcagctgcaaattccattcttctccggcaccggccatgccaccaacataaaattcgcgatcttggcaggcgcatccatcgaagcacctttctgctctagagcttcagagacaacagacaactaactagcttcctcttccagttcccgactctcccgtcagtctgcccgagaatcaatgactaaccgcaaatacactaaaggcagaaggcacgagctagcacacagtcctctgctgaggactgaggttgactccagctaccgcgctcagtgactgtgactgaccggcgataaagcagtagcagactagcagtagaccagctgctcaatcagaggaaagcttccacaccaccagcccaccaccatgctgagcacaacgtgggcatcgccgaaggcgacccccatcccctcgtctccggcctctcagacggcgacccggctccatcccgcctccagcagcaaccgaacgctccgccttgtcgcgcttccctccccgtccgcgccgcggcggaggcggaggcccggccttcctcctcctgcgcgcgcggggctcgtcgccaccgcggcaatgccggcgccggagcccaaggcgcgggtcctggtggccggcggcggcatcggcggcctggccttcgcgctcgccgccaagcgcaaggggttcgaggtgctggtgctggagcgggacatgagcgcggtccgcggggaagggaggtaccgcggcccgatccagctgcagagcaacgcgctcgccgcgctcgaggccgtcgacgccgccgcggccgacgagatcatggacagcggctgcgtcacgggggaccgcgtcaacggcatcgtcgacggcgtttctggctcctggtacatcaagtttgatacgtttactcctgcagctgagcgggggctcccagtcacaagggtcattagccgcatgacactgcaacaaatccttgctcgagcagtcggcgatgatgcaatattgaatggaagccatgtagtcgattttatagatgatggcagtaaggttactgccatattggaggatggtagaaaatttgaaggtgaccttttggttggcgccgatggaatatggtcaaaggtgaggaagacactattcgggcattcggatgccacctattcaggttacacttgctacactggaattgcagattttgtgccacctgatatcgatacagttgggtaccgagtatttcttggccacaaacagtacttcgtctcttcggatgtcggtgctggtaaaatgcaatggtacgcttttcacaatgaagaggctggtggcactgaccctgaaaatggcaaaaagaaaaaattgcttgagatattcgacggatggtgtgataatgttattgatttgataaatgcaactgatgaagaagcagttcttcgccgagatatatacgaccgcccacctactatgaattgggggaaaggtcgtgtcaccttgcttggtgattctgtccatgctatgcagccaaatctgggccaaggtggctgcatggctattgaggatggttaccagctggctgtagagctagagaatgcctggcaagagagtgtcaaaactgaaactcctatagacatagtttcctccttgaggcgctacgagaaagagagaaggctgcgtgttgctattatacatggactggcaagaatggcagcaatcatggctaccacctatagaccgtacttgggtgttggtctagggcctttatcgtttttgaccaagttgcggataccacaccctggaagagtcggtggcagattcttcatcaagtatggaatgcctacgatgttgagctgggtgcttggtggcaacagctcaaaactagaaggaagacttttaagctgccgactttctgacaaggcaaatgaccagctttatcaatggtttgaggatgatgacgcactggaagaagctatgggtggagaatggtacctcatcgcaacaagtgaaggaaactgcaatagcttgcagcccattcatttaattagggatgagcagaggtcactctttgttggaagccggtcagatcctaatgattcagcttcttccctatcattgtcctctccacagatatcagaaagacatgctactatcacatgcaagaataaagctttctatctgactgatctcggaagcgaacatggtacctggattaccgagtagacgttaccgcgtgccaccaaacttcccagttcgtttccatccctccgatgtcattgagtttggttccgataagaaggctatgttccgggtgaaggtgctgaacacgctcccgtatgaatctgcaagaagtgggaatcggcagcaacagcaagtccttcaggcagcatgaatggagacactggctaccaccactatcatcagccacactgtactgtacagcatccggtaaagacacaacactgcatcacggaaaggatacactcgttctcgaatatttgtcgtctgctagttcaattttaaactaaaacgtgacaaatgaaaaaacgaaggaagtagaagatatgtcaaaacacatgcaatttttgcatccatgaagatgccaaacaggatcttgaatactagcacctagcggattgaaataatgaagttgcagttctgcgtgaactggattgtacgatagggatagacaatttagctgttgtcggactgtgtacatcgttgtaccatcaccggaaatattgtacaccgagaagccatattgtaattacggcatgagaacagtaacactttgatcatgtaatacagtatatagttgtttagcaattagctgagtcagataagatatgatttgttcttccacaagtgccagctcctcgaactgttgaaatttccttaaaatttctgcaggaattgaaaaacttgttcctataaaattatttcatgatccaattaaaaattttactatattatgttggatttaattgggcctagcccattttgaattagtaattaaataaaaaaaataaaaccatag

SEQ ID NO: 35187 - DNA, 3892 bp, Zea Mays
tttacccctgttgcacttgtttactgaaacatctccaagaccaaggtgattgtattcaccaactgtagtctagtttttttcacatcattcaacccatatttcaatgatatcgtttttgtggatcatagttggatgaccaatgataaatgtgataagttgcaaactttattctcagaagatgactggaagttagttcagttggtgcttactttgttccgcaacgtcttggctattcaagaaatcacattgacgcagaaagcatctggagaagctacccacttactcttcctgtctgataactttttggagctcatgttccaagagaatgtgatggacataatcttagttttgactcagcatattgatgagccctctggttaccttaaggaggaaaaccttcttttaatggagatttaccattatctcttcttaggccgagacccaggactgattgcccgagcttctaataaaggtttaaaggatcgtgttaacggagatattgtttcatcagttgattcattgagattgatgatggaagaggaagaaaggaaaaaaagaatgttcaggcaattgaactcagaacatagctcgcttagtgggacttttacgtgcttttctgtggatggatctaaatcattgtgcaaagggaacccaagctctgcatctgctaatagcctcttgaaaatacgtaatgtccaaagaggacctcagaaacggatagcctgggacaatgaacttctgtacgtaccaaaggagggtattacagaaatgcttagaagcttcatggatcaatttttatctggagcatacaatatcctgatgcagtcagtctgtggtgatatcatggatgagcaccactccattgagaaatctgacataactacattcttcaaagttgctcggtttgttctagcttttcaacatgaaaaggcttcaaatgatcagaaatctgctaaagggattcaaccatctggggtttctcctagcaatgaacctgatgataatctgccatttcatggtgatatatgtggacctgttgcggccacgttgaatgaagatatgttcaatatagtcatttccaggtggcgtgagacgtatgaggctcttaaggaaactaacgactacaaaactctttcagcagctgggtctttaatgaagaacatgattgacatgatatatttggtgctaaaagtactccctgaagattcaagggaatctcaaacagctcgtgttttgctctataaactgttttatgatcagacagaacatggtctcactcaatttctgctgaacttgttcagatcgtttgatagtcacaagcaacccaaaagtgatctagtggatttattagaaacaattcatatcatgctacagctcatggaaaagcttcaagcacgtggtgcattaagggttgcaaaaaagacaaaaaaggtcagaagaaagaagtccacaaatgataaaaaggagaattcagaacccaaagtggataatgcagaaccaaacgatgctaatcctacagatggaacgaaatgctcacctgaaacacttccagatttgagaagcgagggtcctgctttagaatcttctccctcagaacctggaaaagtagacactagtggcgcacatgtactggatacacttgtggacactgtagttaacattgagagtaccgcacatgctgaaggtgacccatcttgcacagacagtggcgtaatgaagagaaatctcattgaagaagagggtgagacttcagattcttcagttgatcaccaacctgctacaagtgaagttgattttaatgtttctcggttaatatctagtcttgcaaacaattctgttgtgcaaaatatttgctggctgttgaagcattacaaaagtaactcctaccgtacaaaccattacataatatgcatgctacggagattctgtgaagacctagagctgtcaccgatgctgtatcagctatcacttttaacaactttctatgatatattagcggaacaaaagttgtctagttcaaaggagtacacaaacattgtaaattttctttctaaagttgtgaggaaaatgttgagaacaataaaaaaacagccactgctatttgtcgacatactattttggaagacgcgaaaggagtgtcattgcattgatgctgatgcactactgaatgagcttaagaatgatgttggaagcaaagacagtgaaattggttcaagtaaggggtggagagatcgaataaatatagcagattctcttggtgacgatgaagttgacgtagttataccgcaggcaccttatgatgctgataaggatggagatctatcagctggtgaacatactgatgactttaggaagagtagtactaaatataaacggagcagattgtcactttcagatagtgaggctgatgaaatcgagaggaaccatgtatcaagagattcggtgcccaaagttccaaaacgacgaggtcgttctctttttacggaagagcaagagaggctcataagagacctttatgaaaaatataaggatggtcctaaatgcagtcatataatagctgagtctttagaccccagcgggaagatatcttctgctcaagtttctcgtaagcttacacagttaggtctcaggaatgtcacaaggagaaaaaaggttgcaggcgaacagaaccatggctccaaggctaaaagctccaggcccagaaggaaaaaattacacacggcaagtgatgaccatgatgacacaagtcagagaaaatcatctgatgaagacacattacaagtacttaaaagcagatcaaaaagtaagaaagttccattggtggatagttcactgagtggatcacagcatcaagaagctcagcatgacccagactctgatgatgcgaccataggatccatgattagaagtagaaaaaagaagaggttatccacgtcagattttgaagggaatgtacgaaaccatcaagaatcttcagacaacaccaaagccaaggactgttcaccgattatatcccaacatgagaaagcattgcaagacatttatcctgatgatgagaccattggatccatcattagaagtgtgaaaaagaagagatcagtgacatcaaatttctcagcgaatatagaagcccaagagtctttgagaaatattaacctacaagatgaaactgttgtttctaatatcatggatgcttctgtaaatcatgggtctgatccagtcaataacagtgacaatactgttgaagatgaacttttggatgattttgaaactgagctagtcaataacggtggcaatactgttgaagctgaacttttggatgattttgaagttgagctagatgatcatgagcatactgaccaaaggatcactgatgatgaaattatgactgaatcagggaaagcaacaaactccgatgctaagggaagggctggtttgaaaagaagacacagaatggttattgacgatgaggatgatgattagtaactgttcaggactgaagaacccgtaactattgaggagtggagtttcaaatgggaaatgggattaaaaaaagaacttttcaggattgtttcccttgcactgctaagctctgagcacgattcaagctgtttcacacctactagtgccagatgttcttccatctgtaatgtttagtggggtcacaatctaatggaattttgcagatgcaaagttcaggctgccctgctgtgtggcctgctgtacagactgataatttcgagtactgttttttttgaaatgaaatactgtagagaagccccccgcagcaatttcgagtactgttggctgtatttgaaactccgaacactgcaactctagcgaatgcgctcagttatactgttttcactttcacctaaagtgctctttagac

SEQ ID NO: 35188 - DNA, 1064 bp, Zea Mays
gaaaggtctatccagcggcaggagttgccaatcactgagtacatatatggtgcaatgagcaagcatgaattgctggaagctcaagagcaagaacagcaattggcttatcaggataaacttgtggaatggacaaaggacaggaagaatgcattagaatcttatgtatatgacacccgtaacaagctttctgagaggtaccggagctttgctactgattcagaaagggaacaaatctcagttaatttacaacagactgaagattggctttacgaagaaggtgatgatgagacagaagcagtttacagtagcaaacttgaggagctgaaaaagcttgtagatccaattgaaaatcgttgtaaagatgacgaagtgagagctgaagccatgagagatcttttgaagtgcattgttgaccacagaaatgctgccaagtcattatccacacctgaaagagatgctgttgacaatgagtgcaataaagctgagcagtggctaagggaggggtcccaacttcaagaatccttgcccaagaatgtggacccagtactttggtcctgtgaaatcaagagaaaggaagaagagctggatacgttctgtcgaaacataacaaggcacaagggctctccagcaaggacagatggcagcaggggttcagattacatgcctacacctgatagagattaaatattttcacgatcacgaggtttctttactgcccgccattgggtgaccgcttcttggttctccaaggtgcagttgtcacttgagagcctactgatcatgattgtcgatacctgtgaattcttttccggtacttggatcaaggttgtctgcttcagtttgttctgaatggaaaggataattaaaaggaaattgtatgcaatagatattgttgacgccgttttttagcttggcagatttatgcttcagtttgttgatcccaggaagttacccattatttaattttgtttgttaataccttgtatggtgtacattgatgatagttccttcgcacacatttttttttcttatgatgaaacaatacatttgaattttattggcca

SEQ ID NO: 35189 - DNA, 1034 bp, Zea Mays
cggccaaccgattgccactgactccggccatcggcgattgtccctcggtttttctttaacgatttccgatttgattccatggccggctggaccgattccagcgcatccctcctcctcgtgatgcccgctccccaaggacctgtgcctgcggcagcgggaggagatcaggacgctcaaatacgtcatcctattcctgcacgtggagccggagccagagctcgaccgccgcctttgggacgatatttccatgctcaccgaccagatccagtgcctcacgcaggagctcgccgctcaggttaaggccgagaagcactcagcaaggtcgtgctttgacgaggatggatactgatcttcccctaggacgtcggggtttaacgaggataccgctttctctctggtgtgttcgattactccaccatctcactctcacagcgaaacgattggcatgtcgatacgctgtttccaaaacaattgggccctgtgtacctctccgccattctcgagtatctcaccgccgaggtgttggagctggctgggaacgctgctcgtgacaacaagaaccgtatcgtgttgtgccacatctagctggcggtgcggaacgacgaggagctgagggttcgaaggaagtagcagtgttttttgttcctagagggaggaagagatggcaaagggggaggtgccggcgatcgggattgacctgggaacaatgtactcgtgtgtcggcgtgtggcagcacaaccgcgtcaagatcatcaccaacgaccaggggaaccacaccacgccgtcctacgtcgccttcaccgacaccgagcggctcatcggcgatgccgccaagaaccaggtcgccatgaaccccaccaacaccgtatttgacgcaaagcgattgattttatagcaaacaactacaaaatcgtggtagaagttgaattgcttctgtttctgtgggaacagtaaacactgaggtaattccagtggcatagcttcgatgctatgtatgactttctgaagaaaaactgggagatcacaagatgggt

SEQ ID NO: 35190 - DNA, 2984 bp, Zea Mays
cctctctcccctctgctcccgcggcccgcgcagcgcacagcatacagcgcaccgagctgcggccaccgcagcgaacagcaaagcacctccgactccaagtcgcgagagccttctcattcgtcttcctcctcttccacccatcctgcctgctcacttccgttccgtagtccagctagatccccgggcaaccgatccaccgagaagcttgtggttgtggcggcggcggagagggaagcgggaggtcggaggccaccgtgcgtcggaggtggacgagggagcgaggcggcgccagaccgaggttgcgtcgggctcgatttctactgggctgctgtctgctgagtttacggaagtgtttggccctagaagagttgaagataaggagtggagctaggtttaaactctggtgacttggttgttgcgtgcaacgaatcaactatgctgagtttttctgtagagtaacagaaattggatcaattcaagtagatggaggtgaattcctctggcgaggaaactgtggtaaaggtaagaaagccgtacacaataacgaagcagcgggagcggtggacagaggctgaacacaaacggttccttgaagccttgaaactttatggcagagcatggcagcgcatagaagagcatgttgggacaaagacagccgtgcagatcagaagtcacgctcaaaagttcttcactaagttggaaaaggaagctatgaacaatggtacttctccggggcaagcccatgacattgacatacctccaccacggcctaaaagaaagccaaacagtccatatcctcgaaaaagttgtctcagctccgagacacaaaccaaagaacttccaaatgacaagtcaacaaaaccaaatatgcccttgagcaatgggcatgtaaaaatggtaggcgatgcatctcttcagaattttcaaaggaaggagttgtctgaaaaaggaagtcgctcggaagttcttaatctcttccgtgatgccccatctgcatcattttcttcagttaacaaaagctcttcaaatcatggggcacccaggaggaccgaggcaagtaaaacagaaagccgagatatgtccatcatggaaaataattcttttaaccccaacacccaagaggatgtaaaggtgatcagtgatcaggaaatggaaaggcttaatggtatccagatcagatctaaatgtgaacattctcatgaggggtatttggacatctcaacgcaacaaatgaagctaatgccaaagtctgtggagacaacatatgtggatgaacaaactgcaagagcttcacacaccctagcagagagcgacgggacagctagcattccagtgactgtacctgaaggaactcatcctgatcaaacaagtgatcaagtgggaatcaatggaagcatgaacccatgcatccatccaatggtttctgctgacccaaaatttggtagtagtgccacaccacagactttccctcataattatgcggcctttgctccaatgatgcagtgcaactgtaaccaagatacgtacaggtcattcaccaacatgtcatccaccttctccagcatgcttgtttccacgttgttgtcaaaccctgccatccatgcagccgccaggctcgcagcatcatactggccagcagctgaaggtaacactcctattgatccgaatcaagaaaaccctgcagatggcgtccaaggaaggaacataggctctcctccaagcatggtttctattgtagcagctacagttgctgcagcatctgcatggtgggcaacacaaggtcttctccctttcttcgctccacccgtggcttttccatttgtaccagctcctagtgctgcctttcccacagttgatgttccacgaccttcagagaaagacagagattgcccagctgaaaatgcacagattgaatgccaagaagctcgaaaacaggtacagttcgaaggtttaagaattgctgcttcttcagagtctgatgggagtggaaaaggcgaggtgtctctccatacggagttaaagctatctcctgcccagaatgctgatgccacacctaccacaggagctggcacaaatgatgcattcaggaataagaaaaagcaggatcgctcttcatgcggttctaacacaccttcaagtagtgatgtagatgcgggcaatgttcctgaggaggacaatgctaatgagaaggcgaagcaagcctcctgcagcaactcttcagctggtgacactaaccaccgcagatttagaagcaatggaagcacaagtgattcatggaaggaagtttccgaagagggtcgtctggctttcgatgcgctgttcagtagggaaaagcttccgcaaagcttttctcccccacaagcagtagactcgaaggaggttgccaaggaggaggaagatgaagtgaccacagtggcagttgacctcaacaagaatgccacaagcattgatcatgatgacctcgacacaatggatgagcccagggcttcctttcccaatgaattgtcgcacctgaagctgaaatcgcgccgtacaggcttcaaaccatacaagagatgttctgtggaagcgaaggaaaaccgggtgccggctagcgacatggttggtaccaagaggattcgtcttgatagcgaagcatccacataattgatttcttcaaagttatatttacatctaagctactataggacttcagatcttgcaatgcagtgcttcattaaaactcaatctgttgtgtgctgtattttaatgcttgtcaagcagcccgctagactgctttaaaaccttatctcgtagagtctgatttaagcatcatgcaactatcaaacttttttttttggtcaaaatgtattttccttatgttttatatttttggaaaggaaaataattgaaatattatttattttgaaggctcatgcaaaggtttatttgatcaaggtgtaggataggctgagcgagagggtgaacattatgactaatatagg

SEQ ID NO: 35191 - DNA, 740 bp, Zea Mays
ttcttctactagctattgctgaggagaccttggcagagtttctgtcgaaagcaacaggaactgctgtcgattgggtgcaaatggttgggatgaagcttggtccggattccattggaatcatcgctgtttcgtacaattgcagtggcgtagcagcccaagcagatcaaggtctggttccagaaccgcaggttgttgcccatttcggagcatcatggtgtgtgatgtccctgtccatgaactacaagtttgaggagctggcgcagacccaccccgaggtcttgttcctctacgtggacgtcgacgatgtccaggtgcaacctgtatggaaatcacccgacctcagaaaggcccaacagaaatcacatgcttctttacctctggtgtccgtgctactggcccaagccgagggcagtcttggctccaaaaccaagtgggaaagaaaccttcacctcaaatggttctcatggaccctagaattgaggcatgttgaggtgtatgtccaaatacatatgctggaaaggtagtatatcggctgcaactgtttgtcagcagaaccagctggtggagacgatccagagccccgagttatggttgctttagacaattcatctgaacccgtcctgtcccagccctcacccaattaagcaattttgatgagcaagacaatgtcccaaacacaatcgtgggagcagcgcacggacatgtacatgagccccttcgtacctatggttgcagtgcag

SEQ ID NO: 35192 - DNA, 431 bp, Zea Mays
catctgtggctggcacatgggttgtcgggtttgcgccatgggcgatgggtctgctcaccggtagaaggtatgagagtgagggcgccgacgacggacgacgataatgcgagcgttgcccacgtgggtggatgggtcgcaggcgcgtcgtattcgtgcgaacaaggcgcatgcacggtccatggagggagtgggcgacatctcgtcggccgtcggcgttgaggaagaagacgaggcccgccggtaaggcgtaactacttctattttaaagaccatgaaatgtattaaattctctctatcaacattagtactactgtattggtgtacatatgtctatagagggcacgccttagagcaaggataataatatagccggttgctggcagaaaaaattgttgcaaccaacctcatagcccacttgtataatagttagc

SEQ ID NO: 35193 - DNA, 1840 bp, Zea Mays
cctttgatcatttcgtttgctggacattggatcaactggtgctgttatacatagaaaggatttcattttaaattctcatctatatttggtggtgccataatcatttttccactagcgtttggcaataatgtcggagagcgagttagcagtaataaaaccagaggtgttgaagacatatatctggcttcagtgctttgatggttccatacaacaagtggaggaggaggttgcaatgttctgccccatgatatgtcaggaaattgtgaaaaatggcacagggtcatcaaaaaatcatgctattgctctcccggaaagagttaatccagccaatttgagtttgattcttgactactgtcgatttcatcagatcactgggcgttcaaacatggagcggaagtcctttgatgaaaagtttgttaggatagaaacagaaagactctgcgaattgacttctgcagccgacagtctacagttaaagccacttgttgatcttactggccgagcgcttgctcgaatcattgaaggaaagacacctgaggaaattcgtgacattttccatttaccagatgatttaacagaggaagagaaattggagcccctaaaaaatataaatgatggtcctgctaggattcgcctactgaaccggttgtatgccaagaagcggaaagagctccaggagcgccataagctgaaggatgttcaagtacagaaagagcaaaaagatgagagatctttggatgagttacttagttttattaatggggatggaggtatagctacagttcaggaggcaggaaagctaccaagagtaagaaaaagaataaaaggaaggatcatgttgagaaccccccaaaagctgactctgagcctgtaaatgcgaatccagatatgcaagatgatgccgagtacccttttgaagatgctgacctcgatgatggacttgatcctgcaatgaaagaagagcttgataggtttgtttttaacatgcagagaagttgaggcctttgcgaagaggttggattcagtttggaaggagtcacatattggtggtaatggttctgcacggagatttcctgggtttaatcacatgtgagtgttaagctggtaggatcagaaggcagaagcagaggagatttgtggacatacagcctggaagagagtaaaaataccaaacagtcgacttgctcctgtgtgtttgataagggcatgtacaaccctgaaatcatggatcggttttgcgaagtacaaaagacatgttaagagactgtataccctgagcctttggatcataaatgtaagtaagaggcaatgtgtgtagaattgtgtagagacagtctcttcgcggaaagagagcctgtctattgtatttttttcaattaaccctcaagagacttcatattgaaagaggttatacatgtcagagccaagcatgcagacatgctattttgttggggaggaggctgcctagttgggatgaagcttagcatggttcaaggaaaaagtgtagttttttttctttggaaagggaggattagaggtctgtcttgtctgtgttgccagggaggaggctgcctagttgggatgaagcttataatgcagtatatagtgtaaaacagtgttttgaatgactatatggctgaactgttggacacagtttgtatcaatgaaatttcgttgattcactgtattgtggtggtgcacataaaaaatgtcctttttttggctgaccttacgtgggttggaatatactataagcacgtgttcttatttataattaagttaaacaacattttatcgtatatatcaataataatagaattggatagatgaatgatagaag

SEQ ID NO: 35194 - DNA, 1999 bp, Zea Mays
catttctatgacaaccatcttaataaaaaaaaaaccccaccgaagccgaaaaagaaaaatcctcgccgacgttcctcaccacggcgacggccaccgcgacctcggccccgacgttgcctacggcagccaccatgtcggcgagctccgttgtccccacgctgctgccagatgagcggcccgacatcctctcactgctcgacgccgccgcccgcccgctcgccgacgtcgtcgccgacttccttgctcggttcccccgcgagcgccgcctccgtgtctgcggcgccctctgcttcctcctcgaggacaagatgatgctccatcctactggccggttaattgcatttgcaattcttcatcagagttattcgccgcagacagcaaatccatatattcctatattgttaaatgcagcctgtgatgaaacgtcagagaaatcagaacgggcgtttgtccaactattattgacttcatctagtggaaatagtaataacgaggtcctgaatcagtctgcccttgattacataaatggatctgtttcagcatctcaggtctttttgcctcgggaacaacttgagaagcaatactgcagtactggtgtacattcctcgcctcagactagtagtttcacagctcctgcagttagaagtgctataccagatccagacgtccgtcaaagttgtgcaaattcatcagaaaatctgcgtctgatgatagagatactactatttctgttttactcgaagacataccaggggggaggttgggtccgcaatggattcggcccacacccccaagacttcctttatttgatggggagctacaatggctgaaccctgacaataaccacgagctattatgggattatagcatgtgtgctgacacgaatcgaggggctgctatccgagatttgattgcaagagccttaaaaggtccacttgcacctattcaacaggagcaagtcgtagtagaactggcaaaggatcctaaactggtttattattgtgggatgactccacagaagcttcctgatcttgttgaacacaacccactcattgctgttgaggttctttcaaagctaattcactctcctgacatttctggttactttgatgttcttgtgcacatggaaatgagcttgcattctatggaagttgtgaacagactcactactgccgttgaccttccaacagaatttgtccatgagtacatcacaaattgtatccaatcatgtcaaaacataaaggataaatacatgcaaaacagacttgtgagactagtttgtgtttttctgcagagtcttatccgaaacaagattataaacgttcaagaccttttcatcgaggtacaagcgttctgtattgaattttcacggataagggaagcagctggtttgttccggctactcaagtcgttggagtgaaagaattcgtgtgttttttacttgccgtctctgtaccatactgcatcgtgtatgtttctacttacattctctggaccatactgcatcttttttccccctaatctatgtacatcttcattgtcatggttaagtcagatgcctcaagggcattggatgcgaggatcatgtgttgtattgaaaattttccatggaaccatttttggaactttatgggctgattgctactaagatttcgagttgtcaggttgtaccgacttggaaagtttgaagtttgcctgttctggtagttctgtggccactgcccttgaggagggtgttccggtgtgttacgtgcattgtctttgactcgttgcccttgaaagagtggccaaaacgagtatagcaagagcagaatctcaaattgttggtgcttaagcttgtactgtgtaggctcatttgtgctttggtaggctctttgttttgtaacgtaaacaacgctccaatctatttgatttaccgttcttgtcaagttacatcatgcttgtcggtcattgttggttatatatatgcagacaagatatcaagaaactctatacgttc

SEQ ID NO: 35195 - DNA, 1357 bp, Zea Mays
cagctcaacatttgatagtaaatcccagatatggaggtagtccactaaagctccaactggtagagctcctatgatgtctgaaatcaatctcctattaaaagtcatcaggatttctccttttgccaaccgactctcatttgatgcaccttctgctgttcaacggttgagatgcttggcaaactttgaagccttaaaattctctaaaccaattgtatctttgtctgaaaccttagtttctcgaatgagagagagaagtgctgaaagcgatggaaaatatatctcagtgcatcttcggtttgaggaggatatgattgccttctcatgttgtgtttatgacggtggtgatgaggagaagaaagaaatggatgcagccagagaaataggttggagagggaaatttactaagagaggacgggtaataaggccaggagttatcagaatgaatggaaaatgtcctcttacacctttggaggttgggttaatgcttcgtggaatgggtttcagcaataagactgcaatttttttggcgtctggaaagatttacagagcagagaaaaacatggcttctcttcttgaaatgtttcctctcctacagacaaaagagacactggcatccgaagaggaacttgctccattcaaggtggaaggcattgaagcggcacttgcttaatatgagagcacacagtgatgccaaggggattgaaatgaaaagaccaagcgaatccatatatacatttccatgtcctgactgcatgtgccgcttgaacagaacagaacactctaaatccaaacacagtagatagtatctcatagttgcatttccagactaaccctattctttctgacatccactttagtctgttcattcttcatttgctgtgcggcttttcacttcatcagcaagcatactcgccagttgccacagcattgagagcaacctattctccgtatatagcggtttttccttgtatagcatatgccagaataaccccagattcgtccgtggagtattaaaccaattgtgatgctaactatacatcatctgactataattctcaacaaccgatctggccccagtaggacaatgaagtatcaaatgtttttgggtagtagtattgctgttgtacatggttcattagcagtctgtcatcatgtacaaatttaaaatggtaaacaggcattgtaaaaaaattatcttgccctaaacatgggcccatagcctctctgtattcttttagctaggctttcacggttgtaactgtgtcttacacttctattcacaattctaacaatagaactgctcagtgcaactttattcttgcttcatcagtatagtcgcaatctttcttcttttttg

SEQ ID NO: 35196 - DNA, 6251 bp, Zea Mays
caactggctagggccatggtacgtgcctgcgtaaaagaaaaattcagagatggtcctcgactcctggtgggtggtggcgatctcccagctgaactgaaagagcaagcgtgcgtgtgagacaaccaggtccgatccgcccccgccgagccgaggacagcagcgggggctctcggtctcctcctaggctcctacagatctcgtaccccgtcacagatctcgcgccctctccatcccatgcccaccccccctcgtcggatctgaccactccgcccctcctcccgtctccgccgccggagctgatatccgcggtcatggcgggcgccgcgggcgggttcgtcacgcgggccttcgaggccatgctcaaggagtgcgctgccaaccgcggcaagttcgccgcgctgcagcaatccatccagtcatacctcgatagtatcaagggggctacagcagagggcgcggtcatcaccgaggcgctcgggtcagctgggcgcgtgctcgacgggccgcaggccgagctggtgctgcagccgctccgcctcgccgtcgagaccaagcacgtcaagctcgtcgagcccgcgctcgactgcctccacaaacttattgcttatgaccatttagaaggcgatcctggtttagaaggtggtaaaaattccccaatatttacagacatcctgaacatggtatgtggttgcgtcgataacacctcctctgacagtactgttctccaagtcttgaaagtgcttcttaatgctgttgcttcaaataagtttagagttcatggagagccattgcttggggtcattagagtatgctataacattgctcttaataggtacctgttatatcgctaccttcttgtttgcagtatgttgccttgttgccctttggaccatgtatgataatttattcatttgtattttcttagcaagagccctgtgaaccaggctacctcaaaggctatgttaacccagatgatcagcattgtattcaggagaatggaatctgagcaggtttctgtatcgcccggaagctctgtggttaaagatatgccttcatctatcacaaatgattctgaaaatggagaaatatctactgatggccaagatgaggaaaaggttactctgggagatgcattgtccatgaatcggccttctgaagctcctccaacgtctgttgaagagcttcagaatcttgcaggtggagcagatattaaggggctggaagctgttctagataaggctgttgaacttgaagacgggaaaaaagtgtcacgtggaattgacctggacactgtgaatataatacagcgtgatgcactattgctctttcgaactctctgcaagatgagcatgaaagaagaaagtgatgaggttgctaccaagacaaggctgctatcacttgaactgctccagggattgctagagggagtcagcaatgtgttcatcaaaaattttcacttcattgattcagtcaaagcatatctttcgtatgctcttctgcgagcatctgtctcttcatctccagttgtttttcagtatgcttgtggtatgttttcagttctgttgctccggtttagagagagtctgaagggggaaattggtgtcttctttcctttgatagttttaaggtctctggatagctctgatagccccctcagccagaaggctagtgttcttaggatgttggagaaagtttgcaaagatccccaaatgcttgcagatgtgtttgtgaactatgactgtgatcttgaggggccaaatctttttgaacgcacggttagtgcgctatcaagaatagcacaaggatctcaaattgctgatactaactccatcgtgtcatcccaaacagtttctgtaaaaagctcctctctccagtgtttggtgattattctgaagtcattggctgattgggagcaacttcgaagagattcctcaaagcaagggagcattgttgaatctcatgaagaggatgcttcaaggagattgacaactgatgagatgaagaaccaagaggatggtcggaatcagtttgagagagccaaagctcataagtcgacaatggaggctgcaatctctgagtttaatcgtaaaccaagtaaagggattgaatatttgttgtcaaataaattggtagaaaataaggcatcatctgtagctcagtttctcaagagcaatcccagcttggataaggttatgattggtgaatacttgggacagcatgaggagttccctcttgctgtgatgcattcctatgttgactccatgaagtttatagggttgaaatttgatgctgcaattcgtgcgttcctgaaaggatttcgccttcctggtgaggcgcagaagatagatcgcataatggaaaagtttgctgagcggtactgtgctgataatcctgagcttttcaaaaatgcagatactgcttatgttcttgcttatgctgttataatgttgaatactgatgcacataatccaatggtgtggcctaagatgtcaaaatcagattttgttcgtatgaacactgcaagtgatgcagaagaatgtgtcccaaatgagctcttggaagaaatttatgattccattgtcaaggaagagataaagatgaaagacgattctcatgatacttcaaaatccaccaagagacctgaaacagaagaaagaggccgtcttgtcaatattctcaatttagcccttccaagactgaagtcagctagtgatacaaaggcagagagtgaaaagatcatcaaacagacccaggcacttttcaagaaccagggacagaagaaaggtgtttttcatgttgcgcagcaggttgagcttgttagaccaatgcttgaagctgtaggatggcctttgcttgcaacattttctgtgaccatggaggaaggtgacagtaagcctagggttgtatcatgcatggaaggatttcgtgctggtatccatcttactcgtgttcttggaatggacaccatgcgctatgctttcttgacgtccttagtgcggtttacatttttgcacgctcccaaggagatgcgcagtaaaaatgttgaggcactgaggactcttcttggtttagctgacactgatatggatgctttacaagatacttggaatgctgttttagaatgtgtctcaagactcgagtatatcacttcgaacccttcaatttctgcaactgtaatgctgggatcaaatcaaatatcgagggattctgtagtccaatcgctgaaagagttggctggaaagcctgctgaacaaatctttgtaaacagtgtaaaactgccaagtgattcaattgttgaattcttcaccgccctatgtggtgtttctgctgaagaactaaaacaaacacctgctcgtgtctttagcttgcagaagcttgtagagataagctattataacatggctcgcattcggctggtgtgggctagaatatggtctgtgttggcccagcactttattgctgctggaagccacaatgaggagaaagttgcaatgtatgccattgattcactaagacagcttggtatgaagtacttggagcgtgctgaattaaacaatttcacatttcagagtgacatactgaaaccttttgtcattttaatgaggaatacccacaactcaaaaatccgaggtttaattgttgattgcattgttcagttgatcaagtcaaaagttggtagcataaagtcagggtggcgttgcgtattcatgatatttactgcagcagctgatgatgaggatgaatcaattgttgagagtgcttttgaaaatgtagaacaagttatcttggaacattttgaccaagttgttggtgattgcttcatggattgcgtcaactgtcttattggttttgcaaataacaagtgcactcctcggattagtttgaaggctattgctctcctgcgtatatgtgaagatcgtttggcagagggattcattccaggcggcgctattaaacctattgatgttgttccagaggccaattttgatgtgactgagcattattggtttcctatgctagctggtttgtctgatttgactttagactccagaccagaagtcagacactgtgcactggaagtgttgtttgatttgttgaatgaaagaggacataagttctcttctcccttctgggagagtatttttcatcgtgtactatttccaatttttgatcatgtaaggcatgctggaagggatgggctttcttcttctggggatgattggcttcgtgatactagcattcattcgctgcagttaatctgcaaccttttcaatacattctataaggtagcatgtgttcttccttttagttgcttgacaaacatcctttgtataattcagaatataagtgtgatgaaactggtcatccgctacttctatagatatcacattgaaacttgtttggttggccatcgtctgactgtggcacttacaggaggtatcctttatgcttccacctcttctcagtttgctgcttgaatgtgcgaaaaaaacagaccaaactgtcgtttcaatttctcttggcgctttagttcatctgattgaagttggtggtcaccagttcagtgatggtgattgggaaacattattaaagagtattagggatgcgtcatacacaactcagcctcttgaactgctcaattcattaggattccataaatcaaacaaccagcagttactttcaagagaagaaagcaatgcacatggcaatagttaccatggcagccggggggaaccctccatcgttaataatggtgagcatagtcatgcagaggcaggtccacaaactagcctggagaattcggaaggtaccacgagcagaggtttaccgtcaccatcagggagaacacaacctgctgtttccccacgtggccaaagctttggacaaagaattatgggcaatatgatggataatcttttggttagaagtcttacatccaaatcaaaaggtcgagtcgatgatattgctccaccctcacctgtgaaggcccctgatgatgatgagacagacaaggctgaaggggaagagagccctatgatggaaactgtccggagcaaatgtatcacacagttgctgctgctcggggcaattgacagcatacagaagaggtattggagcaggttaaaagctacacaacagatagcaataatggatatcttgctctcactgctagaatttgcttcttcgtataactcaccttcaaattttcggacgagaatgcaccatatacctctagaaagacctccactgaatcttctccgtcaagaactagttggaacaacaatttatttagatatccttcataagtcaacagtggagcaggacaaaattgactccattgaggaaacaaatggtttaaatgtggaatctggtgaccaggaaaagatcaagtacctagcagaagggaagctggtttctttttgtgggcagattttgaaagaggcgtctgttctccagcctagcactggggaggctgccagtgcagacatacatcgtgtattagacttacgggcacctgttattgtaaaggttttgaaaggaatgtgcatcatggatgctcagatcttcagaaggcacctgaaagagttctatccattaattaccaaacttatctgttgtgatcagatggatgttcgtggagcccttggtgatctctttagcaaacagcttactccactcatgccctgaagtctggcagtatttcctcccttgcatagatcttgttggaacatattcttcgtcagcatttttgtgcaaacatggagcaccggttgggtgcttgacatccttaacgcgctttctggtgcaacagctactccctaggaacttaagagcttgatcagcgggaacggcaggtccctaggccacatcttttttttttggatgacgcaagggaagtagcttgactgatgcgcacaccgtgtttttcctagcaggcttgtactttggagctatttatctgtgcccggacagggatgatgcttccattatacagtagagtagtgttggtaatatgtacacattgttgagaacgttgtacttgaggcctgttgttattatacggcaatagtagattgtttgcggcaagcctcgttttttgtgcgtctaattctctgacttgcagaattgcggtggcaaatacccattgccctccaagttgtgcgttagcgtatttatccgtagttgacagcaatgaacatattactactgctttctgtattttctattaacgcatgcacatagtttattgg

SEQ ID NO: 35197 - DNA, 1125 bp, Zea Mays
cgccaccctcgccctcaacaggtgttgctctctacctacgaggaggaagtggagcagatgggtggtgggtcaggatctcaaggtggcggtagcaacaacgacagggggagcaaatcgatttctgacagaaaaaacagaacgagtgggtaaaccttgcgatttttcattgccgcaagttcttggatctaaacaagcctggaaaaaataaaggaaaataacaaggcgttgttgggatggattgatgaggacaattctcacgaacgattgaactgccgctcagctcacctgacagatctgtctgtgcgtaagtgccggtatacaaataccttccaagagtaccacccagtgcaggcaacgttctcggtcaaataaagcgccattaaggaatcacttgcataaattgttgccttcgaggtgccatacttgataaagaatggaactggcaaagcttttggatcgtgtgccaatacctgtgaaagagggcttggaggaacccagtgcaaagatcaatggtctgctgcaagcgtatatttctaggttgaaactagaaggcctttctcttagttctgacatcgtctacattagacagtcagtggcgggcttggacctaaatcgatcagaggcccatcattaaagaacaaggttagtatttaatttttttgtcaagccaaatggtcgcaactagcaactaatgtagtttgcacaagttcagggatggtcatgccccaaccactgcctgtaattctatcacatctggatatatatcccattttcagttataacggaatgtccctcactccctgtgtagttgatctcttctcttaccaagttatgttctctgaagtcatagctcctcaagaagtcaagatgtggcggtctatggtgccctttgtgcacttgcttcttttgaccgttcagacctgaagaacaaagtcatcgacaatatcaacttccgtaactttctagagctggtgcctgaagtaagggagctggttaatgattttaatgcaagtcgctatggatcttgcttgggtcatctggagaagctaaagcctaacctgctcctggatatccatttgcacgagcatgtagagagtctgtatatggatattcgccacaaagcga

SEQ ID NO: 35198 - DNA, 3441 bp, Zea Mays
aacaaaacaacgcggcggcaccacactaaaaatccaccactcccgagcagcagcagcacgctgctacaaaaggcacgagcacaagcaaggcaaaccctctagcgagagcttgctagccacaccagtgacaaagagtatactcgcccgatcccgccgcgcgccgcagctagagcctagagctaggaggtcgatctgatcgcatcggccggggtctgccgccctgcccatggccggcgccgccggtgacaggtcggaggaggacgtcggcgccgactggccgttcggtggcgtcgacgccttcacggagtactcatcctttttcgcggagcccggctggccgggcggcctagccggggaactcatcccggtgctggatctgcccgaggcagcagcaccgctgcccgcccaactgtccacggagccatcggaggagcctgcgcccgccaggtcgggggacgccggcgcgtcgtcgagctcgagcggggacggcgccgcgccggggaacggcgacggcgacgacgatcggaaggcggcgccggccgccgaggcagcgtaagtgcacgcgcggcagcttctgcacctaaggtagcatacgccggcgagcggcaggcagcagcagcagggctatagtttcggagcaccaccgcgtgaaggtaagcgagactccgcaacgcgtttgtgcaccgcgcgtccgggacgggacgggacgggaggggcaatctcgtcaaataccagcgggcgcgggcggcggcacatgtccacgcagatccgcgatttgcgtgcgcggattgacccaagtttcacgcggtttcatttgttttcttccccgtctatctactctgttctgccttttatttttaattctgcgtgctgcatttccgtatatatactgttcacgtctccgtatgcatatgcacgagattgttttgttttgttctgttcggattcgaacgcagtctgtgcatcttcattcgcgtgtgtcaaatagatccaaatcaacggtttcatttcaaaggtgcatgtggtcaaactaatggatcatatatatacactccaaaacctgctccaaaatttgttcatcgaagagaagggaaaagtacgcatgcggcatacatgtatctgtcatgtgtatgtctacgactcatctagctatgtgtctatgttctagcgcggggcgacggatggagaggttttgtgctttcctcctcgctcccaccgtccttgctgatctgtatgctgtcatcagcaacgctggcggcgagcggcgtccggtgggccgcggtgcggccggacggcgtgtgtggtcacgtcgtctgcccgccgtcctggtcctggtcctgcccctgccatgatcagccgaccaatttccttgtcttacctacctttgccatgttcagtgcgcattgaatcttgcactccagcctacgcagcattaactgctcgcaggcatggatctgtcgaaacgctctgtactgttgatccagtattgctgctgctcatagacgatctgtccactgtatgaactgccgccagtactgtcttcgtaccaaagtaaagtccaatcaaatctacgtaaaagtatattgatgtctgtaatgtatgaacttgcatatgatgcaggggtaggaaaccggcggcgaagaaggggcagaagcgggcgcggcagccgcggttcgcgttcatgaccaagaccgagctcgatcacctcgacgacggctatagatggaggaagtatggccagaaagctgtcaagaacagccctttcccaaggtgcaccaacagcaaatgcacagtgaagaagcgcgtggagaggtcctccgacgacccctccgtggtcatcaccacctacgagggccagcactgccacagcatcggtccattccagcgcggcggcggcggaggcgcagccgcggcgcggtaccacagcgcggcggccgtcgcgctggcggagcaaatgtattcgtcgtcgacgacgtcgtcgttcatcccagcagcgcggcagcagctcttcagcttgccgccgttgcacccgcagagctccccgccgtcctcggagacgacgccgccgccggtcgttagctcggtgactactacatcttttcagcgtgctaacgacggcgacgagctgtggcggacaggcacaggctacggctccggggtgtccgtggcgcagtcgccgtcaacgccaccatcagtgcctccgccggtcgtttcggttcagaaggcggggctgctggacgacatggtgccccatggtgtaaggcatggcaccccatgatggtggcaaaatatggtaattaaagaaactgagctaaatatgatactgacttgctgctttctatttggtgtgtacgtagtacggagtatacgttgtaggaggaataataatggcacttcatgcatgctgccacacgtatacgtatatatatatgatcgtattcatgcctccgctggtacgtacacatgtggactcagtggcttaggatctttttcaacgacatatttcaattgtagtgcactacaaatactagatcgagtagttggcacttggcagactagagcacatttatacaagtacagatctagcatatgcatatatatatatgcatgcatacatgtgatactcccaattaagttgaggtttcttatggaatagttgtatgcgagttattttatgtaccttattactattatatcgatcttctctattgcatttccagctgccctggttagctttgatttgtcagtcagtccctctctccacatgctcatgcatggctgaaagctactatagctactagctagggaatgctgaatgcaaaaatgcagcacatacataaatgtaacgccggccctatattcctttcaacgactagttggttttcgttggaatcctctaaaaaatcgttataaacaccaatcggaaaggaaagacgtacttgtgttttgcattcatacttgtgcacatgtatatagctaggaccatttcctatcttatccttcagcgtatagagtgacttgacttgacttgacctggagtctgatcgatctaattcagcttctacgtttttttcagacatatatatacctgtcggccgtaccagcaagaggcggataaagtgatcaaccagctagcagctagggttttctcctgctggattcatcagtagtagttagatttatctattactctaccagacactgcatgcatatatatactcagcttatctgttcagatttgcttatattcagtgtcactctccaacaatctccattgcacctacatgtggatgtgtagcagtacttgtatttcttgtcaaaaaatcagagaggtatatctagaagcttcgcatgctcccttcctctataaaaccaacgtctctgtatttataggaagggttcacccttttacatgaagaattatgcaactagcaggaccgc

SEQ ID NO: 35199 - DNA, 427 bp, Zea Mays
ttagcctctgtttgtttcgactttttgcagcttctgaccaccaaaagttgctgcggactgccaaacactcagcttttcaaccagcttctatagaattcgtttgtgtaaaatcattcaaaatcaacataaacatataatcggttgagttgtcgcaatagttgtaatacgtcactttatagatcctgagccccatggacaactttatcttcctccgcacgtaatcctaatgatacttagattttctacacagctatattttcggaaaagctggtcagaaaaaagctgaaccaaacaggtccaaagaaacctggttttgtaagacagtgtaagtattaatagaggcattgatggttttagtgggaaaattgtgtctccaaaaaaaatcatttatgaaggcatgcctctgaaaatcactggtaaacggaag

SEQ ID NO: 35200 - DNA, 2544 bp, Zea Mays
ccagccagccacgcccacgccccggcagacgggggggcagtgacgctgatgcgtcagtgccggcgagggccagcacgtccacgtccaccaggcattcgggaggaatctgggcggtggtggagttgaaggggacgatggcatggaagatttcgatgctgaaaggaagtccgggatgctgcacatgttctgcaaaacgcttacggcctctgacacaagcacgcatggagggttctctgttcctcgccgtgctgctgaggactgtttcccgcctctggattataatcagctcaggccttctcaagagctggttgccaaggatttgcatggagccaagtggaagtttcgtcatatatataggggtcagcctcgtaggcatctcttgactactggatggagttcatttgtcaataaaaagaaactggtttcaggggatgctgtgttatttctccgaggtgatgacggtgaactaaggctgggtgtgcggagggctattcagcttaaaaatgaggccctttttgaagatttcaatagtgacagcacaaagcggcattctttgacggctgtagctgattccttgaagaacagaagtgtttttcacatttcttacaatccaagagctactgcttcagaatatattattccatacgctaagttcctgaagagcctcaatcatccggtctgtattggagcaaggatcaactttcagtgccataatgaagatgttagtgaaaggcgatctggagtggttgttcgcattagtgaaatagatcccatgaaatggcctggctcgaagtggagaagcctgctgatgggaggacggtgctgaatgtaatggccaagatagagtatctccatgggagatcgagatagctggtggttctgtctctgtttctcattctctttctgcatctagttctaaaagaaccaagttgtgtcctcagggaaatttggacgttccagcaatgtgtaagctctcatagcacaagactaatgcctgtatatgtatgctgctatccttttacctctatggtaattgactgtcgcattagatgttacagggaatggttgtactgactccatggaaactggaaagttacccagggtcttgcaaggtcaagaattgatgagttttaggacttgtcatgttccgtgtgctcctcaaactgctgaggctgcaaaacttcaatcttctgatgctagtaggttccttagtaatgcacatggctgcgcattgggtggtccaacaagcagactcgcagtgcatagctctggttttacctaccaatgtgtaggcttcaatgaatctattggattctcagaggtcttgcaaggtcaagaaatttctcgggcggttcctaagttccaaggaatgatgtcggaagcttgttcactgaaagacagatatgggctgcatagttatatgcgtgccccagttgctgttaatggattatcagctacaactcaagaatgttctctcgcactatctactccgccaggagcacaagtgccctctctctaccctggtaatgttgttaaccgaactgtggttccacaacttggactggcaaggaagtttggtggtggaggtacaaatggccagcagtctggcccatttgataggccgagggaactttggaccaggccacagcatgaaacacctgaccaaatgaacttggatcagtttgagactagaagaccttcagtgcctgtagatgctgctaagcttgggtctggtggaggggaggttcgcaaaactagctgcagactttttggtttctccttgactgaaaagatcttgccagcagatgatgatgacgtcaaggaagtgagctatgagactgagtgccagaacccacggatgctggacctgttcgggtacaactgctcaacaccgagtgccgctcttccagctctgtgtgctgccgccccctttggaatgtgatgctgcttcgaatctttcgataactttgctccatgtactcttagaagttttactttcccagtaccccagtgtagtcataagctgcttttgacatcattccctttggtctgcctcaagttaagcagtcatttgcacaagtaaacgaaggttcgttggtgaaccactcctcgacatgcctcaccctgtcacccaaactattgtggttagtctcaggatacccagagacaccacattgtaacttatgtcgatgatccttcagaactgttgtgcgatgaagctaacaatttgctctaaaagtactttgcttgctctaaaagtaccggctatgtatatttaaatcagcacctgtatgagtttttttagccctcacaagccctggttgcagtcgactaggccgtgtgattgtattagtatgctatctttttaaactgtcgcttatgagtctttattctagtgcattgtgtgaatactctgttcatcgcatgcaagtcttgtcttctgtttctgttggcttggtaggagatactctgattttataacatgtcagatttttattggtcaattcaactttgaccatcaatatacaaggaatttggtgaata

SEQ ID NO: 35201 - DNA, 1505 bp, Zea Mays
gggggctgtgctcctgaatctaggaacatattggctgcggctactccatcgccgctttctccgcctccactcgcgggcctcctcccgggctgcccctcctccgcccccgcggccccgcccccgtcctctcctcggcgcgacaccgttgccgcccccagacccttccccgttgctggttgctgtctctcccgcacgcagccttgtgaacaagccccagcgggccgagcagacgaggagcaaaggagcgagcggagagagaggagtaggcagcggccgtcgacagcacctggcggaaaggcggcggagcagacgcacatcccagcggtggtgcggtagtaagttggttagtgactgcggctccctccagtttttcgaattcctattgatttggagctagcttcagtagctgaatgcgggaattttgaaatggtaatttgggcgccatgagatcagttttccatgcccattttgatggtaaaggaaacggccggatctatacgtgtgacggtgcgagcattaggtgtttgttggaatgcatcagatgagatgacacattcatataccgtatatacatatgaatcttgcattactttcagtgtattagtagatagcaacttacactgattgttccgaagttgaatgaacttggcaaaatcctctctatgtgcacatggatttataaagacagctatttttcattttaaaaatagctcagatcatacgaacacacatctggcatacttggtattagtgcttgggcaggtgcaagagaggaagtaccaacgcaatagatttttttagtatatattaaactaatgagatacttttattgagtctatgcaatagattttttagtatatatccagtgagtaatgcatggatatgcataagtttttgcagtaccaatgcactctctgtggttgttgaattttgactagagcagttatgtatgcatggtatacttgtgtgctataaagatatcaaagatgctcttacttcatgaccattatatgattgtacaatttccagcttgctgggaggtttcacatggattgaccattacttggcattaagttgttcttcaatggcgtatttcatggatttacgggctttcatcctgcgtacacatgtcttgaagctttatagacaggcattgcgtatcactcaccgagccccggtacatgctcgagatgagttgaggcagaccgcaagggccgagtttgagaaatatcgccattgtgatgacaaacaaaagattaggtttttgattagtgaagggaagcagagactaaaaggtcttgatgaactgcttgacatgacagggaacagctaatctgagttgcatctttgtctttgcttctgcaatcagctcgctccagaaaccattcctgatatgtaaacaactacattgtttgaaaaaaaaatgttttgataaggaacaacactatatgaacaattttttgtgccttttttataataatataatgtgaatgttttccataatc

SEQ ID NO: 35202 - DNA, 3774 bp, Zea Mays
cggtgttattttagtggcagcgtatctcgtgaaatccaggaaattcgattcactcgaagcccggctgctttctccccgtcgcgaaaagccgcaagccaacaaaaaacacacacacactgacacacacaccaaaataacacatcaaagcagcgggagaggagagctcggattctcgcggagaggaggcggcgtgggcgccggacggcggaagcagaggagtggtcggtcggtggcctgcggtgcagcgtatgtgagagctgctgcggcggcggggacctgccctggcccctgggatgggggtgggaggcggaggcggaggcggaggggaggccgcggcggtgtcggcgccggcgccggcggaggaggcggggaaggacgcggaggatggcagcgggtggaccttgaaggcgaagctgatcgccgtagcggtgctggtgtgggtgctgggggccttggcgctcggggtgttcctgcactcctacttccgccacgcggcgctgcgcaaggcggaggaggggctcgtcagcatgtgcgaggagcgcgcgcgcatgctgcaggaccagttcgccgtctccgtcaaccacgtccacgccctcgccatcctcgtcgccaccttccactacgagaagcgcccgcccgcgctcgaccagaacacgttcgcggactacaccgccaggacgtcgttcgagcggccgctgctgagcggggtggcgtacgcgcagcgggtggtgcacggcgacagggagagcttcgagcgccagcagggctggatcatcaagaccatgaagcacgagccgtccccggtgcaggatgagtacgcgccggtcgtctactcgcaggagaccgtctcctacattgaggggctcgacatgatgtccggcgaggaggaccgcgagaacattttgaggtcaagagcatcggggaaggcagttcttactagaccgttccggctcatgtcgaatcacctgggtgtcgtattgacttttcctgtctaccatgttgatctttcttctgatgccaaggaggaggatcgtgttgctgccaccgcaggataccttgggggatcatttgatgtagaatcattagtggaaaatttgttgaggcagctagctggcaatcaggaattggtggtaaatgtttatgatgtcacaaacagttcgaaccctcttgtcatgtatggatcggaagtttctcttggcaacccctcaccatcgcacatctgcatgctagattttggcgatccattcagaaagcatcatatggtttgcagaaacaagcctcagctcccatggtctgcaatatcttcgtcatctggtgtatttgtcatatgtatgcttgtggggtacatcgtgggtgccgcttggagtcgttatgataatgttaaggaagattgccggaaaatggaggagctgaaaaaacaggcagaagcagccgatgttgctaaatctcagttccttgcaactgtttctcatgagatcagaacgcccatgaatggagttctagggatgcttgatatgctgttagacactgacctaacgtcgacccagagggattttgcacaaacagctcaagtctgtggaaaggctttaatatcactaatcaatgaagtgcttgacagagcgaaaattgaagccggaaagttggatcttgagtctgtaccatttgacctgagatccatccttgatgatgtcatctcattattttcttcaaagtcaagagagaagggaattgagcttgctgtatatgtctctgaaagagttcctgaactcttgttgggtgatcctggaaggtttcggcagataattacaaatttagtgggcaactcaattaagttcacagaacggggacatatttttgtacaagttcatctggcagatcactcaaatcttgcaacagaacccaaagttgagtcagtggctaacgggatgaatggacataaagatgagaaaactgctgtagcaaccagtgtttctctcaacacactaagtggttttgaagctgctgatagccgaaatagttgggaaaacttcaagcttttgctttcttatgagaaaaatgagatgccctatgaaagtgtatctgataaagttactcttgtagtaagtgtggaagatacagggataggtataccattggatgcccaagccaaggtgttcactcctttcatgcaggccgatagttcgacttccaggacatatggtggtactggaattggattgagcatcagcaaatgtctcgttgaactaatgggtggtcagataaactttgttagccgaccacatgttgggagtacattcacatttactgcagctctccaaagatgtgacagaagcgctattggtgacagtaagcctgttatgttgcaccctcttccatccagtttcaaaggtttatctgcattattggttgatagaagaccagtaagagctactgtaactaagtatcacttgcaaaggctgggaattgcctgcgatgttgttgctaccattgaattggctcttggtgtgctgtccgggagaaatggcagttctctaaccagcacgaagcaaccatgcatgttattgattgagagtgattcatggggcttcaagattgatgtacctttacgatctcgactcctggagatgaagcagaatggtccacctggattgcccaaaactatccttctcgcagctgcagaatcgggcaaactcaaagcacactatgcagttgattctgtgatcacgaagcctctgaaagcaagcggacttgccgcttgtctattccaaacacttggcatcacacagtcaagcaacgagagacgcgacaactcaggttcccttcatgggttgctccttggcaagaacatattggtggttgatgacaacaaggtaaatcttagagtggctgctggcacattaaagaaattcggagcgaaggtggagtgcgtggagagtgggaaagatgctctcgccagcctacaagttccacataagttccatctttgtctcatggacattcagatgcccgaaatggatgggttcgaggccaccaagcaaataagggcaatggaggcgaaggcaaatgagcaggcagtcgcctgtgatgattcagaaacggatggcgcgacaagggcggcgagatggcacctgcctgtccttgcaatgaccgccgatgtcatccaggccacccatgaggagtgcacgaagtacgggatggatgggtacgtcacgaagcccttcgaggagaagcagctcttccaggcgctgcagaagttcttggaccctggcatgtccagctaacacccaagtgctgcgttcgttgcaagtgaggcaccattctcctccgttctgtagttcgctaaccatagacgcaatctgattatctgaccccgaagaaagatcgtaaatggcgggctgctcgtcgaccatgccagcggggaacagcaggcagcacgcagcaggggcctttgctgcctgcctgtgcagtgcaggcgccgtgtaaatgtattgtattagcagggatcctgtttatagcgctagtatggacctgcgcgacaatgttggaggagctgcctgcggctgatgcacgtcgagcataattttgttgtacagcttccaccatttttgtgctactgtggcaggcatgctcgctggtgcagtgcaggactggaaggaaaacctgactgcctgagagtagtttttttttgccgtcaacattgcattgggattcgtgatgtattacaatctgctaatgtgcgatataagctcatgtaattggctcagtgcgtttcca

SEQ ID NO: 35203 - DNA, 508 bp, Zea Mays
tagaaaccggccggcccagcccaatgtgacaatgtcttttattcaatcaccagcaaccctagtctctctctcacctcaacctcacgcacaacacaaactcaagcggtcaagcactcaagccagaagcaccagccgccgcacgcatcttcgccagaaagcagaaagctcctgtccttctcctcgtcggcatacggcgtcgagctgccgtcctgccgccccagccacctgtcgctgccgcactgccgccccagccacctgccgcactgccctgctcctcgtcggcgtacaactgccgaagtgccgaccctgctcctcgtcggcgtccgacgtcccttgctttgagcagtagcagcactgctgcacgcctgagcagccagcaagcagtagcaatattattgttgtaatgctatttttgttctttgcttgctggctgcccaacagtccaagtttgtgtaataagagacctttcttgttttgttgaattgaatactttaaagtttggttcaag

SEQ ID NO: 35204 - DNA, 1910 bp, Zea Mays
gtctggctccccgtgaccgatctcgtaatctcatccgcacccgcctggccgccttgcctagccttgcctgctctcctcatgccctggccgccgcctataaaagagcgaggcggaggggcaggcgccggccgttcttctctctccttcttcctcggtcctctcctctccgcatttcgggcggccacttgtggcggcgtagctagcgtactacagctccctgcatggtgatggaggggcgcacgggctcactctacggccgcctcaacaagagcagcacgcgggggttcctcgcctacaccgccgccggggctgcctgcgcggctgtcctcgcctgcttcgtgctctccgccgcggactcgccggcatctgcggcgcgcaacgatggcgagcgcctccgcctgtcctcgcgctcaccgcgcgtctggcccgacctcgcgttcaactggcgggtggtggtcgccaccgtcgtcgggttcctcggttccgcgtttggcaccgtcggcggcgtcggcggaggcgggatcttcgtgcccatgctcaacctcgtcgtcggcttcgacaccaaatccgccgccgcgctctccaaatgcatgatcatgggggcctcggcgtcatcagtttggtacaacctccaggtgtcgcacccgaccaaggaggcgcccgtcatcgactacaagctcgcgttgctcttccagcccatgcttatgctcggcataaccatcggcgtagagctcagcgtcatcttcccatactggctaatcactgtcctcattataatcctcttcgtaggcacctcgtcgagatccttctacaagggcattctgatgtggagggaggagtccaggattctgatggagacacgcgggcgagaagagcaatccaagtctacctgcgctgcaagtgatgtggtcattgatcccagttatggggagcccctcctgactcaacctcagcccaagaagtctgcatgggagactttcatgttcaatctgaggtggaagaatatccttgtgttaatgtctgtctggtcattgttcttggtgctgcaagttctcaagaataattcaaaatcatgcagctctttctactgggtgataaacgttctacaggttccagttgcggtaagtgtgttcttgtgggaggccatgcagttatgtagggagagtcatgcacgacgtatgaatgggaacctggaatgtgtgtgtgaggcctctattgagtggtcaccagcacaactgatcttttgtgccttttgtggccttctcggtgggactgttggtggccttcttggatctggtggtgggttcatccttggcccacttcttcttgagcttgggtgcataccgcagggggctgagaagaagagcacagtcggttggggaaaggccggcgtgcgcgccatctgggagaagagtgctcggtggcccagcaacaacgacgtgcaaaagaagggcaccagggtaggcgatgggggccgccatggagggagcaccacagggggcagcgtgctgggggaggccggcggtgggaggcaccgacgggaaggggggcgtccagtgcaaagcactaggcgcgcggtagcgcgggtcggcggcaggctggcggggaagacgccagggagtggagggggctcatcggtggcagcaggccaaggcggcggtgatgacgcgagcacggcgggatccgacggcgttgatggcgtggactcgctggtgatgggtggaatccggcgggacgacgcggatccggacggcggcgggaaggcacggggcaggggtggggcgcacgtggcacggggcggccgccctaggagcaaaaaccagagcgtaaaatgcttcccgcacctgagcgggcatgagaaatttatcgatttctcgcccttttcgctcgagaaattgaaccctggttga

SEQ ID NO: 35205 - DNA, 3705 bp, Zea Mays
aaaaaaacacgcatcatcccctcctgtccgagatatttgtgcagcgccgcaaaagcgcatatccccccggccctctcgctccgccgctccgtgcgagctcccgctcccgacacgcttcccgcccgccagatcggtcccgcgcgcctcttctgcctgcatccgcgcccgcgaccaccgcttctaggtttagggttccggcagagtaggcggtgagatgggtgtgccggcgttctaccggtggctggcggagaagtacccgatggtggtggtggacgtggtggaggaggagcccgtcgagatcgagggcgtccgggtccccgtcgacacctccaagcccaaccccaacggcctcgagttcgacaacctctacctcgacatgaacggcatcatacacccctgcttccaccccgaggataggccctctccaacaacatttgctgaggttttccagtgcatgttcgattacatcgatagactcttcatcatggttcgccctaggaagcttatgtacatggccattgatggtgtggctccacgtgctaaaatgaaccaacagcgttctagacgattcagagctgcaaaagatgcagctgatgcggctgcagaggaagaacggttgcgtgaagagtttgagagggaaggaagaaggcttcctgcaaaacaacaatcacaaacttgtgattctaatgttattactccaggaaccgagtttatggctgttctttcagttgcgttacagtactacattcatcaaagactgaattatgatcctggatggaaaaaaatcaaagttattctatctgatgccaatgttcctggcgaaggggagcataaaataatgtcgtatattcgtggtcaacggaatctccctggatttaatccaaacacacgccattgcttatatggcctggatgcagacctcataatgttagctttagcaactcatgaagtacacttctctatattgagagaggtagtttttacacctgggcagcaggacaaatgcttcttatgtggtcaggtggggcatctagccgctaattgtgaaggaaaggcaaagagaaaagctggggaatacgatgagaaaggtgaagctattgttccaaagaaaccataccagttcttgaatatctggacccttcgggagtacttagaatatgagttcagaatgccaaatccgcctttccagattgattttgaacggattgttgatgatttcatcttcatgtgctttttcgttggcaacgattttcttccgcatatgccaacactagagatcagggagggagctatcaatctattaatggctgtgtacaagaaagaatttccttcaatgggtggctatttaacagattcttgcacgccggatctgaatagagtcgaacacttcattcaagcagttggctcttatgaggataaaatatttcagaaaagggcgcgtttgcatcagcgtcaagcagaaagaataaaacgggaaaaggcccaagcaaagcgcggggatgatctggatccccatgtcagagatgatcttattgtacctgtttcaaatttccgagggtcccgccttgcatctggagcagtaccttcaccatatgaacagaatggatctcagagagaaaggtacaaccaaactcggaaagctccaagagtatcatcatcaggttccagcattgctgctgctatcgttgaggctgaacaagatcttgaagcacaggagcgtgaaaataaagaagagttgaagtctatgcttaaggatgctcttcgtgagaaatcagatgtcttcaattctgaaaattcagaggaggacaaggtaaagcttggagaaccaggatggagggataggtactatgaagagaagtttggggcaaggacacctgaacggatggaagaaatacggagggatgttgctctcaaatatactgaaggattgtgttgggttatgcactactactatgaaggggtgtgctcatggcaatggttttatccttatcattatgctccttttgcttcggatttaacgagtctgagtcagctcaatataactttcgaacttgggtcaccattcaagccatttgatcagctaatgggggttttccctgctgcaagtgcccatgcacttcctttaaagtatcggcaactgatgactgatccaaattcaccaataattgatttttatccaactgattttgaagtagatatgaatgggaaaagattctcttggcaggggatagcaaaactgccctttatagaagaagatcggttgctggctgagattaaaaaagttgaggatactttgacgcctgaagaagcaaggagaaacagtaccatgtgcaatatgctttttgtgaatggcgcccattcactttctccctatatctactctctcaacagtaaattcgggcatctgccagacaaagaccgtggtgcaatcaaagaaaaacttgatccttcagctaggttagctaagtttttcaggattatcgattctctaacattgctactcttgtttcttttatttagtggaggaatgaatggttacattgcactctgtggtggggacccgtcccctcctgtcttcagatctcctgtagatgggcttgaggacatcatggataatcaagtgatatgctcaatctacaagcttccagatccacacaagcacatcgctcgtccaccagctggtgttatcatacccaagaagagtgtagaagccggtgatctgaaaccaccaccagtgctgtggcatgaagacagcggtaggaggcctcatgataacaaccaccggaggccttatgataacagcaacaggcaaaacccatcaggagctctatctggccgccaactcggggaagctgcccatcgacttgttgtaaacagcttgaatgttcggggtggtgggcaaaataattccccatctatgccatatcagacaatgatgagtggtatgaactatccaaatggaaggcatcatgtgggtaaccatggagtgcctccgagaatggaacagcctgctggtcgttctggctggcatgtttctgatgataacatgaccaatggtcaagcagcttatggtcagtatcagcctgaaaggttgggaccttcccggcatgaacgaggtaaccatggaaggcaacagtataacccatatgcaagagataaccaccatgattctagtggaagagttcagccacctggataccatcaaaaccgtggcaacccacagtctgctgctccatcagcaggtcctggactgtatgggccataccccccagcatatgctggtggttattctgggggataccagcctgtaccatatgggggtcaacaatggcagcagcgaccttatggaggcgggacaccccccacaagacctaactcacaccaatcacaaaaccgttatggtaccttagacagaagttctaacaagaggtcctcagatgtagaagaaaatgagcttttggaccttgatcttgacgaccttgaggatctcacagatgccctcggcgagtcattcctggatttcttccttctctatttcttgggcggctttggtatgtcgggtattgggttatttcttgaccgctacttttggggagatatgccaacaggtcatatatctggatgctcatcaaactctgcgagtcaacgtttggttccggaggcagttaggagtggaacgactccgtctcagagagccaattgatt

SEQ ID NO: 35206 - DNA, 1997 bp, Zea Mays
cgtggaccacctgttctagttctagtgatcagaggggagggaaggggaggtgaacggagggagcggaggaagatctcgggctctcagagctgcatcctgaacccatcgcgtaggaaggggcaaaggagtcggagctgatccggcagtcgctctctctcgttggcgctgtgtagacttgcgattcgcgattcttctctgagtaattgggctgccacctgcgcttggtcccaattcacagtaaaatctacgcattgcgtggccacgttggctaggaatttggaagcaagtactctccgctttcagtaatcccaacggattgagtacgatttgacgcatttgcggccgagctttcttgcacccaagatgagtgggcatggtgacactgcgacctcagctaagatggcgaaactgaaggagttgttgcaaaagagtgaaaaccacatttgtgctgactgtggtgcatctgatcccaaatgggcgtaagtatttgtgtgagcatgaataggtcaccatgtgctcaatttcagtttgcttgaactttctgtcttttctcccatttggatatcagccctggcagctggcaatgcatttgtggaagacatatgagtagaacatgtagagcaataataaatcatgcataaccttgcaatataatttggaaaatcctctgtttggttccccattcttttctttttaacataaccaggtctgtatactatgcataggcctttgcttcaaacttttgtggctggagaaacacaaataactgaggtttatctttgcagatcagctaatattggggtattcatttgcgtaaaatgttctggcgtccatagaagtctcggtacacatatttcaaaggttctgtcagtgacactggacaagtggtctgacagtgaagttgactccatgatagaagttggtgggaattctcaggcaaacgcaatatatgaggcttttataccagagggctaccagaagccacattcagattctacccaggaagagcgagaaaaattcatcaggtctaaatatgagctgcaggaatttctgaagccaagcttgcgcattgtttctcatcagcctagtgactctggaaaacatgccggaaatgcttctcattctgatggttccaagagtcaagtcggcatgatcgagttcattggaatattgaatgtcaaggtgattggaggcaccaacctagccatcagggatatgtcaagcagtgacccttatgtcgtcctgacacttgggcaacagaaagcacaaacttcagtaatcaatggcaacctgaatcctgtctggaatgaagaactgaagctctctgttccccagcaatatggacctctgaagctgcaagtgttcgatcatgacatggtgtccaaggacgacctcatgggtgaggccgagatcgacctgcagacaatgatcaacgctgccgcagcatttggcgacccggagctgctgggcgacattcagatcggccggtggctcaagtccgaggataacgctctcgtcagggacagcgccgtggtggtctctggtggcaaggtgaagcaagggatggcactgaagctgcagcacaccgagtccggcgagctggagttggagatggagtggatgccgcttaacgtgtagaaatctgctcaagttgccacctttataatgggtgtgggatacaaagaatttgttttgcttttgttgccaagagaaattgttatattttggtaattggcaagggctctcttcaaaataaagatctgaatcgctaaaaggtgtgttgtggatactaaaatttgagagatgattcacaagaaactcctttttttctaatctaaattcaaggttcaccatgcagtttataacaatcaatgtcctctcgatttgttgatatcaatgtccattacatgcaaaacgacgcaaaatagaattgtgggtttgttttgctatcttgcgggtaaaattttttgccacagtaaatggtgtgcattatctgt

SEQ ID NO: 35207 - DNA, 1938 bp, Zea Mays
cccgcgcaccgctccccctttccccctttccttgcgcgatgcgagcccacaaatcacgccaatccatggcagcccgcgtgccccgctcccccgcagcgcctggctcccctttccttgcgcgacgcgagatcggcgagattgccctcaacgcgctcgcgtcgcgccgcggatcccccaccctcctcccctctgcacgccgccatcaactcgcaccggccctcgcccgtgatccatcctctcccccgcggcaatgatatggcgtcccccctcaaccgaccattcccgcagcggatccgcaccaacccgttcgcgccggcctctggaagaagaatccaccgaaggcgaaaacgacgacggaggtccggctgactcgtctgggtctttgcaatagcggcaagcgggttggagctccgcttcgggcaggggagaaccacgtggagacctggagtcacgctgcctagactcgccgctgggtggattcgtcgcgatggaggtcggattgtgaacacgccgtccagttaggacgctgtcgtcttcagatccaggggatggggttgctcggcatggcggccaagggcccctcgcccacgcgtcgcctaatgccacagccgcacttggccgtctcctcgctggcggcctccgtggctctgatccactgcttcctcaacacccggagatggttgacgtcgccttcgtcgtctcctcgccagtggcctccaccagccccgcagtccaagacaaagccacgacatgagtcaacccaagtccggtcgcacctacaccgatggccgtacccaacaagttgagctttaagaggaacgtggtgtcattgtcatctgagctcaagggtgtgaggagcaagcttgcttcctaggagcagctgtttgtaagggaatctcaaactagaaaggttagtatgtaactggtaccttcgaggttgttggtggggtttgtgccgacaaggaaaaaaatttagcagcttgcggagacaaaaacaaggagcatggaagaggaagtaatcaagctgcagaaatgcttacaggacaaggatgggcaactgtgttcatccacaagtagcacggaacagtaccatcatgagttggatgatcttagaacacatctgtcatttactcaagctacaggagaagcaggtgttgcatcagctaagttagctcggatgtagtgcatgtcattgctgaaagagctgaatgagaaggacaactcactcaaagaccatagacttcgagtgaacaatctaggtgagcagcttgatcttctccagaaggatgtacaagcaagggaggtcacacaaatgcaacttaaagatatagttataaggatcgagaccaacatcatggatgaagttgccaaagcttttgaaattgcgatgttgagaggggaaatcagaatattgtctactcactggacgaacaaaaccaagaaccttgaatcacaggagctgaagaagagggttctgaagcttgaattttgtctctggtcctgtcatccactggtatggtgcataaaaaagtaggaaccacaatgagattgtaatgctgcacatggcacatcaaggtgcgcaagatatgtaccgtagaaattatcgtaaagtgcacacagctgtatgtatagatgtttagaagtggtcgaagttaggcttgctcaaccggggcaatgatttacttagcctgctgaaatgtactataggtagcattcaagtttgtgaccatcatgcaagtacatgtgggtttgttgaaattgagtggtcatcggagaagtagcaaaatgttccctatcgagagctcgtgtactatatttgttttatgaacttaatttttattacaacataacatgtggtcatacatatgttattgctacaatattttttccgttgcaacgcacgggtatttacctagtacccaaaatatataaagtgat

SEQ ID NO: 35208 - DNA, 1133 bp, Zea Mays
cgcctcgcctagtcgcttcccactgcgcgccgccacgcaccagcccagccagccatggcgttcgccgcgcggaggagcatcgccacccggctctctcaccatctcacgcgacgcctccatccctgcgttccacattcgcgtacctccgactccctcgacgagcaggcgtcgagaccctcgccaccgctcccgctcccgctcccaccacttcacgtccagctcaagcaacgttctagagaagtccaaatcctaggcttcctccctttctcgctccgcctcgcggggccaacccgccgcaccttctcgtcctcagcccccgcccccaacctcgaggcggcaccagccgccgaggtcgatgccgcgggcgtgcttgcggatgcagcggaggcggcggcgtcagtgccagcgccgttcccaggggaggtagccgccgcggctgcggactcattcccccctgttgccgcacttcagcacattatcgacgctatccatacctttaccgggctgaactggtgggtgtgcatcgcgctgacaacatttattatccggatcgccacagtcccgttgctcgtgaaccagttgaaggccacgacgaagctaagagcaataaatccagagatggaagtcattaaagaccagatgaatagtatggatccaaaatcagtgcaggagggacaagctaaaatgaaagcgctgttcaaaaaacatggtgttagtccacttactccaatgaaaggactcctgatccaagggccaatattcatgagctttttctttgccatatcaaacatggttgagaaagtaccttcattcaaaggaggtggaacattgtggtttactgacctgacgactccagattctctttacatcttgcctatgttaacaggactgaccttcttggccacagtggagcttaacttgcaagaaggaatggagggaaatcctatggctggtaaaatgaagtacttttctagaggagtagctgttttgacagtcccatttacaatgaactttgccacggtgagaagccagaagggcaggcctggtgtagtggtgagagctatctcgctggttcgaagcaacccctccacatttgcaagggcaaggcttgtctcggtttattccttccctag

SEQ ID NO: 35209 - DNA, 2741 bp, Zea Mays
atgccccgcccgccctgctctccgtcgcgcccttccagggatcctccatcgccgctcccgccatcatcgcgcccgcgctccatcgatggaaggtgtcgccccgccatcctcgcctcgctccccgcgacacgcggcgccagcttgtgtcgcatcttctatctattcaccagcaaggtacctggcacagaacccagccgaatcctagaacccagccggatcctagaaatttcccattggcatctggtgaccgtatccggtggttgggcgtcagacgcagcggggcggtaccggtgcttggagttggaccacccgtgcaaggcaccgtggtgcgacgggccgctcggcgcgctggagagcaacgggtgggtgtactcggcgcactgctccttcaagctctttgtggccgatgcgtcgtggtggtgccttgacgggaagtggctcttcttctggggcgactctaaccacgtcgacaccatccggaacctcctcaccttcgtcctcggcatcacggacacgtctgctgtgacacgccagtttgatgcagtgttcaccaatcccattggtggggcagggactctaaggatcacaagcatcttcaacggccactggaacatgagcatgaactatctcggcttgcattccctccggaacagaggtttccggcagctcatccggtcctacttcatgtccggtgatcgtgttccagacgtcatggtcctgaactctcgcctgcacgatggctgctactggaccagcgtccgcatctacgcgcaggctgcggatttcgcagcacagttctggtccggagtcatggacaaagtccgggctcgtgggcatgcagtgcccagggtgttctaccggacgcagatgcctcagatgcagggaaaaaccacgcgactcccttcacggaattgagagatgaagctggtgtcacatactcacatccgcagggatgggtcacgttgcagacacttcctaatgaagtccttgtagtgctgcgaaaggtaatcagattttgttagtagacaacacaaggaaggaagcacaaggaagtttaacctgtatagcacaaggaagcaagcagctcagcctccattttatttggaaaagtcttatacttatcagaaatggctactatcctttgcaattgatcaagaatggtgagctattctaaggaagcttctgaacaatatacctgttgtcctggagtgtcacagatggcaaagatttgcgcttagagaaggaggaagaacggtcggtgctagagtcatctccaaagttcttagctgatcagtttccactttcttctctgtagtctggttgcaactgttgatggttagcacattctttatcttcaattattggaagaaacatttttgcgccaattacatgaaagtggttgcagttttaagggtctgttcaatccctctccaagatattgtaggtgtatgaaatcttctaagcaaactgttaaatacattgcacccgatcagaagggatgctctataatgcagcctgggtgtgatctccgtacatcgtgctccagccgcactcagatctagccttggccgggagacaccgcgacagaggctggacgtgctcttcccgtcctcatgccccatgccgctgcgcgctcttcccttcacctctcactacacggcggctgcggggcaggggtgaaagaggcgaggcttctccagcttctcgaggccggagaccgtttgctcaagggtgtcgttcttgacggcctcctccgacagcgtggacgcgtggttctcaaccatggccttggtcacggcaggaagcagagcctggtgccagagaagctcccagtgccccatgtgttggcagcatatcagcatgaaagatcctatgaggtgaaaattgcaacctctactctgtcttaactcctaagggactgaattgctggttctcacttattcttgcgacactctgcagccaagagctactagaggctgttgaacaagagaggaacatccgatctaatccttcacgtaatactgctgttttccaccatccaatgctgggtgattttgaggtgggcatgtttcttcatgcatgtttggggaactttttaggttaagaaactccatcaagaaaagcagttaggaatgatggtggacaaaggcctggtagcaactaggacagggttgagtcagtaccacctgtctcactggcctagaatgtttgaggtgatcaggatgctggaaggagacatgctcacagagagatgggaggtgtcgcagaacgtggacatgccagagttcgtctcatcggagctcctacttcaaaagtacatggattttgcagcggacgaatgctcgcttggtgtagaagccatggagctctctggactaaggtgaccatctgatcgatcgaatcggccatcacacaggtcgcataggtgtcttgccatatcaagcctatattattgttgtattacattggacacatagggaagggaaaaaatccggtgaattatagggtgtgatctgtctgcctatacttgtggtggcattcatttgtgcaaatgattttgatatattgatgtagagaatatatatgttgtttatttctatgtaatcgttgcacactataattttatcaaacaacttttgtattgttgcaaggggcgacaaaaatccagtggattgtagtgtgtgatttgtctatctataactgtggtggtattcatttgtgcaaatgatttgttgtatatt

SEQ ID NO: 35210 - DNA, 5343 bp, Zea Mays
atactattctactactcgatccgccacgcccggcagcagcgctcacatcacatgggaattcaaggctgaccgtgccgccgtcactcctcccgttcaggtccagcagcgttcgtttcgttgctccactcatcagatccatccacgccagagacggaggcagccatgccgctgccgccgctcctgctctgcgtctgcctctacctcacccacctcccccgcctcgcctcctccgagcccgacgccgacaaggcggcgctgctggcgttcctcgccggcgtgggccgcggcgccaccgcccgcgcgcgcatcaactggcccaccaccccgctcgcctgcgccagccccggccacggccccggctggacgggggtcacctgcagccccgacggcgcgcgcgtcgtggcgctgcacctcccggggctgggcctctcgggcgccgtccagtccggcacgccgttcctggtcgcgtcgcatcaccacaggaatggcggatctcgccgctcaaccaccgtaacaagaaatcgttgccgacgacgatttcagaattcgaataaattcctacgcccaggtccagcagcgttcgtttcgttgctccacctccactcatcagatccatccacgcgagagaccgaggcaggcagccatgccgctgccgctgccgctgccgccgctcctgctctgcgtctgcgtctgcgtctgcctctgcctctacctcacccacctcccccgcctcgcctcctccgagcccgacgccgacaaggcggcgctgctggcgttcctcgccggcgtgggccgcggcgccaccgcgcgcgcgcgcatcaactggcccaccaccccgctcgcctgcgccggccccggaccgggctggacgggagtcacctgcagccccgacggcgcgcgcgtcgtggcgttgcacctcccggggctgggcctctcgggcgccgtgcaacccggcacgctcggccgcctcacggcgctgcagctgctcagcctgcgctccaacaacctgtcgggcccgctccccgccgacctcctgcgcctgcccgcgctcgcggggctccacctccaccgcaacgccttctccggcgcgctcccgcccgggctcgcggggctcgccgcgctccaggcgctcgacctctcctccaacggcttcggcggcggcatccccggcgcgctcaccagcctcacccgccttgtcgcgctcgacctctccaacaactcgctctccggccgcgtcccggacctcggcctccccgcgctccagttcctcaacctctccaacaaccgcctcgacgggcccgtgccaccgtccctcctccgcttcgccgacgccgcattcgcgggcaacgacctgacgcgcccgcccgcagcagctcctcccgccgccgccgcccccgccgcgcggacgcggcgggtcaggctcagcgaggcggccatcctcgccgtcgccgtcggcggctgcgtcctcgcgttcgccgtcgccgcggtgctgctcctcgcattctgcaacagggagggccgcgacgacgacgacgacgacacgggaggggccggcgggaagggcggggagaagaaggggagggagtcgccggagtccaaggccgtcatcggcaaggccggggagggcaaccggatggtcttcttcgagggcccggcgctggcgttcgacctggaggatctgctccgcgcctccgccgaggtcctcggcaagggcgcgttcgggacggcgtaccgggccgtgctggaggacgccaccacggtcgtcgtcaagcggctcagcaaggaggtgagcgccgggcgccgcgacttcgagcagcagatggagctggttggccggattcgccatcgcaacgtcgtcgagctccgcgcctactactactccaaggacgagaagctgcttgtgtacgattactacgccagcggaagtgtatccaacatgcttcatgggaagaggggagaggagcgaacgccattggactgggaaaccaggtggaagatcgctctgggtgcagcaagaggagtggcacacgtccacgccgagaacaacggcagatttgtccacggcaacatcaaggcctccaacgtgttcgtcaacagggacggatacggctgcatctcggacctcggcctggcacagctggcgaacccgatcgcggcgaggtcccgctccctcgggtactgcgcgccggaggtcgccgacacgaggaaggcgtcgcaggcttcagacgtgtacagcctcggcgtcctcgtgctggagctgctcacggggaggtcgcccgtccaggtatccggcgggcgcggcagcgaggtcgtccacctcgtgaggtgggtgcagtcggtcgtccgcgaggagtggaccgccgaggtgttcgacggcgcgctgctgcgggtccctgacatcgaggaggagatggtggagatgctccagatcgcgatggcgtgcgtgtccaggacccccgaccggcggcccaaggtggcggacgtggtcaggacggtcgaggaggtgcgccggagcggcaccggcacacggccgccctccccgccggccaccgccgcggatgcagaccagagtgagatggagagctcctcctcggcggcggcggcggcggcgcagtgacggcgggagttgatgcttcgcagccgcatctggtgatccgttcgtcgccctttgtgttgtgctcttccaaatccacggccattccattcttttggcgggtgctgtaccattccattctttttttctctctctcttgtgttaagaagattccgtgttacgaaattgtaacacagtgtcacgtggagacggtggtccgtccgatgctcatggcagcagttgctcactccttgccgatgagatgagagtgtcagcgcatgaagacaagcaattaacattcggtgctgctttgctctaaaaaggaaccacccccattccttcgcttcctccccgaaataaagctctgctcgcctcagctcggggggcggctcagacaccaatccgaagccctgctgctgcaccacaaatgcgtgagagagacgcctgctgggagtactgcgacaagctggatgggaacaaggtccggtgcaggttctgccacaaggtcctcaacggcggcatcagcaggctcaagttccacctgtcccagatccccagcaaaggggtgaacccctgcaccaaggtgaaggaagacgtcgtcgacagggtgaaggccgtcatctcggccaaggaagagtacaaggagttccagctcctcaagaggcagcgcgtcgccgacctgtcgtcggctgctgccccggcgaagtgggcgccggaggctcctccgtccctgtctacctctccggggcgagtggcctctcctgctgctgttattactcgtgccgctgaacagagtcggcttctcgccccggaagcgtccgctccggtgcccagaccatctgctgctgcggcaaacaacaagccacgcgccgccgccgcttcggaatgggagacagaacgatgtatagctgagttctttttcgagaacaagttggactacagcatagccgactcggtctcataccagcagatgctcgaggcgctcggcggtccgggattccgagggccgccagcagatgttctgcgggacaagtggctgcagaggctcaagtccgagatcctgcagaagacgaaggagatcgagaaggactgggcgacgaccggctgcacgatactggccgattcgtggaccgacaacaagctgaaagccctgatcaacttctccgtggcgtctcccatgggcacgttcttcctcaagacggtggacgcctcctcgcacttcaagacgcacaggggcctgtacgacctcttcgacgaggtgatccaggaggtgggcccggagaacgtggtccagatcatcgccgacaggaacatcaactacggcagcacggacaagctggtcgcgcagaactacggcggcgccatcttctggtccccctgcgcgtcgttctgcgtcaacgccatgctggacgacttctccaagatcgactgggtgaaccagtgcatctgccaggcgcagaccgtgacgcggttcatctacaacagcaggtgggtcctcgatctcgcgaggaagtgcgtggcggggcaggagctcgtctgctcggggatcaccaagtccgtgtcggacttcctcacgctgaagtccctgctgaggcacaggccgaagctgaagcagatgttccacagcgccgagttttcgtcctcgtcgtacgcgagcaggtcgataccgtgcgtcgagatcctggacgacgacgagctctggagggcggtcgaagagatagccgccgtctccgaacctctgctcagggtcatgagggacgtctcaggaggcaggcaggccatcggctacatatacgagtcgatgacgaaggtcacggactctatcagaacgtactacataatggacgaagggaagtgcaagtcgtttctggacatagtggagcagagatggcagacggagctgcactcgcctcttcactcggctgccgcctttctgagcccgggcatccagtacaacccggaagttaagttcttccgcactatcaaggaggagttctaccaggtcctggataaggttcttacgacccctgaccagaggcatgatatcaccgcacagttgcacgctttccgcaaggcacaagggctgtttggttcgaacattgctaaagaggcccgcaacaatacccctccaggcatgtggtgggagcagtacggcgactcagcaccgtcgctgcaacgcgccgccgtcagaataaccagccaggtgtgcagcacgctgacgttccagagggactggggcgtgatcctgcagaaccactacgagaagcgcaacaagctggacaaggaggccctggccgaccaggcctacgtgcactacaacctcacgctgcactccgagccgaaggcgaggaggaggccggacgcggacccgatcgcgctggacgcggtcgacatgacgtcggcgtgggtggaggactccgacggccccatcctcacccagtggctcgacaggttcccgtcggcgctggatggcggggacctgaacacgagacagttcggtggatccatcttcggcaccaacgacaacctgttcggcctctgatggcttccggctccagggggtggggggacatctgcctgttctcatttgttttgattaacacgagagccatgaagctgctgaaaatgtgctaagcatccatttcttctgcagtcatcattgctatcttcttcagtgtatttacctggtgccttggtgggtgcacatacatagctgacacatgggggccactctacaagaatgactcggg

SEQ ID NO: 35211 - DNA, 3727 bp, Zea Mays
cgagactggagtttctctctcccacccaaccctcttccttccaccccatccccgcttctctctcgcctccgcttcgctcgcgcgagagggggccgacgacggaactctaggattcgcgcccgcccgcgcggccaagccaccaggatcgcgctccgcggactcgagggcgctagccaagctccagggcgcgcggatcgtgcaccgggcggggccggttaccgccgccatgtcatcgctcacccgcgacatcgtcttcctcgtcctccagttcctagacgaggagaagtttaaggagaccatgcataagtttgagcaagagtcggggttcttcttcaatatgaagtactttgaagcgaagggccatgctggggactgggatgaggtggagaaatacttgtcaggtttcaccaagatagatgacaataattattcgatgaagatcttctttgagattaggaaacagaagtatttggaagcgcttgataggcatgatggagcaaaggctttagatattcttgttaaggatcttaaagtcttttcgacattcaatgaggagtcatataaggaaataacacagcttctcacttttgagaattttagccactccaacttcctccacctagtccatctttagctcgttggctgacgaatacagccgtcccttcatctgttcagtctgctgttgtagcagcctcgtcaatacctgttccacccaatcaagtgcctgagcaactaatgaagcgcttgaggcctggtggacatggcattggtgagaccacatatcctactcccattcctcaacgtgcatggtcaatggatgatcttccaaggacagttgcttgttcattgtcacatggatctaatgtaactagcatggattttcatccaactcgccatacactgcttctagtgggatctgctaatggtgaatttacactttatgagatcggtctgcgtcaaacattactttcaaagccctttaaaattctggatacaaatgcatgctcaccacaatttcagaatgctgttgttaaagacccccccatgtccattaatcgagttacctggagccctcatggagaattgattggagttgcattcacaaaatatttgatccgtgtatatgcatatcaaccaccaaatgagacacgacatgttctagagattgttgctcattctggaggtgtaaatgatatagcattctcacgaccaaacaagcaactttgtgtggtcacctgtggagatgataaactgataaaggtatggaatatgcatggacagaaattatttacatttgaagggcacaaggcgcctgtgtattctatatgtgcgcatcacaaacagagtattcagttcatcttctcaacttcccttgatggaaaaattaaggcctggctttatgacaatgtgggatctagggtggactatgaagctcctggcaagtggtgtactactttgctatatagtgctgatgggactaggttgttctcatgtggaacaagcaaagagggagactcatatttggttcagtggaatgaaaatgatggatctatcaagaggacatattctggattccgtaagaggtcagctggtgttgctggtgtagtgcagtttgatatagctcagaatcacattttggctgctggtgaagataacaagattaaattttgggatgttgataataataatatgctgatctgcaccgacgctgaaggaggcctcccagctcttcctcgcttgaggttcaataaagaaggcaatcttcttgctgttactacagtggacaatggttttaagatacttgcaaatgctgatggactcagaaatctacgcgcattaggtagcaggcctcctttcgaagcatttaggctacaatacgaagatgcttctatgaaggtctcaggtgctcctgttgttgctaccatatctcctaacataggccgaatggatcacttggataggaattctcctgcaaagccatctcctatgctgactggtggcgatacagcatcaagaagcatagatataaaggcaagaatctcagaagaaaagtctgataaagcaaaagcttcggaactaatggaggttctaaatccccaacaatgccgtgtagcaacaatgccagaaactcccgatcaggctagaaaggttgtccgacttctgtacacaaattctggtgttgggttgctagcactagggtcaaacgccattcaaaggctatggaaatggagtcgaaacgagcaaaatcctagtggaaaagccacagccagtgttgtgccacaccattggcagccaaatagcggtcttgtcatgacaaatgatacatcggataccaatccagaggaggcaatcccatgcattgcactctccaagaatgattcctatgtgatgtctgcttgtggtgggaaggtttctttgtttaccatgatgacatttaaggtgctgacaacattcatgccgccaccaccagcatcaacatttttagcatttcaccctcaagataataacatcatagcaataggaatggaagattcaaccattcacatatacgatgtcagggtagataaggtaaaaactgaactcaaaggacatcaaaagaggataactgggttggcattctccaccaaccttggcgtacttgtttcttcaggcgccgatgcacagctctgtgtgtggaccaatgacacctgggaaaaaaagagaacagtctcgatacaaatgctagctgggaaggctccttcaggaaatacacgggtccagtttagttctgaccaaaatcacttgctagtagtacaagagactcaactagccatatatgatgcatcaaaaatggagaggatctatcagtggataccgcaggacacattgtcagcttccatatcccatgcatcatactcatgtaacagccagctagttttttctgccttcattgatggtaacataggtgtttttgacgcggagaacttgagattaagatgccgaattgcgcaatcggtgataaacagcaatccacatgttcaccctcttgttgtcgccgcacatccgcacgagccaaaccaatttgcggtggggctgtcagatgggttcgttaaagtgctggagccattggagtccgaaggaaaatggggaacacctgctccggtgaccaatggcacccccaacggcaagacaccagcttcgtcgactacgagtaaccctgctacggaccaaatccaaagatagattgtatttcctaagcattcttctgtaagggctagtttggcatccctatttttctaaaaaaaattattttattaaggaaattagttcatttttctttgggaaaataaaaattccttagaaaaatgctgttgccaaactagccctaaactttctaattacaccgacttatctgtatgtgcatgctgttaggatgtcattgccatttgttgaaaaaaaaagatagaataggttcaagttcaggtgtggttagttttcagatagagatctcttccagatactaccctagtttttttaaggaaaggctgtagggaaaatccctacaacatgattttgttaaataatgaaaggaaggggacaaattagatcaagaaaagaaaaatgattcaaccggctatcgagaatttagccacaaagacaccctaagcctctgaccgctattaaacctaagcatttgcaacttcagcatgtcattgaagctgtccttccaagagaggaaagaagtggc

SEQ ID NO: 35212 - DNA, 3338 bp, Zea Mays
ccgcgccgtaaaaaattggacgttcccgctccctccatctttttggttcgggtttcgttttcccactgccgctcccgcctcctctctgccctgtttccacatttgaccgatcctcttcgattcgatttctacacccccagagcttgccaaacccctcgtctcccaaccctagagagcagcagcagcagcagcagctaccgcatcccttgccatggcgccaagctccccgtcatccgctaggcccacgcgcgcctccggccggaagcgctccgccatggccgaggagatccaccagaaccaggaggaggaggaggaggttgtggctgcgtccaccgccaagcgcagacgcaaggcggcgtcttccgggaagaagcccaagccgacgcccaagcaggccaaaccggccgtggcggggatgaagaagaagggggagaccgagaagacggagcccgttgtggacgacgtgtgcgccgaggagcccgacgaggaggagttggccatgggcgaggaggaggcggaggccgaggagcaggccatgcaggaggtggtggccgcggtcgcggccgggtcgcccggtaagaagagggtggggagaaggagcgccgccgcctcgggcgaccacgtgcccgagttcatcggcagccccgttgctgcggccgaggcgcacagcaactggcccaagcgctacgagcgcagcactgccgcaaataaaccggaggaggacgatgagctcaaggccaggtgccactaccggagcgctaaggtggacaacattgtctactgcctcggggatgacgtttatgtcaaggctggagaaaatgaggctgattacattggtcgcattactgaattttttgagggcactgatcgatgccactattttacttgccgttggtttttccgtgcagaggacacggtcatcaattcgttggtgtcgattaatgttgatggccacaagcatgaccctagacgtgtttttctttccgaggaaaagaatgacaatgtgcttgattgcatcatctccaaggtcaagatagtccatgttgatccaaatatggatccaaaagctaaggcccaactgatagaacattgtgacctatactatgacatgtcttactctgttgcatattctacatttgctaatatctcatcagaaaatgggcagtcaggcagtgaaaccgcttcgggtatttcttctgatgatgcgggtttggagacgtcatctaatatgccagagaggacagcaacccttcttgacttgtattcgggctgtgggggcatgtccactggtctttgcttgggtgctgctctttctggcctgaaacttgaaactcgatgggctgttgatcttaacagttttgcgtgccaaagtttaaaatacaatcatccacagactgaggtgcgaaatgagaaagctgatgagtttcttgctctccttaaggaatgggcagtcttatgtgaaaaatatgttcatcaagacgtggattcgaatttagcaggttcagaggatcaagaggatgctgacactcttgacaaggatgaatttgttgtacagaagcttattggaatacgctatgatggcactggaaggaaaaaaggcgtatattttaaggtccaatgggaaggatatggtcctgaagaggatacatgggaacctattgataacctgagagaatttgtacaagaagggcgcaaaagaaaaattctcccgcttcctggtgatgttgatgtcatttgtggaggcccaccatgtcaaggtataagtgggtttaatcggttcaggaaccgtgatgagccacttaaagatgagaaaaacaagcaaatggtgactttcatggatattgtggcatacttgaagcccaagtatgttctcatggaaaatgtcgtggacatactgaaatttgctgatggctacctaggaaaatatgctttgagctgcctagttgctatgaagtaccaagcacgccttggaatgatggtggcaggctgctatggtctgccacagttcaggatgcgtgtgttcctctggggtgctctttcttccatggtgctccctaagtatcctctgcctacatatgacgttgtagtacgtggaggagcacctaatgccttttcgcaatgtatggttgcatatgatgagacacaaaggccatccctgaagaaagctttgcttcttggtgatgcattttcagatttaccaaaggtcgaaaaccatcaacctaacgatgtaatggagtatggtggttcccccaagacagagttccagcgctacattcgacttggtcgtaaagacatgttggattggtcgtttggtgaggaggctggtccagatgaaggcaagctcttggatcaccagcccttacggcttaacaatgatgattatgagcgggttaagcaaattcctgtcaagaagggagccaacttccgtgacctaaagggtgtcaaggttggagcaaataatgttgttgagtgggatccagaagtcgaacgtgtgtacctttcgtctgggaaaccactggttcctgactatgcgatgtcattcatcaagggcaaatcactcaagccattcgggcgcctgtggtgggacgagacggttcctacagttgtgaccagagcagagcctcataaccaggttatattgcatccgactcaagcaagagtcttgactatccgggagaacgcaaggttacagggcttccccgattactaccgattgtttggaccgatcaaggagaagtatattcaagtcgggaacgcagtggcagtccctgttgcacgggcactgggctactgtctgggtcaagcctacctgggtgaatctgacgggagtcagcctctgtaccagctgcctgcaagttttacctctgtggggcgaaccgcggttcaggcgaatgccgtttctgttggcactcctgcgggggaggtagtcgagcagtaaaaggatagcggagcaaccctggttggtattttgattcgagcccatccagtagcatgtttaccaataaataatcattggtcgtgctgattcttatggttggagatgaatgtatgtagggtgtactcgagctcgagtgcttgttgtactgtaggttgaggtttctcatccattggcctgcctatttgtggatgacgtttcatttcagattagcaatgtgcttatttaaggtttcgtcatgtacctgtattctacaatccactattgtttccaaagacagcatttgatccttgttcaacgcgagcagattttcgtccaccaaagctgtgtagggatcgaaatgtcaacaatgaattgagtcattcaatcatttgtctaatgttaatgtgtcctttgcatttat

SEQ ID NO: 35213 - DNA, 7269 bp, Zea Mays
atggacagcacggcgaacttgttcaccgccgcccccttggacaacgacagcaatagaagcaagcctccggccactaggtgcagcgcctggaggagcaaaccaccacgaacactcatcagatcaataaccgccaatgacggcaagagatggaggagcgaatccaggaggcaagcttgccgtcacctgcacgaggatgaggcgcgcgaggcgggatctgccctcggcgaccctctggaaaccggagccaccgccgctgctcccgctgcttgggtatctaacgccgccacgacggccccatctgagcccacaggatcccctgctgatgtcgaagccttcgctgatcctactgccgtcggtgacgatgagcacgactccaaggaggtcttcctgcgcaggtacttcctccatgagtgggagctggtctccgcgatcctccgccgtatcgtcgccggcggcggcgttgtccaatccgtcgatgtccacagtgtccgctttctcgtaagcactcttctctccccatttccaaatgctccctgccgttgagaggagcgtgtagctctgagaacaacattgacttctgtttggttattttaaaggatattatctgctttagcgtcttattctaaatgcacaacaaccgaatttgaagacatcatgtccaatttcttgcaaccttttagttgtctaggtggcagtttaaactgtttggttgatgttaatctgtgaatgcacaatttatttgctaatataggataacaaaggctgagctgagatacatatgacttacatgaatcaatcctaggccctagaatgatatgttatttaggaatcacattctgctttccctggtacaaaaatggttctgagtaagagttatgactaatgatctattaccacctatgttttctggtcgagcgaccagctggtcgaaccgggggaacgaccaggcgactaatctcgattagtcgacgactaggtcgactaatcgacctctggtcgacctagtcgtatattagtcgtcatgttgatccaggacatatgtatatactatatagtatataattatataactatatataaaggatagggtaaacatggcatgaattctgcaatactgatttaagaaattgagagaagatatttgttcatccaaatatccaactgaaaacatcaaagaaacacttactagttactaccagataccacatagcacacattatcatgacggcgacaaccaaactctatatgtatcaaaggaataaggattcagaggatggcaacatgaacaaggatggcaacatgaacagaatctctattgtctacatgaactgagtcagaaacatagaaggacataacacaatacataagacagaagtgaatacgacctccagatcatgaactcatgttgtgcaccggtgatctggggccgctgacgccaaggaagaccaactgggctgaggttttttaatacgtcgactgtcactaaagccgcgccgccggtgatcaacttaccaggaggcaggaaccttgcgcagtgcaccgacaccggtgataaaaaaccaggagctaggaggatagagaacgacgacaggagaagagattagagatagagaagcaaaactgcagaagcaaggagatgaagacgccaacaatcaaggagattggaaacaaaccgtcgtgtgcaagggtatttcacgacggcgcctcctgtagacgggccgcccgccaaaaaaaaccaacgattcttttacaggatataaaccctagtcgctaagcactacctgatcgaggatttatcggacctaatcgtcgactagtcggatgactaggtcgaccagatcacctgatcgggtcggatccctaatcgcctacccctaaaccgaccagcccgactaatcgcgactaatcgcgattagtcggacgacttgaaatcagaggcacctctatagataaaagacaacaagaggcaaaggtccacatgatgtagaaacattaggaaaacaactgatatatttggataacacccagacatcgtatttctgacttgaagtgtaaagagttatactccctctgttccaaatgtaagatgtttaaagtttttctaagtcaaacatcttcaaatttgatcagatttatagaaaaacatagcaaatgtcaaacaccaagaaaatatactataaaacaatcaatgctggatttaattaaactaatttggctttgtagatgttgctacatttttttctataaactttgtcaaactgtaatatgtttgacttaggacaaaaccaaaacaccttatactttagaattgagtgattattttttccttctttggttcacagatgaatgacatattgaaaatcaacatggtccctgatgcaactttggccactactttcaataatagtatgtttgtaaaacacagtaagattgtgctattatgaaagcacttttaagaaaaatatgtgtgttacattttcatatatccagcgttaatatttgtagagcgtcaacctttgaactgatattcacgacactcttacagagatggcctattgccgctagcgtgtaggatttgttaattccactcaccctactatggtctacaaactcaataagtctatgtatggactgaagcaggcacctaggacttggtacagtagatttgcttcttacttgctctccttagggtttactacgaccaagtcagacacttccttgttcatctaccagcgtggtaatgacactgtgtacctcctcatgtatgttgatgacattgtgctcactacctctactttggctctcttgcaccgtgttatgcccgtggtcgccagcgatgatcgccgaggacatgagcgccaataaatctgtcgccgtcagagagacaaaatcgaggtatgtgtgtgatgttgtatttcagatattcagtgtccaacacagagttcgattacagcttttatccctcacacacgccacggcccacacgacccaacaccattacaagatacggcccacacttatttattgtgccccatccggcacgccagccttgtcaccatctttaggcatcacctcccgcactaccggctctcgcttcttcctccctcgccttgctctccctggttgtcaggcgtgacatctgctccctcctgagtgcttgcttgtccccaagcaacaacatatggaaagcactgacgcaccacgtaaaagtcttcccaagttgctgaatcgctgggaatatggctccagcggatgagtacctttggaacagcgcgaccacctttctttaccaggcgcctgtccagaatctcttcaggaacgacatcctgttgagccaagtcattgtatcaaggcaaaatagagaaaactggggagtaattggcagtgaacagcttcaattgcgacatgtgaaagacaggatggatctgggcagacgaaggtaactccaggcgataggcaactttaccaattaatattaccaatattcctctcactccacttatggagccccttagtaagctgctgaagctttaccttagccatggcaacctgcaccttaatattactcttataggtatgaccgttagcccaccactccaaggctttaaccatcttgtcactcttcatcatctcaccattggccaccttgactgctgccagcccacatttgatcagtggtaaccccaatctgtcaaccatatgcctgctgatgaagctggctgaccttccggaatccaccaacacaagcatcacttggttcttaatgagggccctcactcccatgcactcctctaaagtggtaccagtgatagcatgcaacgacaacagatactcctcacttttctccttttgctcaatcttacccaacatttcctcggtcagagtcattcccaaaccttcagcagacaatgcgcattcagctgcatctgcagtttctttggacacttggcttggtggcctggttcaaaaaaatttcccacacgtaaaataaagtacattttgtctacaatactccttaactagtcgttcctttgacaactccattggtgtgttctgaactcgggtttcaggttgaggaagaaccactgaaccggtgttgtacaactaacttcaattttttgcctctgcttctccaacaccagtttctgcatctgagcgagtaaagctgctcggtccacagtagacagcaaatgagactgcactggaccctgcaactccggtttcactcctttcataaactgggaaacataaagtgtctcatgcaacttggggttatgcgctgctgtcgaataccgaatttcctcaaactccttcaggtaatcttctacataccccttttgatacgagttcagcagattgtgcatcgccttgggatattcctctgccccaaattttgctttcaccgcctcaccaaattcctcccaatttcccagcccgtgctctggtttgtaaatctgaaaccaacgggatgcatttccctccatatgcaaagaagtagacgtgaccctcactgtttcaagaacacggtacataacgaaaaaatccacacacttcgctaaccagatcttcggctcaaccccttcaaactttggaaaagttggcctaggtagtggaacatgctgataatcctgatcctcctcccgacgagaatttccctcgcgttgctggactggagaaattccacgatgcctttggggttgtggaggagtgttgagtcgtgcgttcagacgtggttccccgttcgggcgctccccgatcggcgtctccgagaactccagatccggagccatcatctccagcctcatctccgccaccaccttcctcgtctattccagctgttgcgccaaccgcacccgttcctccgccgccttctgggccacggtcgccgtgagctccgcttggaccatcagttgttgttgcaccgcatccactccttcaaccttctccgacagccgatccagcttgtccatcatccgatccccttgctccttctcctagttgtccatggtgtccaggataaactgggtctacatagatggcttaggcaccggcgccgtggcgactacccacgccgaggacaaagggctttgataccagatgttatgcccgtggccgccagcgacgatcgccgaggatgtgagcgccaagaaatctaccgccgtcagagagacaacgtcgaggtatgtgtgtgatgttgtatttcagatgttcagtgtctagaacaaagttcgattacagcttttatccctcacacacgtcacgtcccacacgaccaacgccattacaagatgtggcccacacttatttaatgtgccccatccggcatgccagccttgccgccatcttcaggcatcacctctcgcaccaccgccatcaacattgtctacctctttgtcaactcgatccagcaatgcatgaagcatgttgagattgatattcactttgtccatgagcacgtcgtcgtcggggacgttcgtatcctccacatcccaacaagctcgcattttccagtcatcttcaccaagggtcttccatcctcggtgttcttggagttatggtccagtctcaacatctaccgtggctagagtttcgactgtggaaagtgttagacagtaattatattatgcccgcttttatggttatgtaggtgtgtgttggctatgtgttatgggcctagctgagccgagcccatgtatagcctattaggcctaatagggttagggaaaccctagacctatatattataatccctacaccaatcaatacatcttcgaatcattctcctaaatcctctgataatgttcaaaatgaagtgccaaggggtttgaatctaaagtaatgggattttacctataagtacatctagtttcttgaatgatgttgttttctatgaacctatagttgccttttgaaaatattgccttaataattatttacaacactgattattctataaacttatttgagcgacccgagcctctacctcaacctcgtaggaagaccgaaccgagccgcaccgagcggagactggctcgactcagctcgtttctagccctagaaatttggtcaccaatttgtggatattatttgtcttggtggtggtattgttgtttcacatttaactgattcacattttaccaataagttcctactgtagcatatccaccattggtgaaacttcttcaggttagctattatagcaagcatgtgctctcagggctcgtgatctctacaggtggattgcaagtgtctttgaagaaaacttcaacgtcagctttggtagggtatctccaggattcagacatcaatactaattgtgaagggaaaagtagagagtatatattgagttgtgatctcctatcggtccttcagcactaccagaaatgtgatcgcgtaattactcccacattgaagactattgaggctctcgagtaaaaaggttttcttgaacaaggaggggtacagtgagttctacggtggactggtagattcggcgggttttgagatgaagggatccaaggatttcacaaagttatgtgcaggtccctcaatccttggatacatttcttcacagtcagatggaatttgcactacggcattttctcaactcctcacattcctaggccacagataccccaagatagcatttatcatttcttgcctgagaacgcagaactccgtgcaaggatcagctcagctgagctcaaatactctgcattctgcaatcttacagatccgaaaagctgcagccgaccaggtgtacgtgtaccttgtgctgctgcaaaatgatggtcttattacgtcggagaatatggataaagcccgggaattacttgtggagacatgctgggaaggagatgtgaaggaagcagcgcaggaggtcagaaatcaacgagatggctggtcaccactacacaggagtctggaaaccaagaaacaaaaaagaacgcttgccacttcgactgatgagaacaaatcttattcgtcgttggtcgatttcagtggatactaaggatgattggggttttcgttggccttccatcttattttcgaccaaaagtttgtatgagtgttgctctccgcatttaactgtactagcgcagtagcgctcactgtcgaatgtcgctatctgtttggatgagtgtggttgttttgagattttcgttattttgtctggtggtggactggtggttggggtggggaggagagagttgtactgctggacgatgtaatttttggaacgtctgatcaaagtagtaagttactctt

SEQ ID NO: 35214 - DNA, 4958 bp, Zea Mays
ctcgtcgcttggcgcttccagagaaaaacccgaaagacgtctcgtgtcgcctccactaggcacgtcctggaaccttgcggggccggtattggaaagcaggcaagcacaacagcgatcccacaaaccacagctcggctcctcttcgccgtcgcaaccgatttatatatggcgatggaggcgtcggcggcctccgacgaaaccctagccgccgtcttcgcccagctcaagctccacaccgtcgctctcctcgacctcctccgcactcgccgccccatctctagctccggctcctccctacgcgaaatggccgctttcctccgcgccgccccggccccggcgctgcagctctgcttcgattatacagtgtttccactgctcctgctcctggatgcggcggtgcagtgcaggaagcaaggcaatgcgccggggcaggttgcagggggcattgatataggtgatgccgtcgccgaagctggtctgacctgccttgaggtcctcctcaccaagtgccacctcacctcggtcaatcagatggtagcaatgctgaaaaagttgacttccggggctatgctttcaccttcagaggcttcagaggaattccgtggtgcaattattagatgcttcagggctttggttttgcagttacagccatgcttggaccatttttgttcttgcaaacacggaatagtgttacctacgatcccaaccagtacatgcttggaggttagaagtgtagtccgcccaaatcactctgcgcagccagaggagtgcttgcttgcatttcttcagtctcaaaatgcttcagctgccgtaggacattggctctcacttcttctacaagcatcagaacttgaggcatcaagggggcaccggggaagtgcagatgttaggaaggaatcattgcacacgctgcgcattcttattggcaaggtaggctctgctgatgcacttgcctttttccttcctggaattgtcagtcgccttgggaaggttctctacacagctaagactatgattagtggtgctgctgggagttctttgagcattgaacaagccattcttggattgaccgaggctttgatgatagtactaaatgacaaggaaaatcttagtgcacttggtaagcacaagaatgagaatcattctggtggcagtgagtcaactgagcatatattgcagatgcttcgccagttgccaaccaaaaatatatctgataagataagccatgatgagattacagatgattctgtctccaatgtcaataattcctttgctgatagaaaggcactgcatgtgaagcggaccaaaaaatggcttgaggaaacaactagtaatgttgataaattgctgtctgctacattcccacatcttgctattcattcatctgagaaggtaaggaaggcagtggttagtggtgtaaaagggcttttgtctagttgcagttctacattaaaaagaaccaagatgctacttttggaatgtttatgtgttctggcatgtgatgatgctgcagctgtgtctgaggctgcacaagatgctcttgatcatcttttcaaccaaggccacaatctcgtaacagaaaaggagatttctgatacctttactaggctggttgaaaggctaccacaagtggtacttggaagcgaggagacaaccgcactttcacatgctaggatgttgttggctctgaccttttatgctggtccccagtttctgataaatcatcttcaccgttctcctgtcatagctcacagttttctggttccatggacaagctaattgtatcaaagccactatctattgggtatctttattcagttgctgagttgaagagtggcgcctattctaaagatacaactaacatatctctgcatgccacgtcaacatctgcagcctccaaaatatctgttatccatgataatgctttgccaaatgcattacttggtacagttgaatatgagttgccccatgtgcctccatggttttttcatgctggtagccagaagctttatggggttcttgctggaataattagacttgttggcctatcaacagtgtcaggggaaggaactgctgcaaccttgtctctctttgttgatattctgcttgatcagtttaggaggttgagcactgagctgagagacaaagatgtttacaacgatggtctgcagcggtggtacatgaaaggtgaagctggacaagcattgcgccaggctagttcagctgtctgcatgctcaatgagctcatgtatggtttgtcaggtcgatcccttggtatgtttttacaacttttcagcaacggatcagcacagatgccaaggacagtttgtcagaaaaatcaactgcttgcttgtgttaaacataatgcagttactaacaaaagagaagtgtggggttttagtgaacaaaagggcactaaagacaacattcttcattgcatcagcagtattctgcatgaatatgtatcaccagaagtgtgggatcttccaacagagaaggacactgagctacacctaatagagttgaacctgccattgcacttctaccgtgatacaactgcattgcacacagtagtgcttgaaggaattggagtcttgggtgttcttcttggtcaagattttgcacttagtgggtttatgcactcttccctttatcttctgctccgtgaacttatcagctcaagtgctcagataagaactgcatgtgatgctgtcttgagagcccttgctactgctggcggtcattgttcggttggccaatttgtcgttgcgaatgcagactacattattgactctctttgcaggcaattgcgtcacctggacctgaacccccatgtccctgatgttcttgcttccatgctatgttacatcggtgcttctcgtgatatcttgccattcttggaagaaccgatgcaatcaatttcttctgagcttgaggtacttggcaggcatgatcacccacgtctaactgttccatttctgaaggcagtttctgagatttccaaggcatgtagacatgaatccacttgtttgccagatgaggcacaatcattttatgagaaggtcagttctgagggtcaagaagtaaaaattatgattgagaagagaatggaatccagtgcaatatctgaaagaaagaatgttgatgctcgatcttactttatgaccttggaatactgggaagatttattttgtaagctaaatgagatgagaagatataggagaatagttgggtctcttgcgggctcttgtttatcagctgccatcccacttctctcttccaataaggaaacagcatgccttgtggcccttgacattgtggagagtgctgctatatctattgccaatgttgaggaggcttataagtgtgaatgtcaaagcaaaggagtcattgaggaggccatccagttttgttcatttgacgagcttcttgatggtacagatgccaccgaagatgttgatgaaaataggctactcccagcaatgaacaaactgtggccttacttggttatctgtctaaggaacaagatctcagtgccggttgttaggaagtgcaccgaaatgttgaggcgagcaatttgcatatctggcggcgatttttatgtacgcaggtttcataaggatggacctattgtttggaggttgctggctttatctccattccgacgtctgtcaaagatggatgaaaaagcaatcattttaccatatagggatacctcacttaactcagaggaacctatggctgagatctccagccaaaagattcagattgcagtcctggacatgatcgctgcaatatcttcgaacaagagaagtgctgttgcactagaaagcgtactaaagaaggtctgtggccttgtggtaggcattgcctacagtagtttgacaggtttgcaggaagctgctataagggcattggcaggccttgcctgcatggatgctgatcttgtctggcttctccttgcggatgtgtactactcactaaaccaaagggaatctttacttcccaaccaagatctagccctggtatcagatcttttgccccctccagtgtcttcgagagaatacctctttgtacagtatggaggtgagggtgtcaggtgtgatgtagatccctcatctgttcattatgtgttcagaaggatgcagggtgtgtgatcttgtgtgacctgaaaatcaggttcctgatactgtgtatttgtaatcttgctgagtttctttggtcatgctagcaccctatgtcacacattgaacataatatcacctgctacagagaatggtaaactttttcatacgtgttctcgcactgaaaatcatcaaggttggtcacatgtctgaagaatgattatgacaagtctttaccactttgatcataattatattaagcaaacatcaggactcatgatgacaatgaaggatgtgatgggtttgtatctgttagccatataaggttgcacgttaagcatgcccctgacttgccggacgagcagcaagacttcgggacctagattggctaaggcactaagaatagaatagcttatctaccgatatgtaaagtcttatttccacctttcgaattcttttcctcggtagctaagcttatttagttgcctaatggtcgatgtaatctttttattgtgtgattcattccactttcatggtatttccgctcttgttacctccctctaccgcttcttcatctacatctaacctcatgcctggcgacctctaataagtaactgttgatccggccacataattggaatgccttcgcgtgaggttgccggcctttgtgtcagtcactcaacatgctctcaacatgctgaggaaggtcgttgttgtgccgtagccgagcgacgcaacaagtggctgttcagaacacggacaaggtgatgttgaacgtgtagaaacaacggcagcgtgatgcggaacgtctgaaacaacgacagcgtgatgccg

SEQ ID NO: 35215 - DNA, 276 bp, Zea Mays
tcatgggcgactcgatgaaccggaaccagttcgagtccatgctctgcgcgaggccttgccgaacacggccagatgttcgagatgcacgagcacaggatcagcaagggccaaggcttcttcatcttcgagttcacgataataataaatcagccaagtgtggcattgtgtaaaatagcatggaagctagagtaattattttttatctcagtggttcccactcaaggagcttggtgtttctgatctcaatgttttttggtacaaggtttggcatgcgtg

SEQ ID NO: 35216 - DNA, 2922 bp, Zea Mays
atcgctcccaccagaactcccacttccctagctatttgtccaactgcccatcctttggagaattcttttgtggcaagaatcgccaatcagttgaaagttgccgttgtcagtcgtgatctgtcatagtctttgctccactgcaacacacccacactccaataaagctggtcccaagaacgcaaaaggaaggaagggttctcagagcagaggcatccggcacccctgctcctgaacttgttgccgaggaggccacactcttgcgctgccttggcaatgggggaggttgttgctgcttcctccctggccctggtgctgctcttcttctgctcttgcgggcctgcaagcggccttctctcccccaagggtgtaaactatgaaggtcaatattccgtcccaaatcaagaggcatcttgtttatttttgtgtttgttctctttcgttggtccttgtaatcatccctgtgatgctctcagaccaaacaactctgtgaaagaaatatttgtctattcgtttttccctttttgctacattgttgcagtgagtctctcctttgtttgcagttcaagctctcatgatgatcaagaactacctcaaggatcctcatggtgtactgaagaactgggaccaagactctgtggatccttgcagctggacaatggtcacttgctctccagagaaccttgtcaccggcttgtaagcaagccacctaccatttgtgtgtgttccagctcaatcaatgtttcctctgtatcttattgtttctgtggctatttccatttggcagagaagcaccaagccagaacctttctggaattctctccccaagtatagggaatctgaccaaccttgagacagttcttctgcagaacaacaacataaacgggttaatcccagcagagattggaaagctaagaaagctcaaaacgcttgatctgtccagcaaccacttctctggagaaatcccaagctctgtgggccaccttgaaagccttcagtatttgaggcttaacaacaacacattgtctggtgccttcccttcatcatcaactaatttgtcacaccttattttcctggatctgtcatacaataatttgagtggtccaatcccagggtccctgacaaggactttcaacattgtagggaatccactgatctgtgcagcaaccatggaacaagattgttatgggtctttacctatgccaatgtcttacggactgaataacacacagggaactgtgattcctgcaaaagctaagagccataaagttgcaattgcatttggtgctacaactgcctgcatcagccttctgttccttgccgttggttcactattctggtggaggtgtaggcgaaaccggaagactcttttcaacgttgatgatcatcagcacatagagaacggcaacctcggaaatatgaagcggtttcaattcagagagctccaggctgcaacagaaaacttcagcagcaagaacatattaggaaaaggcgggtttggtattgtttaccgggggcagcttccagatggaagtcttgtagccgtcaagaggctcaaagatggtaatgctgcaggcggggaagcacagtttcagactgaagtcgagatgatcagcttagcagtgcacaggaacctcctcagactctatgggttctgcatgactgccagtgagaggctactggtctatccgtacatgtcgaatgggagtgtcgcgttgcgcctgaaagggaagccaccactggactggatcaccagaaagaggatagcacttggggcagcacgaggtctactttatctgcacgagcagtgtgatcccaagatcatccacagagacgttaaggcagcaaacatactgctagatgactgttgtgaagcaattgtcggggactttgggcttgcaaagctcctagaccaccgtgaatcgcatgtcaccacagctgtgcgcggaactgttggccacatcgctcccgagtacctctcgactggccagtcatctgagaaaacagatgtctttggttttggaattctgctgctggagctgatcactggtcagactgcactggagtttgggaagtcatcaaatcagaagggagccatgttagactgggtgaagaagatgcaccaagagaagcagctggacatacttgtcgacaagggcctggggagcaaatatgaccgcattgagctggaggagatggtgcaagtagcactgctatgtactcagttcctccctggtcacaggcccaagatgtcagaggtggtccggatgctggaaggcgatggacttgcagagcggtgggaggcgttacaacacactgagtcacacaaattcaaggtgcctgagttctccttcagccgctgccactctgacctgacggacgactcgtcactgttggtgcaagcagtggagctttctgggccaagatgacaccaacggagacggtctgtggcaagaagtatccagcagttgtttcccagtagaaaatgtaaataatacaaagtgaagcaactggtgctgcatcctgtcagaagtcgaagcaaatctcaatcagctgaactgtacaaagattaaaaaaagagcacaacctagtctaagcatggtacattactacatctacagattatgtaactgttggtagaataaggatagagcaatgtttccattttgtttgttattttcccctttgtattctattactgtagttatagtttgtaaaatgcaaaaacggtggcaatagcgctcgatgttggtgctgaagaactcaaatagcttagtaaagaccaagtgtagacaggtgccaacgaagaatttgattgtgtgcatgaacttcctacctccgttgccaacacatactgcaaagaaagcaggtataattcctagccatgacggcattttttgcatgatataaaatatttggtatctg

SEQ ID NO: 35217 - DNA, 5620 bp, Zea Mays
ttacttcttccttatcacctccatctctcaccccggtctctctcccctcgcgcggccggcgccccaactccctcccctccggttctcgctcgcctccacttcttcctcctcgcctctgggtcctgacgccttccaccgtcggccggagaagcacctccgccttgccaccgtcgggccctgctgtctccagccatcgccgctccacctccgccaccccaccaccgggtcccgtcggcatctggccactgttgccggtgcagcggcgtggcgaggaagcgcgggaggagccggtacggcgggacgcggagggccccgtcgcctggtccgcaacagcctgcatcccgggaggccacgagtaagataaggtgagggagaagaagtgaaatccggccgccatgccgaggcctcaaccttccgtgtgtctcctatctgaagaccccccactacctccactgactcccccttcttttaatgtcgttaaagttgctttgaattttcaattgactaatgcgcgtccgttcaacacaacgaacagaaatggccatcagctgacttgcacgtttgtgagacaggcttgaaatatgaaacacattgcttgtgtctactgaagtgtttactcttcatttttgattttatcactctagccctgaatgcatttgccatctattgatgtcatggtagaatgtttgaagaaatgcccttaaggtgttagatgaaatgtctatatggatgcattaggcaactgccctcaaaggattagataaaatgagtatatgaatggataggcacctctaacgcacatgtaccacatctttgccatgcctgtggtgttagttttgatgtacaagacaacaatatgaatttcaattttatcttattattctatcaacagatttattcagtgtcttcctttagaagcagtggttgtaaatgttcaaagtagcacttattattcatgttcattgagaaatcaacagtaccgatttctgatattttttatattgtttgttttttaatgctgttggtctgctgcaatagtacactgctacaataaattggttagtgttgctataaaatttgatgcacaatatatgttcaacatatttcatatcaaagtaccatcatcaattaggatcacttattttttccctgaaaagttaagcttacatacttcatcatcaatcctttgatttgaaaaattggtatgtgtggacttaccaaacgatgcagctctagcagtacgatcctattgcacggcactgcggcagtacacgactaccaaaggtccacatctttgttctttgcctgtgtgcatgtgctaaccacaaagatgacacaatacattaaagtgagcatcggggtaggtcccgcgccaaaggtttattgtgctttcaattctagaactctaacacaaaagaaggattagagtatcttctccacttactaaatatagcactatattgattattaaattatctatggcgagtgagtaggctctgagtccctcggaggatggactcaaagatggggaggcaatagctgcgctgcaaaaaaatggaatttatgcctgcagaaatatggctgcctcacaacactctcaagctcagacgaagttgccactaaaccctcaagtgaatgtgtgaaacaatcaattagtaaggagaaatatttgtaacttaatttcccaccaagaattatattttaaatttactttagaaggctttattcatagtacatttaaatttgagcatgctgttatgccaccatatcttctattttactgctaggctcagcaaggttgagcatgctattatgccatccataaaaaaattaacatgctgaatgttttttttccggttcaattgaaaattacaatggttgattctttttcctaattatgcattctatcataatctttctgcaatattcaaggctcgttgtttatccaagccttttacaacttcataagacacaatgcattcgggctgcaagcttttgttacaaggtcagtaagctaagtcgcaatgcattcaagttgcaatcttttgctacatgtcagtaagtttcactgttggctccataaacaattcatgctttaactagatgctatatatgtattttagtgtaaaaatgaattatcaaaatctatgcgcctagtagaaaattaaaaaaacgacctacattttgggacggaggaagtagctattaatgtccaaatcaagagtcaccagctacaaaacgaacaccactggtcaatgatgatggtgcggcaacgccgcgccccgttctttctagttatatatactatagcttcaacctctctagttgctcgcatgttgtctctcactcgtgtttaggtttaacacaaccatcaacctaaaccacactctcttctaacttttttttttaattcttggtgcctactgtatgttgttaacaacgatacagtcaccaactcaccataagataaaacttcacttaaaaactaaatctggtttcatattttttgaagctttgaaacaaaattttcacatctttctaagattaatccagatttcaggaatttaactacatgattatttttggaaaaaaacatctgtagtccgaaaaaacagtccatacagggccaaattctacagcccaattaacctccaaggaccgaggctccaaccaaaagggccccgacccagtgtcaatgtaaaacgcgaggatattttccccttcaccattcccttctcatcccctacctctcttggtttcgctggtaggcggcagcccgactaaaggaacgcccgccgtcgccgtcgccgtcgccgacttcacctgcgcccctctattggaacacctgcttgctgttttttcttctctgttcacctcgtctggccgggccggactgccgcagccttactcccagctgcccaggtttctgttggacccttcgacggcaacgagcatccaccataccagtaggtaggtcgacctgcgccaatgcactgacaacacggacacgggggatacattcttcggtgaagaataatcttagctttggacctttttagtggactcgagctattgcaatggagattgtgaacagtgtttccttcagctcaattggagtcggaagaattgtaataaacaagacagtgaaggtaggatgccaaacacaccggattggctggaagctaacaaggacatgttgcgagtactctcctggtgcttctagaaagaagcaagagaagtatgagcaacaaccacagaacgtcgatcttccagaattacacccaaaaaacaaaaagaaacccttccctgttccgattaaaaagatgctgcaagcttctcggcgagagaagaggcttgcacaaatgcatatagagaagcctcttgaacccccaaagaacggtttgcttgtgccagagcttgttccagttgcacatgaagtccttgataactggaaagtgctaatcagagggctctctcaacttctgaatgttgtttcagtttatggttgcagaaagtgtcctcaagtccatgttggtccagttggccaccagatccaagactgttacggttccggaagccagcgtcggaacagtcatcactcttgggctagaggataccagcaattgttgagctatgcattcaggctggtgttgacttaccacaatacccctcgaggcgacggactgctcctgtccggatgataggcaagaaggtgattgaccgcggtgagtttgttgatgagcccaagccacaacgttcagaacactgtgtatctctgcttgctgagctcgacacattcagcaaccaacaagtccagtcaccttcaccatcaaatatgaaagagcttgccaagaggacactgaaagcataccttaatgtccggcgaggcgtcgagcagctgatgagcaagtacactgtgaaagcatgtgggtactgctctgaggtccatgttggtccgtggggccacaatgtgaagctctgcggggctttcaagcaccagtggcgggatggcaagcatgggtggcaggacgcggtggttgatgaggtcatcccgcccaactacgtgtggcatgtccctgaccccagtggctctcctctcagatcctctctcaggagtttctatggcaaagctccagctgtcgtagagctgtgtgtgcaggctggggctgaaatacctgacgagtatcgggccatgatgaggactgacattgtcatcccggactctgtggaagctcggatggctgcataacaacaatgatctgagcttctacgactactatcctgcagttcttgtccagagtacagattccaaccaaatgtgccgctttctgggcatgctgtgatggtgggtctcttagccctgtggtaattgctcagggagcagcagatgcatagtttgtataatataattagcatagctaaatcatgatcgtttgggatttaaagctgagttgaagatctgatttaagtactattcgttgaaaggtttaacgcatgaacctaggacgcgcaatgacaagcctgatagcctgaaagctaaaaggaatggtctctgcaccatttataaggtccatcccatcttgtttacaggccgcagatgctttattcctgcctatgctagactgtgaggcacctagaatgctcaggagtcgccatactgatggccttccactttctccatcggtacaattgcgagctaatgctttggattaaactaatcacggtggtttgttcggggtatttgtgcgcctggctgtagttaatcatggactaaaagcctgtgctgtgcacctgtgcccgcccccagatcgacactttgggggtatggctacatgtatagtcctaccagatcgtcggcatattgtgttcccctttttgctgtatactagtactttgtaacatgcaagcggaggctacttattcagcgccgttccctaattgtgcttatgaaatgttttgagctgtatatggaacggatggtgatgaatgatccatgggcgaaagattcatccatgtgtgatcagctctgtgatgaatgatccatgagacctgattggctacaagaggtactaaactcttaggccacttatcgttaatagagggattacccaggtctcaaagctatagtgtcgttctcgtggtggagactgattatcacttcgtggcagtgaagcacccctacacaacttcttcaatagcccaactcttgatggacaacattgtcgcactccatcgtcttcttcctcactgtattgtcactgacagagacatcatatttctcagaactcttcaagctctacaaagtcgatctacaactgagtacaacctatcattctcaggcagatgggcaaaaaccaagaagtcaaccagtacagatgggcaaactgagagagtcaaactagtgtctggagatgttcctctgttgtgcagttcaggactccccgaatacatggaagtcttggttgtcatttgcagagctatggtacaactctgcttaccatgcatccattggatgccctccattcaaggccctatatggttttgagccatacagccttctactcctgctacagtgtctggcttagtggaaagtagagagctacatttacgatcaccgaaa

SEQ ID NO: 35218 - DNA, 1361 bp, Zea Mays
tatctactgcttttcccaagacttgaagcttgcttgagtgtgaaaataaatgtgccttgtcattgatgaagccgatcgcatacttgagcaaaactttgaggaagacatgaaacaaatatttaaacgccttccccagaataggcagactgttcttttttctgctacacaaactccagaggttgaaaaatttgctaaactgtcatttgagaaaaatgaagaaagtaaaaaaaaacctgtttatgttggagttgatgatgataagtcaaaggctactgttgaaggcctgcagcagggttattgtgtcatttctagcgataaaaggttcttggttctgtatgctttcctaagaaagaagcggaataagaagataatggtgttcttctcatcatgtaattcagtaaagttccacgctgaacttctgaatttccttgggatagagtgttctgatatccatggaaaacagaagcaacagaagcgaactactacattctttagcttttgcaaggcagaaaagggcatcttattgtgcactaatgtggctgcccgtggacttgatattcctgacgtggattatatcttgcaatatgaccctccagatgaaccaaaggattacattcacagagttggtcgtaccgcacgtggtgagaaaggcaaaggaagtgcattgctgttcttactaccagaagaactgaagtttctaatttacctgaaggcggccaaggttaccctgacggaatatgagttcaatcagaagaatgtgccaaatttgcaatcgcagcttgagaatattgttggtgagaattactttctgaaccagtctgccaaagaagcctacagatcctacgttttggcatatgactctcactctatgaaagacatttttaatgtccatcaacttgatctgcagaaagtagctgcgtcattcggtttcaagaatcccccgaaagtgaacctggacctggatagcagtgcggcgaagcatcggaagaagatgaggagagtagacggtgggaagaggcatggcatcagcgcttcgaacccgtacgggaggaaggacaaaggcggtgccggcgataaacgacagttggcgagattctagaaaggaaggaagagcaggagcgtttcactattgttgtgttcgtaccagggctttgattgatgttacctggcttgggaaaaatcttgacaggccactaagattggctataaattttgggttgtcttgatatatttggtgtgtaacgcaatcagcctgctcgatgcgaaaattggattattgctttatagtacttgtggtttccaacccgaggaaagttggtgctgtggtttctggttttgcgtctcaacacgaccatggcggg

SEQ ID NO: 35219 - DNA, 1318 bp, Zea Mays
accctgcgcccctctcttgttctccgtttccccgcggcgtactcttcctgctcttcctccccctctgtttatctctctctcggtcctcccgtgtccatcgcgtgcgctctgtctccggtggcgccgcctccgccaccctgcaccagatcagattcgtggatatgtctgataatgagaaattggtgggggagggaaccacccgccgaggggcggactgggaagttgtcactctcacagcatctgcctatgaagcagcgccagggcctgttggaacggaagtaaagcctgttaacgaagatcaagagcgtagttcatccgatgcactgctcatgtctgaccactttgtgtttccgccgagtgaacacgagaacctgccaatacaaaccagttttgatgagatacatgctgagaaggatgtgcagaaacctagtaccagtgtggaggattatagtatcaagaatgatgttgggtctgagagagttcagtttgacgatgaagggaaacacctctcagatgatgatgtggagatgaaagatgacacccctgggtacggttcctctcacgctgaagatgatgcacatggttttgttgcccatggtgatggcattgagtctggtgaagattttgatgaaaaatcaggccaccctttagagctctcagacagcaagagctgtgatactggtgcctcttgcaaatgttggttgaagaagcatatgacatgcctgtataaccaaacaaaggaaacaaatgctatctggtctgtggtggttgcagctgcactagttggtattgtgatcttgggacgttggcacaaagataaattccaccttaaccagcttaagtggtgctctggctcagcagtgagaggatgatcaacaattggcttgttgaaaactcagatgagtcaattcaactgtcaccaaaatggttttggaatattgttgtgacggtgacgaaaaggagtatgttcaatgtaataatatgttcaactggaatttcacttgccacctacaatgagtgcctcgtgggcttctaagtcaaactcactcctgccatacacattatcttacagtttttcttgcaacctggcacatgatttttggttcctggcttcctgctacttgctgtggtgtatcatatatgttgactgatggctgtagaacatagtacaattgcatactgcaaagtctgttgaaattttggtggttctgcgagaacaattcacgtgcgattgtgaaaatggaggacaaggaaagtttgtttggctcttatttgttgttactcctgagtattgaaatattgcttaggtctagtttgg

SEQ ID NO: 35220 - DNA, 436 bp, Zea Mays
gtttgaccccatgatcgaaatcgattgcgcgatacacgaagtagaggaatgactgaattgtactggggtagttttaccaaagaccatgacgccagcggtggttgtcaacgccaatggcggcccggcagcgcattcttgacaccgacgaggaattagggaggatctggttcatcaccagttcctgcgattccgcgtccagcatcaccccgacccagcgacgatccttggcccaacatagaccacagaccggccgcacggatggaacacaccaacagcgatcaccacgacgttctctctctcaatctctctgcaatccgacgagcacacggcggtccctctccagcttctctctctctctctctgcgatgaagctcggtgcgattttcccaatggcagcgcgccccacatcaccctggcgcgaatcacctggtgctgg

SEQ ID NO: 35221 - DNA, 612 bp, Zea Mays
aattgttagttacccggtggtagatcttacacctgcttgatagcctgcaatgtattcaagtcaagacatgttctggtgtacaatgtactcagttgtccctaaaaggctctaccaccagcttgcaacattggtattgatcattctaacaaaatatattccactgaacttgagaagatgcctacttaattttcttgtctctgtacttgcggttgccgatcgaaaatctgcatcagcaaacttatgagtattattgctagagttgctgcagatacttatgagtattagtatatgtgcttctgcatcacctatggttctacaaatgtaagagctaggatagtaaatgcacttggaggtggacaagagaaaaaaacaaagcttgactgcttgtgttgatcatttctgttgttgagccaactttgaggtcaacacaatgacaattctatgttgttgagcaaactattcagaagacaatatactaaaagatgaaagctttgaaaaatttctcttagaaataggtcatatatgcaacatgggatatgcacaatgttgtggttcactttttaagatatgctctattgtatattcaaccaagcctgaagaataattatagac

SEQ ID NO: 35222 - DNA, 2250 bp, Zea Mays
agataaggataacctcactcgatccggatcctgtactcacagcctatttagcagtctagcgtccattccacttcgcaagggcttttctttctgttttaagtaaaacggatccagcaacgcaccagttcctgaaacagaaacgtgatgatggattcagtaagcatgaagctgttagcttttgtgttccttctgttgcgatgccagcgggcatcgcttgctcttgctgtcgacttccaagtcgaagcattggttgaaatgaggacgcaacttggtgacaaacgtggtgtccttagtgattggaaggataatcaaatgagcccctgctactgggccaatgttaattgccaagataacaaagtcacaacaataattttgagctcgtcagggttaacaggatccttatcacccagcattgcaaagctaacaactttacagcagctgatactggataacaacaacattactggagggattcctccggagtttggaaacctatcaggtttgacaattctaaaccttggaagaaataatttaaatgggtcaataccggactcccttggacaactttctaaactccaaaatctggatctaagccataattatttgaccggaaatatcccaagctctttctcaaatcttctgtcattgagtgatattaatctggcatataataatataagaggtgcaatcccacaacatctacttcaggtggcccaatacaactatgcaggcaaccacttgaattgtggccaaaatttatctgcatgtgaacgaggcagcacattgacaggtggatccaaaaatttcaagctaaacgtggttattggaagcattgctggagcagtcacattttctgtaactgtagttctagttttgctatggtggcaaagaatgcgttaccggcctgaaatcttcattgacgtgtcaggtcagaatgatcatatgcttgagtttgggcaaataaagcggttctcatggcgggagcttcagattgcaaccagcaatttcagtgaacagaatgttcttggcaagggtggttttggtaaggtgtataaaggagttcttccaggtccaaacagtataaagattgcagtgaaacgactactgaacgtggacagtcgtgatggggaaatggctttcctcagagaagttgaattgataagcattgctgtacacaagaacatattaaggttgataggattctgtacaacaccaacagagaggcttttggtctaccctttcatggagaatcttagtgttgcttcccgtttaagagatataaaactaaacgaaccagcattagattggtctacaagaatgcgaattgctcttggcgctgcctgtggtttggagtaccttcatgagcactgcaatcccaagatcatccaccgtgatgtcaaggctgcaaatgtcctgcttgatgggaactttgaagcagtggtaggagattttgggctggcgaagatggtagacatagggaggaatacagtaacaacaggggttcgtggaactatgggccacgtagctcctgagtacataaagacaggaaggccatcagtgaagacagatatctttggttatggtgtcatgctgttagagattgtgacaggagagcgtgcaattgcattccatcctgaccgtatagaagaagcaggcgagatcctgctcactgatcaggtcaagctatggatggaagaagggcgactactcgacctagtggatcgcaatctagatgctggaaggagagattgtcccagcagagcggtgggaggagtggcagctggctgagctccaacgacgacaacagcatgagatgaggcaacagggcaaactattcaacttcagtgaagagtctcaaaacatccaggaagccattgagttgtcagctggcagatgagctgtcataagaaagtgacatgattttcacttgttccttaaatagaaaggctataagagaaatattgactattaggaatagtctataaggtcctggactcctggtgtaatatcttgcacaagtaactccgtccatatgctgttaatacaacgataggaccacacctagctcagaccatgtgtatatcaagaatagactgttctacattttaattgcattctgtattactggataactctgaaattctctgttgtgtgtgtgtagaacttgaagccttgaattcaaactttagcttaaaagccaaaaatttcggcagtaatataatgagaactttactcacggcatgctgtgtt

SEQ ID NO: 35223 - DNA, 2174 bp, Zea Mays
ccatagtttgttagagcattcccccaaggaatataacaccattgtgtgacgagcaacccttcaccaaaaactaaggactgataaactgcaagagaccgttcctatcaggattgtggagtctgcaaccagatatcaatgcataacagaattgaagagatgtatcatcatcaacaacagcttcagagccacagtcatttcctgtcttctaggcagacattccctccagaaaggcacatgcttctgcaaggagggagcattccagcagagccagggcttgtgctttccactgatgctaaacctaggttaaaatggacacctgaactacatgagcgttttgtggaggcggtaaaccaacttggtgggcctgacaaagctacaccgaagacaatcatgagactcatgggtgtccccggactaacactataccaccttaagagtcatcttcaggctaagcaaaaacatccatgcccaagctaatggtgtaaatgcaaaaaatgtgattggttgcaccatggcaatggacaaaccacttgaaggaaatggatcaccagctagccacttaaaccttggaacccagacaaacaaatctgtgcacataggtgaagcccttcagatgcaaattgaagtacagcgccgactgcatgagcaactagaggtacaaagacatttgcaactccgcattgaagcacaagggaagtacctacaatctgtgctagaaaaggcacaggagacactttcaaagcagaatgcagggtcagtcggtgtagaaaccgcgaagatgcaactgtcagaattagtctcaaaagtatcgacagaatgcctccagcatgcatttacaggctttgaggagattgatggttcccaaattctacaaggccataccatccaacttggcgatgggtcagttgacagctgcttaactgcctgtgacggctcacagaaagatcaagatatcctgtcaatcagtctttccgctcacagaggaaaggagataggaggcatgacctttgatatacaagagaaagaaagaggaagagaggatttgtttcttgacaagctaagcatgacgcctccaggccaactagacaggcgtgagagaggaagttttagtatgacacggaaggcagcaaaactggatctgaacatcaatgataccactgatgggccacagaactgcaagaaaattgacttgaatgggttcaactggacctaggaagagttagcaaaagaccttgcaaattaaatctgacttgattcatcaagagtgacaagcttataagcttgagattggctccttctgccaagatagcagcaaagagaggaagtgaaaccgaatgagttattccaaagaccagcagcatcgacatatcctccatggcaggacctgggtgatcctcggaacagctgcgctgtcggcccatcacgattcagcgaaataagtgatgaaattacaataagtagggcatgtagattggtagagtgtatttgagagagtctagtgttctcctccggctataccttattgtgattctgtacacaagcatataaatacaacgatttttgtcacaagtgattgttgctgggattggcaaatgcccaggaatgttttgccatcagctaagcgtgcctacaccctgctgccaaatcatgaatctacaagacagcaactggtgcacaaaacataagggacggacggatgcatatgcatcgtacaaaacacctgcaccgtgtccttgttggattatacataatggtttcaatgtttcgtttcatgcggctatgaagcgggaatgggacagatttactcccaacacgcaaatccaataaggtatcacgaccgctcttcgatgacaaggcagataaatcgtaaatcagctgctaagctgcgaaggtaaataaatcgatcgtacctcccaactgatctaggtggcggcggccgttcgatgagtgcagaaggggatcttctcctgctaaacaatcaccgccgccgccgccgcctctttcctcacaaaagctaaacaacatttgctccaaccaatttgtcggtttgatatgaagttcgtgattcgccaacctgcaactgcaatagaagccgtcggagtcggacgatgaatgctcaagggctcaaggccaaggaggagaggcttcgtttctcggggtgcgaggactaaagc

SEQ ID NO: 35224 - DNA, 1003 bp, Zea Mays
cccaacaaggcctgccactaactccgcgcacgcaacggcgaggtcgacgccgccggtcggcgatcgcgcactctgtctctgccggagtgccgccgtgctggatcttccgcccggcgctcctcagtcgaccttccgctcccgcccatggcacgaccctaagcccgccgctgtcggtggcggcggctggctctcagagtgggggtgggaccttatgctcggatcgatcgccgcgttctacgccgtcatggcgccctacaccaaggtggaggagagcttcaacgtgcaggccatgcatgatattctttatcacacttatcacatcgagatgtatgtcatttagaatttcctggagttgttcttcgaacattcatagctagactaacattgagttgtgttactttgacgagtttgagacttctcagagctcagatactctaaggaggagcaaattcccgttgaagaatttgagagaaggaatttcacctatctactgaagtgaaagaacccaaggtgtttgcacctgggaacttgagagaccctgacattctttcactgaattggcctggttgtccttgaggacaggacagcgagacacccaggttcctgtcgcaagcaggaccacaaaccgccaacggtgaagatgtgcagtcgtctgtgtgatacggagtagtatgggtcttgccatgaagctacctgcaaatctaggatgggggttcggttctcccccagatctcaacgcagaaaccaaaccacagcttttaagagattgccatttttagttgaaaatttatgtaccgttttagacccggaagaaagtacacgcggcctcatcttgaaatggttttcttttttgggtgggtggggggcataacagtcttatataaccagcttgctcaatttaatttttttcctgtttgagacatctttcggattttatatataacaggagctgtcagactttatttgtcagcaggaataatacaatcgtcctacaagcgtactt

SEQ ID NO: 35225 - DNA, 1489 bp, Zea Mays
gtgtggcccgcttgccagcctcagcacccgcggcgttaaccccctctgcctactccacctctctctctctctctcaggtctcagctttaaaagcatcctctccgccgcggcgcaacggccacaccttccgtctcccggcctccgctcgcctgtccctgtctctctctctcctcgctgagtcgccgccagccatgaacaacctcctcacggattcctttgagctcccccggcgggactcctcaagagatgcagacattgaaatgggaatgcatcaagctgatgcttcagacaacttaaaagatttcttgaagaaggtcgatacaattgagagtttaattgcaaagctgacaaatctattgaataagctacagactgcaaatgaggaatccaaagcagttacaaaagcaagttccatgaaagcaattaagcagcggatggagaaagatattgatgaagtggggaaaattgctcgtcaggcgaagacaaaagttgatgaattggaaaaagacaacttatcaaataggcaaaaacctggatgtggaaaaggttctgccgtggaccgatcaagagagcaaactactggtgaaaaagaaattgaaggagcggatggatgactttcagaccttgagagaagcaatcaggcaagagtatcgggaggttgttgaaagaagggtttttactgtaactggtaatcgtcctgatgaagagacaattgatgacttgatagagaccggaaaaagtgagcaaatattcaaagatgctatccaacatcagggaagaggccagatactagacactgttgctgaaatacaggagcgacatgatgctgtaagggatctagagaggaagcttctggagttgcaacagatattcatggacatggcagttcttgttgaggcgcaaggagacatgatcaacaacatcgagacccatgtctcgaacgccaccaaccacatacagcaaggtgtgagcgcgctccagaacgcgaagaaactgcagaggaattcgaggaagtggatgtgctacgccatcatcatactgctggtgatagtcgtggtcattgtcgtcgcagtcatccagccatggaagaagggcacctagcgtggtggtgccttttttcctgtttgtgtaatatgtgtgcagttttttttgtgggtgattcgtgatttgttgttgtacctatagtcgacgcaacaggagctctggcatttcgattcattctgtctagtgaaaggacactgccatcatatgccgataaaaataacgcttcgtatccgtcggtgaaaagattgatctctccacttggtctgggtgtgcagtgtgctgccgccccttgccgtcgtggacatgggatggcgccaggtgttcactgggatccatggagctactgccatagattagatttgtcctcatcatcaacatgctccacaatcccaaaatcttggatttgctgttgctcgattacatctctactacttattaatgctac

SEQ ID NO: 35226 - DNA, 3986 bp, Zea Mays
tgagacgccacgtcgcctgcgcgccaggtggtgggcggtttccttcgtcccagtgtcccacacatctctcccactgccatacgggtccatatcctccgcctgtttcgctctctgcgctccaactcaacgcggcccccacccccaccgccgcggcgccgcttgcgccagtgccccctcctcgctttccgctttcatccgggccccactcgccgcttcggtctgagctcggccaaccatcggccatcgccagtgccgctgccgtatccgtcgagtaatgcagcctcccggcccgcctctggcgacgccgcagccgctgccgccggcggtggcggcggagctcgcgcagcttgagtcgaggctgggccaggtcgccggagagcccgcgcgccacgagctcgcggagctaggcgaagtcgccgcggttcgcgtgctacgtaggatcgcgaggtctcaagagcaggtccggacgctcactggctacatcgtctcggctgcggtgcaggagacgttcgcgctcaatgcgcaggccgtccccaccgccgagagccgcgcctgcaactcctccgctccttccctaagtgatggatctgtacaagggccgcagtgcgccagtgaacttcgaatggaagaagtaactgcgggcctctcaaactatcgcatggcaatatgcgagggtcaaggtcaggaggatcatgcagtgatgatggcaattgacaacccacctgactgcatccccccctggggttgggaccaagattgcattgaagttgataaccttgtgccaggaattgcttctcaggcaaaccagatgcctatgcagtatggcgaccgcgaccgtatccaagaactagtttctattgtaccacatggtgttcgtatgctggctgaaagtcttgaaaatggcagagcatctgagttgcagaactatgtacaaaatggcattcccgaacagtggatggttccagcagatcaaagaatggaatccacctcgagccgcctgcaacatgttttaaaatgtcttcagggagttggaccctttggacaccatctcggtccggaatgtgcaataatgataccaaagcctgagccaaatgttgttgtcgaaaatttgttcagggagatagcaagccctcatatcacagacaacaaattgaggaatacagcgagccctcagatgtgtgcgttggaggatttagagttcagcaagagatttttgatactctcttatctttgtcggaataacctggaagatgaagttgtactgactgtggactatattaaatcgttgaagtttctgtccatggttcattttgagtcccaaatttggaggaaatttggtcagaagaattttcaggcatccaatagagctgcaacagatagggcaaagaatttcgattcagacccaactacaacaaaattataccattgcaatatcgagataagaggggagtccatattctttgttttgaaggggccatatatggagaataagaggacttatctacaaaaagttcttggtgatgataatgttcttctagtaaagtttatggtttcttcagacaagagcactgatttctaccgccaacattaccatagggttgttgaagatggtattgttttgggtctgcgacgatataattttttcgtttacaaggatccaggaaaagagacgaaaaagaaagacagtgaacagggggatatcaagaaatgcacttcgcctgtaagatgctattttatttgcactaagtctgggtggaggggggatgaggcttatattccaattgacaagtgccgcaaactgttcatgcatatccatactgctcccaccattgcaaattatatgaaaaggtttcatttgatactttccaaaactctaacactggatgttgatttatcgacaattgacgttatactgattgatgatgaaccttgtcgggacgagcatgggaacattgttatgctagatgggaagcgtttgatccatactgatgggactggcttcatatctgaaaatttggctaagaaatgccctagcagaataatcaaaggaaagaagtcaaaagtttatatgcatcaaggtgaaacaacgcctcttctcatgcaggtccgtcttttttataatggatatgctgtaaagggaactctgctagttgacaaaaggattagtaataatactattgtgatccgaccatcaatggtaaaagtaaaagctgacccaaagttgtgccggatgaagtctctgagttctttggaaatagtttccacaagccatcaatccaataggacatcaacatcaaggatcttgattgcgttgcttcactatggaggagttaaggcagaatattttatggaacttctacataatgcaattgaaggggttaataatgctcgttatagtttcagacacgcgctgaagcttgcatatggatatgctaatatggaggattcaatgttagaacgcatgattcattctggaattccactagaagaaccatacttgctatctaggctgagttttatggccaaacaggaaatgaaagtattcagagaaggaaagctaccaattgatgaatgctattatttgatgggtacaacagatcctacaggaacgctgaaaccaaatgaagtttgtgtgatacttgacagcggacaatactctggagatgttcttgtgtttaaacatcctgggctacattttggcgatatacatatcttaactgcaaggcaaattgatggactagagaagaattttattggatattcaaaaaatgcaatactttttcctacttctggacaaagatcattggctgatgagatggccaatagtgattttgatggtgacgagttctgggtctcaagaaacaatatgttactaaagactttcgagaagcgaagtgagccatgggttgaactattaaaactgaaggagacccagcacaggcttagcaaacctggggatttaaatgaattgattctcgaaagagtgctatttaatgaatgcttgacgactatgtttatacccaattacacaaaaggtttagcgcctgactgttggttagcacatatggaccgattattaacagaaggagtcgatcaagatgagaagaagtcaatcgtggaaaacatgattaaattagttgacctttattatgcggctctggatgggcacaaggtagatgttgatcgccatctgagagtaaaagcatatccacacttcatggagaagaaaggatttgaatcctaccattcttcatctattttgggcagaatctacgatgagactgaggaaataatagcgcagcaatgtgacgaacagatccagataacgacactgccgtgcttcagtgaggtggaggcaaccccggaatgcacctccctatgggaacaccggtaccaggagtacttgacaaagagcaggggccttttcgatctgggcaaggaagaaaagaacgacgagttccagaaactctaccaacactacaaacatctgctatacgacgccgacgaactggaggagacctcgcgggacctctcagacgtgttcatggaggcctgcgcgatatacaggatcgtgtacgagcgagcatggtgtaccaggagcgtcagcaggtgccgtttcgtgtggaacgtggctggagcggcgctgtgccacctccacgcgaccaagtacgcggcgcagcgcggggagaaaaccgcgctctgcccgctctcagttatccgccagctttacatctgatatatatattttttttttggtaaagcagctgatttctgcctgtaaaatgaaacgggtgagctgatgcgtcttaagagaagtatatactggggctctcgatcaacttagtcaagagcttcacagttgctttgatttgatgaggttaatatagaattgctttcttgtacgtcaccagccttcaatcttaaagactcgttcgcatcttttgatacacagaagttgtgtaggtttgccgattttttttatctaa

SEQ ID NO: 35227 - DNA, 3772 bp, Zea Mays
gccaccttcttcggcgcagcggcggttgctttgcccgatctcaacccgcgtcctcgtcagtcctcagttcctcacttctcccctcctcggcacgggccacctcgccactcccgagtccgggcccgccgcgccacctgaccgactcgaccgcggctcgcatcgggacgcgtccgactcccatgtaacagcagctggtcagcaacaacgagcagctcctcaccctcactggcaggacccgaccgactcgccctttgccgctccgctccgatcgccgccgccgcggggttgcattccaatgtggcggcgcggggcgcacgccgacgccgcgcaccatctccccaccgcgggcccgggagcgtcctcctcctccaccgccgccgcctccgcgggcgcggccgcagcgcggagacggcggcgcccagggctgccctgccgcccgagccacctcttcttcgcgctcctcgtggcactcttcaccgcctccctgctagtggtctggcagctgctccccatcggcgacggcgacgcagcggagggggacggggaggcgccgccgcgccttcaaggaggcgaagccggaccgatgcggttctcgtcctccagcctggcgctgcgcgcgttcgacggcgagagccggctcgaggccgcgagatccgggcggcggctgtgggccagcctcgcgcccgtcagagtagcgctcgctgttggaaatatgaacatagatgcacaatctctgatgcttgcaactgttgcgaaaagtcttgtgagtctgggctacgaggttgaggttttagcatttacagatgggaaagctcgtgatatttgggaaaatatttgtcttgtaaatgttgtgaacactggggctttgaaatctgttgactggtcacagtacaatgctgtgctagtaagctctctcgaagggaaaggggttgtttcaatgaaccttttcggcttctaccagtgatttggcttatacatgaagacactcttggacaatatcttagaagttatgcaaagttacatgattctattcaaaatgtcattgaagattggaggactcattttaatgcatgcgcttatgttgtttttccagatagctaccatcctttgttgtactcgcctcttgattctggtaactttttagtgatttctggttctccagttgatatctggtctgctaaaagatttggctcatcacattctgacgaaactacaagaaagcagcatgggattgaaaaagatgatgttgttattttggttgttggaagctacttattttttgatgatttaccatgggattatgtcacagtcatgcgtgcatcagctacacaaattttggatatagcaaaaactaaaaatctgagggtgcagtttgtttttttctgtggaaatggctctgatgcctacaactctgctttccaggaacttacctcacacatggggttacctgatgtctccataaagcgattttctgtgactcatgatattagaaacctgttaatgtttgtggatgttgttctctatggatctttaagacaagaacctgtcttccctcctttgttattgctgtccatgtcctccgaaattccagttgttgcaccaaatcttactgttataacaaaatatgtcagtgatggtgtccatggattccttttcgattctgctgacccaagcacgatttcttcagctttcatacaaattttaggagaaaaaaagcttttggatactgcctattctgttgctctggaagggaagctactttccaagaacatgttagcacatgattgtatcaaagctcatgttaagcttcttgaaagtgttattcattttccttcttatgcaaaattgccatcttctgtttctaaagttcaagaacgaacatggttgtgggatcctttcgagttgaaagctgcactagaaaatagtttgttggaagatgaaagccatgccagcacaaaggctgttgatattcttagagaattctctcaaagtaaccaaacaacttatgctgatacaaatgatacttcttcatatgattaccctcgtttgtccgattggtatgatttaggtgaaattgaaatctttgaagacattgagaggagagaaatggaggagattgatgaaagggtggaaagacctttgttatcatgggatgaagtgtacaaaaacgctcgtaaatcagaaaggctaaagtcagaaggaaatgaacgtgacgaaggtgaactagaaaggactgggcaacctgtgtgtatatatgagatctatagtggagagggggcatggccatttttacaccatggatctttgtatcgtggtgttacactttcgaaaggaggaaggcgaccaagatcagatgatgttgatgctgttaccaggctttcagttctagacaacccatactatcgagatcttctttgtgaatttggtgctatatttgccattgcaaacagagtcgatactgtacataagttaccatggataggtttccagtcatggcgggctgctggaagaaaggtatccttgtctgaaagagctgaagaaaccttagaggaaattacatctggagaaagtaacgaggatgttatatactactggtcaccaatggatatggaccaaacttctgacttttggttgacatgtgattctctaaatgctggcaattgcagatctcttttcgaagatgcatttagggctatgtatggattaccagagaatgtcttggcccttccaccaatgcccaatgatggtgatcattggtctactcttcatagctgggtcatgcccaccccatcatttctgaaattcatcatgttctcaagaatatttgttgattcacttcatagcttgaatgtgaatagtactgaaacaacgtcttgcttccttggggcatcagaacctgagagaaggcactgttattgtcgaatcctggaagtccttgtaaatgtctgggcttatcacagtggaaggaagatggtctaccttaaccctttcactggggataccagtgagcagcatctgctcgataagagaaatgggatgtgggtaaagttcttcaatttcacccttctgaagagcatggatgaggatctggcagaagaagctgatgatggcatgcatcctggaaacgagcagtggctgtggccattgactggtcaggtgttctggcctggtattgctgatcgggaaagggaggagaaatacattaaaaagctggataaaaagctcaagaacaaggtgaagttacttgaaaggcagaagtctggttacaagcagaagcccctgggacaatgaccatgactgaagagctaacaattcaagatttttttccttgccacgtccggtgcatgcacgtggaagaagagttggagcacaaaaggcaccgctgttgtgaatacgcattctttctacacctcattgatctccctctccaaagatgtttggtgagtctggaggatattgtcaggatggaaaagcaccattttttttcctgttcgtataaacagattagataggatttgtttggttcgctgtctaatttaccacactttgtctaacttttttgtctaagtttagtttttcgatttaaacgactaaccttatgtaaagtgtgacacagttagccacgaactaaacagacctgtaatgcgccatatagttgaactgattcttttctttgctttccccatccgccatggaaagtcagctggacgagcagcaaaattttggtagggtgacactaaccatcgttgtacatgtaaatatctagtgctgt

SEQ ID NO: 35228 - DNA, 1438 bp, Zea Mays
atgggcggcgcctactgccgccgccgctcgccgctcgagcagcaactcctcccggcagtgctggtgctgctcgtcatcgtcgccgccagcagcagcttctggggtgtggccgccaaggagacgggccggaatgtgatcacgcacatcaaggggttccgaggcccgctgcctttccatctcgagacagggtacgtggaggtggacgacgagaacggagcgcgtctcttctactacttcatcgagtcggagaggaacccggcggaggacccgctcatcctctggatcaccggcggccccggatgctccgcactctctggactcctcttcgagatcggccccctcaagttcgatgtggcggggtacacggaagggacgttcccgcgtttggtctacttcgaggattcgtggaccaagcaccatgtcttcctccgcaagtggctggcggagcaccccgagttcgcgtcccaaccgctctacatcggcggcgactcctactccggctacactgtgccggtgacagcgatggacatcgctaccagcagcaggtcgagggacgacgatgatggttatccgaagccgaacctggtgggctacctggtgggcaaccccggcacggacgaccggtacgactcggggggcaaggtgccgttcatgcacggcatggggctcatctccgacgagctgtacgaggccgccaggctgggctgcggcggcgacttctacaagactccggacctcacaaacacgcgctgcgccagcgcgatgattgctatctacatggtgaccgtcggcgtgaaccccatgcacatccttgagcctttctgcgggccgcaggggccgggggtccggagcatcttccaggacaacggcagcaggcggtcgatgctggtgcaggacgatgtcccccacccgggattcttcaccaaacagccggtggagtgcaggaacaacgggtaccggctgtccaacatctgggcggacgacccggaggtgagggatgcgctaggcattcacaaggcttccatcggctcgtggagtcgatgcaccatgctgccgtactacaggcacgacgtcagcaccgccatcccctaccatgtcaacctcaccaaggcagggtacagggcgctcgtctacagcggcgatcatgacctgggcatgaccttcgtgggcactcaagagtggatcagaaggatcggctaccccatcgtcagcgattggagaccatggttcgtcaaccgacaggtcgcagggttcacaaggacatacgcccacaacctcacattcgccacagtgaagggaggagggcacacagctccggagtacaggccgaaagagtgcctggccatgttggatcgatggacatcgtcagcagctggccagctctcatgaatttgaggatcacgaaattaacaaagaactagtacaaatccgtgccccg

SEQ ID NO: 35229 - DNA, 2124 bp, Zea Mays
ccacagcggcaggaagaatcgcattcgattaggcagctgcggggccgccggccgaaccgcctccgcagtccgcaccacacgtgccacccccgcgcgcctccctctcctcttcactccgccaccattcttctccccctccggcgagagcgtgcgcccaccccgccatgaagcagctgcaccggcagtccagcattagcaagcagcaccgcccgcaccaccaccgtacctccctctcccgcaccctcgcttcctacctcctccgcgagcagcgcctcctcttcgtcctcctcggcttcctcctagcctcgtccttcttcttcctctacccgcattccgccgccggatcctcctcggccaccaatatcaccgccgccttcgccagaaagaacccccgcagcagcggcgcctcctcctccgcgcgccgcctccccgtcggtgtccggaagccctccctgcgcatcgtcgtcaccggcggcgcgggttttgttggcagccacctcgtcgacaagctcctcgcccgcggggatagcgtcatcgtcgtcgacaacttcttcacgggccgcaaggacaacgtcgcgcaccacctcggcaacccgcgattcgagctcatccgccacgacgtcgtcgaacccattctcctagaggtcgaccagatctaccacctcgcctgccccgcatcccccgtgcactacaagttcaaccccatcaaaaccatcatatcctccccgctccgctgcccgcgcataattcgtccacatcctcacagaaattggattcgttatatttgtctttattggtttatttatggacacggatacgacttctgtgatgcacatttcacatgggggtgaaggtgagcgtgggggtgcatttgtagttttgtgcttgcgtggggaatagcctgtatttacatctgtttattttgtctgtttttttttttcttcaattgtttctttaaccaactatgtacaagacaaatgtcatggggaccttgaatatgcttggactggctaagagggttggggctcggttcttgttgactagtaccagtgaagtgtatggtgatcctcttgagcatccacagaaggagagctactggggacatgtcaatcccataggtgttaggagctgttatgatgaggggaagagaacagctgaaactcttaccatggattaccaccgcggtgctggtgttgaggtgagaattgcacgcatatttaacacatatggccctcgaatgtgtttagatgatggccgagttgttagcaactttgttgcacaggctttgcggaaacaaccaatgacagtttatggcgatggaaaacagactagaagttttcagttgatgggttggtaactctaatggaaagcgaccatattggaccattcaacttggggaatcctggagaatttacaatgctggagcttgcacaggtggtaaaagaaacaatcgacccaggtgcatctgtcgagttcaaacccaatactgcggatgatccgcacatgagaaaacctgacatttcgaaggctaaatctcttctcaattgggagccccaagtttcactaaaacaaggcctgccgcgtatggtctcggacttccagaaacgcatcatggatgagaaatgatgaggagcagaggtttgtttcgaaaaggaaatgaggagcagacgccaccagtctcagaacactgtatcctactgacagatctcttttggtgccatgaaggctgaaggccttgacaaaggtcagatgaacgactaattgccaaaaaattcttcctcgctccagggcaatttttttttgtgacaggacatctgttctttggttctggtttcttcgatacataaacttcgccatagaattccatagttgcctttaagcgaacagtgagaggtcaacataaatttagtccctctttctctctttctgatgttattgaaacccatccacgtccattttacgtaggatgataccatattctcatgctacacatgtcctctatttcgtgtctgaatttttaggtgattttattactcttgtacaacaaacaaatagttattttatggttccttaaattgttacttttataatttgtgattttatgatttgtgatttgtttttgta

SEQ ID NO: 35230 - DNA, 994 bp, Zea Mays
cggcgtcagtatcccgcaccttctctttcgtcagttttcgaagcggcgctccccttcaccgactccttcgcgcactcactgccacgccttgccccgctgctgcttgccaatcacgaaccagtgcatcgtgcggacgaggatgctgggcatagagtagaatggcgggaccgcacgccttgtcgcggtcgcgtctcgctgtccatggagcgactctctacgccctgcctgcttcgctcgctggctcaccgcagctggaacggcgccacattcctttgttagagccgccgttttgcatacgccgagggagagaaccgaggggagagagagtttggtcgtcgagtcacatggagggttcgctggtggcctaggatctccgtgtgtcgcatcgcctaggcggtggattccccgtgcgtggagccaccagcagctgcggagtccgcgccgccgccatgggtccaaatctctgttgctgttcggagcacgagctcgacccggtgagcttcaccacgacaccaagtttcttctccggttctccgcggacaaaacggtgcaggggcgcgcgacgaactgctcgtcggatcttcaaggccgcgtctcaccatgggcagggaatcccactgctccgatctcgcagtgaggtcacgaggatctgaagaatcaccctgataactggaaatcttaagtgccaggagaagaacaggtggttcaggaggagccacgtatcgaggagttcaattcaatctaggtggtgtttctcagttgacattggtgccgacgatccttagttcgtgttatatttatcttttatttttgtaagtcttccgctatgtaataaatactctgattattgtgacatttatctctatacactcagttattatatatgttgtcttcttggcgcatgtatgagatgcacctggctttgttccttaaagccgggtgtgacactaaataacaaaacagttatttgtggtcggaactttataagtttggc

SEQ ID NO: 35231 - DNA, 1385 bp, Zea Mays
ctaaagctctctcctatcttcagacagctgacttctgacagctctggtctccctatatttgaaatatactttgcagaggcaaatggtggatacaacctgcaggcagtgcatctgaaaccagatgatagtgattctgaccaagtgccaaacatgttaagggagaaacttggcatggacagtataaatatatctagcagttcagtagggtctaagcatgaagaattcgatggaagtgtaaacatggatgataaagatagtgatgatagcaacattgatgctggccctggttcgaaagacttgtcaagcgatccaactgcagttcccaggattaaaatcttgaaagtggtacccatgcagaatgttgacaaagactacataatcaatatttttgatcagatttcagaggaaaatgatgatcctgaagttgaaaatgaatcttcagaagatgctggtgatgaagataacagtggagtagcagaaacagtttctgcagaagagaacggtgatgaatctggtgacgaaagtgatattgaacccttggtttcaattgattttgtcattgagaataacgatgactatgcttctcatccatctgctgaagcttttgaacgaatgccagctagattagaaaaaagagaccgcttctcgttttccttctatactgaagaatatagtaaaaaactagatgctggaaaggcccagcagacttcaaagaaaacagttcgtttgcataccgatcagcaggattatgatggttttgttgagcttgatcgtgtaaagttgagcggcagcaacaaaaaactttcgatactacaacttggcatcaaacgaaataacaaggttcagaaaaaactgcatggagttacccactttagtcgtattcagatgcctatatcttcagatcctcttaccggttgttttccgtgcaaaagttggtgaacactatcggctccctcataagggaattatccctagagaacttggagtgattgctaggtacaaggggcaaaggaaaattgcagatcctggtttccaaaaccctcaatgggttgacggggagcttttgatactagatggaaagttcatcagagatggtcctgtgatagctttcttttactggacatctaatgttcatcttttcgaattctttagacagttgaagcttcctgactagttcccttctaaaagtagttaaagtgttgctagctaatatgcttgcatgacacacaatccatgaccagaaagttgatgcctgaaggttttaggtcagtttatgttcaggggtcgtgtagtcgtgtgctactatgcgttggttctttttgctgtactctgaagttacacctgcctaccatcttcacaatgcatcaaacataacttgatttctt

SEQ ID NO: 35232 - DNA, 1901 bp, Zea Mays
tcgtgtgctgccccacttgcagttggactcgccgccgctcgcttgctgtggcctgtgtccgagccggcctaccccgcctctgaacaccgcctcgccgcccgcgtgcgcccccctccaactcctatggccgcgccctcccacctccacctccacctcccgggctgcccccaaaccctagccctgcccctgccctccccggggggtttctccgcttggcccggcctccgctcctgctcccgctcccgccagccccgcatccgcccggtcgccgcgctcggacccgccgacgccggcgacctgctcggccgcgttgaggcgttcctctacaccgttgcggacgccgccgttaacgcggagcccgtcgcggcagccgcggacaccgggaccaaggaggccgccgccggggactggctctccggcatcaccaactccatggagaccgtgctcaaggttctgaaagatggtctatcagctctccatgttccttattcatatggctttgcaatcattctcctcactgttcttgtcaaggcagctacatttcctctaacaaagaagcaggttgagtctgcacttgcaatgaggtcactgcaacctcaagtgaaggccattcaacaacgatatgctggtgatcaggaaaggatacaacttgaaactgctcgcttatacaagttatctggtgttgacccacttgcaggatgcttgcctacccttgtgacaataccagtttggattggtctatacagagctctctcaaatgtagctaatgagggacttctgactgaaggctttttttggataccttctctggctggtcctacaacaattgctgctcgacaaaacggccaggggatatcatggctttttccttttactgatggccatccacctcttggctggtcagatactttggcatacattgtgttaccagttcttcttgtcatttcacagtacatatctactcaagtaatgcagccaccacagagcaatgatcctaaccaacaaggtgctcaggctgtaacaaagttcttaccattgctaattggttattttgctctttccgtgccttcaggactaaggctgtactggcttacaaataatatcctcagtactgcacaacaagtgtggcttcaaaagcttggaggtgcaaaaaatcctgtcaaagaatatattgacaagctttcaagagaagaaacgactactgttcagaagaatgattctactgttcagagtgaacctctctctaaacatagtaaaccccagcctagccaagagccgaaaccaagtgggccacaacgtggtgaaagatttaggaaactgaaggaggaagaatctatgagaaaagaggttatgggacaaggtaaacaatcagaacagtcaagttctgaatctagagtcacggatggaacacaaaattcggatgtgtcttctggagaccaaaaagaccaacaggggtctcatgaaaatggaccggttgtagctagtataaatggtggagtcaaccatattcgaaatgaaaagactcagaacttatcctcagaaaaggaagcagctgacgatcactcacctgatgtccacaaattaacggaccgagagaatggcaatgacgcggtatagagtggatgttagcgatctactgctctctgaagatcactactacaggagagttgagaatcaacacgaagaagatgcaaacaggaggcaaaattgtgcaaaccatggtctaggtctaggctcatttatttatttttgtggctgtgctttaggttatgtgaagcatatggcatatatatatatatatatatatatatatatatatatatatatatatattagtagataaatgtacacctggttttgaccgtgcaattcgatattttacctcatgtaaataaataaaa

SEQ ID NO: 35233 - DNA, 244 bp, Zea Mays
cgaccggttcctatcccgcgggatcttccctctccccttcgctctaaggcaaatctaagcccgaatccttttttactgggatcggcgggttcacttgttgtgcatgtcgagggtgggcaacttgctgctatcccagcaatttggggggccagcacattgcacgtctttgtgttccagaggagatttcgagtctgcgatcgaggcagcggcgtgttgacaggaaacggcgggaggcgctcgacag

SEQ ID NO: 35234 - DNA, 2946 bp, Zea Mays
gcagatgctggcattcgatccgtgtgcgtcacaaatttcagctgggacttcatttatgcagagtacgttgtagctgctggacatcatcatcgctcaattgtgtggcagatagcagaggattactcccattgtgaattcttgctcagactccccggatactgccctatgcctgctttccgtgatgtcattgatgttcctctggtggtcagaagattgcacagatctagaactgaggtgagaaaggaactagggatcgcaaatgatgttaaggtggtcattttcaactttggaggacagcctgccggatgggaactgaagaaagagtggttgcctgacggttggctatgtttggtatgtggtgcatctgatactcaagagctccctctaaatttcattaagcttgcaaaggatgcctacacacctgatttgatggcggcatctgactgcatgcttgggaaaatcggatatggcactgtgagtgaggctttggcttacaatctgccatttgtatttgttcgaagagattatttcaatgaggaaccatttttgcggaatatgcttgagcattatcaatgtggcattgagatgatacggagggatttacttactggccattggaaaccttatcttcaacgtgctatcacacttcaaccctgctatgatggtcccataaatggtggcaaggtagctgcacatatcctccaagatactgctgttgggaagaagtatatttctggaaagttgagcggagcaagacggttgcgtgatgccattgtgcttggctatcagcttcaaagggctcctgggagagatgtaggaattccttactggtattctcactctgagaaagaaattagtgttggcccagcgcccacatctcatgatatgaatggaagtgatgagtcatcgttcgaggactttgagatactccatggtgacatgcaaggcttaactgatactatgtcctttttgaagagtttatcagggcttgttggaaatgacttaagaagccctgagaagcaaactcgagagagggctgctgcttctgtgctctttgactgggaggaggaaatatatgttgcaagagcacctgggcgattagacgttatgggtggtatcgcagattactctggaagtcttgtattgcagatgcccatccgagaggcatgccatgttgctgttcagagaagtgaccctaccaaacagaagcaatggaagcatacacaggctagacaactagcaaatggaggagcagtaccagtgttacaaattgtatcctttggttctgaattaagtaatcgtgcacctacgtttgacatggacctttctgattttatggatggcgacaaaccaatatcttatgataatgtgaaggaatacttttctcgggatccatcccaaaaatgggctgcctatgttgctggaactatttttgtattgatggctgaactaggggtgcgctttaaagacagcatgagcattttggtatgagtaatcgctagtttcttcatctgtccctgaaggcaaaggtgtctcctcttctgcatctgtggaggttgcttctatgtctgctatcgccgctgcctatggtttaaacattgctccaagggatcttgctttgctctgtcaaaaggttgagaatcgtgtcgtcggagctccttgtggagtaatggaccaaatgacatctgcttgtggagaagctaacaaactcctagcaatggtttgccagcctgcagaagtgaaggagttggttaacattccaactcatataagattttggggtcttgactctgggatacgtcatagtgttggtgggactgattatgggtctgtaagagtaggcacttacatgggccgcaagatgatcaagtgtgctgcatccaacctactttcagaattgttgctctcgtgtacgtctacgcaaccaggcgactcaagtcccgacgaatatgaaggacatggcgtcgacctcctgaaatctgaagcgtcaatggagtatctatgcaacttaccaccacataggtatgaagctgttttcgcgaaagaaattccggagacgatcactggcgatgcgtttttagagaagtatggagaccacaacgatgcggtaacagaagttgacccaaagcggtcttactgtgtcaaggctcctactagacatcccatatacgagaacttccgagtcgaggccttcaaagcgttgctaacagctgccaaaacagacgagcagctctcagcccttggagagctgatgttccagtgccactacagctacaacgcttgcgggctcggctctgacggcacagacaggctagtgaatctagttcaagaaatccggcacaggaagagctcgcgcgccggagggcccagcctgttcggcgcgaagatcaccggcggagggtccggcggctcggtctgcgtgatggggaagaactgcctgaaaagcagcgaggagatcctcgagatccagaagaggtacaaagcggcgactgggtacctcccgactgttttcgacggctcgtctcccggcgccggcaagtttgggtacctgaagattcggcgccggtccacgtcgccgtctgattgaagaagaagaagaaggaagagctctgctcggtcggccgtaccctcacggtcgtattgatcgtatcgtatcccacgcactacgcccaagatgccaataaatgggacagattgatcggcaataataatactagtagccatagaaaactctagtgataagctgcgaaacaacttgtatgtcgaagaaaatatttgaaaccatggtatctttgtggtcgatatctgaagtgagatgatgtgaatggctattggcgtatgttcatgtttgagctgtacggagaagaaaaggccgtatccaacaagagttcatctgcatagttacctcaaacacattatagaatgcactgaatataagagataagc

SEQ ID NO: 35235 - DNA, 662 bp, Zea Mays
cgcattcatcgtacgagagtgacgacgaactgaagacgatcctgttcatcagttagttgggcgaaaagttagctgtagcagctgactgccatttttctgtcgctcccagccgactccggactggatttttggcagcaggtgctctaggccatctgggtcgctggattccatttgcacggtcaagaagatccatggccgctctctctttctgacccatggccccacctggaggccggtgcagagcacggagcggtagatcctttcctcacctgctgcgccgccggcccggacaccaccatggaagcagatccgccgccggagagtgcgacggaggaggaggtcctgctacgcatccatccctcccgcccaagtcccaacctgctcgtccgcaggtttgctgacgctctgctttgcatttccaggcgggcacgacagtcctggggtaggagatccctaaagtaagtaccaaatcaccagcagattttagtccatggacaccagctttaggagtggcagaacatgcatcacttgctaagctagcaatctgaattttttttcgtgaccttcatatcgttggtgctctacagagaaagagaacttacatatatatatatatatatggtgatggctaggggtgtttgtttgggattataatctaccca

SEQ ID NO: 35236 - DNA, 872 bp, Zea Mays
cccacatccaaattcggtgtgccaagtatagtttgctactggtgaaataagatcaagcttgtcaggaggaagctgattgctgcatctatagacagctaactcttacaggcttatgtatatctatagccaacttggactgataaaagctcagcattccaatcaaggtggtggagagagtcttgatcaactgtcggagcgatgtgtgtcttttctgtacgacattgttggtaaacacaaaggggagcgagttatcctggtttcacatggcggcaccatcagagagctctacagacacgtgagtcccacgaagccgctccacggcaaaatacacaacacgtcggtgagcgtcatcctcgtgtccgacgccaccggccggtgcatcgtcaagatgtgcggggacgtcagccacctccaggagacgggcgtcctggagaacgccttcggtggcgacaagacctccgcctgagattccaacattcatcacgcgccgagagctctcggcaattatcacgcgccgagtgagcgctcgtttcggccgtctttttttccactgtaccaatcatcctgttgctaccagtagtggtctagcggagaatgatgcacacttccccccgctgggaacgcggcgatttttgctggaacagttgaaggccgagccggggcgaatccttttggcctggccgtgcactgcttgctgaactgcacgtacgcatgtggagctgaaacgatctgcgttcgctcatgttcgtccacatccgtggatcatgggtctattctgttcttgcggctgtttgcgcactgagatggcggtgccggaccggatgcatggcgtgcgatcgggcacgacggctgccccttccccgggtagggac

SEQ ID NO: 35237 - DNA, 1210 bp, Zea Mays
ccacactcgattcaagctgacgttctattcccacaatcccactccagaagctgccgagaccgagagagcctgcggattacacgcatctcgccgacccccgccccccatggccgatctccgcccgccggagccgggcacgaacggctccagcgccggcgtggtcgccgcgctgccggccgtggaggccgtagcggccgcagagaccgccatggccgccacgggcggaccacagccgcccgcgccgccctactccaagcgacgccgccgccccagcgtccgcctcggggacatcgacgctccgcccccgcgccgcaaccacaagccgccgtcctcgtcgcacccgcgcccgccgcgccgcgcgcacccggacgacctcgacccgcacgcgcacagccgccgggggtccaagccgccggcgcagcgccgcccgcggaccgcctggattcccgccgcgcccgcttcggcggggcccgccgagggctacgacgacgacgaggagcgctactacgacgacgaggaccagtccgactccgcggccgccgccgccgcgagggctagggtttcgggcagccgcgacgccagcggcgacgagtcggacggggtggcggactggggcctccccaacggtcgccttccctccgcgacggggtatggcggcgtcaaggcctggctcgatgggttggggctttctcggtacgcgcccgtctttgagatccatgaggtggacgacgaggtgctccccatgctcacgctggaggacctcaaggacatgggcattggggctgttggctccaggaggaagatgtacgccgccatcctcaagctccggagcgacaacgcgtcctgagttgggaccggcttctttgttttgaccttgcacatcttgcgagaaatcaatcaaaaagaagatctcttttgaaatatgtgtgcctcttgagcctcccttaaggccagggtttgatgaacagaatccaatgttctaaagggctattgaggcgtgctgtgggcagagagctgcacggaaggtgcaaggaaacgataagctgatgaggcattgatacccaaagagtagcagatggatcatgagagatcatagtttttggtctttttgaaatgtcatctccaaaaaaaatgtgatggttgtcgaacacgatagtccggtacattttttgccataagtataagcatgctagaggatcattgagctgga

SEQ ID NO: 35238 - DNA, 3772 bp, Zea Mays
ctcatctcctgtagatatccaccgccctgacctcctttctttgccgcggtctctcctttctctccctcgcggtgtcttcttcaccgcgcggcgctcacatcttccgtcggagctctgctccctctcttcctcagcagcgaccgagctccatctctggcgatctcgccctgccccacggcgttcctcccctttcttcaatctcctaccacgccatgccgaactccctgtgcgcgcgtgcctaggatttttattctctccatggcgcttctctctgctccgtctgccgcgcgtgagttttttttccctggtgccctgctcgaagctccctctgcccagctcggatctccttctctggtgcgcgcggctcccaggagcttggcttctcgtcgccggccgctgcatcctctcgggcatggaagttgcgcgcgcccctgctcctctgcgcgcgcccagtcatggtctccagcgtcggtcggagctcccctgctcccatggctgcttgctcagcgcatctctctctggtgttcttccatgcgcgcgcgttccgttcttcctgcgcgtgctgccgtgagctcctctgcccggccgccgtcgtgctccctgcgctcatttggccatgctccgcctcgctgcaggcactcgtctcctccctctcctcaagcacgtcgtgcctggctcaccccctgtgccacgcaccgcttcaccagctcgcccctgcgcatgcgtcctcccgcgcccgcgccgtccctactcatcgccgcgcgcctgcttcctatgcgcgcagccgctccatcccagccgtgaagctcccttttcagttctcctccgtcgcgttgtcgtgcgcgtgaaactactcgcagtcggcatcaatttaaccgctcggccctgttccctggccagcgctcgactctgagctccgatcttcctgcatgccgtcgttcccctcgtagcctgtggaggtggacctcggcagcgtccccaccgcgtcgtcgacctcgtcgcttgtcgtcgttcgtcgtcgcgtcgtgtgtgctcgtcctcgccaagatctggccctacgagctccatgcgccttggttgtgctcgccgtgtcctctgtagatattttcgactagccgtgcggtccttgtcgtcgtcttggtcgtcgatgccacgcaaccatccacgtgttgttgtcctcatggacaccgcttcacaccatcaccctgttttcaccatccgtagcgtcgtcaagatgtcctggctgcagcacgagcgtcctcgaccttgcccaaagctctaggttggattcgtcagtgtgctactcgtccgctagctcctcgtcgtcgcgctgtcatttcttaccatgtcgggacacctcccctctgctcagatgctcgactgggaccccgtcgtcgacaactttggttttacgtcgccgggaatttgagtgaagaagtgaagcccgctgggcgcttgtcaggggctcgatagaaggcatgaacaagaatcagcaacgtttgcttgaaattctaattgaataggtaaccgttctttagttcgctattttttaattgattgagtcgatggattgaatagatatatattaatcgtaataatcctcgtgttagcataggcgcgttgtggtagtgttaaatatgtgtgagatacgatggagttagtaatgcaaaagatagattaattcgtgtgatattcgggcgagctgatgacgtaaaaaaaggtttagtatttctatcggctagttaataaattttctagtgttattatgtcggcttggttaatagatgaagtcgatatcctgtgctagtagttagtatcatctatgtttgtgatcgataatgttggagtcggatattgagtaattagattaatatgcttctttactctaaattgtcggtatttaaaaatagtgaatgttttactctaaattgtcggtattcaaaaatagtaaatgaaaatatgacgagtaatttgatattgggtgtttcgataaaagacttgtgcttagcctattattacttgatgtttaaagtagatgcgatcacgctagaaaaatgtgataattgagcgtagtcgtatatcgataactagtgtttccgtatgaaattgtacaacgcctcgccgctaggtgtttaattcgctatcgcgtagcactatttaggtatgtgatattcctgtctatatgcattcatgtgcataatgcatttcattcaggtacgtgaattaaccacgtgatgtggagaaccagaactaagtcgaccacaagatgctggaaagcgtgagcttctccacaagatgatgttggtggattaacctgaagatggatagacgaagcaagtatcggaacaaaggctgatcgtcaagtaatcgacgtctaacaacactaacctagtgttcttccaggcaagccccgatgcatgcaaccccttccttgtgtttttaaatgatttttacacactttaagtctagcaaaatgtgcattaggtttataggagttgcttggaaactctttgatgcattggctaccttgaaatctattccttttatagatacttctggtgaagtatcaaatatgatttacaaaatttcttagccttgcctagaggtaaatcttgcggatagaggttgtcctttgcgttaatgcctagcttaggggttatcctgaggaaggatggcttctgcctgcaagaatattttaattgggagcaatggtgggatcttactgcaaagttccctataatgctcttttcatcctaagaacacaaacaatcctgaggatggaagtacttaaatcgagacttgggctaggaacaggtgatgttctacccaggttggttaaggattatagagaatgtaggcctgatgaccgaggatcttttaactagtcacatgcctcgtcatgggtaagctttacctcgggcagactaataccagaataggacaacacgcaatgggagtggagagatggcgagagtagcgtgtaccctccgtggcaagaggctggacggtggtgtatctgtgctctcggttggcgtgaacatgatctggtcttaagaaccccggtggcgagttgacatattcaaaggttaagtgctacatatatcgtgtgattggagatccccagctaggtattaatcgattcaggatcgccattacttctcggatatgaagacttggtcactgacttgcaatctaagtcatggatggaatcataatgagcaaaaatcatgttgtattgattaaagtgatgatgaaattagactagatgcaaacaaggtctattaatacttaatctagcattaaaatgttgaaagtaaggatccgctcatagtaagcttttctgtaaacagagtccttgattcttgataagccttaccttaaatccttttaaaactagcataccctggagagagtcttttctttagtcgggtaagtcttgctgagtacttgcgtacttagggttttattcccattgttgctgcaggttatgagtcactttgattgtgattggtgttaagcgccggtgggcacgaccttctataagtctaagtacttcttttatacttcttattgaggatggtcacttaagctagtatatatttcaaacatataaatgtttatacattcaaaacatagtgtaattactcccatcatgtacattgtaaatttgatgtaacttgtaaaatttggtaataagattttcgctgcaaaaatgttggtgtgtgatttgtgtttacttaatcttgcggtcctggttgtaagtggtttatcc

SEQ ID NO: 35239 - DNA, 1304 bp, Zea Mays
tctgccgcccgcatcccgcatccgcgtcgcaacccgcaaccgcctgcagccgcggcttccatcttccgccctccttccatcctcctgcaatcgccagcgcgccctccgcgctcctgccatccgaggaaagccttccatccatggcgccgttgctgcaattctccccgcgatccgctctccctccattgccccccgcgatccgcgctccctccattgcccccgcgctcctgccatccatggcgcctccccacggatctctgctgtcaattttacggagaaatcacgcctccctagggtgcccttccatccatggcgtcgttgctgcaagtgccccgcaatcaactccattgccactgtgatccccttccaccgatggcactcaccttccatcgacaaaactgctcttcctccattccaccgatggcactcaccctaaaccctcacctcttagatcccgtgctcatcaccatcctgcccctcgctcgccgccccacctcaccaagagccttagccgtccctagagaagacacggaggtgcagtgcagtgcagtgctttactcaagtgcgccacggattttcggtaccggccagattgggacgaattcgacattcatcggctccaccaaagtttcgtcttctacctttcaccgctgccaacttcgcggtgtattaaacggtaacaaggcgatggcccaattgtattaattcccgctcccacaagagaattggctgttcaaatacaggaagaatctacaaaatttggatcatattcaagaactagaagcacatgtgtctatggtggtgcacctaagggtccacaaatacggggccttagaagaggagttgaaattgtcattgcaactcctggccggttgattgatatgctggaagctggtcacacaaacctacgtagagtgacgtaccttgtgttggatgaggcggaccagatgctagatatggggtttgagccccaaattcaaaatagtatcacaagtacattttcgtttagaaatgcatagttatggttttactgatgtatcaaatttccataaaaatggccttgtagttcatgaactttattaattttgtttagtgataatgtggtggtggtgttttaatcgggagagcactagctcaagaagccacaacaacccaagatcattcctggcgctctccatacatctactactgctagctctggacgctacatgtactgcaacagatcatagctcgagacataagtaccaagcatcactacctatagagtactctccctgcatcaactggctataaaaacaaacagg

SEQ ID NO: 35240 - DNA, 307 bp, Zea Mays
caggaacggccctgctgagacatcgcctccttctgtcttcaccgtcggatccttctcgccatggttcctatgtcttccggtacagcggagctgacaacgtgatcaacggcttgtgggcggtggacgacgatgtcgggggcggcgaggtcatcgacggcgaggtcggtggctccgtccgatccgagtgtctgcgttaggggagagagggtcagagaaagcaagtgcaagggggttttcgtgaaattggaatgccaacaaggagcaggtgcggaggggcttttatgtaatattcgcgctgaccgttgat

SEQ ID NO: 35241 - DNA, 650 bp, Zea Mays
cgctttcaggtgccaagttcattccgacattaaagtagcccctacatcagacgtgaaggacgatagcaaatctgaaactaggaggatcaagatgctctatgacggtgattgccctctctgtatgcgtgaggtaaacatgctgagggaaagaaacaaatcatatggggcaataaagtttgttgacataagctctaaagattactctccagatgacaatcaaggccttgattatgaaactgcatttagaaaattgtagctacgatggcaaatgcaatatatggcgtgtgggcgaaataccgaatgcaaattacaggtcgacctccgctagaaaagctgcaggcgaatgtaaagatgacaaagtatgcaagatgtgagcataaaaaatgttctactgtgctacatacctcactcacctatattcatgcttagtgcttagataggctcatatacatagttttaacacaaaaaataatcacaatggtattgaaaagggcgaatagcttatgtaatggtttgtcgaagtaaatatatacattttctgaaaaaatgtaaatatatacatttgtatgtacactgtgctggtttgacggcaagatattttacggtgaaaacttccacggaatgtgctgttgtgactggtgggattgcac

SEQ ID NO: 35242 - DNA, 2034 bp, Zea Mays
agttcgggatttcttgcgcgttagtcccttcggaagtcaggatcgtgagaaggaggctcgggaaatggggtgggcgcacccggcggtgaccatggaggaggtgctccgtctggtgcggggtttcgtcgacgtccttgtccttgccggcggccgcacctcgtccggcgccgctgctacttggagcgccgacgagatcaagaaggccctccggtgggcgctcttcttcgaggagattttcaaggacctgctcgactcgggccagtacgaggattctgcaagagaactcgatgcggcactccttgagctcacttcaagtcccgagttccctaagggtcttgctgctgtacgttcagatttgctatccatggcaagggtgttggttatgcgacattttctgaaaccaaacacaatgagcgtggaaaacttttgtgctcttcttgaagcggttgctggcatggatattgatggcatttgtgctagtggtgcgcacaacgcatgccaagagtatgctgagtcaatattgaatatgaatacatcatgttttgcgcagaccatgaatgcttgtgatggtggacttcccactagttcttatgatctgcgggctgaatccacgggccattcatggattatagttaaagaatttcagaagacgctggattcggcatcgtgtggacggttggctgatagaggactggaaacgtttttgaacagtgtgaaaaggaacatcttggaaaatggtagtaataagccttgtgtcccagcaattccgaaaacatcgcaaatgatcgacgagtttctaatgtggaagcaatggagagcaaagtgtttgtcatatttgcttgatcaacggaccattcgagttctgtctggagctagtttgatttttaaagctcctaaagagcagtggatgaaagtgtttgagcccttaaaaagtatagaagaaacatgtcatagtggtcttgttgaaaccatggagctatgcttgctgggttcgattacaaggcgatggaacacattgatagagggcttcatgtcacacactttctgttccattcctatatccaagaagcacgctgatctgcaccagtgccttcacagaacctttcaggacaaattccaagacgaatatcttaatttggaggaaaaggatattcttgactatgcaagacagacattagagaggaaaccatccgtactatggcttctacctccagttcttaccgccgcagcaattccaccgcagtcaagcttgttccagatatacctagctcaaatcgataagcaaattcatgaagctgctcctgcagatcgaaagtgtagttgcagaggagatgaaatagatcggcatgttaactggctgtggatgtccaggaagggcagcgacgcccgccctcaaggtgttggatgaaatggtgcacgcttatgggagggtgacactgagcagtccttctggttgagaagatgaaagacatctgcaagtataatcatctacaatttgctgctaaaaggaactcaatcattgatgcaagatccatgatgagcatgcattggttatcttatcgcagaaaatcttccggcatgagacaactacacagactttggccagcttctgattcgatagtgattgcaaatgttgatatcttcagctagctggctataattatgtgcacacttgaaagtcaatctaaatttattttgagccccagccatgtgtcatgcctcgacgacaactggctagctagctacatgtcgtggcaatcagaaaaagggtccacagatagaaagggtgatgaagtggactctccccgtcgttcgttcatggttttcagtcgggacactgaaacaaatgagaaaagcaattactaggatttaaacatactaatgccaaagacgtcgtcatgtaattcgatggcatgtaacaaatgagaaaatcttcgttttattaattgcaaactagtccgatttttttggaagatggaagagaagatagtacgtttggttttataattaagggagagaaagaaaaaaaactga

SEQ ID NO: 35243 - DNA, 3131 bp, Zea Mays
attagttcctgtgcatcctttaggcagctgtggtaatccctattgggggaggtaccaatggccggttaatttggtgatccattgagctgtgcaagcaagcaaataccataggattacaagatgagatggcagaggagcaaattcagttggctcctcagcgcatgcctcatttgtctgctgctgcagctggttggtgcgatcaggactagcttgttctggccacaatcttgcctgccgtctcctgcaatcccaagagaagatgaatcggtggaacaactgtggcacagttgtgctctcgacttgagaattcctcaagatgttagaaacaagttccattacagccttctgttcaacaccatcagcaattcgtatagagaaaatgataataagtcctatcctcagaaggtcggcattgaggaagcaaccacggcaaccttttcacctgcagaagttgccaacacttttctggattgcttaaacaagcataatttccctttctctgatcatggactgcagaagcatcaggaggaaaccataagcttacttcccaactctaacagcatcaaccttccttttgcgatgaaaagaagacgtctacttgaagaagattcagccattgctccaccccgacctaaagcaaaacaggcaataagaagcgttttgtcttccgaaggagaggctcacttgctagtcactaccgtgaaaaagtccggtaaaccagagcccaaaaacaagagcaaggacaacagtggcactattattgctggtttgtcagtggcttgtgttgcattggtggctcttatatgttcttcacgtaaatcatgctctaccccaattgatgtcaacaggttgggggcattgtcaaccagttcatcagcgagccagcgtaaagaatttaaatttcctcctataaaggcagaagttagagaaatgtcaatgaagtcagagtttgagcgacgcagcaatgtgcaggcgatgaaactaagttctcatgaaataactaccattgctggacgtccggcgacctctactaattctcaggatgtgaaatctgctgttgctgcagttccttctagtaatgccagcgacagcatatgtaaacctgcagctggtccagcaccagcaccaccaccaccaccacgtccaggttatcctctcccaaaggctcctcctgcaccatctgcaccaacaccaccggtaccacctccaaagatgcctacagctgctggttcgagcaatccacccccaccaggacccccaccgcctcctgctcccaggcctgcagttggacccggacctccaccatcaccaagtagtgccggacccggacctccacccccaccaggtagaggtggagctggacctccaccaccagccatgcctggtggtccaaaagcgcgtggtccaccaccattgaagaaggcagggaatgttgcaggtcctcctgtggcagacaataaaacaaagctgaagccattcttctgggataaagttactgcaaatccggatcaagcaatggtgtgggatcaaattaaagcaggatccttccagtttaatgaggagatgatcgagagcctttttggttgtcatgctgctgacaagaaaaatgctgacggcaaaaaggatttagcagcaaaggatacccctcaatttgttaggatactcgatgctaaaaaggcacagaacttagcgatatcactgaaggcattgagtgtttcagctgacgaagtacgtaatgcagttatggaaggtggactccaagcagcgacgaggagctaaggcttcggttatacaccggggagctcactcaactgggtcctgcagagcaattcttgaggaccatcattgacataccttacctctatcagcgcctggatgtgttgcttttcatgtccactttgccggaagaagctgcaaatgcagaacaatcatttaaaaccctggaggtggcctgccatgagcttcggaacagccgtctattcaagaagctgctagaggctgtactcaagactggcaaccggatgaacgatggcacctttcgaggtggggcccaggcgttcaagctggacaccctcctgaagctctcagacgtgaagggggtcgacggcaagacgacgctgcttcactttgttgtccaggagatcattcggtcagagggcgtgcgtgccgttcgggccgccaaagagcagaacaacagcagcatatccagcgtgacttctgacgatctcaccgaggatgtcagcgatgacacggagcactacaagcagctaggcctgggcgttgtttcgagcctgggagacgacctccagaacgtgcggaaggcagcaatcctggacgccgatacgctgaccatctcggtggcgagcctggggcacaagttggtgaaggcgaatgagttcttgaacacgggcatgaagagcttagacgaggacagtgggttccatcgcaagcttggcgagttcatcgagcagtcccaggtgcgtgtgacccagcttctggaggaggaaaagaagctacgggcgctggtacgcactactgtagactacttccatgggagcacagggaaggatgagggcctacggctgttcgtcgttgtccgcgacttcctgggaatcctggacaaggtgtgcagagaggtgaaagaggcggctgccaaggctgctgctaataacaagaaaccttcagcggcaggatcaggatcaaagggaaggcaaccgtcgcagtcttcttcgtcgttccgtgatcctcgacagcagctggtgcccgcaattaaagatcggaggagtgcagcggcacgcagctctagttcatcttctgattctgactgactgacagcaaagaatttgtgcagatcacaccagattgatgaggtgatatgggagcacagcaggtagaagagttagcggctatctagttatggattgactcgcttacagcagaatgaaaaagagttagggacactacgccctggtaggttaatttagtatgcacatgatctcaggctctcagctttcgcctccgtaaatattattttatacaaatgtacatcctagatatgtatacaaagatcgttcatggcttaatgaataatattattttatacaaataccttataatatatattgtttgtg

SEQ ID NO: 35244 - DNA, 3621 bp, Zea Mays
gttgtcctctccgcggggtgcggcctggcttttcccttctcggcttctgccgttcgcgtgcggccgtgcgtcctctctttctttctcggcgcctctgtttctggcggccgcgactggcccagcgccaccgccgacctagccaggtgaccaggtcttcgtcaggaccatagccagcgaagaacacccaagtacccaacagatgagttcgaagaaggttccgtaccacaagcatagggaggctgaggaggcgaggaagaagagggaggaagatgaagcagcacgtgtatatgcggaatttgttgagtccttcaaaggtgatagttcatctggggctaagtttatccgaggtggtgtgattgaccccaatgcaaagctgaagactgactcggaaggtggaaaatccaaagatggggggtctgttccaaagaagggcagtaggtatgttccatccttcttgccaccatcatttgcaaaagagcctgagaaaaagaaggaaggggagaggccaaaggaaaaggaaaaggaaaagggaaagccacgagtaatagatagattcttggaggaaatcaagcttgaacaagagcagcgagagaagcgccatcaggatcgagatcaccgccgtgaaggtcgccatggcgatagctccatgtcctcgagccggtttgatgaactaccagatgaatttgatccgactgggagatttccaggatcatttgatgatggtgatcctcaaaccaccaacttatatgttggcaatctatctcccaaggtcgatgagaattttcttttgaggacatttggtcggtttggacctattgctagtgtcaagattatgtggcctagaacagaagaggaacgcagaaggcaaagaaattgtggttttgttgccttcatgaatagaacagatggacaagcagcaaaggatgaaatgcaaggtgttattgtgtatgactatgaactgaagattgggtggggtaaatctgttgctcttccgtcacaggctttgcctgctcctcctccaggacacatggcaatcagaaataaggagggtggtacagctacagtcatactttctggtcctggcggccctgctgttgcatctattaaaccacaaacctcagagctggtccttacaccaaatgttcctgatattgtggttgctccacctgatgatgggcatcttcggcatgtgattgacacaatggctctgcacgtacttgatggtggatgtgcttttgaacaagctgtaatggagagagggcgaggaaatcctttatttgatttcttgttcaatcttaaatctaaagagcacacatattatgtttggaggctatactcatttgcccagggtgatactctacaacgatggagaacagaaccctacatcatgatcacaggaagtggaagatgggtcccacctcccttgtcgtccaacagaagccctgaacgtgaaaaggaatctacatttgctgctggtagaagcaggcgtgttgaagtggagcgtacattgactgactcacagcgtgatgaatttgaggacatgctgcgagctttgacattagagaggagccaaataaaagacgccatgggatttgccttggataatgctgatgcagctggcgagattgttgaggttcttacagaatccttgacactcaaggagacgtctattccaacaaaggttgctcggcttatgctagtgtctgacatccttcataacagtagcgctcctgtgaagaacgcatctgcattccgaacgaagtttgaagcttctttgccagatgttatggagagctttaatgacttgtatcgcagtatcactggaaggattactgctgaagctctgaaggagagggttatgaaagttctacaagtttgggcagactggttcctgttttctgatgcatttcttaatgggctgagggctacttttcttagatcaggcaactctggtgttgttccgtttcactcgttatgtggtgatgcacccgaaattgaaaagaaaggtagctctgaggacggaaatgatggatttaagcttaatgaagacggtgccttggctactggaaaggcagcagcgacaaaggagctattagggctcccgctagctgaacttgagcgccgctgtagacataatggcctctctctgtgcggtggtaaagaaatgatggtcgccaggctgcttaacttggaagaggctgagaaggaacgaatttacgagaaggatgttgacgtgaaatatgtgcagggtgaacagcatgtggttggaagagaggacagtggtgtgaatgctcatagtacttcaaggtttggtgaaggttctaatggtgatgaattagatgtctctcggaacagtatgagagctggtaaaggacgttctggaggatctgcttctgccgaacttgaatcatttccaagcaagaagccgaaatacgatcctgttttgccagcttctaaatggagtcgagaggatgacatcagtgacgatgaagataggaaaggtggccgaggcttgggattaagctattcgtccggaagcgatattgctgatggtctcggaaaggtcgatacaacagaagctagtactgaccacacaagtcatcatcatgatacgattgttgatgaagagcacaggcagaagttgaggcagattgaaatttctgtcatgcagtaccgtgaatctcttgaggagcagggtctgcgtgacttggatgagattgagaggaaggttgccagccatcgaagacgtctccagtcagaatatggtttatccactccaactgatggtgctaacagcaggcgatcttctgaacatcatcgtcgtcggagcggaaagagaggcatggcgatgcacatgatcatcctaggaaacgtcgccggagccagagtagaagctgcagtcctccaaggaagtctcaggagagggatcgagagcacaatcgcagtagggaccgagatagggtacgcgagaaaagtgcaagccgagggcgagacgaccaccacgacagaagccgagatagagaggacaggagaaaggggaggtgaccgacccgaaaaacctcgtcactatgcaccatttgccctaaccgaagggcccaggagcatcatttgagctgggctacacgcccaccagcatctccatcggtaaacatatattccgcaccaggcaggttaccctggtctgctccatgcttcgtctgcaataggagtttttgaggattaagttgaggttttgtaaagaagacttgttcgttactttttttgtggattattaagatatatcctatgtgtagtttatgcttaaaatttaaaaccaatgttgaatacagccagacccagaattgtcagtatcagacaaccgaggtatggactgcgattctgttcttccctggtggtgggctgttacgtgtagatctttgcacggcgtgagaataccgtcggttgtgcgtgggcgcatgcgtcgacgacaatgcatgctgcttaacgtgctcacgtggacgagaatgtgttgcatcatgctctagcatgcgaacatgtgcggtactgacatggtgcgtagctaagctattgtacacttgctttttcatgatgcctcgtgttaacgttgtcagagatctgaaa

SEQ ID NO: 35245 - DNA, 2021 bp, Zea Mays
atactgtacaggccaattcgttcgcagactcgccaaactgctgccccgagcggccgagcccccccccccccccccccccccgacctcgaaatcctccgtcttcctcctcgccgtgtcgggcctcgccttgcatcgtccccaaatccaacccaaactcctcaatctccgtcactggcatggcgtccgataccgagggcatcgccgccctcttctcaatgtacaacgacgacgaggaagatgaggacgccgacgagcccaaccctccgtccccagcgccgctcaccaccgtcacctcctcgtcgccgctgtcccctcaagccgggggcgaggaccctaacccttccctggcgcctccgtcgcctccccgtcccgaggagtcggccagtctcaaaaccctagtgagtccccacccttccccggcgcgggcgctgctaccgccacttccctcgcggcgctcttcgtcgcccttcgcagcgtcgcccccctctccgctacggggaccatcctccgcgccgccagccgacctgccgcgcccgccccggcgcggggcgcttgcaatcgtggactatgcgcacgacgagatggctatgtcgcccgagcaggaggatggggagatcatgagccacacatacagattcgtttcagatgctcaggctgcagaggggaatcttgaagaacgaactctctctggcacagttcatatcatgacaccaaatactccagcagaattgtctcagcatgctgatgcacctgagcagaaccaattagggacagacatggcagtggatataactagagcagaaattgaagacgcccaggtggaggaaactactgatatttcaactaatggtgaaaatgatgatccattgagtcgtttccttcctccacccgtgactacaaaatgctctgcagcattaaagcaaaaaattaacaaattccttgcatacaaaagggccggaaagagctttaatgctgaagtgcgcaacaggaaggactatagaaatcctgactttttgcagcatgctgtgcgataccaagaaattgatcagatagggacctgtttcagtaaagatgtttttgatccttatgggtacgataaaggtgactactatgatgagatagaagctgaaatgaagcgtgaacttgagagaaaggaacaggagaagaaaaggaatccaaaagttgaatttattactggaggagtacaaactccacatagtgcatcaataccgaagatcccaggtttggcgggtgtctgtacactaccggtacctacagaaggtgtacagaaagagactaggccaaacaagaaatcaaaatgggataaggttgatgatgatgttaagaatcatgtagttcctagtggacacgacaacttatcagcaactgcttctgtggcactcctgacttcagctaatgttggtgctggatatgctgcttttgcgcaacaaaagagaaaagaagctgaagaaaagagaagcgatcataagtcagacagaagatcgtagcaccactttttttttttcattctgagcagtcagcgtatcatttagtttttcagtaacatagttttgtattgtgggtaaggaaaagaaggaaacagttaaaatcagtccgagggaaatggttccagaaaagcccctcagagcgacttgttgtcttatacaggtatcagaaacttaacgttttaggccaagaaaaagagaacagtgagcgttctgcacttctgccccccgttacggtggacaattactcctgtcctaaaaagaatgcaccaaaattgaatgcaaaacatcgccagcagcagtcgctcatcatatccgcgtgatgttttaggactgacgtgcgatctgcagtcctacaggctacgtgctacagtgcggtagatccgtagatgtacaagataagtcgcttctgcagagtatatggtagcgctacaggcaacagatgagtcaccgtgtgccccccaatagtaaagataatgacataggcccagctcaaattatttatcattcacggtg

SEQ ID NO: 35246 - DNA, 1293 bp, Zea Mays
atcctgacactctgatcggccagcaacttgacacacaattagtatgggatgcacttactggggatgagctacattcatttgaacacaagcatatagttcgggcatgtgccttctctgaggatacacaccttttactcactggaggcatggaaaagattttgcgtgtgtatgatatgaatcgtcctgatgcagctccaagagagcttgacaaatcacctggttccgtccgaactgctgcttggcttcatagtgaccaaactatattgagttcctgcactgacatgggtggagtaaggctgtgggatgttagaactggaaaaattgtccaaactcttgaaaccaaggcttctgtcactagtgcagaagtaagccaggatggcaggttcatcactactgctgatggctcaagtgtaaaattctgggacgcgaatcactttggccttgttaaaagctatgatatgccatgcaatgtggaatcggcttcacttgaacctaagtctgggagtaaatttgtcgctggaggagaagatttatgggttcatgtatttgatttcttcactggtgaagaaatagcttgtaacaaaggacatcatggtccagtccactgtgtccggtttgcaccttgtggtgaatcatacgcatcgggttcagaagatggcaccattcggatctggcagcttagcccggctaatgctgatgacaatgaggtggccaatgcaaatggcaagacaactgctggggtaaacgaagttacaaccaagatcgaaggcttccacattcccaaggaggggcagaccgaggggagattgccatcagagctgcagtggtcattcagtttccctctgcggagtcatcatgtctgcgatccaagggtatcctggcttcatgagtcatcatcagcactggggaaaaacaagcaagcaaatggtggtgggtttttggatggggccctcgctttgatagaacatagcaattgtagcgtcaaaaataaacaagagttgggtagtttaggtaccgtgtttgcgttcattaaagtgaagtattctgtatcaccacagtcccctaaaaaaatacttgaggccttcatcgttggaacaccgaccttcaaagctgtagaccacttcttgatcctgaggtatcccataaggagaacatctgggatatggcacatgtttcgttttgcagcgaacatccctgctttcgcaaaagggaatcgcgtcacatgccccgccatgtgagtcaaacttggctgaacggtgaatgcatctgatcggcctttctgcgatggtttcg

SEQ ID NO: 35247 - DNA, 1187 bp, Zea Mays
tttattcatgtgaaggggctttgtggttttacgtcaaaaagcaacatctattcagcaagattatgcagaagtgaaatccaccaacactcagtctgtttcggagctcaaggattttgtgaggaggttgcactcgctaccggagatagctatgctttgagtacattgaggagatgatacataagcaggaagttattgaaaacgtccttcgccttttggtgttactttctcttacaaatgccgggcttccaaagaagaattttgattacatgaggcgggagatacttcatagttatggctttgagcacatgcacttattatacaatctggagaaggctggccttcttaagaggcaggaatcaagaagcaattgggttggtattacaagagcactgcagcttatagttgacgtaaatgatacagcaaaccctactgatatatcctacatcttttctggatacgcacctcttagtattcgccttgttcagcatgcagtgagatctggatggcggtctattgaagaactgttgaaactattgccaggcccacatctggatttgaaaagaggtggtttgacaattaattcatcaccggaggtacatccaggtttaggggctcaacagagtattgacagggttggtcatcgctctctggttttggttgtattcattggtggtgtcacatttgctgagattgctgcccttcgcttccttagtgcacaggaaggaatgggctacgactttcttgttgcaacaacaaaggttgtcaatggaaacacaatactcagacccattatagcaaatagcaaagaggggatgatgtaattttattccttttctgtgcatgtgttttttgtaattgcaattgcagacaaacccaagcttgtgggttttcttgtttggctgtgagttcgtgtttggtcagcaactggacgataaggctaaccacgcttgttgatagatggaatccaacagtcccattttttgttctgttctgttctgtagtacatccgctaaactgtaaatcctgggtttcatgtgttcgtctgtctttttattcaataattgcttccttgaaggccgtttatgttgtttgtggaccaatattgtgaaaaaagaaagaatgtatggaacctgttgcaaatctgcatattcttattcctcttttttactgaaggaaaatattgtcca

SEQ ID NO: 35248 - DNA, 2155 bp, Zea Mays
cgcacgactttcattggcaggccggctggaacagcggaacgcaggaagattcccagctcgttcctgccactttcccgccatcttctcgcccggcatctataacagcgcgtactcctcccgttgctttgttcttgttcatcacccgtcttcccccaatggctccgccttcctccgccaggcgcttcccatggtcagggacgaccgacgacactggcggcagcgagctctccctgccccgcaggcgctggcagtcagttgggctgcaggttaggagaacgaggaggaagccgacggaggggctgtttggattcagacggatcatggaggcggagttcatgggcatgttcctcccggtctttgggtcgatgcttcggagagtggtctcagaggaggtagagaaagcaatgttcagacaattcagtgcacaaccagcacctcgaaggttactggtggacaggaatcagcaccctcggtatcagctgatgttcttgaatggactgagacccgtttacacaatgacaaagctagaaccagatgacggaaaggcgctgaaggtagctgtagtcgaaaggctcgaaaacggtcggacggacatcgtcagatacggccctctttcttctgctagggttgaagtcgtagctctccatggcaacttcaacgctaaagacgaggaatcctggagccctgaggagtttcagaagcacatcgtgtccggtcgagagaaaagcgcccagctcctcactggcaacctggcactcaagctcagtggaggcgaggctgtccttgagaatgcaaccttcaccgataactccagcttcaccagcaccaagatgttcaggctggggctgaggcttgtcggttcttctggagagagagttctcgaaggtgtcaccaagccttttcgcgtgaaagagcgcagggtagaaggattcgaaaagcactaccctccaatgctggacgacgaagtgtggcgtttgaaaaagattggtaaaatcggcgcttaccaccaggcattgtcagacaatggaatcgattcggtgcaagagttcttacgggcttacatgaaggatgaacagaagctcataaagattttcaacaagatgccacagtcgacatggaaatccatcgtagagcacgccatgacgtgcagagttggcgacagtctttacctctacgaagctcaggacaaggatgcgggtcttttctttgatgagttataccagctcgttggggcgaagtttggtgactgttacaagcccattgaccagcttaatgaaatagagaagaatctagtggaagccctgaagcatggggcctaccagaatatagatggcctgcagcctaactacaagatggtgaacaactaccctgtgctcagcagtttccctgctgctcagggtacttccctgtttagcgctcttcatccaaatcagcaggcactcagctatggtgacagctcgactggtgtagggtttggaacaaggccttcaagggagactttcaacacatcccttggatccagtaatgagccacaaacttccaactatatggagttaagacatgagcaaacaataaacagggttctaccatatgatccaagcaatggaaccttgttacccagaccgagaatcacccagttgcagataccaaactctgagagaacattttttggtcctcctgctgttattccaaacaacattctggttggtcacggtgttgcgctctctgaaggatcacacagtggttttcctgtccacagtttatcgtctacggatgtggtcatgtcactgatgcaatccccattccagcttccgacaaacagtgaccattctgaacagcaatgcaatggtcaaacatcaacgcagttacaacagtttgtcactggatgccagccatcaagaacaaacagtttcgacttgaactcgtgcgacgaactcatacagaacttcatttcccagatttctaacagtggaggggcatctacgccactttcaccccgcaaatgggtcaagatcagagctgcgttgaagctggcatctgtagggaggctctcaaggaggggtccgcattgcaacccaccaaggccaaggcttgtaccgataccatgagcactcttaagaggcatcgatagttttttttttttcaactgataaca

SEQ ID NO: 35249 - DNA, 1844 bp, Zea Mays
gaaggatttaagacttgatgaggaccaagacaaatggtagagatcttgttaggctgaaatggtagagaccagcaatggctgaaatgtgggccgccatggactataaaaaaagagcatcaaggaagcttcggaacacaaagagcgactaattgatgaagtaatttctattgttgttgccaggctgacctacttctatcctaccgctgcgaagttgacttgaaagctctcatcccacatatcccgagaagctgtcagtctattctgatgtctgcaacttcaagctctgatgttgacaagttgacaaaactacttctgcataacccatttgttctaactctttcggaggttggtcaagcaaaggatgatgtgatccccaaaaatgttcagcagttttggatctcctgtgatgccaaggataaaatacttcatatccttgcacttctaaagtttgagctcattcagaagaaagttcttatatttgtaaactcaattgatatggctttcagattacgactgatcttggaaaagtttgggataagatctgcagttttgaatgctgagttgccacaaaattcccgactacatattatagaggcattcaacgcaaggctatttgattatctaatagcaacggatgacactaaaacaaaggagaagcaaaccaatgaggaaaataaaaaagaggcaacattgtcccgcaaacggaagaagcaaaccaataaggaaaaccagaaagagcaaaaggtgtcccgcaaacatttgcaacagactttagatgctgaatttggagttgtcagaggaattgacttcaaaaatgtatttacagtagtcaattttgacatgcctctggatgctactgggtatgttcacagaattgggcgaacaggtagagcaaataagactggtgcatccatatcgcttgtttcaccaaaggaggatagtacttttaaagagattgagcatatgttgcaagatgtcgaaaagaaagatatggactgcatttcacctttcccattacttacgaaagatgctgttgaatctctacggtatagggctcaggatgttgcaaggagtgtgacaacacgtgatgtacaggaagcgcgtcgacaagacataaagaatgaaatcctcaattctgagaaattgaagtctcattttgaagagaatccaacggaccttgatttgctcaaacacgataagttgctatgcaacaaggaaattcctgcatacctgcgtgatgtccctgactacctaattgatccgaaaacaaaagaagccagcaatgctgtcaagctttccagggctgctatgcatatcgacaagccccaaaggcggaaaaggcaggggtttaagggaggatcagggaaaagcagagaccctctcaagacattctctgctgagggcaaacgagggagacggaggaaagaaagggagggagaaccagatagaagaaagaagagtaagaaggcgtgaagttgatttttcaagcagtttgctatcaagctcgcccaattttgtaggctttgtttgaagcaacttgacaaagtgctgtatcggtgacactcgtaggtcgtagctaaggagtatgtttttattgcctgatggcaactcttaatttttaaagtgtactcgcttccccccttttcctgtactgttaggaagcactaatgacgtgaaatttcattcaccaaatcaggggtatttaaagctaataatgttaagtccccccaggtggaacattcacacaaaactcgcccattccccgtggacctgtcccagatgaggccgcgcacaatgttccatttcttcacctatcaattttagatttactaaaaccatattca

SEQ ID NO: 35250 - DNA, 4313 bp, Zea Mays
gtacgatcgttggtgttgcccatccaaatttctagactagaggaccttggcaaacgcccaaacagacttgactgtgtagaaccactgaaccagcgtcgtcttctcgagttgaagtgtgctgcctgttcacccctgcgtctttccctcccctgttacgattatttgcctattgggtgaccgccgacgccgccccacgccaggtgctcaggtcttcggcgggccctttgctggcgaggagcaccaaccctatacggaggatattttggttgcgcataacaagttggatagttctgggttttcgctctgaacaaaatggacaatgctcagagtgagaaccgaattgataccaagcaagatgatgatgtgcgccagatcaaacatgatgatgaggaggctcgccttgaagaatataaaaagatcattgatcaaaagacttccctccgccggagcaacctaaaccctgaaaggcctgatgcaaactacctgagaaccctggactccagtatcaagcgaaatacaacagttataaagaagttgaagacaataaatgatgagcagaaggatgggctaatggatgagttaaaaagtgtgaatttgagcaaatttgtcagcgaagcagtttcttatatttgtgaggccaaacttcgctctgctgatatacaagctgctgttcaggtttgctcactccttcatcaaagatacaaggacttctctccttgtcttatacaaggtctactgaaggtcttctttccgggaaaatctgtagatgacttggatgcagataaaaattcgagagccatgaagaagagaagcacactgaaacttttgattgaactgtattttgttggaattgtcgaagatgctagcatatttgtaaatattataaaagatcttacatcagcggaacatttgaaggaccgtgaaggaactcaaaccaacttgtctcttctatctacctttgctcgtcaagggaagttttttttagggctacaacctcatggtcaagaagcttatgatgagttctttaaggagctaaatgttaccgctgagcagaagaagttctttaagaaagccttgaactcttattatgatactgtagctgaactactgcaatcagaacatgtgtctcttcgtctaatggaggcagagaatgcaaaagttttaagtgccaaaggtgaactaagtgatgagaacacagcctcatatgagaaactcaggaagtcttttgatcagttactacgtggtgtatcctcgttggctgaatctcttgatatgcagcctccagtgatgccagatgatggaaatacaacaagagttactacaagaactgatgccttgccttcttctggaaaagattcatctgcattggaacctatctgggatgatgaagataccaaagctttttatgaatctttacctgatctcagagcatttgtgccggctgtattactgggagaggttgagccaaagtcgaatgagcaacatgctaagggccgtgagcaatctagtgagtccacttcagaacaagagactgaactacatgacgattttcaaacttctgcaactgaacatcaactagaagttaaattagatggtggagtgaaagagagtgatgacaaagataaagagaagggaaaggatggagaaaaggaaaaatctaaggagaaggatctggataagaaaaatgacagagagaaggagaaaggaagagccatggacggtgcaagtctggataacatcttgcagaggctaccgggatgtgtcagtcgtgatctcattgatcagttgacggttgagttttgctacctaaattctaaagcaaatcgaaagaaacttgcgcgtgccttattcaatgttaataggacttcactggaactgttgccttactattctcgtttggttgcgacactatcaacttgtatgaaagatgttccaagtatgcttctgtctatgcttgaagaggagttcaactttttaataaataagaaggatcagatcaacattgaaacaaaaataaaaaatatacggtttattggggagttgtgcaagttcaagatggctcctccagctcttgtttttagctgtttgaagtcctgccttgatgatttcagtcatcataatattgatgtggcttgcaaccttctcgagacttgtggccgatttttgtaccgctcacctgaaactacgattcgcatggctaacatgctggagatactgatgagattgaaaaatgttaagaatttggatccacgtcacagtacacttgtagaaaacgcttactacctttgtaaaccacccgaaagatctgcacggatatcaaaagttcggccacctttgcatcaatacataagaaagttgcttttctcagatcttgacaaatcaagtgttgaacatgttttgcgccaactacgcaaagttaccttgggcagaatgtcaacaataccttctgaagtgctttctaaaggttcacaaaggaaagtacagccaagttcatctgattgctcttctcactgctagtctcagccgctatcatgatgactttgctgtcgcagtggtagatgaggttttagaagagataagggttggattggagttgaatgactatgggatgcaacaaaggcggcttgcccacatgcggttccttggagagctatacagctacaagcatatagattcatcagttgtttttgatacactgtaccttatcattgtgtttggtcatggaacacctgaagatttatttggagagctacgaccaaacatgtctaggtatttatcaatcgaggaacttgttgctgcgttagttgagcttgaagaaaatgagcgctcagccccagtagaaaaggttgaaaatgaaagacactcggacaatgaatctcataaaagacaggcacgagatgctggtccatctgtgaatggtggaagcgctgcaaatggaattgaggaaaatggcaaggatcatgaaatagcagatagtgagagctattcagatagtggcagcattgatggacgggaagatgaggatatattatctgaggataaatcaaatgatggctcagataatgaaggcgacgatgaagatgatggcattcctgttggttctgatgaagatgaaaatgttgaggttagacagaaagttatgaaggttgatcctaaggagcaagaagactttgatcgagagctcaaagcccttcttcaggagagcttggagtcccgcaaatcagaggcccgttcaaggctccctctgaatatgatggtaccgatgaatgtccttgaaggttcatcaaaagactcgagggccacagaatctgagagtggagaagaaacagtagatgaagagggtggcaatgctgggggtagcagcaaggtgcgcgttaaggtgctaatgaagaaagggcacaaacaacagacgaggcaaatgttaattcccgctgatagttcaatcgttcgaagcacgaagcagcaagaagctgccgagcttgaggagaagcagagcattaagcggaggatccttgaatacaatgaaagggaggaggaagaactgaatggagcatcacaaatggggaactggggtcaaggagctaccaacaccagcagtatcagatcaggtggccggggcagctgggatggttcagcacggggaggtggtcgacaacgacaccacatcgccggttctggtggtttctatcacagttatggcaggagaagatgagtttgtcctgatgggaggtggttggcagaggcgccacactgtgggttcttgtggtttctatcagttgttgcaggagaacagttagctgtgtgagctattttgtcctgagcttttttttggcagggccatgcttctctctatttaaccgcctaacgatcagattaacagggaagaaatttcggggaggttaacacagcttgatggacaattgcttccaccaccctaatctgaaagataagataattctaccactgatgggagatagcaatgccttgaaggagctatttttctggtggcccgaatggcttgagttgcttggtagttatgggcttatggctgtacctggagagcatagataccccggttgctcatgtacatataataataacataatttggcaacgagtgtgagtcgtttggagattgtgtgcgcacttgtatctgagtatggatctgatggtggtacttgcatagtttagatgtgcatactgtttcgacgccatgtgtgtgtatggggcacctgataaaaaaattactgtttgattcccatttagttatgcgtgcaggagttattatgattaggggtggtaatagatgacgat

SEQ ID NO: 35251 - DNA, 1405 bp, Zea Mays
gatcgcaacgaatattggtagcggctcccccagctctggaccttctcaaacccttccccgtgggccgtggccgccgtctgcctgtctccttccactcgccactccgatttccctcggtcagacgccgaagccgaaccctgactccaattctctcgtgcgagtgacatctaggtttccagacgccttcggtgagtacagggaaggaagtcgccatggctgacgacgaacaggcggagaagaaggaggaggtccccgagcttgctccttttgacccaaccaagaaaaagaagaagaagaaggtggtaatacaagagccatcagatgaggtggataacttggcagagaagacagagagcttgactgtaaccgagtctagtgagccaagctttgcgggcatgaaaaagaagaagaagaaacatgtggaacttgattcttctcttaccgagaccggagatgttgatgacacaggagacgatcaagttagagaggatgaagaaggagaagggattgtgctcgctggtgccgctgccaccagatacccttgggaaggaactgacagagattataagtatgaagagctgcttggcagagtattcaacattttgcgtgagaacaacccggatcttgctggtgatagaagaagaactgttatgaggccccctcaagtcctcagggaaggaacaaagaagacagtttttgtgaacttcatggacttgtgcaaaacgcaaccagaacatgtgatgatgttcttgcttgctgagatgggaacaagtggatccctggatgggcaacaaaggttggttatcaaaggaagatttgcaccaaaaaatttcgaagcgatacttaggagatatatcaatgaatatgtcatatgcaatggttgcaagagtccggataccattctttctaaagagaacaggttgttcttcctccgatgcgagcagtgtggttcatcgaggtctgttgctcccatcaaggctggattcgttgcccaagtgggccgtcgtaaggctggatcttaagctacctactacttgcctgaaatcgcttcccgatgaagacaatgcaaactagtttgctggtccacaaaaatcattgttgcactttcccttgtgcctacacagttcactggatttctgctgttcgctatacttggattggtgctgtgaatttatttcgtgtgatgagaggatttgtgtttgcggctcacttgtgtttactacgtttgttttgctcgtgattttgctgtggaaggcactgtcgggagcttcccgagttaggacgagtaacaagaaaacgtgttgcttccattcagataaaaagcaaggctgcagcattctgaactgttcctcagcttcttttccctgcacttatttgggtataaaaagctaagaagatgtgattt

SEQ ID NO: 35252 - DNA, 1211 bp, Zea Mays
aatgcctcccctttttctaggtcaaacgtgactattttacgcctgccattcactacctacctttaagcctttaattctcttcactgttggatttctttgttcagtcttggcgggggcaccaacaaaccatgcattaatggcgaccaagcttccatcgtcggaggggcaatcgagttcgtgaaggagctggagcagcaggtccagtgcctcgaggcgcagaagcggaagctgctggttcaccagcgcgtggcggcggcgaagcctgcagacgcgacgccaatgcgcgccagcagcagcggcgccagggcctgctgcgcggattcggcggcggcggcggcgacgacgagcaactgcagcagcggcttgacgacggaggacgcggcggcggaccacgcgctgccgccgcccccgttcgcgcagttcttcacgtacccgcagtacgtgtggtgccactcggcggcgcgcgaccccgcggaggaggaggacgggcggcggtcaggggtggccgacgtcgaggtgaccctggtggagacgcacgccagcgtccgagtgatgacggcgcggcggcccgggcagctgctcagcctggtcaccgggctgcaggcgctccgcctcgccgtgctccacctcagcgtcgtcaccgcgctggacgccctggtcctctacaccaccagtgtcaaggtggaggaagggtgcggcctggcgacggcggacgacatcgccgccgctgtgcaccacgtgctctgcatcatcgacgccgaggccaccgagcagcagctgctcgcggcagcggggccgcaaccgcaatagggcccgcccgcgcccgcgagccgacctaccggcgatcgagaggaggccagcgtagaagcgacgtacgtgactccaagtcatgtgtacaagcataggcgttttgcagggtccggtgaaacgccttgtgtagtttgatctttgtatttttggctgctttttttttcatatcttttcagtagatgtgtaagcgtgcgtgtgttcagcatgttgtcacgatgtttgattcagcgttcgatctgtgacgattagctcaccagcagtccatttccacattgttcttcaaggatgtgcaggcggccgccacaatttttttttacgctgcttcgtgtgttcccaacgttcgaattctattcagactcttccggctaatatgttttctttttcaattagttaaacttttc

SEQ ID NO: 35253 - DNA, 2559 bp, Zea Mays
gttggttgtgcattactgcattgcatccagtaaaaaaactacagctcaaccaaatttagccgagcggagacgcacaagccggcgtgggctgcattacacgagacgatcaacaagggcagcggcccagcagcaacgaaccaccgcacaagcgccaggccgccagctcgcactctggtccagccacgcggcgccgctgccaccttcctctcaccgtgtacgtcttcggcgtacacgtctctctctctctctctcctcccctaaaccctacgctgcccttctttccctccccgtctctccctcccgtgcgggcggcggagctgatgagatcccggccatggcgggccccacctcgcggctcctcatcctcgcccgccgcgccgaccgacgcagatgcctcccttttctcgttccccgcgccttgcaggccgcccccccgaccttttctccggcgttgccgctacctccctgcctccccgcctcaacgccggtgatgagctattcaagtgcatttacaagtgtacatggagagaggccttcatcagaatatgcaaagatcaggaaggagtcactggaaacccagtttggaagaatattgggttcaagttcacgcaggcattttgctgaccgtggctttggtccattccttgctctatacagggctgctactatctcctttcatgttgtaaaactcactatttggcatttgttgctcaatgatatgcataaaagagcagaaaagtttcgagagaccttgatacgcttgggtcctttttatatcaagcttggccaagcattgagcacacgccctgatatacttcctagtgcgtactgtcaggagcttgcaaagctacaggatcaaataccaccgtttccaactcgcattgcactcaggaccatagagtctcagttgggttctcgaatttctgatttgtttgctgatatcagcccagagccgattgcagcagcatcactggggcaggtttacaaagtaatgcagctcatctacgatctggagagcttgttgcagtcaaagttcaaaggcctggaatggcgcccttgctgactctagatgcacttttgttccacatgattggaggacaaatgaaacgatttgctaaggctcgcaaagacctattggtggccgttaatgagattgtcagacacatgtttgacgagattgattatattttagaaggaaaaaatgctgaaaggtttgctactctttattcacatggttcaagtggggtcaattctgaagctagtacaagtatcaaggtcccaaaagtttactggaactatacatgtaaaaccatattgacactggaatggattgatggaattaagctaactgatgctgagcgcatcagcaaagccaatttgaacaggaaaagaatgatagatgagggtctctattgctcattgcgacaactgcttgaagaagggtttttccatgcagacccccatcctggtaatctagttgcaactgaaggtggatctctagcatattttgactttggtatgatgggagatattccgaggcactatcgtgtggggcttatacaaatgcttgtacattatgttaatcgggactccttaggcttggcgaatgacttccattcactaggatttgttcctgagggaacagatttacttgcagttgcagatgcgttgcggttttcctttggtgatgtcaggaggcaatcaaatgatttccagggcgtaatgaaccatttgtatgatgtgatgtatgaatttagtttctcccttccccctgattatgcgttggtgataagagctcttggttctctagaagggactgcaaaagcactggatcctgagtttaaagttattgagagtgcatatccttttgtaattgggagactccttgcagaccccagccctgatatgaggaaaatattgcgggagcttcttatatgtgacgatggatccatcagatggaatcgactggaaaggctgattgcagctatatctgaacagtcatcagaatcttcaagcgcatcaggagctgactccagtgagaacgccaatggaagtcctgagtggagatcatttgatatgcattctgtgattgcagctacagaagacctatttgatttcattttatcgaggaaaggatggcgggttcgggttttccttgtccaggacatcgttaatgcttcagacgtgttccttcaagaagcgacattcccatatgtatatgcgaaagtgggaaagataggggacctaaatccagagagaagtaagatgatcaggaggctggtgaatactgtgcaatcgttccgccaagctatcaatttggctccagatgcttggagcgccatgctaatccgcactttgttgaaacctgaatcacaaaaatttgttcttgatgtgtttttggccctggctaaccattccagttacaagattccagaaacattctggctatttatgtcaagatttctaaattacttggacaaacaagatatactttaggaacggttaatatatcaattcctttttttttgttatggcttgaatttatttattttagatcgg

SEQ ID NO: 35254 - DNA, 5450 bp, Zea Mays
gaagacgaggactggcacgcggccgcgacggccggaaggacgcagcagccgccgccgccgctcacccacgacgacaaccgcagcttccttcggatgctgcgtgacatgaaagagaagctgggcgtggacgcgcccaaggtggaggtgcgcttcgagaggcttaccgtggaggcggacgtccgcgtcggccgccgcgccgtcccgacgctgctcaacgccgccatcaacgccgcccaggagttagcaacgtctgttcatatgtgtgttacaaggaaaagacctatcagaatcataaatgaagtaagcggggtgattcgaccatcaaggtgaatgtgtccccttatctttcattagctaccagagtacagatatagatcccaacatcccgttccatctcaaacctaagcgcttgatcaaatttagaagataagttactcaaatgcacaagtatggatttgatagtctgttattagtcaacagttttgacttaaggcaaacttagatcccttatatttcagacggacagagtaatttatcaagatatattgactttatatgccattctgtcaggatgacactacttctaggagcacctggttccgggaagacgactctactaaaagcgttagcaggaaaattggattcttctttgaagttcaaaggaaaagtcatgtacaatggagaagaaattaattactcaacaccacagacacagtacctgcgtacttatgttagccagtatgatcttcaccatgctgagatgacagtaagagagacaatcgacttctcttccaagatgcttggaaccaataatgaatttgatatgctaggagaagcaataagaagaaaaaagggtgtcatcaatgaagtggatcaagatcttgattcattcattaagctcttctctcaggccaccacctttggagaaggaagcaacctcacaacaaactatattatcaagatacttggcctgtctgagtgtgctgataccctagtaggagacgagatgagaagaggaatatctggagggcaaaagaagagagccacagttggtaagcatttctataagggctgatggtagaagacaaatacagccatatataggttttatgtagctgccaccagaaggacacatttcaatctgaaagaaaacgactactgacatttcaccacctcaagaatgtaaaatatagggtaggaatcttcatgatagcgaagaatgactagctctaaaatagaatgtttataactctcaagtaagatggaagtaacaaccagaaattagaatgacgaacagagtaaggagatacttaactggaacctaacctaagttggcatacgctaaagtgaagttgtttaatgcaggggagatgctagttggtctggcaagatgcttctttatggatgatatatcaacaggtcttgatagctccacggcatttgagatcatgaagtttctccaacagatggcccatttgatggatctcacaatggtaatttccttgttgcaaccaccgcctgagacattggaattatttgacgacattatacttttatgtgaggggcaaattgtgtatcatggtccccgagaaaatgctacggacttgttcgaaaccatgggattcaaatgccctgacaggaagaatgtagccgatttccttcaagaggtaatcaaccatcaaatgtgcctaactgccaataataaatagctaaactttgagataattaatacatcagatcctcaaaatgtatagtgttcaaggctaactttgagataattaatacatcagatccacaaaattaagcaggcaatagatgacttacaattctatgcatgagcataaaatgtcattgttctgcaatacacgtgcttttgcaaaataatgtaacaagttttctccaattggccactgaccaggtaacctctaagatggaccaaaagcaatactggactggtgaccaaaataagtatcagtaccatacaattgaaaattttgcagaatccttccgcacgtcatatcttcctcttctagtagaagacaaactgtgcagtccaaacaatactggaaagaataaggaggtaaaagtgaatgcaggtcgccgagtatccagatggaatattttcaaagcatgcttttcaagggaactgctgctgctgaaaagaaactctccggtccatatattcaagaccattcagataactgttatggctttggtgatctccacacttttcctgagaacaaaaatgagtcacaattctgtacttgatgccaacaagtacatgggagcactttttatggctgtcgtcatagtaaacttcaatgggatgactgaaattgcaatgacgataaagcggcttcccaccttctacaagcaaagagagctactagcattgccaggatgggcactcctttgttcagtttaccttattagcatcccaatatcgcttgttgagacaggcctttggacaggcttaacctactatgtgattggatatgcaccttctgctatcaggtactcatctcctggtacttacatgctgaatgacttctgatgcttcagcttcaataggtaaaagcaagaaatgaaattacattgcttatggcaggttcatccagcactttctggtactttttgccatgcatcaaatgtcaatgggcttgtatcgcttcttagcggccataggaaggacgcaagtgatggccaacatgctagggactgcagctcttattgcaatctacatacttggaggattcgtcatatcaaaagatgatctccaaccatggttgcgctggggatattggacgtccccgttcacctatgcacagaatgcgatcgccctcaatgagttccatgacaaaagatggaattcagtaagcactaatttcaaaacttggaagtgattgctatatggtagtatatcctatttcaaattaattacaataaggttcttgatcttttgtttctggtaggaattttattataacggtgcaaacaccgtcggtgaagctatcctcaagatcagagggctgctcatggagtggcactggtactggatttgtgtcaccattttgtttggatactcgctggtcttcaacatcttcagcatatttgcattggagttcatcggctgtatgtataccaatctatcacaaacctcctaaatattgcatttaaacgaaaaaataattatctgcttgtttactgcttgcagctccacacaagcatcaagttaacatcaagaccacaaaagtgaatttcgtgtacaataggcagatggctgaaaatggcaattcatcaaatgatcaagttatcctcccatttcgacccctctccctggtctttgatcatattcaatattttgttgacatgcctaaggtaatatcttgttcacttattaagatcttacctggtagcttcattaattcctatcacatactgaagacaagaatacaaatatcccaccaggagatgacaaaaaatggagcaacgaagaaaaagcttcagctgctacaagatgtcagtggtgcttttaggccaggagtactaacagctctgatggggataactggcgctggcaagacaacattgctcgatgtattagctggaaggaaaactgggggatatatcgaagggactattaagatagcaggctatcctaagaagcaggatacattctcaaggatctcaggttactgtgaacagagtgacattcattcccctaatctcactgtttatgagtcactgaaattttctgcatggcttcgtctaccttcaaatgttaaacctcatcaaagagacgtatgtgtattgtgtttcaacctcaccccctctttatccctgctggagcctagaaactagtttctgacacaaaatttctcttaaaacacatttcagatgttcatcaaagaagtcatgaaccttattgagatcactgacttgaaaaatgccatggtaggcatcccaggagcaactggcctgtcagccgagcagcggaaaagactaacaatagctgtggagctagtggccagtccctccattatattcatggatgagccaaccaccggcttggatgctcgtgctgcagctattgtcatgagaacagtacgaaagacggttgacactggacgaactgttgtctgcacaattcatcaaccaagcattgagatttttgaatcttttgatgaggtatgaacaagtttagatggtatagccatataagtggacaaaacatagacacaacaagcaattgagaaacatgatagtccaatgctggagtggtgtcaaggtaattacacaattaaaacaaacatgattctcgacaaacttaaacagcagtcaaattggacaaatgtacagaagtatgaatgaagttgtaaaatgcagttgtaagttaaagtagaagacaatcaaagaactacatgataaactggtctttcttttatacaagtacgtataggcactatggaattaccatcctaagttttaaattaaatttgttccatttcagcttctgcttatgaaaagaggtggccagctcatatacagtggttcggccataccaggcgttcctaaaataaacaagggacaaaacccagcaacatggatgttagacatcagttcacacataacagaatatgaaattggagtggactatgcagaaatttattgcaattcctccctgtacagcaaggatgagcaagacgtattaaacatacttggaatcgtatatggatcggcattgttcctgggtttcatgaattgcagcatcctacagccggttgtggcaatggagagagttgtgctctaccgtgaaaaggcggcaggcatgtactccaccatggcatacgctatcgctcaggtgtcggtggaattaccttacatgttggtgcaagtgatgatcttctcatcaatcgtgtacccaatgattgggttccaggtgacagcgagcaaattcttctggttcttcctataccaggtgatgagcttcatgtactacactctatacgggatgatgacggtggccctgacccccaacatcgagatcgccatggggctgtcgttcctcatctttatcttttggaacgtcttctctggcttcataatcgtgagagagatgatgcctgtgtggtggcggtgggtgtactgggcggatccggcggcatggacggtttatgggctaatgttctcacagctcgcagacaggacggagcagatcctggtgccggggctcggggagcagacggtgcgtgagttcctagaggggtacctgggcctgcaggatcgctactttgtgctggtgacctgcctccatcttgccatcattggcctcttcgtctttctcttcttcctcgccatcaagcacctaaacttccagcgcagtttttgaatcttgacagctacatagaatggaattgctgcaattctcagttccgtgtgatgtttacatg

SEQ ID NO: 35255 - DNA, 1046 bp, Zea Mays
cttttctctgattctgtaccgcgcccagcgtcctccctgctcctctgcagcgtgcgtcccggtgccctatctactccagccatggcgtgtctctgctccatctccctcgcggcgccctttccaggcgtgctctctgctgcatctcgccatcgacgctggtcgagtcctcgtctccaacttcctcacgctcggctcccaggattgaaggtgagcctgtcaacctcacggaagataatccagtcactcatggaatcactgctgctagacacgatatcctacaatttggattggcttcaacacctgcaatgttcaatagtacacttacagaagatgagagtagtcatttacctgttgttggagtcataatgatgacatattattcagtcaaggggagattccaagagtggtggattgaggagaaagtgaagctcagttcaaagttcgtcaggtgttcgattgaaggcttcaatcagagactgtcgtcattcttgcaaatattaagtcaagttgattatgcagccccttactcctcgtcgtcgatccacgccgcgtccacgacatgcccgtcgatcccgacgatctatcttcctatgcgcgccacttgcgttgagatccgaagctcccctgtcatgctcgaccctggaggtctccaacttgtcgacatcccttacgtcgtcttaaaatcccaagagtttggataaaccaacaaatcccgtgtggtgcttgccgggtgctccgcaaaaaggtcttaacaagaatcattgacgtctgcgcgaatttatggtcaatatggtacgttaaataactacgtgatgcggggaaccagagctgagtcaaccccaagatgatgtagcgggtggactactacgcatggtgaagctgatggaccaacctgaagatggttaaatcaagcaagtgctcggtcgagggatgctcgtcaagtggacgtcgtctaacaaacactaacctagtgttatccaggtaagccccggtgcatttgccacctccttgtgttttaaaatctttatcaccttgtttgatgcatt

SEQ ID NO: 35256 - DNA, 1332 bp, Zea Mays
ccttccgcccttcccttggctacctctgtctgtctgtgtcttgtccagtccgggtctccagggctccggcaccggcaggcagagagctaccaaaccccaccaccacgaacggccgccgccgacgagacgggggcgcatggcgactgcatcctccttcaccgccatcttcttcagcagcgccttcgcggcctgcttcgcggagccaaagtgcggctccagctgcaaaggaaggcaccactaccgtcgccaccagtggctgcagcagctgctgctggaggcacgctagccacaatcatgtgcatcgccagggaggaaggggttgccgcgctctggaagggcgtcatccccggcctccaccgtcagttcctctatggcggcctccgcatcggcttgtatgagcctgtgaaggctttcttcgtcggaggcgctgttgtgggtgatgtcagtttactaagcaagatccttgctgcacttaccacaggtgtgatagcgattgttgtggcaaatccaactgatcttgtcaaagttaggttgcaagctgatggaaaagctaacactatcaagaggagttattctggagcccttaatgcatacgctacaataatcagacaggaaggtattggagctttgtggactggccttggtccaaatgtcgcacgcaatgccataattaacgctgccgagttggccagctatgatcagttcaaacagctggacttggtgctgggttttttgctgtttgcattggctctccggtggatgtggtgaaatcaagaatgatgggtgattcaacgtacagaagtactcttgactgttttaccaagacattaaagaatgatggacctggtgctttctacaagggattcattgcaaacttttgtcggattgggtcatggaatgtgataatgttcttaactctggaacaggtcaaaagattctttctatgaagagatgtctgcactgcaagtagggattgtgtgggacaagggtatgctgatatatatgggcggcataattgcatgattatttgaagctacaggtttgtcaaccaacagaaagcagccatatatgccatactgccacctacgtctggctcttagattacatatgacaatatgttctcatgttgcattttgattattatgtggcgatgctgtaatatttttgtatcacaaattgatcatacagaccactgtgttggtatattgtagagagcgacactgttcactacttcactgcaagttgacgttcatgccgaaacacttatgaagtttacacatccatatgcatatttgcttagaaatcgaagaatgatcgatgcacccatccata

SEQ ID NO: 35257 - DNA, 740 bp, Zea Mays
gtttgtacagtatgagacgcaagaggaagctaatgctgctatcaagagcactgacaagaggggatccacaaggtagtagctgagagagcgttgcacggacgctggatgtggggcccatactgcacggcgccgaggcaggagaaccagttgggactcgtgtggtgggcctagagcgtcagcgtggagggtgaagccgtcgaggcggggcacgttttggcgggcgaaccagtcgggacttgtgtggcgggcatagagcatcagcgcggatggtgaagccgtggtagcaccagcaccatattggacagggtagtaactgttgaatatgccttctgggatgatgatggcgagagagatgacaggtacgggagccccaagcgaggttccttatgacaggtgtcgcggcagtgcctacatgcgctcacctagcccaaggtaccgacaggagtacagtccaaattgtgatcggcgcggacgctatcctgggtatgatcgtcgtgatggagcaatgtatgaaaggcgaagccctgtatatgatcgctacgacagcctgttgaatcaatattaaggtctggttgaatctggagcgaagccctgtatatgatcgctacgactacccgaaacattgaatcaatattcagcttgaatctggagcgttcaccgttcacaacttcggtttgttaaggtctggttgctccgttgttgcctggtgcatgctgttcagcctccgccgggctgcctca

SEQ ID NO: 35258 - DNA, 2482 bp, Zea Mays
attgattggtgattgtttgatgtcgcaatcacgcaaaaacctaatttgcagcaagggtgcagattttgagaacactatgtattctaactggaatttgctcgctcatataccttgttctcctgatttgctctgctgtaatttatatggccataatcaatttggatttggtttaccatgaaacttgttttagtttaacaataaatctaggtatattcttgtactggtttcagtttgtaatggtttaaaggtcatggatcaactttcataattcaacaataaatcattggctttatagtccaagattctttttttgctgccagatttctctgttcccagagtttgatgtctctgtgcttggcagggaagatggctaccattgttactcgattgttcctgcgtgtccctgctatttgtttgacaggaaattgtgcatcgcattgttgtttgacagagaattggctaggttcactgtaattttaagttacagggttgcacaatgaaagatccggttcagtctacaaacaacacatgttcagtgtactctggaagttgcagttctgcacactcaaacacatgttcagtcaaacacaggttcagtctacattgcagaagataagctggagggaagtagtgcagaagataatcacctgagttgttgcagtgctgagcgctggcgaagaaaagtaaacaagcgacacaaaaaaatgacatgtggacgcccaactgcgtcgtgtggtggctacgacagatgaaaaataaaaaagcgacctgtgaacgtccagcgcgtcagctacaagaaatgaaatcatgcgccacatgtcatgatatcaataggcctgcaaaattattctggttgtttcttttgttctctcggaaaatgacaagatttatgaggtgtgtgtatggtctttccttcagcagtcacacagctgcaattgctgctagaaacaatgggattccagtgcaaattatttgacagtgaatgtctccattttttccttttcataattcacttatgccatgtgttgctcttatgctctctttttgtgtgactattatctcgcactataggtcaaacaatggacttcagaacacagaacaacaaaagatatccaagtatatcagcacacatgttacagaggctttccctgtgagaaaagcaggaaagtttggtaacgaaaattgcaagttggatatttggttcggtgctaagtgtgaataccctacatgatgccttatagaatatcgtgaaggtttctaagtctgttgattctacaacaacctcaagttttgcaccatcttcactataatgctgcaaaaccaggtttcaaggaagttgagaaatggagtgaaaatgctttgtggagtgtatctgagcttcatgttggcgatgagaagcagactggttctaacaaatttgtatcacctctagattttgcctcaaagactagcttgcagtttgtttcattgtcaccagtcaagtggtgggtgtgcactagcttctcttgctgttgtgtatcgaaattttgccagttagaaattgtattaatattatgtctatgttgtctgaacctataacatttccttaggttggaattatgttctattatttctgcattttagagctgatgcatttactgctttggcagccataagtgtacatctttttaaagtagcatgctgaaggttgcaaagctaaattgtctgttgttcaatgaaaacaacactcttcaaccaaaagggtcctagatattttttaatattttgtggagtaaagtagaccgatcatttaattttgtgtaggggataattatcttaactttttcattaattggttataccgtaccatatcaaggttagccgaggatacgaccgctatgacatttgttggcagaaatcataacaagacacggtgagtccgagtaatatgtatagctcatccaatgcatgaacacctttgcacttttacatctatggcactttggttacttgctttctttgtgttctggctttcctggtagcatgggagatgatttgatcatcaatatgtctaattcaaagggcaggtcctatggtcgtgttgttgcccaagttgctataatggctgggagtctattagattttacaaaccattttgctatttgtttatcaaagttgagtgtgatatgcttttattttacaattggttgttcttccatatattttggcacaacaaggaagctctcaggctaaatattttgtctcacgcctcaaggcctgatcccagcacatgagcaagtattttgtacctgtgaaccttacaatttgatttgtctgaatctattgcaactatatggtctaacggaaacaagttgtcctgctactgcccagtttgttaaaagaagaacttttctggttttcaggagtcaaggttttctcaattgcagatgctcgcttgctgctatgtgatccaaaccccgatagggcgagggcgcctgaatgg

SEQ ID NO: 35259 - DNA, 1162 bp, Zea Mays
cgtcttcattctttctccctgcccctgccctcgcctgctgaaggaagccgcctttttggagtttggactcgggaggacagcctccgcactttccgtccgtcgcgaggaattcctgcccgggcgggcgtagagcagggcgaagcattcgttggggacgaacgtttagggccggggatcggggaacacgaggctgcgcgttggcgcaagcaagcaaattttgggtcctagcttgaaggactgccatctttttttttgggatggctggaaaaggaagctatgtacctccacaatatattcccttatacagcctagataccgaagaggatcgtgtccctgccgtggaagagaaccatgctacgcgccctaaactaaaccaggatccaacacaatggtcatctggcatctgtgcctgttttgatgacccccagagctgttgtattggtgcgatttgcccctgtttcctttttggaaagaatgcacaattcttgggatctggaactcttgctggatcatgcactacgcattgcatgttgtggggccttctcacaagtctatgctgtgtatttactggaggtctagtattagcagttccaggatctgccgttgcttgttatgcttgcggatatcgcagtgcactaagaacaaagtacaatcttccggaagcaccctgtggcgatttgacgacacacttattctgtcacttgtgtgctatatgccaggagtacagggagatccgtgagagaacaggcagtggctcctcaccagctcctaatgtgactccacctccagttcagacgatggatgagctttgatctttaactgatatgaatgtatgttatctgacaaactttggtgtgtggcctggtgactagtgctgcctttgcctgttggcattttgacatatttttgttcttgggctctcacaacgctgctatgttgtttgtagagttgtaaacacgttttgaactagtgaaccactgacagttcacggaagttgtaacacagttgtaccatggaactgtagtagaattaagtgtatttttttgctatttatataggtgagaggatgagaagggaaaagaaaagaaatgcgcttatcatgcagaatgtttcattgtgtttagttctatgaacaatccaatattgtggtgagtggttgttt

SEQ ID NO: 35260 - DNA, 3501 bp, Zea Mays
gggagactggccgactggcccagtggccctatagaagaaacgggatcccgccaggcctcccgggaccgggagccacgccacgcaggcacgcacgcggaggggagcgccggccgtccgcggcggattgggatctccctcgcccgcccgtccactcgagactcgacggcacccgccgcatttgagctgagctgaggaggcgtgggggacggcgcggggatgtggcgcctgcggatcgcggaggggggcggggacccctggctccgcacgaagaacgcccacgtcggccgccaggtctgggagttcgacgcctccgccgaccccgaccccgccgtcgacgccgcgcgccgcgccttcgccggcagcaggggccacctcaagcacagcgccgacctcctcatgcgcatccagttcgccaaagaaaatcctcttgagcttgaccttccagcgatcaagctcggtgagcacgaagacgtaaccgaggaagccgtgtctactactttgagaagggcaatcagccgtctttctactctccaggcacatgatggacactggcctggggattatggtggccctatgttccttatgccaggcttgatcataacattgtatgtgactggagcactaaacactgtcttgtcatcagaacaccagaaggagatccgtcggtatctttataatcatcagaatgaagatggtggctggggcttgcacattgagggtccaagcaccatgtttggctcagcactgacctacgttactttgagattgcttggagagggaccagatagtggagatggagcaatggagaaaggccgaaactggatcttagaccatggcggagcaacatatataacatcctgggggaagttttggctctcggtacttggtgtatttgaatggtctggtaacaacccggtaccaccagaagtatggctactgccatatctcctgccatttcacccagggaggatgtggtgtcattgtcgaatggtgtatttgccaatgtgctacatctatgggaagaggtttgttggtcgaatcacaccactcgtgttggaattaagaaaggaacttttcaaagacccttacagcaagattgattgggacaaggcccgcaatctatgtgctaaggaagatctgtactatccacatccatttgttcaagatgtcttatgggccactctccataaatttgttgaaccagttatgatgagttggcctggcagtaaattgagggagaaagctctggagacagccatgcaacatgttcactatgaggatgagaacactcggtacatttgcattggtcctgtaaacaaggtattaaatatgcttgcttgctggattgaagatccaaactcagaggccttcaaactccacatcccacgagtctatgactacttgtggcttgctgaagatggcatgaagatgcagggttataatggtagccaactttgggatacagctttcatagttcaagccattgtggctaccaaccttaccgaagagtttggtcccacccttaaactagcacacaactatatcaagaaatcacaggttcttgacgactgccctggtgatctgaatgactggtaccgccacacatctaaaggcgcatggccattctccaccgcggatcatggttggcctatatctgattgcactgctgaaggactaaaggcttcattattgttatcaaagatttctcctgaaattgttggtggaccgatagaagctaatagattttatgatgctgtcagttgtctgatgtcttatatgaatgataatggtggttttgcgacttatgaactcacaagatcctatgcctggctggagctgatcaatcctgctgagacctttggggatattgtgattgattacccgtatgttgaatgtacatcagcagcaatccaggccctgacatcattcagaaaactataccctgggcaccgcaggaaagaggtggacagctgtatcagcaaagctgctaatttcattgagagcattcagaaaagtgacggttcatggtatggctcttgggctgtttgtttcacgtacggcacttggtttggtgtgaagggactaattgctgctggtagaacatttgagagcagtcctgcaatcagaaaggcatgcggctttctgttatcaaaagagcttccttccggtggctggggagaaagctatttatcgtctcaagaccaggtttacaccaatctcaaaggcaaccgagctcatgcagcgaacactggttgggccatgctggcgctgattgatgcaggacaggcccagagagatcccgcgcctctacaccgagcagcaaaggttttgatcaacttgcagtcagaggacggagaatttccccagcaaagatcataggagtgttcaacaagaactgcatgatcagttactcccagtacaggaacaccttcccgatctgggctctgggagagtaccggtgccgagtcctgggagctggcaagcggtagtgacccggcctggccccgtcaacttgactgaaaggcgctttgttgtcttggtgttcttggtgttctatcttggcacgccgagggctgtcttgccggccgcctagctgtctcatgaatcaatcagcttttttgtgagtagctagctatgtgcggtggttggaataatgcagctatgcttttttttagggttgcgctcctagttctaataatgtactacgtatattggaagcagaataaatgttagattgaactaatggtgccattaaagatgacaatagaactcttccgaagcaaccaagttattacattgcacaaatcaatagaacttcaactgctagcgtcacaaaaccgtggattattcaagcgcgcgcagctctaccggcgacctccacgagttcccatggcgacaaggccttcttcttttttattattttctgttcgttcagaacacaagcaaaatcccgctcccgcgttgcagagacgacgccacagaagccacgtctgactgatttccacgcgccaaccgggggcacggcggcgctcccgctccatctccagttctccaccacaatccacaaggaaggaagcatcagcgcatcaggtcgtagtgggacgaggagccgccgtacgatggcggcggcctggggagctggaggagctcctgcgccgtcgccatggcggcgtcgagagcctggagccgcgcgtgcgcgtggtggcccagggccgcgctgccgccgccgtcctgccacagccccggcgacgaggcctcctgcagcacggagacggagccggcggcgaggcagctgctcggggcagcgcggtggtggtgcagctcagccgccggcggcggcggcgggtggttggtgttggtgccgccgccaccggccggactgtttgacagaagagagagagcacgctgaaggtccggggcgccgtccgggctggagacggccgcacaggcttcaacgcctgcgcctgaaaagatgcatctttttttcgatatcatctctga

SEQ ID NO: 35261 - DNA, 883 bp, Zea Mays
gactccagaggcaacaccagcggccacacatcagacgcccctgccaaggaacccgcctggacctccttctacaacccttggaccagtcatatcaccatgtggcctagcccagcaaaaagagaggttcagcaacagcacccccagcaagtccttgggcgaccagcggcagtggatgcctcctctagcgcctatcccagcagccttgtgtcagcgcctacgccacagcagcattgggtgccacaacagtcgtggacgccctagattggctcttgggatcagcagtcttgcaaagtccttcggcacgatggccctttcccagccgtctaccgcggtagcatattgggttgactccgacgccaccaaccacactactttcgacaccggtaccatatctacccttcgtccaccgcatcttgctcttccttcctctatccttgttggtaacagattctctctgtcgatcatcttagtaggtgattcagttcttcttggtccgctctaccttaacaacattttacttgccataatattatcgtgaatctcctttttgcccggcgctttactactgataatcaccactccattgaatttgatctgtttggtgtttctgtgaaggattttttccaagaacgtgatcgtcggttcaatagtgttggtccgatgtacaccctgtgcctccccacgtcactccctatacgtgtgctagctgttgtctcgacctccacttggcaccgtctatgatgcgcggattcttcacaaaactcacgtaccggtgtcggataccgtatcggatatggatactcctcggatactttcggatacgtatccggggcgtatcgggaatttctgtgaatttaaataaataaaaaatgatggatactcc

SEQ ID NO: 35262 - DNA, 655 bp, Zea Mays
aataagttatgttctgtattcctaattatcattttgccatttgccacccccaactcccgagggcccatttcgccgtctttcactccatcaccccctctcccccagtcccccgtccctttcccctcagccatctccttccccctcacctcgccatggcgttcttctctcaccaccatctccagcagccacacccgcagcaggcaccgcccccgaatcagcagcagccggtgcttccttccttcaggaacgcgctaccggtgcctgtggatggccagatcccagcgcccctcaccttcttcaacccgccgcctgccttcccggagcagcccgcgcagacaacgctggtggatgcggtggggctgacggcagctgctgggcttgggtggaggcagccgagggagcaggaactgcttggagaaaactcccagatgtcgtccatcgattttctgcagacgggctcggcggtatcgacggggctggcgctgtctctggaggaccggcgccacggcggcggcggggctgggaactcctccggcgattcaccgctgctcctgctgcccatgctggacgatgacatttcacgcgaggtccagcggcttgacgctgatatggaccgcttcattaaagctcagatctggacttctggagatggaga

SEQ ID NO: 35263 - DNA, 367 bp, Zea Mays
ccggtactcgcgcagcagagctggctgcccacgggcatgcggatccgcggcggatccccaaccctggtgagggattccagtcgtcgcttccatctacggcgctcgagctcgaaaccaccgtgcaccgcgcattgggatggagctccccggccaagtccgaaggtggaatgggctagcggccaccatcatcctaatggaatcggccgacggcgcaccccctatccccagcgccaagcttaagattcggtttatggtgagggtcatcgggtgcggcgttcaccttatagatcgatgcgaggagatctcggtcaggaggttggaactgctctccgaattcccacgcgacatccacggcgttagcagcgcg

SEQ ID NO: 35264 - DNA, 518 bp, Zea Mays
caactagagaaaaatacttcgccgagaaggaagaatcagccgtgcggttggacacggagatgccgagaagatggacgcacggagtcaccacgaacctatcgactttttatctccagatccagattagctaccacggcaccgccagcccggacggctataaagacgaggcccatctcgaaatcgacggcgatgaagaagaccagttcccctctcctgatcgtcctgttcctcacagcagcagccatggcggccgagccggagaagcaggcggcccccgcggcacaggagacggccgtgcacatcgtgtacgttgaccgccccgaggacgccgaccctgaggagttccacatccgcaccctcacccccgtcctcggcagcgaacagaaggccagggacgcagtgctctaccactacaagaacgccgccagcggcttctccgcgaagctcaccccccagcaggtcaaggatctcaagggataataattaatcaaagtgattacttctccacattattgtgt

SEQ ID NO: 35265 - DNA, 2172 bp, Zea Mays
atggatgttgtagctccccgcagctgtcaccatgatggcatgcagaagggacggcatgttccaaccagcatgagagcccaaacaaccactaggatgagtggagaaatcgtttcagtgacaaagcatcgtcgatggaattgtgtaaaatgtctaaatagagtgaaaagtccaggccccacaactacatctgaaactgtttcaatacaacaggatggaactaatgatggttgctctatttcaatagttcggactttgcctaataattctgattccagaagactgttttcttggacacaacaatcatctcaagggaatgatcaatcaaccctttcaaagagtgcccaagaatgcaattcaaaatgcagctctccttatggcagtagagcagttactacagtgaatgttccagacacattaactgaagcaaatgttccagacacattcaccgaaggcagtgttccagcaacagaaggtttatggagctctttcaataatattgatgtatcagcaaatatcctgaatgatgtctccatggatatcagtgatttacctgatgatgtttctcgaatgatatcaagcatagaagaaaatggcacacagaatctacacggtccaaaaccttgtgtggtgtcaattgaagatgataatagaacagctcaagatgttcctagtgatgactgcaatgagcctaatgctcgtaaaccgaaatctgggcacaatgtctctaaacaaatatctgcgcacaaaaccaaccaagtccgcaaccaggttccacttcaagcatctttaaaaaggaatgttggatctgttgataagaagaaaagggaccaatctgccaacttagctgatatttcagatctcaaattttgtcagaggaagccaaaaagatgaggcggttatcagagctcataggcactgaccaggtaggaaataccatttgaggtaggaaataataatagcactcctgttagcaatcagaaagtgggtgaaacgcaatcaagagctcccaagaacattgtgaatcacacagtagggatggttggtgttggatcttctctaatgaactggatgaaaaacactcataataagaaaatcagagcacagaaaaaggacacaggacacaagaatcttgattcttgtgctgtttcaaactctaatccagacacagtcgcttctagtgttggcgatatggggcaggagaagatgctatctactagcaacggcaagcatgggaatgaaaacacacagaataacaacctggagcaaaatatgcagaatgtggatgacctgtgccaaaatgaatcagggaacttgaaacgggggttctcaaatggaaaaaatcaaagattttgctaaagagaaaggtactgtcaactgcgatttcccgtgatgagaacactgagaataataatactataaataaaagtatgctcaggtctcatgatttgcatcaaatggaatctgaaggcacgatgcagagatgtgtggcaaagggttgtacgcagcttggcacacaaattcaagtgtcatacacacaaatagctagtttgggatagcaggtgagcgaaacagcgagtcccaaatgacatacaccttattgagaaactatcgaagagctaacatgcgccggatggaacttggaacgcaagctctcggttcacagcatggtcaatacaatgtttcacccagcacatcacacggaagctacacagacctctgcgccctcactctcgagtaggtgtgctcggttcgttgctgcagcaggacattgcaagctggtctggtctgagaaccgtgggacgcagcacagcctaggcgtgtctagacggacaacaccgcctgctgaatgctgatatggacctgcagttgggttctgctagctcttctgttcccgacccaaagcagcatcgattgccaaggcatggtggtaccaggcaacctcagtggcagctgatttcactgtaattagcgacaagaacaagtatatgagaaggatttgaggtagagaggagtgttgtagttggagaacaggtacatttgactctgtcaagcaagtatcatctgtagaggtatagagatgtgtggttgtgccctgccatgaaacagctagacagctatctgtgccagcaatgggttcgaagtcatagcagagtcagtgtagccgcccacgcg

SEQ ID NO: 35266 - DNA, 1036 bp, Zea Mays
atccctgcatcgcaccctcccgggccgccttctcttctccagcgtccgatctcccactcccctccctcaccgcagctctcccacctccgccctccccccgcacgcgctcgccacctcgccctcccctccacgttgctcgcacccgcgcttatataagtgcaggaggagctcatggcggaagctccggcgagccctggcggcggcggcgggagccacgagagcgggagccccaggggaggcggaggcggtggcagcgtcagggagcaggacaggttcctgcccatcgccaacatcagtcgcatcatgaagaaggccatcccggctaacgggaagatcgccaaggacgctaaggagaccgtgcaggagtgcgtctccgagttcatctccttcatcactagcgaagcgagtgacaagtgccagagggagaagcggaagaccatcaatggcgacgatctgctgtgggccatggccacgctggggtttgaagactacattgaacccctcaaggtgtacctgcagaagtacagagaggtgcagggtgatagcaagttaactgcaaaatctagcgatggctcaattaaaaaggatgcccttggtcatgtgggagcaagtagctcagctgcacaagggatgggccaacagggagcatacaaccaaggaatgggttatatgcaaccccagtaccataacggggatatctcaaactaatggaggtatggaccttttctgcgacagctgctcttacctgaggtccgtttttatctgccagaactgatgaggtcgctcactaggagtaagtcgcttccctgggaacggttgtcggctagcaccgctcttgtatgtatattaagagtaacttaatgattggtcttttggctgcgatttgattacatgtatttgtatcgggaggcataaatattgtgtaatttgtgttaaagactggtgtaattgaactatgggaagagctgctttggttgtaaccatattttgatgcccgtatattaggcaaaaatagaaggctgtgggcgtgcacaac

SEQ ID NO: 35267 - DNA, 2005 bp, Zea Mays
aaaaaaccctagagatgtccgcaggctctccgtcggtcgcggctctcgcgcggcggctcctcacccgccgtcggtcgctcctcacccgccccacgcctgaccagcgccattactcctcatcccgcaggcagtctcgggtccctgttcccgctgtcgctcgtggcccgctccaccagcacgcaggcatcaccctcggccacggcctccgaccaccagccacgcttcgccgctaaccccctcgcggcggcttccattcggtccctgccctccacgccattctcttcctgacctcgccttcaagttcatgtccccgtcgtcgcccatgggcctgctccatcggcccgcctcaccctcggccacggcctccaaccgtcggccctgtttcaccgccgactgcacgccctgccctgtgccggctcttgccctcccctgactcgtcggccccgtttcgccgccgaccgcacacgctaccgtgcgccggctcctgccctctcctaacttggtcggcaccaactttgcaacttacaggtgatttgtccaaggagatggatttactgagcagtggtacatcttttgaagaggctgtcaaaccacggaagtggcttaatccaacggattgggggaggagagcctggtgccgttcgagattggggcctcatgaggtaaattcagaagcaaggatggcgacgacgatgaccccgacgacatcgtccccatggacacccaaggtcactggagtggagtgggtgacataccaagcacaaagcaactagactttctcatccgaaccatcatgtgacctccatagaccactggcgtcaaagatgaagcaagataatgtcatttcacttgtctctacgaccatggcacaacctggcatggtgtttcatttaataggtcactggagtggagtgggtgacataccaagcacaaagcaaaggcatatgtagggtgatgatgatgccgtagtgatgggccttgaggtagagcacggaggcagtaacgtagcggagtgcaacaagcagtagctagacaatataggcattgaccaagtagaggttaatacagacaccaacagctccgggccaggaccatgttgtgtacctcaatatggtcatgacttggagttctgcagtgaggatcatgtggagtgtccagtgcctgatggatgaaggctaacattggagtttcacagtgagtagttttgcggagagctctggctggagatctgacatgatagatgagatgagagagtcagcttcgcttggtggtcaagttgcctgtgatggggaaggggaagagtaagacgccttcctgagatggttgggtcacgatgaatgcgatggctgatggttggatcatgatggatggattccaacttgagggacttggattaaattagactcttaagcacattgagatatgtttggactggatggtggactttctgtagtaggattataattggattcctttgttaggatttggattttggtccaatcccccctaataagctgaagatcatgcttgctgtggagcctttgataccatcagagggaccaaagattggagagcacatttcggttacacggaatggaaaatgtgcatatatggtgctgattgcagtgagattagcctcgtccaagttaggggatctgccatgaactagacaagattagaagtttaaagaggccttacatcaagagagtacaagatcgccataaggaagtacaagtctttgaggaaagtgaccttatgagaagcttgagaaaaatcaacttgaaagtgaccttcatgatgatacaataaattgtctcaaacgcaacactattgaaatggagggatacattcgccctcttgacgtagtcataattgtgttgcagaccagcattctgatggtgttgcagatgatcatcccagcgattccttattctctccaacataccatcatcacaaggttcgttatttgaataaataacctaacgaaaggtataaagataataaa

SEQ ID NO: 35268 - DNA, 2043 bp, Zea Mays
gtccccgcttccgttactccctccgcgccccgctcctcccgcctgtcctccacgcgacgttccttgtatccccgtcgccttccttgggcagttgggctgagtcctcccgtctctcgcccctgcagatatagttgcggcggggtttccttcttcgagaaagttccgaaccagagggagccgcgcggaaagccggaggcgtcccatgctgctggcagtcttgctaacttcagctgatggttaatatgagggacaatgactcatcaagcgacgcacaattggacgagccattaggacgggtatcgatactctcttacggttctgggcatatgctcaacgacatcacatcgtcttgttggtttacctatttgcttgtgttcttgacagatctgggacttagtccaggtgatgccgctattgtgatgctttctggacaattggcggatggcttcacaacaatctttgttggggaattgatggatcgctttggacatttcaaactgtggcatgcaggaggatctattttagtggcaatttccttctcgtctgtttttggtagctgtgttccttgcaaacttatgggaattaatacatctactttggagactgttggatacagcacatttgctgctatttttaatgttggttgggcagttactcaagtcgctcacatgtctatggtaaactgcattacatcaaatccaactagccgggtttcacttgtaagctgtcgtaatgccttcacgatggttgcgaatcttagcctgtatggcgttgctttggtgatatttactctattgcagtcagtgaatgtactagttcagtatcggtggattgcttaggtgtccatttccctcggatcttgctttgttgtcatcttcttgattggaaccaaagagccaggatcaattcggcactgtttggataagagtccttccagaatttcatgggactactggttcaagagagtattgtactaccaagttgctctagtctatactctgactagattggtgaccaatgtttcacaggcatttcttgctttctatgtaataaatgatttagaaatgaatcaatcctccaaagcattggtacctgctattatctacatctgcagtttgatagtatctgtaatattacaggtcttggaattgttcttctaccgagcagaatgcacaacctcatgtatgccatttcaatcgtaataggagctgcgaatgcacttatgacagtgacaagtattagcatggaaggtgttctagtaggagaagatctaaatggttgtgcttttgtgtatggctcattaagttttgttgacaaagtttcatgtggaatagctctctatgttctcgagtcctatcaaggaagtacaaagatcagatcaaatttaggaacaacatctggctattcagttacaagacttggcttgggcttagttccagctgcttgttcgctgctttcagctatagcagcttataccatggagctccctgatactcagaaaggacctttggtggaaccccttctagcataacttcactggtggcagtgttacagtttcaccgtgagatttcacagtaattgctcgatggaatgacactgctgctcgagcctgaagatgttagcgacctggtcaattcgttttgacttcgtatatatagtctgaataaattatgacggaggggatatactgagacacgtttgaatagggattagaagtgacataggggggctaggggcaagaagatctgtgttgatcatactgagctttacaagtcattctgcaatccaatgtaaatataacttagcttcatttcgaaagcatcaaaactgccaactaggcacatgtagcgacgatgggcaaggaaaagaatatctctggtccttgttctacgctataatttcattgtatatgtagcatcatgattgaaaagaaatatcttatatttatattgatgggtgaaatagtgtcgcctatgctcatgtaaattgtttctgacatttagaaattaaatatgcttgagaagagagcactaatctgtctaa

SEQ ID NO: 35269 - DNA, 4577 bp, Zea Mays
cgccaaaagacaagaccataaagattactcatagattaaagtagggtttggacgtctgcctgtccatttcggcgtctgttcttagcggccgacaagcggaatctggatcaagtcccctgcttcaacccatcccctctcatcgattcattgccacaaggcagctgattgctcacagcgttggatgtgagaattggattcggacccaccgatcgatatgccgttcggccacacgcggctcgatgtccggcgtccgccgcagtcgtcctacctctgctgctccacaaccaccgtcgccgtattcgtcgcgctctgcctggtggctgtgtggatggcgtcgtccatgctcgtcacccctgccgagttccctccatttcagtccaaagtgcgtccactgaggcctcatgactctcctcctgccaccggaagcttaaccagtgctgatcagggcgatggcatcaccacccatgatgatccaccacctgctacacaacaattgcctcctgtaacagacagcatggatggtgaaaatcagcaacaagaacttttcactacagagcgcggaccatggtcaaccaaggctgaacaatctaacaaggacgctaaagagcaaaccttgacgtccagtagcccactgagcttccgttgggcgttatgcaacgtcgatgctggagcagattatattccatgcctcgacaacgtagcagctatcaagaagctccgttccaccaagcactacgaacaccgagaaaggcattgccccgagaaatctcctacctgccttgttcctctaccagagggctacaggaatccaattaggtggccaaagagcagagatcagatatggtacaataacgttcctcatactaagctggttgaatacaagggacaccaaaactgggttaaggtttctggagaatacctcaccttccccggaggcgggactcagtttaaacatggtgcgttgcgctacattgattttattcaggaggcaaagaaggatgtagcatggggaaaacgaagccgtgtagtgttagatgttggttgtggagtagctagctttggaggatatctatttgacagagatgtgattactatgtcatttgcacctaaagatgagcacgaagctcaggttcagtttgctcttgaaagaggaatacctgctatatcagctgtcatgggtacaaaaaggctcccatttcccagtagggtgtttgatgttgttcattgtgcacgatgtagggtaccgtggcatattgaagactgttacgtcctggtggttactttgtgtggtctgctacacccgtataccagaagctgcctgaagatgttgagatatggcaagccatgtctgctctaaccagttcaatgtgctggaaaatggtcaacaaagtaaaggatagggtgaatagagtgggtatagcaatttacagaaagccaacagacaacagctgctacgaagcaagatctgaaacaaaccctccactctgtggagagtacgacgatcctgatgctgcctggaacatatcgttgggggcttgtatgcataagttgcctgtagatcctaccgttcgtggttcacagtggcctgagttatggccattgagactggagaaaccaccttattggctgagaggttctgaggctggagtatatgggaaacctgccccggaggattttcaagcagactatgaacactggaagcgagtcgtgagcaattcatacatgaatggtttgggtattgactggtctactgttagaaatgttatggatatgaaagccgtatatgcagggttcgcagcagctttgcgcgatctcaaggtgtgggtcatgaatgtggttccaattgattcacctgacacgcttccaattatatatgagcgcgggctgtttggactgtaccatgactggtgtgagtcgtttagcacctatccgagaacttatgatcttgtgcacgccaaccatctgttctccaaggttaagaagaggtgcgagctattacctgttatcgtggaggtggaccgggtgttgaggccacaaggccggctaattgtcagagacaacattgaaacaacaagtgaggtggagaacattctgaaatctctccactgggaggtccgcatgtcttacttccaggagaaagaaggcttgctgttggtgcagaagacgacatggcggccaaatgaaactgaagctaagctatgatgcagagcccttgccccttggaaggaggaaaggaagatctagtgtttgcaaggtcctctacttttgtgaggcatcttttatttatgtagaatttgtagagctatatgattggtagatgtggaggaatctggtggtttccagcatatccatattcatctgtggaagtggaactggttatctgattccctttttttttttgattcatccattcggaaggggaaggtaacgataaatagaaaaggaattgagaattggcggaggtcaaaggcccaacacaacccaatccggaaccccaaccccacccccaccaccaagggtccaaagccatgcgtgccgccatggcggcggcggtcctccgacccacggccgccaccctccgcttcctctccaccccaccacaccagcgccgccgcgtcttggtcggacacctcccctttgctcgccgacgccgccactcctccaccgctacggccccagcgctggaggactccagcccccgcagtggcgaaggcaaggccgtgcgccgccgccgcgcccgtgaatctccccagggcctcctccgccaccagctcgacatgtgctcccgcaacgccgacctcaccaccgcgctccgcctctacgacgacgccctctccccggacaaccccatcccgctctccctccaccactacaactgcctgctctacctctgctccaacgccgccgctaccgactctgacagccatatctccgccaccgccgctcagcgcggcttcgacatcttcgccaggatggaggccgacggcgtccagcccaacgaggccaccctcaccagcgtcgcgcgcctcgccgccgccacccgcgaccctgccatggccttctccgtcgtccgccgcatggccgctgcgggcaccccgccgcgcctccgcacctacggccccgccctcttcgcctactgcgatgccaaagatgccgacggcgccaagcaggtcgaggctcacatggacgcatctggcgtcgtgcccgaggagcccgagctcgcagcgttgctccgcgtcaacgcggacacgggcaaggccgatgaggtttacaggctcctgcacaggacgcgcgtcctcgtcaggcaggtctgcgacaccactgcccaggtcgtcgaggcctggttccggtcggacgcagcgtcccaggcgggggtggacagctgggatcccaccaaggtaaaggagggcgtcgtcaagggcggcggcggctggcatggccagggatggcttggcaagggcgcatggagcgttggctggaccgagatgggcaaggatgggacatgccaacgctgtggggagaggcttgtctgcattgacattgatccagccgagactgacaactttgcaaattcgctcaccgaactggccattaagcttgaggccagggaagatttcctcagttttcagagctggctacgccgccatggaccattcgatgctgttatagacgctgctaatgtaggcctttacaaaagtaaagatttctgtttttcacaggttaactctgttgtaaatgctatacagagagtaactaaatcaaagaagttgccactgatcgttttgcataggagccgtgtaaatgttggtcctgcaaaagccccatacaaccagaagattctggacagttggaggaatgctggagctctgtatgcaacccctcctggctccaatgacgattggtattggctgtatgcagctgtcagttgccgatcgttgcttgttacaaatgatgagatgcgagaccacttgttccaactgcttggcactagttttttccctaggtggaaagaaaaacatcaggtcagactaactttctccgggcatggccctacccttcacttgccgcctccttattcaattgttattcaggaatctgaagatggaagctggcatgtaccaacaacaacaggcgatgatattgaaaagccacggcagtggttgtgcactactagaaaatctttgaggtagatgtgatttaattttggcccagtcaagttgacacagaatggtgccaagttgccaaccttggtgggaactgggaagggtggtggcgtgacaaaccctgaaaccagcaaagcttaaatgcagcaacttgttggcccgaacgaaagaaagctgattggagtacaagtgatgaatatgagcaggccatggatatggaaagccttttgttgtaacatcgtgagctgtttattgctagcccaggttattctagagtagtttgagaaccgtggtaaggtaatttgcttcatgtgagttttacttttattaaatgacgtgccatgccagtgatttgaaggatgtggcaggcaagtaatcaaagaaagagatgaatgttatctaatttgtcattag

SEQ ID NO: 35270 - DNA, 1156 bp, Zea Mays
gggggcgccactgcttctcttcaagacccgattccactcgcgtgtctgcccgccggccagacctcgaggaaacaaggccttacttccttgattacatggcgtcgccggacgaccccgtgctctccgcttgcaagaaaaacttgagccacttcagaataaaagagctcaaggatgttctacaccaacttggactttcaaagcaaggaaagaagcaggacctagtggacagagttatggcagtgttgttgagccagcaagatcaagcctttgaaacgaatggcttaccaaaggcaaaatcagcggtgaaaatagtggaggacacatttagaaaaatgcaagaccctacaaatactgttgcagtctcaaggagccacgaattaggagacagtgttacgtgtaaaaagaaaccggatgattctgctcaggcagttaaggttcgttgcccttgtggtgactccaagccaaatgattccatgattaagtgtattgatccacaatgcaacatatggcaacatgttggctgcgtcgtcatacccgatactgagaaatccgcggacaatatttctcctgaattaccttcctgcttttattgtgaagtgtgccgacttagcagggctgatcctttttgggtcactgtgaaccatctgttactccctatcttaataggaccctctactgtagcagcagacgggtttggtgtatccttctcagtgacaaagtaccttttaggatgcactggcctttacactctgacatgcaagttaatggtatttatgttagggtggttaacaggcaacccacacaaaagttaggggccaatggtagagacgatggtccactattaacagattacctgaaggagggacctaacaagatttctctatcaagaaatgacactcgtactttctgtttgggtatcagaattgccaagaggagatctctagaacaggtcctaaatttggtgccaaaggaacaagatggtgaaaacttcgatgacgcccttgcacgtgtgcgtcgctgtgttggtggtggagctgaggcaaataatgcagacagtgatagtgatatcgaagttgtggctgattttgtctctgtgaatcttcggtgccctgtaagcaatctggttattactgtggatgctttagatcctcaatga

SEQ ID NO: 35271 - DNA, 4544 bp, Zea Mays
ccggaggagattgacttattcaattttgactctcgtcggctccggtatttcgacttccaaaatagccctaacatttaccgaagctcctcccgccggcgcgctgcgatccaactccgagatgctcgcaccgcttccgcgcctgacgagcgcgctccgcggccactacgacgctgatcaggcctacctcctccgcaagagcgccctccaggctctcaccctccccaggccgcatgacgagtggaagttcgctcggaaaatcgtgcctggctgggacgatgcttccagcgaagtgcgtcaggcgtataaacaatttatcggggccgttgtggagttgttgagcggagaggcagtgtctgaagaactctaccaagttgcgcagactgtatatactctatttggtggcgatgacacggagtatgttggtgctaaaaaagtcctttccaaaaggaatgagttggagagccttgtgggctacactgtacaagactcagttttgaaaaagctagctcagttagctcagaagctcgattcccttcaacgagcaagtgcctatgaatctgtacacagaatagcggatgatgtaaatgaaaatgatagaattgaatttggagcagacttcgatttcaagccacttgcccgtttcattgttgatgtttctcttgacgcacccttagaaagtgctgaattgggcagtggtccatttgaaaaatggcagtatgatgcttggagcacatccacaactagtcattcaactgctgttaggggttctatagctggtgaacttttggacctggttggcgacaccgcttttgaaatagttcaagatcttcttttgcataggaaagagctagtggatgcaattcaacatggattgtcgatactgaaatctgagaaaatgacctcaggtaatcaaccaaagatgccaacttatggtacacaggtaactgtacaaacagagtctgaacgccagcttgataagattaggaggaaagaggaaagacgtagcaagcgcagtgcagacagtggcaataatgatattggtgttgatgatttttcatcccttcttttggcaagtgaacggaaggaggcatttgatgacgtgattggtagtggagaagggtcagacagttttacagtaacttcccttcctcaaggaaccacaaggaaacacatgaagggttatgaagaagtgaagattccaccaactccaacagcatcactgaaacccaatgagaagctgattgaaataaaagaattagatgagtttgcccaagctgccttccagggatacaagtcactcaatcgtgtgcagagtcgtattttccaagctacatactacaccaatgagaatattttagtttgtgccccaacaggtgctgggaaaacaaatattgcaatgattgcagttcttcatgaggttaaacagcacttcagggatggtattttacataaaaacgagtttaagatagtctatgttgctccaatgaaggccttggccgcagaggtaacagcaacattcagtcgccgattatctccattgaacctggttgttagagaacttacaggagatatgcagttgaccaaaaatgagattgaagaaactcagatgatagtgactactcctgagaagtgggatgttattacacgcaaaagcagtgacatgtcactttcaatgctggttaagctgatcatcattgatgaagtacaccttttaaatgacgatagaggttcagtaattgaggcgctagtagctcggactctccgccaggttgagtctatgcaatcaatgattcgcattgttggcctatctgctaccctgcctacctacttagaggtcgcacattttttgcgggttaatccagacactggacttttcttttttgactcaagctatcgtccagttcctcttgctcagcagtacattgggatcagtgaaagggattacacaaagagaagtgaattattcaatactttgtgttatgagaaggttgttgagtccattaagcaaggtcaccaagcattggtttttgtccatacccgtaaggatactgggaaaaccgctagaaccctgattgacctagcagcaaaagcaggggaattggaattattttcaagtgcagatcatcctcaatttccattaatcaagaaagatgttagtaaagcaaaaagtcgtgaagttgttgaattttttgaatctggatttggtatacacaatgctggaatgatgcgatctgacagaagtttgatggagcgcttgtttggtgacgggcttttgaaagtccttgtttgtacagcaactttggcttggggagtaaacttaccagctcatacagttgttataaagggcacacagctatatgatcctaaagctggtgggtggcgagacttggggatgcttgatgtgatgcagatctttggacgtgctggaaggccacagtttgataaaagtggcgaaggaattattatcacaacacatgacaaattggcttattacttgaggttattgacaagtcagcttccaatagagagccagttccttggatctctgaaagataatttaaatgctgaagttgctttgggcactgtaacaaatgtcagggaggcttgtacctggcttggctatacatacttatttataaggatgaagactaatcctctggtgtatgggataacttgggaagaggttatgggagatccttctatgggtgcaaagcaaagaacatttattattgatgctgcacgagcactggacaaagctaagatgatgcgctttgatgaaaagagtggtaacttctactgcaccgaacttggtcgaattgcaagtcatttttaccttcagtactccagtgtcgagacttacaatgagatgcttcgacgtcacatgagtgaaagtgagttgattactatggtggcccattcctctgaatttgagaatatcgtagtaagagaagaagaacaggatgaattagaagcccttgcaaggaaagcatgccctttagaaattaagggtgggccgactgacaaacatgggaaaatttcaattctcatacaggtttatatttcccgtgctccaatcgatagctcctctttacattctgatgctcaatacattagtcaaagtttggcacgcataatgagggcactatttgagatttgtctgcgtcggggatggtctgagatgtcatccttattgttgcaatattgcaaggccgtggaccgcaagatatggccccatcttcatccacttaggcagtttgataaggatctttctcctcaggtattgtggaaactcgaggaaagaaatgttgatctggatcatctttatgagatggaggaaaatgaaattggagctctgatccggttttctcatcagggaaagttggtcaagcaatacgttggatacttcccgtatgtcaacctatctgcaaccgtgagcccaatcactaggacagttcttaaagtggacctgcatataactcctgaatttgtgtggaaagatcgttatcatggcatgtcagaacgatggtggatcattgttgaggattctgaaaatgataccatttatcattcagagctattcacattaacgaagaagatggcaagaggaacacctacaaagatatcttttaatgtaccaatatttgaacctcatccgccacagtactatatacatgccatctcagactcatggctacatgctgaaacactcttcactgtttcttttcataatttgacattgccacagacacaaataacacacacagaactcttggacttgaagcctcttccactgagtgctcttggcaacaaaacgtatgaggatctgtacagattttcccatttcaacccgatacaaactcaggcttttcatgttctttatcacactgataacaatgtactcttgggagctccaactgggagtggcaaaacaatttcggcagaacttgcaatgctccatcttttcagtacacaaccagacatgaaggtagtttacattgctcctctaaaggcaatagtacgagaaagaatgaatgattggagaaaacgtcttgtaattcagcttgggaagaagatggttgagatgactggtgacttcactccagatttgatggccctattgtcagctgacatcatcatttctacccctgaaaaatgggatgggattagtcgaaattggcatagcagaagttacgttatgaaggtcgggctcatgatattggatgagatacatcttctgggagctgaccgtggacccatccttgaggtcattgtatcaagaatgcgatacatatcatcacaaacagaacgttcaattcggtttgttggtttatcaacggcattagcaaatgctcgtgatttagctgattggttgggcgttacagatgacggtctattcaatttcaagcctagtgtgagacctgtacctcttgaagtgcatatccagggatatcctgggaaattctattgtccaagaatgaatagcatgaacaaaccagcttatgcagccatatgcactcattcacccaataaaccagttctcattt

SEQ ID NO: 35272 - DNA, 1895 bp, Zea Mays
gcgagaacgtcgcggcgctcatcgacaacacacgcccccgacgccgataactatcacgattcacgacactcgcagcgataccactccacaatcacacattcgacaccgccaatccatggccttggcgacgccgctgcggctccgccgccacctcctcctccccgccgggccgtccccggcgacccaccgcgccctgtcgctgcggcggggccgcctcctccccgcaagcctgtccgccgcagcgggcgggcggccgacggtgctggtgacggagacgctgggttccgcggggctggacctgctgcgcgccttcgccaacgtggactgctcctacgagctgacggcggaggagctccgcgccaaggtgtcgctcgtggacgcgctggtggtgcgcagcgggacgcaggtgacgcgggaggtgttcgaggccgcgcgcggcaggctccgtgtcgtcgggcgcgccggggtcggcatcgacaatgtggacctccaggcggccaccgaggccggatgcctagtcgtcaacgcgcccaccgccaacaccgtcgccgccgccgagcacgccgtcgcgctcctcgccgccgtggcgcgcaatatcgcgccggccgacgcgtcgctcaaggcaaatggcagcggggcaagtatgttggcgttaccttggtgggcaagacgctagctgtcatgggtttcggcaaggtcggtccagaggtggctcgacgcgcgagaggactcgggatggacgtcgtcgcccacgacccatacgctgccgccgatcgagcccgggcggtcggcgtcgacctggtgtcgtttgacgaggccatctccacggcggacttcatatcgctgcacatgcctctgaccccgtcgacggcgaagcttttcaacgacgagactttcgcgaggatgaggaagggcgtcaggatcatcaacgtttcgcggggcggagtcgtcgacgaggaagcgttgctgagggcacttgacaacggaacagtttcccaggaaggtgtagccctcgaaattgcagaggctgttatcggtgcactgcgaggagacctggctgccacggctgtcaacgccccgatggtccctgccgaggttctatccgagttatctccatacgttgtccttgcggagaagctgggccggctggtggtgcagctggtggccgttggcagcgggatcaaaggcgtcagggtggtctactcgtccgccagagaccctgacgacctggacacgagactcctccgcgccatggtcaccaagggcatcgtggagccgatctcgagcgccttcgtcaacatcgtcaacgcggactacgtcgcgaagcagcgaggcctcaggatcgtggaggagagggtcttcctcgacggcccgcccgaggtcccgctcgactccatccaggtccatctcgccaacgtggagtccaagttcgccggagccctgtccgacgcgggccacatctgcgtggagggcaaggtcagggacggcggcgcgtcgcacctcacgctcgtcgggtccttgagcgtcgacgttagccttgagggcaacctgatactgtgcggccagctcgaccacccgggcatcattgggagagtggggtcgatcctgggaaagatgaacgtgaacgtgagctttatgagcgtcagtaggactgctcccgggaagcaggcgataatggccattggagtcgacgaggagcctgggaaggaagctctcaaattgatcggtgacacgccgtctgttgaggagtttgtctttcttaagctatagaggctgaggaagtaggttaggggacccaaaattacatttgtacgtgctatagtagcgtgagattgatgttgttgttgccatgattttagtagctagcacggggtactttatgctttgtgttcatg

SEQ ID NO: 35273 - DNA, 1660 bp, Zea Mays
gtcctgttcaccacccttttcgttctcgtcttcctggctcccggcggcacccacccgttcccggagcaaaaataaaacgatcccaaaacacaaaagaatccgccacctcgccggcgacaggggcgacctcgcgcgccccggccggtgctgaccccgacttctccatgcatccattctgctgcgcgcctctcgtgcccgtatcgcccgcggcctctgccgcccccgctgcgtcctccgctgtggcgggcacccaggccgtgatgccgccaccgcagcccccgccgttgccgcctccgccgcctcgaaacaactccgccactggcggtgagaggcgcgcgcgcgcagcgggggtcagcggtggtggaggaggcgattcctcgccgctcgagggggtgaagctgaacgagatcgtcggcggcggcatctcgggaatcatgtacaagtgggtgaactacgggcgcgggtggaggccgcgctggttcgctctccacgaaggcgtgctctccttctacaagatccacgggcccgaccgcatcatcctatcgcgcgagaccgagcggggcgccaaggtcatcggcgaggagtccctccgccgcctcaaccgcccctccgccttctcgccgtcccactccaacggccaccaccaccctcgaaatcccatcggcgaaatccacctcaaggtgtcaaccgtgagggagagcagatcggacgacaggagattctccatcttctcggggacgaagacgttgcacctgcgggcggagaccagggaggacagagctgcgtggctcgaggcgctgcgggtgaccaaggacatgttcccgaggatgtcctctagcgagatggtcgggccaggggacaccgctgcggcagtggccgtctcaaccgagcgcctaaggcagcggctgcagcaggaaggggtcagcgaggcggccattgctgacagcgagaggatcgtgcgagaagaattcgaggctctgcacaagcagcttgtgctcgccaagcagaagcatgcgctcctcttggaaactcttcgccagctagagacagaaaaggttgatttggagaatacccttgttgatgagagccaaaggcagtcaaaagagtatggatctgcttctaaaccaaggcatgagaagtatagtgaaggaagtgctagcgaatctgatgattataatgaaccacaagatccagctgaagagactgacgatgaagcaaatctttactttgatacaagagattttctatcctcaagctcttttaaaagtagtggatctgatttccaaaggtctgaagctggttcggatgatgaagatgattatccaatggatggaattaatccttctatgaagtctatcggagttagttatgcatatgtaagaagacggaacaggctgccagatccagttgagaaagaaaagggtgtaagtttgtggtcaatgatcaaggacaacataggaaaggatcttacaaaagtttgtctgcctgtttacttcaatgagccactctcatcgctacaaaaatgttttgaagatcttgaatattcctaccttattgatcgtgcatccgaatgggggaaaagggttagatgtatgattcatgcagcaccccatcatttcagtggagaaaagaatactcataatacacatcttatttcttc

SEQ ID NO: 35274 - DNA, 640 bp, Zea Mays
ccagtgccaacccagtctccaaggccacaaccacggctcccggctggctccaggctctagttccaacctccacctgcgccgcccgatagcaaaacgcagcgacctcgccccccctgccccgctcctccccttttcccggtagcagagacggagcaccgcagcccgccagaaaggaagacgaaacgcgccgcggcgcaacgcaccgcgtgctagtgaaagggcgcagcggaaggccgccgccgcgctgctatttagacaggaagcggggcgatcgaatcgcgtctctcaaccaatcgataaatctgccggtaggtcgatcaaggagagcgcggtccacgtctccgttccgttccgttgcggggaaggaaggaaggagagagaggagcgatggcgtccgggtaccgcgcggaggaggagtacgactacctgttcaaggtggtgctgatcggggacagcggcgtggggaagtcgaacctgctgtcgcggttcgccagggacgagttcagcctcgagaccaggtccaccatcggcgtcgagttcgccaccaagaccgtccaggtcgacgacaagctcgtcaaggcacagatctgggacaccgccgggcaggagagcggctgcatctgttgctgctacagtagct

SEQ ID NO: 35275 - DNA, 2138 bp, Zea Mays
gatatctcaccccgtttgagtcacttagaaatatgacaagctgtttcaccactatctgtttgatagaaaaacctaaaaaagctgcttcaccacgatctatttgataaaaaaacataaaaaatgtgttgggacagaagttataccaaatttcgatttttaattaatagcactaatagaaaacgacactttctttctcataatgtgttggcaatcccctgtgcacgagtccctcccacgaatggtgggagctgcagtgctgcaccccacccgcggcagcaccaccggcgacgccggcacgcctaaatgcatcctcccctcgcctccgcggccctccgcctcctctccttcacctcccgtacccgcctcctctcgcactgcccatttttcctatcccgccgtgacgacgacggcggccgcgagggcccctcgtcgccgctgcccccgctctcgccttctggctcgactttctggccccgctcgctcctcttgtctgcgtcagatgccgcgggcctcttcagcctccgtggcgggtggcggagacgggctcttcctcccgcggcgtcacggccccccggcgccgtcactgacgcagctcccgtccggctcaccgtctcccgcaaatattctctgcgtgtggccaaggggaagaagaaggcgcattttgacgatgaacacagccatcgagcggttaacatggcactatggtgcaactttctcgtcttctctctaaagtttggagtgtggatttcaacttcaagtcatgttatgctagctgagctagtgcattccattgcagactttgctaaccaggctcttcttgcttatggtttgagcagctcaagacgtgctccagatgctctacacccctatggttattcgaaggaaagatttgtatggtctctcatatctgcagttggaatattttgcttgggttcaggtgctaccatagtgcatggagttcaaaatttatggaattgtcaacctccagagaatattcactgggctgcattagtgattggtgggtccttcctaattgaaggtgcttcactgcttgttgctataaacgctgttaggaaaggtgcagaagcagagggaatgggtatttgggactatatctggcgtggtcatgatccaacttctgttgctgttatgactgaagatggtgcggctgttacaggccttgctattgctgcaacatctttggtagctgttcaaatgacaggaaatgctatgtatgatccaattggttcaatcattgttggcaatttactagggctggttgctatttttctgattcagaggaataggcatgctttaattggccgggccattgatgatcatgacatgcagcgagtccttgaatttcttaagtctgatcaggtcgtagatgctctttatgattgcaaaagcgaggtgattgggccaggattttttagattcaaggctgaaattgatttcaatggagttgttctggtacaaaattatttggaaaggactggacgtgggacttgggcaaaacagttcagggaagctgcaatgtccaaggatgatacggaattactaagggtcatggctaactacggtgaggatgtagttgaagctctgggatatgaagtggatcggctggagtctgagatcaaaaagcttgtgcctgggattaaacatgttgacatcgaggcacacaatccagaaggacttactcttagagcagaagttttgtagattacctatgtacattgcatttgatttaaacaacttacacatagaacatctgtatactactaaacagaaaccacacaactagagagcatgcatgaacaacataagagagcggctacacaagttgcataaaatccacacgactttacatatacatatacatcacacaatcagtaaatatagagatgactggattgctcgacttgttggatagacatctcatgtaaaatagctatatgcctatatcaagaatgaacaagatgctgtcttgttacacacagaaaacattttgaagtactatgcttacatgaatactgttgggccttctttgtctgaaggtcatcaaaatattaacttaacaattactctttagtctgttttaagtgtaacatgacgattgccgaagaagaccttcggtt

SEQ ID NO: 35276 - DNA, 5683 bp, Zea Mays
tctcctccgaggaagacacataccacaccaccgatgtccgatgcgacgagggagcacataataaaaaaacaataagacaataaaattaaataaaattataaacagagaaaaggacaacgtgaaataccctaggccgtgatcttggcggctgcggcgcgtcggcgatcggcgggggtcgccccgcggccgacgacgtcatgctggggcggcgcggggagatggggtacgaggaaggggagctcgagctggaggagggcgaggcggcctccggcggcggccgtgagctggttattcccgacgcgctcacctgcatcgatgaaagaatccaaaatgtgttgggtcatttacgcaagaaatttgaaggtgaaataactcatatgaatttgggttcgatgtatggatgccatggttcgttcttgccaacatacccacgttcccctttgggctttcctcaatataggaacactgcagatccaaaaaaccatggcagtgcctcgagatccctgcatgtattaacagagaatgcgcaaaagaaccattttgttaagacggaattagacagcagcaggaaaaatgaatactgtcgaatatccaatgagagtgatggcaatcaacagatgttaaacagagcagtcattgggtctgagcagaaagcacgaaaaatacgtatcaagttgaacagcaataaaagtttgccaagaaatactgctgctatatatagtggcctgggcctagatatttccccttcatcatctgcagaagacaacctagatgagactgctggggctctggtgcctgaagttttgcctgatgaatctccacgtgccatacttgagataatgaccagccattatattcctggaggacacttgctctcacccctcaaggaaaatgttctagaattgaaacaaaagcctaaagtgatggtaaaacaagaagcacctgaatttcaagtcaaagtagaattgcatggagactggggctgtacaacctctgctactctggataacaaagataagtgtaccaaggaaatcaagtctgatgaaaagaaagacaagatccccattttcaggagttcaaaaatcagagttaacaaaccatctgctgtgaataagggaactaagcctttacaggatgttttagatgataccggttcaaacttgttgcctacaattgtaaatacagaacatacagttgaggagccagcgaaatttacaggtgcaatttcagataaaatgaagggatcgaaggatggtgcatcaaaaggacacattagtggcaagaacaaaaacattaaggaggaaccttcgcttgatcatggattttctcgtaaaaacagatgtgattctgatgagtacaatggtaaacctcatgccagttcatgtcagttgcaaaacattcccaacaaaacttcgccactggagagggacaaagggaaagtattgcatatggaagatgaaccatctcagtacaaaagcaaggaaaatggagacctgtttagtgcagattccatggctgtcatggtaggaaatgttgatagaaattctttagggatgatgaaagggaagaagaaagtttcttctttgcaagccaccctgtctgggaagttcaagttcaaggcaaaaaaacaattgaatgacaacattgatagaaaaaaatatggtgaagacgagcattatgctttagaccatagaattggtttggataattcatatcaaatagataagagtgtgaggcttgagaaaaagaccatctcatctggggagattgataacaagtcagatgttggaaatgatggtggtgtcaatatctctgccatgtttgatgagaaatcagatgttttgccattagcatctgcatccctgcctgctccagaacccattttaataaatgaacaatgggtgtgctgcgacaagtgtgagaattggcgccttttaccctatgggatgaatccagatatacttcccaaaaaatggcggtgtagcatgcagagttggctgcctggaatgaatagctgcaaaataactgaagacgagaccacaaaagcccttcgggcactttatatggttcctgcacctgaaaataacattaaggatggtggtcatgataatgctatgtcaggcaaaggtacagctattgctccaacttttcagggaaatacacagtccatcagttcactggggaagctaaaaggttcccttgatggagccaatgtggcaaatactttggagtcagctggtatgtcaaagccctcaaagaatctgcatgctccttcaagtagaaacttctctaaactgaaggaaaaaaggaagctggtggaatcatcagataaaggagaaattgttggaaaagaccaatcacgtcgaatgagaagcagtgtaggggttgatcatgataacctgcgagcatcaaagaaaatgaagaaagaatccaatggccctgtgatgaagcatcaaccctctgagtttgaaataagcaaaagtagtcctgccagtgagactctgaaaaacattcagaagcgcagttgcatttctcctggcatgggaaagtatggtttatcttcatcaggtaaacattctcatggtgaggataaagatttctcagctgtggtcattaaaacatcagatacagagaactctggccctcgagactcatccattaagaagagaaaactgaaacaaaggcagtcaagccagcattttcgggatccacactgtagcaacaatgacacaaatggtattacaaaacaaaatattactgaaattaatgctgtgaagaaaaaatccaggtcagaattgaatttgttaaagacagataggatagctactgattctagaggcacagttggtggagttgatgataggatatctactgataaggagtgtttaagtgagcaacttcaagaaaatacccatttccagcatccgtcactcgtagaaggcaccacaaagagggaaatccgtcatgcacaaacacctatagctgcgacttcgagttcatccaagatgtctaactccaacaagtatatagctcattttcaggaaacgagggcctctcctgtagagtcagtttcttcctcacccttgagatcttctgataagaatcctttgggtcgacatagaagctcttcatggacaattacagaaaatgtgcattctcaagagtcagggaagataaattcttcatgctcgaacagaaactatgatcttgggtctgattgtgataaagctaaggctcgtatttctggttgctttaacggagatgtgagtcatcatgttcagaaggatagggactttctgaaagataaacaagatgtgatgaacgcatgtcttataaacaaaggttctggatttggtgctagaaatttccagctgagtcctgaacataaagtcaatccagatgtcctttcatcacatgacaacgatggtcacaagcaaccaacagttcgtcagaatgggaaaacacagccccatttcggttcaaaccaaggtgaccatgcaaatttgacttatgggcatattaagcctggtaaagggaatataccaaataaggaccagaaaacaaatccatctgcagtcaaagcaagcaagcagcagccatccttaaacaatgcatcaaatggtgatgcctcttacaaggcaaggcaaatagaaaaggctgttattgaaaatttggacacgaggaagcacatcactctcaatggtgatgcttcaaatctaacaagtgcatctgttctactgaaggaagctcgagatttgaagcacttgtctaaacgtcttaaggaaaaaggggatgactttgagagtacaagcatgtgctttgaggcgggtctgaaatttctccatgttgcttctctgtgggagaccccaaacattgatagctccaatcaaggggtttctatacaagctatgaaactgtattccgaaacaggaatcctctttggattctgcgctcacgaatttgagcgactcaagaaaatggcgaatgctgctctggcatataaatgtgtggaagtggcatatatgaaggctgctttctttagaagtcctggtgtaattaaagatagacatgcattgcatgcagcatctttgatggttgctccagctgagtctccatcatcttccgcttcagacatcgataatttaaataaccagagcacagttgctaaggctgtttctgcaagaggtgtatactctcctcagattgctagcaattccatatctcggaacaatcatcatttgatgggattgctttcttatgcagaggacacaaataattcatttgagggaaccagaaaatcacaaacttcattttcagcttatctttctggcattgggaagaatcaggtggatgaagttgctcttgtaaggaaagtacttgatttcagttttcataatgtcaagggattgctgcaactgattcgtcattcgttggagtctatcaaccatgaaagtggtaaatgatctaccaagtataggtatcttggaaaagagattaatgatgggaaggttgctttggcaactgtgctatacattggtacctcctccaatctggatgtagaagtaaacaagtttagagagtaatcagttgtgaatggaaagggttcacattgccttctcttggttgcatggaagtattatatgtgggtgatacaaatttcaccagcggcaaactgctaaaacgggtttctttaccaagtcatattgctacttttgttgcccggaatatttcttgtagatgatgactttgactagtgccgaactggcaaagggggttcttaccaagaattagcctgcaaatgttaattgctaagtccaacattcttggtttcagtgtctagtgaatgatcaaatccaagtcctcaatgggaatctaatatacatctaccatagtgttcgagggcagagtctcagttttctttccagggcgccagtgtaagcttaggtcagcacttttgtcctaaagtctccccaccttctattggccttgcggagaaggttctgacaggcaagactccaccaattgcttcagtctaatattttacaaatttgcggaggttcagtgaggattgtctgactccaatgataggtgtgtatataggccaactttttagttaattcctgccctttttctcgatacatgtgtgtatattatacgagaaaaggaagaaaacaattttgtcataattttagctaatggttgtaattattgttcagatgttgcaaaattcattctttggtggcctggaaaaaactagtctagccctaaaacttcatcattgtttaggcaccttataactataaatattcttagcgtttgattcattttttccttttggggctgacctaacaacaaatgttagatgatgacactatctgctgcctatctgagtgttgtttgggttcctgactgagcattaccattgtaacgagaaagcgatgtaaaagcccttgctgctgtgctgacgaaagaggattcctttccaatgttacacgatgagtccggttgatttgtgtaacatgttctcgtctccgtccagactgaaaaggcagtggctcgttgagctgtacggcatgaagccttctttccgattttaatactagttctgggtgtactgctccaaagagtagcatctctttgcagtaaaaatggtttgttctgttcaagtatgtgagagaacaag

SEQ ID NO: 35277 - DNA, 1878 bp, Zea Mays
ctaactaaaatacggttcccggtcaaaaaaacaccgaaatttggtcaggaaatacgaaattcgaatttttgaatttgaatacgtaaacccttcgggaatgcgaaattcagttatttcccgttttcagaaacggacggaattcagttcacaaacgggatgggtaacactgctgtagggtgattctcgaatctcgatctccctgctctacccgcatcaccccgccgttgccggccccttcctcccgcttcccacctcgccgtcgccacctcttcctcttcctcatcgccggcgcttgcgcgccccttctccaccccgttgaccgccgcacccacggcctcgccgttgcagcactcgtgcgatccggtcacgagtggagcgcacgagctcattcgctgcttccgcctccccctcttccttgccggagcccgcgcctcctctcctcgccggcgccttcgcctgctcctgcgcccccttctccacgtcgcacccacggcctcgtgttgctgccctcgtgagatccggtcgcgagcgcccgacctaggccgctgcctcagtctctcctcgctcggtcgcatcaccaccgccggagacggaccgaggtgctctgcgagactccgcgccatagagctcctcctacggcgggttcttttccgtccggtagctgggttccctgaagccagtcatggcgatgaccaccgccgtgacgggcctcgccgtcgcagcaaccgctcccattcgctccttcctctcgtccgccgccgcctctgtcagcctgcccgccgatcttcgtgacctcgcctccgacctagcctcggaccctgccgtctcctaccgctctctgcgtgccatctggtgcgccacctcgccggacacccgcccgccgctccgcgacctcctccagggcgccgacttcgtgctacccagcccgaaacctcgtgagaagagcgatgagctgaaggcgaggctggagaagctccgggagacacaggagaggaaggagtatgctgagctcgtcagggacgtcgctccgcccagcaaggatgacgctcctgagcccttttcatcctacaaggatcagataggatttggtctgcatgtcgtggttattatgttcacaggttacttggtaggatttgctatgttcaaagctctgttcaacaataatgctgtactgaacgctgctggaggtatcttaggattagttggtggcatgctggttgagaccattctcttcatcatcagatcatcgagtaaagagttagcctctgttccaagatcaaagaaagctcagtagactcttgaaatgctatcatcagttagtggtgagagctataagtggccttagcttgtggaagtctatggagcattggtatgggtttgaaaatgcaattcatcgaatatatgcaattgacatccgatttgaatttgcatcatgaaggaatagggcagagggatttgatttcaatattattagctacccagaattttgtatctcgcccaatgattggctcgatgataattgaagaacatgtacctacggatatgtaaaaagtacatacaagaagatggtatgcttaacagcttaagtaccattggagagtatattggcttgaaattttgcagttaaaacttaaaagtcgaaacaaaatatctggaaaggtcgaagttatcgatggaagatcagaatgtcgccgcggcgacgacatgaagacaacacatggcactgtagatagatttgtgggatgacgcaaaacagtggccgaaatatggttttcgggatggatttagaaccaacattgatttagggagtcccaacgaggtggtaaatatagggatgaaattggattttgtatggagtttgtaaatttaaggatctgc

SEQ ID NO: 35278 - DNA, 2772 bp, Zea Mays
cctgagcccaaatccccaaagccaagttgagcccagatggccctcacagaatcgcccgatcccagcccctccaccggcgacccattctgctcacttccatgcgggccccagcccgccacgaatccccgttcccagtcccgcctgctccgacctcgcctttctccatctagggtttctctctccatttccaccccatcggaccggagcttcgcatggagtcatcgcagtctcggaagcggacgcgccaagcgtatgactgcgccgccgcgctgccaccagagcgagaagtggtagcgaggggtggcgcgtcgcctccatggagggaggatgaccgcgacggacactacgtcttcgatctcggcgagaacttgacccgccgatataaaatcttgagcaaaatgggagaaggttcgggttttctgcaatctgtcgtctcctcttctggtgggtatcctcgttattattctaatgaagagggctacgagttgggttttcgtaggtacatttgggcgtgttttggaatgctgggaccgtgaaacacgtgaatatgttgccataaaagttgttcgcagtatccgcaagtaccgtgatgctgcaatgattgagatagatgtgctcaatcgccttgcagaaaatgagaaatacagatctctctgtgttcaaatacagagatggtttgactatcgtaatcatatatgcattatatgcatgacttgaggcttatccacactgatctgaagccagaaaacatactacttgtgtcttctgagtatataaaagttccaagtacaaagaagaattcacaagatgagatgcatttcaagtgcttgccacagtccagtgccataaagctgatagattttggtagtaccgcctttgataatcaggaccataactcgattgtttctacgaggcattacagggcacctgaaataatcttaggtttaggctggagttttccatgtgatatttggagtgttggctgtattcttgttgaactatgctctggggaagcattgtttcagacacatgagaatctggaacacctagcaatgatggagagagttttgggacctctaccagagcatatgatacggaaatcaaggtgtgttatttgcaaccttaacttagtagatcattttatcttttgaacgaaatgtatttgtgttcaaatcagcttgtgataagcatatctttatttgcttgatgtttgttcttttttttggtggggctgggattttgggttttactatgcatttatttgttaaacatttttagaaaatgatgcattcgattctgcctgcagtagagtatcagagttacatttttgtaatcattttgagaaactgacattttctttatttattgaatgtttctaatctggtacaccttcattatatttcatgattagcagagtatcagtgtacttaactctcatatgttttattctattttgtttattgccacttgaattttcaaagctaatggctgcttttctactttgattttcaaggttaataaccgcctttttatggccactatcaatactagcttgctccccctttttttgtttcttgtaccttgattttgatagttttgcgtgtgtatctcttctatgtgtattgcctgcttgttatatttaaccagcgacattgaaatttcttgggaactcttgtaatatatttttgtttcttccatttattttctaatattcttttattgtgcttacatgtgtcacctggaatatgtagttcttctgctcagaaatatttcaggagggcaacacgtttaaattggcctgaaggtgctgtttcaagagaaagcatcagagctgtgaagaaactggatcgactaaaggacttggtatcgaggaacgctggccattcgaaggcagagctggcagacttgctatacagtatcctccggttcgagccatcagaacgtctgacagcgcaagaagctctggagcatccattcttcaggaacccgacatgacttgttggacaggcttgactcgtgtaactctctgcttcaagaaggtatcgaggaagcaggcagagccgtccattgcaaagctgatgggtatcttgctcctcttttaccagagagtttgtgtaagcctgtcagtaaggcttcttgcggtggtgataaagctgatggctttggtcacccaatgtaatgtacactagcattttttttttacctagggagtttagtgcctgtatgttgttaaccgggacgcgctatgagctgcgtcccaatgccctggttccataatccaattgcagatgttgaaaatcaagcatgaagggatccctgcgcagctgtgctcccgtagctgcaatagtctgttggatgcaagtatcgtgatgtcacgagtttgggatttgttgcattccgactgcatgggtggtgtgaagaatgggcatgaaatgccgtgtcctgttgttgagacttgtgtgtagctggtgaagtgttgttgttgatggagtacaacttgtggaaagagagtgcgcataggctagaaagtacagtatcttcatactaggtaagggatgtttctgaagctcatgtgcaccgcgattgcatgttggcaccgaatcttatcgtacctcatggatccctcactcgtgctgtttcgtcctgacatggacacatgaggagaggagaggagaggagacgagccgtgccacaccgccatggcccgcgtcgctgttgcgtggttcgtcgtcacttgtctccacgggcggttgtcgtgtaaaagctcgtggt

SEQ ID NO: 35279 - DNA, 4967 bp, Zea Mays
gtggtgcacggttctgcctttgttccgcgcccctgcgtccggaaatctcgccgcgcccctgcgtccggaaatctcgccgcgcccctacgcaatcacctcctcctctcccctcactacgccgccacctcctcctctccccctcactgcgtcgccctcctctcccactcactgcgtcgtcccctggatcctcgccccagcctctccaaccgcctccgcgctgtcccctggatctcgcgtcgcgcgtctgcagcacgcccgccacacacgccgcgattggagattggtggaaagcggtccgcggcttcaactccgacatctccggcgagctcgagcgcctcgctgcaacgacgggggcgacgctcagatccgacgtgccggacgcggccgccgtggatctgaacgacctcgagtccatggatctgtcggcggacgctgctccgctggagcacatggagccgttcgtgctggcatgcgcgcgggtgctgggcccgacgccgggccggacgcgtggcgtcgccgacggccgggtcgtcttctgggacggcaagcggtgggtcccattcgcgacggcctctccgcgctggacgcaggagctctgcggcgggcccaaggcctcgccgctggagtatctccccacgcccggcgatggcgccctgcacctcacgcccgtgctccgcccccacacccagcaggcaggcatggatctcgcagggcagggatctcgcggatcacgccgtgcggggatctcgcggatcacgccgggcggggatctcggccaagcctgatcagaagtttggggccctatcaaagcgattcgcagaagtggaggctgggggatcgaagcggaggtggtggagatgacggaggcgctgaagtccgtctggaatccggtgacacagaaaaagatcagagtttctccttctacttcgtcgggtgaagtcccggtggtggacaacacctcgacgctgatccctctggaagctgcggcaggcattgctggtgccgatgcaacccacatttggcattcccactccaatcgaagggtttttggtgtcgctgaacaggacactaggcttctgctctgcttactaatccattggtttcaagatgacagaagccgtcatcaaactgaatacttcttctaactgaatacttcttcccagctgacagatcagatcaaacttgacgtgtgttaggtatcagagaaaaaaaccaaggcatggtgcacttctaaagagcacatctgcagctgcccgctcgggctccgtttcgataagactagggacctgtacatcgccgacgcctacttcagcttgctcaaagttggccccgagggcaggctggagagttgctgtgaaaactctcaagtgagggaacatgatcatgtgcacgcaagatcctgatgactgttggcagaatcaagtcatagttaaataaacaggcccccacccgacggcgcgagcgaggcacgcggccctcccggcggggtggacgcggcccctggctgtgaggcgacgatggggctggaggctgcgatggcgctgggcgacccgccggcggactacgcatccatcgcgacggtggggctgttcgtggcattcatgtgcgtctgcatcgtcgtcgggcacctcctcgaggagaaccgctggatgaacgagtccatcaccatgctcttcatcggctttgggaccttgatgttgcaatgctgtatgttggggattgcaggggctgggaactagagcagtcatcctgttcgcgtcgagcgagaagcattcacgtgtgctggtgttcagtgaggacctcttatttatttacctgctgccgctgatcatattcaatgcagggttccaagtgaagaagaaacagttctttcgaaacttcattactattacactgtttggtgcagttggcaccttgatctcttttactgtaatatcccttggcgctctaggactaatatcaaggcttaatatcggcgcacttgaactgggagactatcttgcacttggggcaatattctcggccacagactcggtttgtaccttgcaggtgttaagccaagatgagacaccattcttgtacagcctcgtgtttggtgaaggtgttgtcaatgacacaacttctgttgtgttgttcaatgcaatccagaactttgatcatggaaatatcagcggtgccaaattactgaacttcattggcagtttcctttatctgttcggctccagcaccattcttggagtagcttctggacttcttagtgcttataccattaagaagttgtactttggcaggcattcaaccgatcatgaagtttccattatgatgctaatggcttatttatcttacatgctagctgaaaaagttcgagggtcacaaccaagcatgcctttgcaacattgtcgtttatcttcgagacttttctgtttctttatgttggtatggatgcattggatatagagaagtggaagattgtcggtcaaacttataggcatactctctccctctttctctctcttcattgctcaactagaagatctttcttctggatctgtattttctatcatgtgcagcccggtaaagtctatcgctttgagcagcaccattttagccttggtgctggtttcaagagctgcttttgttttcccactatcctttctatcaaatttgaccaaaaaactccaaatggaaagatatcttttaggcagcaggttattgtttggtgggcgggtctcatgagaggtgttgtgtctattgtgttggcttacaataaggttaatcttgtgtttggtctatctggtttgagctttggtctggaattatgttactgcttttgtttcctctatccattccaaaacataggacattttttgttgtcgtaagtcaaaaattctctaactttgacagagtttatagaaaaacaaaccaacatcaacagccttcatttcttaatcttatatagaagttgcagtattttagtctaatagatggacatgttttaaattttgaggcattgaaacaatttgcatcatgaaggcgttcgacttaatgtttccaaggttctgtggcagtgcgaggcattttgggaggtggtgagcgcctcgcttggcaccttcattttcgtgatgatgctgtccttcaggctgcagtgccacacaagttcgtttggtgtaggtgctgcttgatttttggcggtgcatgccgggtgttcgacaatgtttctgaggttttgtggcagtgcgaggcattttgggagggacatcatcatgcccaacttgaagtcgtccgtgaccacaacagcgagcgcggtggagtacatggatgaagtattgaaggcgttgtcgccaggtagtaccttcttcccactcatgacactacctcgtagacaacacaagtctagatgttgctggtgcagctgttcaacacgggcaaggtgctgttttccaatgtggtcgtcgacggcggcatgttcgtcttggccctcctcacctaccgcagcttcttcgcggcgccatcattctccctgtccgtctgattttctatcaggttgctcgatcgtcgtcaatataatccgtgtcaacaaattttaatcttggttcataagtaaagaacagaaaaggaaaacctagatgtctataattatacgtacatcaaatctaatgattttaggtacatattttctgtttgccattgcaaaatctaatcacgtgaattttatagttccaatcggggctatgtctatgtactcttatttttgtccagaacccttatgtaaggggaagtggaaagaaatggattggcacactgctggatggatcttcctcaatacgtttatcgagtaaataagcttgcattgttttggataattacatcatgtaaccgattttgacatttttttattaatcaccggcaacttacccaatttgctgtaataataaaataaaaggctacactatactacacactttcttgccatacattaaatctgacggtcattttttttattcctgacgacgcccgcagccgccgccgccgacgacggaggagcagcacctctcgtctgtccaccgctgaccgctcgtttgtcagcctagcaccggggtgcatgaacgcccagtatatgctacagcaccgccgcccctggccctgccgcctgcgccggtcgttgccctgtgcactccgcgggcctcgggaatggccaaccaggacatttatcgtcttattccttgccgaggggagtcctgctccagtagtggtctcagaaggggcaaataccatggatgttggcaggcctgtgcttgtgcagaatgcaccaaggacaagactggatgcagggacatgggggacgatggggattggattggggtactgtattgcagctgcagtagctgaacctgaatgactcgtggttgctgtggagggcgattctggatttggcttcggtgcaatggaggttgaggtgaacaggggcttcaacagtgatgctgttttagcaatggagacgatccattccctgtcagcttcaaaatcaagttacccaatggctgatctcacccaactcttcatgacagctactcaagaagggaaaagatcagaatcgcaaggccagattcttagggtggaatgctatagcttaatgccctaatctttatatgcctcttcttatatctgcacttccatgggcaccgggcgacactaaattcacaagataccccctccacctcaaggtgtaagaccatagcttccatcgctctttacgttatgtaatatatttgtagtatgctaatttgattcaccataatccttaccattcatactattatgcttgtttttctctcttcagtaatcgtcgaaaatggttcattgttcatagctcaagccaacttaattttaacgcaaaaatgtagcagtacttaaagtttcatctgtaatttatcaatggataagtgagttagaaatagtatttatca

SEQ ID NO: 35280 - DNA, 2260 bp, Zea Mays
ggccgatgcaatgcacgcatgcaacctcgtcgatcggccgtgagcccgtgagccgttgctgtctgcatctcacctggtgttgttcaggtaccattcatcattccgtccagatctgccgccgccattattggcgagtcggtcggaggacggaggagggggagaaattaaagccagcatggggcgaggaggtcgcggcggagctcaatgctctccctgaaggctcaagctgagggcgcccatccctgttcccggccggccccttccagatggatccccggcgcgaggagctgctgcatgagctagggggcatgtgggacgagatcggggaagcggaggaggaccggcgggggatgctgcaggcgctggaggaggagtgcctcaacgtgtaccgcgccaagctggagaaggtccgccagcaccgggcgcagctcaagcgggagatcgccgactccgtcgccgaggtcgccgccatctgcgccaccatcggcgagccgccctccaccgtgcacacggcctgctcctcgctccagggcacagggagcctgaaggaggagctgggcctgatcgcgccggagctggcggagatgaggcggcggagggacgagaggcggcgccagttcgcggacgtcgcccagcgggtcaacaagatccagcaggagatggacctgcagctaggcggcggcggaggccagggccagcctcatgctcatgtcgccgtcgacggctccgacctgacgacgaccaagctcgacgagctcagagcctatctgcggcgcctgcagcaggaaaaggaaagtcgcaccaagaaggtggcggagctcatggctacgctgcactcgtcgtccttggttctcggcatggatcccagagagacgaacagcgtcgtccatggcggcgtgcagacgcaggccagcggtatcagcgacagcgccatctcggggctggctgggggcatcgagaggctgagagagatcaaacggagtcgaatggagaagctgcaagacctgctgggcagcatgctggagctgtggaacctgatggacacgccggcggaggagcagcggcggttccagggagtggcctgcaacatcgccgcgtccgaggacgagatcacggagcccggcgcgctgtccatggccttcatacgcaacgtacgtacgtggaggcggaggtgatgaggctggagaacctcaaggagtgccggatgagagaactcgtcgtgaagaagcacgaggagctcaaggagatccgccgccgcgcgcgtctgcccgaggacgacactaccgtcatggtgttcgacgccatggacagcgatgctgagcgtgctatgatcctggagcggctggaattgcagatctccaaggccaaggacctggagttcagccggaaggacgtgctggagaagatggacaggtggcaggcggcgctggaggaggagtcctggctcgaggagtacagcagagtgcgtcgtctcgatcgtcagactcatcatctctatcccttgctgcataatccgatccgcttgcttcttgtcgcagaacgagaacagatacaacaccggcaaagggacgcacctcgtgctcaagcgcgcggagaaagcccgctcccttgtctgcaaaatgccggcaatggcggaagctctggtggcgaaggttgttgcttgggagaaggagagaggcgccaggttcgagtacgacggtgaggtgctgctggacctgctggaggactacggcaacgcgaggaaggagaaggagcaggaacggaagcggcagcgggaccagcggcggctggtgcagggcgcggcggcggcggaccgggacgtgtcgtcgccggtggcccgcccgccgcccaaggccatcaagaacgtcacgaggtctctgtccatagggcgcaacgccgccgccgccgccgccgccggtggcggtggcagccccaggaaggcggcgccggcgtcgtccaggcccggcacgcccagcttcctcaagtcgcccttgtcggcgcgccggggcgggggcgacgagggggcgcagatgctgtcgccggactccttcgagtgacctcttctgcttgcagttgcagtcagcattcagcacgctggaatggacagggatatcgtcgatctgcaacgcccaaattctggatggatcctccgttgaactgaaaccttttgctgtaaaaaagttctccgagggttggagtgcatgcagagcgaatgctttcgaatggcaaaaaaattggaaatcgtacggatttcattttt

SEQ ID NO: 35281 - DNA, 787 bp, Zea Mays
ctccttcacccctcgcacctttgacccctctcccttctcctcgaggacgcgcgcccatcactcagccaccgccgccgccggagtgatggattcccgcggattcgattccgccggccgcatcttctccagcgccacagagatgtggacggaagagctcggttccagcatcacggcttccaccgcgggggaagctgaagccgccccggcccccgccgccgccgccgaagccagcgaggaagtgggcggagacggaaaacgcaaggagtggtactccaaggctatcgcctactgggcgtggaggcgtcgaccgagggggtcctgggaggttatgggtgtgtgaacgacgcggatgtcaagggcagcgacgccttcctccgccctctcctcgcagatcgcttcggcaccgcgaagcgtcatctggttgcgcttgactgtggctcgggtattggacgcgtcacaaagaattttcttcttacgcatttcaacgaggtagatcttgttgagccagtatctcattttcttgaagcagcacgggaaaatcttactggatgtatggaccaaggagaagactcgcacaaggctgccaacttttactgtgtgcctcttcaggacttcactcctgaggaaggaagatacgatgtgatttggattcagtggtgcatagggcaacttcctgatgatgatttcatttcattttttaatcgtgccaaggccgggctcaaacctgatggtttttttgttctgaaagagaacattgcaagaaatgatcatatgcttgatgttgatc

SEQ ID NO: 35282 - DNA, 1503 bp, Zea Mays
cctggtctcgtcgccctaaccgcacccttccaatgacggggcgctagcgaagccgcgcatcctccctgcatctcaccggtcgtcaccctaaccgcgcccttccaacgacgaggtcgctaccgaagcgccgcgcatcctcctcgcatcttcgtcgctcctgcgccgcgccgaaatcctcccccaccgcgcccttccatcgacgaccatggcggactacccacgcgtcatgcacgccccgccctccgtgcctgtcctccggggccagcgcgctcccctcctcctcaccagactctgccgccgcgggtctggttgcccacctcaactccgaggaacgaggactccaccatgctcgctctagagacaccgccttcctgtcctccgctcaccgtgcttgtcctcggatccacgactgccgccccgctccccccaaataccactgatgcagggatccaagcccctgccatctattcagccgccccgacgtccacaggggataccaactgatgggccaccaaccatgttgttccacgctctgggctgctgctggaagctaatcaatcgcttggttagaccatcgcagattagcggtgggattcccaggttcaataatctcgtttcgggccatgccctcgatgtcattatctggcttgaggtttgtcgtggagaagcaaagggatgtttacatgtgctctattctaagtcttagggtctgggattaattgggcaagcatggagtattcgcttggttctactcaagaagggaatcaaggaattcaggactttatgcactgattgtaatagtccaacgaaagagcggatccacatgttaaaaatctcagcaagtgttcctttctgacagagtttcaacttatgtgttactaatgtagaagggatcccaattacttgctgcattgggtgatcgaacagtcatagtatggagtttaggaaacaggaaatgcattggtctcttgtttgggcatactgggagcgtgaggtcgttgccttgccattcctccaatccggagagaacaagaacttgactggaacatcaagataagcaagtgtaaatacccaccttgaaattggtagttttaattcaaacacatgccttttatcatgtattaagggtgtggacggttatgttgcctttttcacaaacttcaatttatgatcaattgcaagcaagatgtggtctagctgttggaatgcggatcacgaaggtggtgtcttcactcttcagcatgttccagtgtcgtgtgttccagatcgggttgctatcgggagtctgttggtttgcatggaatcaatcaggtttagcttggattcatgaataattggtttgtgtcgtccggctgttcgagctacgtcatcatgattagaatctacatttttccctacgcttgtatttaaaatggagtttacaaagataatcgttagaatggaatcgaaggctcattttttgttctatctgataatagccgaacgaatgaaatgcaatttaaa

SEQ ID NO: 35283 - DNA, 1155 bp, Zea Mays
ccccgcccacctcttccgtcctcccgttcccgtcccgcacacagactctttctctctcctcccctctctcgtcctctctctctcgtccgatctgcatctgcttttctcccccttgtctgtctctctcctgtccgtggcgtgcgcaaagatttgattttttttttctcggggaggagccggagtccgagcaggagtggcggcgggagggaggagatcctgatctgttgtcgcagcggggaggggaggaccggaggaggaagatggctgcgcaggagcaggagcaggagcaggagaagcagcaggcgaagacgagcaccacgagctcgctcccctccagcagcgagcgctcctccagctccgctcgcaacaacctcacggaaggaggggcggagagcgacgaggagatacggcgggtgccggagatgggcggcgcgtcggcgtcggcctcgtcgggcgccggcgcggacgagcgtcccaagggggaggacggcaagcaggggcaggtggcggcgggggcgcagcctccggcgggcgggaagaagcgcgggcgcacggcgggggacaaggagcagaaccggctgaagcggctgctgcggaaccgcgtgtccgcgcagcaggcgcgggagcggaagaaggcgtacctgacggagctggaggcgaaggccaagggcctggagctccgcaatgcggagctggagcagcgggtgtccacgctccagaacgagaacaacacgctccgccagattctgaagaacacgacggcgcacgcgagcaagaggtccggcggcggcggcggcggtggcggcaagggcggagacggcggcaagaagcaccacctcgccaagagctagtgagaaacgagagagggagctgttcagccttgcggtttggcaattcgattcaagattactgtacgctgccagctcttggagagaaaaaaagaagttttcggtgcatgtaaataaccatgcgcgggaaagaaaaacgtgataacaatcacacgacgtcaagcggcgagggtctgaattaaggtcatggttgtttacctctagtagattatataatacaacttaaataaagtaacgatctgtttaaaacctccttattatgttcattagtggattatataatttaaacagggactaagggacaaac

SEQ ID NO: 35284 - DNA, 3358 bp, Zea Mays
tttcttttagagtagaaatttagagttatatgagtgcggatagcctaacgcccgaggcgccgacggctgctccctggccgtcctcggaagcgcggcggccaggcgctgaggcgcaccacgccacgccggcggtgggacggaggagaggccggaagttgctggctcaagatactcttcctttatcatgtccggcgagatgaggccacagcagctgggggcgatgcggcgtgccatctggaggagctggcctatcctgtgcttgcagtcacagcacaggcttctaccatctttctgtgcctcaaccaaggccgccacgatggccgcctcgtctctgccaccaccaactcatcataagaagaaggacacggtcatcgtcatctctggtcctactggtgctggaaagagcaggctggcgctggaggtggccaggaggctcggaggggagatcatcagtgcggactccgtgcaagtctaccgtggccttgacgttggttctgccaaaccgtccgcggcggagatgagcctagtgccgcatcacttgatcgacatactggacacgtccgacgattactcggctggagcctttttccgcgatgcccggagggcgacgcaggatgttcttgacagaggctgcgtgcccgttatcgcaggagggactgggctgtacctgagatggtacatctatggcaagccgaacgttccacagtcatccatggagtccactttggccgtgtggtctgagctcgctgattttcgggagaacggccagtgggaggaagcggtagagctggtggtgcaggctggtgaccccagagcccgggacttgtctgtcaataactggaacagattgagccgcagcctcgagattatcaggtcatcaggctcccctccttctgccttcgccttaccgtacgatgcattctgtgaacagcatgacactgacctaactgaggctccctcatccgctggaaactacgaggccagggagatggagtatgacttcttctgcattttcctcgcaagtccacgcattgaactgtaccggtcaattgatctgaggtgtgaagaaatgctggttgacacaggcggcttactttcggaagcctcatggctgcttgatatcgggttgcagccacgtatgaactctgcaagtagtgccatcggttacaagcaagccatggagtacctgctgcactgtaggcagaacggaggcgaaagcaccccacaagagttccttgacttccttgccaagtttcagaggacatctaggaacttcgcaaagaggcaacttacctggttccgcaatgagaagatttaccactgggtcgatggctcgaaaccatttgaggcacttgttcaatttgtctgtgatgcttaccatggctgcagtgcaaggatggttcctgaatcacttgaaatgaaaagggaaaattgcgtgctcaaaagccgtgatctcaaaacctatcgctcaatgaacagggtgtttcttgggggtgatgactgctctcacgttttgaattggatcaggagaacacagagcaaatgaaatatagatctactcccttatcatgtttttttcaaacatggaaattgtctagctttttggtgttgaccaattaggacaggagtttagtagatcaagacgcaaataacacatgaatttagtttataggtttttattctgttttctatcatagtgaaaatgccttttcaaagtgccacaatggaacgaaaagtcaggtttctcctttgacatctctccattttgagctttgtaagaagctcggttcctgttttcttaaggcaggtttcttctttgggcatctccctctttgagctttacgtaaatagtagtacctgattttgtaatatcttaatcttgaagtgtgattcgtgcagaattaagctgaggtgtgttgaggacctcttttcatgtgaactgtaccatgaatgctcagtatttgcgattctgcagtagtgcatcgcaactattcatgttttctgtcatgggtattatctgccgtcaacctctgccaatatctggtatgctttttaaacagtcgaagacagtacaagtttggttatttggtctgcagtggttacagaagagatgggaggccaaattaatcagatatctgacatcaaaagggcaaacagtttggtaactgacagccagatgtttgcacacaaatcgctgctcatacctctaccaggaatgcccatgccatccctgaatgcttgtggtcaaagaacgataagaacgtgtgctccaaaccatcggcaaaagagagacgcgcccaagtctcgtcagcagggtgcgtcatctgcaatgaataccttgcagagatactatggcctaacaccacctcagaaaggaggaaataccatggatagcagcactgaactgtctgtgtaccataagggcggcggcttccagagtaacctcagcgaaacattgctcaatccttccgcagctccaggcaccgacagcagctggaattttgaagcgctaggcttttcagcgaccgagggcgatggcggggcaccgaaaccagagcaagatggttctatgcggcggcgacagaaagtggaagcagagtctaacgcccagggtgattttctagtgaaggcgatcaagagtctgttgatttccagcgtccgtctagacacgtatgcaggcagcccaggttccagccagaagagcggcttcagatctgtgactgtgaggaagtccccgagcgcgcccagctttgcggatgctgacaatggagtctctatgtggtcaagttccaagtggacgttcagccatgactccttcacccgaccgttgcttgatggcctgcccaaaccagcgtcagctcggaggaccaaccaaaaccgcgttggactgaaactgaactgaatacacacatgtttgagcgtctcctttgatgaacgacgagctgtggcgtgactaggcgactgacttggcagcagagcatatctgtctgcagctctggtgttagcacaattgattggcttgtacaactcctacaaaagagaagagttacgatggagcctagctacatgtaatgtatacaacatgcatacatgcatgtgttgatggaatgaattgtattgtatcccatcccaggcagtgctacacacagatattctgtctgctgtgtgatggggtgaatttggtttcagttactccctaaatcaaatggaagttcttcttttttttttcccactgtggtttggttttcgttattattattatactaggtcagtacccgtgcgttgcaacgggaacatataataccatgataacttatatacaaaatgtgtcttatattgttataagaaaatatttcat

SEQ ID NO: 35285 - DNA, 1122 bp, Zea Mays
tcaggcactccggcttgccatttccttcccatctcttgccggcccgggcacggtcagacggtcaccatccgcccgtgcggtggctcggcgcttcccgcgcccgcatcgaagccacccacaccatccacgcgtccctctccggctctccctctcatataccgccccttgcctccgcttcgcccgcccgcccgttgccgtagcttccgtccggaaccgccgcggccggcacgcacccacccgctggcctgacccgctccggcgcatgcggcgagacgccgtcgccgccgcgcccacggcggccggcgcctcgccgccgatccctgccaccgtcctcccgacggatgctgttgtcatcgatgtcgagggagagccgcttccggcggaggcccccgggctggggtgccggatctgccacctcggccctgaggacgatgagtcagcggtgccaggttccgaggtgatgctgctaggctgcggctgcaaggacgagctcggcgccgcgcaccagcaatgcgccgaggcgtggtttaggatcaagggcgataggcgctgtgaaatatgtggttcagatgccaaaaacatcaccgggttggaagtgaaaaaattcatggagcagtggcatggccgaagagtggcacacgcacaaactactgaggagagggaaagccattgttggagacagcagcccttctgtaatttcttgttagcaagtttactgattgttttcatgctgccctggtttctccgtgtaaatttattctgattctgctgccactattgggccatgtagattcacagcttgttaacttggttaccctcctaaggatggaatgcgtagataattgttggcacaaccacaacacagctcctcaaatatatatttttgaagaagttcccttttgatatacttatgcttaatctcctggatgcttataaccaactcaaagactactttgacttgaacacttgacgacaggaactcaaactggaaagtgcagggtcgatggctgcttggtagaagaacaattccagaagtatggggcacccagtttgacgttttgcacttgttgcgccaggatggacatctgggtttttcagtcagtcattgatgtgcaccatttt

SEQ ID NO: 35286 - DNA, 4506 bp, Zea Mays
aaaaccgggaaaacacccgtcgcccgcccctcatccctccgtcgccgcgccgccgtcccatcgacgccacctgccgctgccgccgtccagcacacctcctccgcctcacgcgttcctgcagaaagcctctcctagaccacggcccaaggcccttcatatccacgcggcacccgagcagcagaaccctagataaaccctctcgggggctaagcaccggcggcggcgatggtgatggtccctcccggcgagtgggtcccccacgtcgaggcctacgtcgacgtctcccgccccgccgtgcagcattctgctagcgtggatgcacttgctgccctggtgaacaaagacaagttgaccctttttgatttggtgtccaagatggatctttatttgacgacaacagaccacattgtcagatcaagaggaatactgcttcttggggaaacattgtctcgaatttcatttaaatatttagatgttattaccattacaacattgtcagacttctttatatcaagattgactgacatgtttatatttatatctggtattaagttagtaaatgttagaagggcaggtctgtcagattggcaagcaatacgaggagcccttgttggttgcctggctttattgcacaggaaacatggtgttggttgtattgtgattgctgatgtcaaaagactagttgagtctttcttacagaatgttccagtgcagtcacttgcagctgctgaccgcaagctgtgctttgaaattctgagctgcatattggatcggtacccggaagctgtaaaacaaatggatggtgaacagctgtatgggatctgtgaagcaattgatgaagaaaaggatccagagtgcttgatgctttcttttcatgtagtggaagttgtcatgaagctgtttccagatccatctggtttggcagcacagtttgcaggggacgtttttgagattctgagcaagtattttcctgtctacttcacacacggagtgggtaatggtttggacactacacgggaagacctctctagagcattgatgcacgctttttgttcaacccaatattttgagccttttgtcatccctttgcttcttgacaaactttcttcctctcttccattggcaaagattgattccttaaaatatttggacaaatgcattcgcttctatggagctgatagaatggttagacatgcatcagctgtttggtacaagttgaaagaagtgatttttaacctttcttcagatcaattattaatatcagaggctctgaattgtttgaagactgctattatgtatactgattcttctgataaagatcttttcattaatttgatcttgttggatgaggatattgtgaacaagatccactctgtatcaagcgtggaaaagaccatattgagttcattagaggacctggcccaactgcatgcacttggaagtgttatttctatccttgctgaatcgtctacatatttctgtactagagttcttcaagagcactttgcacacttggtagatattgtgggaaccaaagctgactatgaatcctggcagttgaataattgtaatggatcatcttctgctcctgtcaactatggagcactctatttatctgttcaattgctttcatcctgtagagaagtggctttggtatcttatgaagatttttcttctgttaaattagcaaagggttcctggtggcttatcttgcagaaaaagctggagcagttaatccatctccttcgatccatttttgctatagcttctcaatctatgcagccaaatttcagacaagaatatgtctcttgtgctgtgaagggcttgctaacactagcaacattcccggaacaatgctcgcctctgccagcaaatgcttatgaggatattctgcttatgttcacgtcaataattataaataagtttgaaaatttagatctgtggagattgtcattgaaagcattggctagcattggttcatctattgccaagttccatgcttctgaaagggaagtagtttactacagaacggttgttgacaagattgtttctttggctgaatcttatgatacttcaatgcctctcggtctaagacttgaagcaagttatgaagttggaactgctgggttgaactatatgttaagagttgcgaaatcacttgaagtcgctgttgtcaccaatatttctgaatctgaggctaatggaagaatggaatgtgctgaccatgtggcccatttatttgagtgttactctaaccgggtccttccatggttattagcttctggtggtgtcaatgaacttgcattgagctttgcactgcatctattggatgagactgaggatttgactgtgttagatagaatcagctcacagggcctccttgactcactaatgactgggatgaagcttttagttggagtatgtacagaggagcaacaatcacttattgttcagaaagcacatagcacaatatcttcaatgctctcactcccaatggaattgatgacagaccgtcttttgcctgtagatgagttagttcctttacattctgtttcagaaacagctctcatcagcatgttttcgtcgattataataggccttcggcctcaaacacctgtaccagatatgatggtgatgattaaactctttactgtcttcctactaaatgggaaaatgccagctgcttatgcattagcttctattttcaataaatatctacataatccagagttttctcatgagaatcagatggataaaatacttgatgatattcttgagaggtgtttctcaactgtattagccaacagctgctcaaagacatctcaatcttgtgctggcacttcagatgttaatttctcagatgtttcgtctagaaacaagctttctaagattaatatcttgtctagcttggcttggattggcaaaggattacttatgagaggagacgagaaagtgaaggacatttcaatgtttcttcttaagatcctattctcagatgagattttgtctacagttccatcccaccaggaagaaccttatggcggtgattcatcagatacttctcttgcaatatctgcagctagtgcattccatgtgatgatgagtgattcagaaatgtgtctaaataaaaaatttcatgcaagaataaaaccattatacaagcagcgtttcttctcaataatgatgccgatcttcctctccaaaattaaagaaacaactgtggtcacgacaaaattggcactataccgagcttttgggcatatcatttccaatgctccagtaccagcagttataactgaagcacaccagattttactcgtgatggttgatagcttagctaaattaagtatggatgttggggataaggatctggtgtacagtttgttacttgtcttctctggaatgttgatggatgaaaaaggcaaagagtgcattctggacaacatccaaatcacaatcagcgttcttactgaacttgtttcctatcctcacatgatggttgtgcgggagacagcattacaatgtttagtagccttttcgacgtttcctcactcaaagatttatcctgtgcggcgaaaggttgtgcaggcagcagtcagggctctcgacgataagaaacgggctgttcgtcgagtggctgtccgatgccggcacacatggcagtccttcacttaaggggagtctctttcggtggtgtcaggtagtcgggggaggcaagcacaaaaaactggtcttactgggcgatcctgttgggagtcgatgagtgtacatggtcggtttgcatgctccactgttgtggttgtttcaacttgaggtttgagcatttcataggctattcacctttctgtgcggacaggatctagagctgtcattgtaaggtgagagatactgggagcggggtctgctgacgagtttatgttcgagacctggtctttggatcagctgctgccaagttccagatgttcgaagttctccgaagagccatggggccatggggaggaatgtccctggaaattggccctcagtctgggatcgcttgggagttgggaatgtaacctaaagtcccagtattcttggcctcccgatgttggagaattcaagcatgctggcatgcgtgcgtttgtgccaacagtttttagtttgctttcatgtttcaaccaggctctgccgctcagaacgtgtcgagtatactttccagttggccagatcgtgtcaggttgtgcagtacgtagaaatttgtcatcccatacagatttgtggccttcctggactgcgcagtactgctacgctggaaaacgctgcgatagccgtgccccgcggaatccacatctctcggtcgattgtgtaatgcgaagtatgcaacagagttaggtggcatttcttcatgacaattattctcgcctcttgtgtcgaagagtgggtttgaaaaagaaaagaatagagatagatggtgtttggtcgcgctgacctcgacaagcccatagcgcgtgagcagggatggaaacg

SEQ ID NO: 35287 - DNA, 2750 bp, Zea Mays
atgtccttaaacagtctccaccgggggcgctccgcctccatcccgagttcgcgacccgtcgcctccctcctcctcattttcaagtttttgcttggttttcaccacttcgcgtcctgtctcctgtatgtgagtcctagcgccgccaaggaggccaggccaccaccgctcctgaactgcactgcgctctcctctccgctccaccagcggctgccgggcatccaagtccagtcgacacacagagaggataagccaagagcagccggtgggtgcggggtgaaccgtctgcctggaccgaggtttacgagtgagatgacggacgccggcgctggttccggcctgcagacgccggaccaggtccccaggggagcgggagctggtgcggtcgttgtggtggcccttcgcgccgccgccagggagatctccaagacggccgccgtctgggcgctgacgcacgtcgtccagcacggcgacagcatcctgctgctcgtgctcatcccgccgccgagctcaggcaggaagttctggggcttcccgttcttcgcggggagctgcgcaagtggacacaaggcagtgctgaatcagaggtcggatgtggctgagctgtgctctcagatggtgcggaagcttcgcgatgtgtatgatcccaacaacaagatagacgtgaaggttaagatcctgtccgggtcacctcccggcgccgtggccaaggaatccaagcgggtgcaagcagcctgggttgtgctggacaaggagctgaagcacgaggagaagcgctgcatggaggagctgcagtgcaacatcgtggctatgaagcgctcccaacccaaagttcttcggctgaacctggtgggatcgcattcgcatgagagggaagagtcgtccagaccacctcctcctccggcgccatcgccaccgccacctgagccgagcacgagtccgagtccgagccgagtgccatcgtcagcgacacctagcagcagcccagagtcagaagaagcgcccttcgacactagtaccaccgacgtcggagcgtcctgcgtctcgagctccgattcggacacgaacagcttttcgacgaataaagggacgacgacgacgacaacgacagcggcggccaaggacagcgtccagcgctcggacgccgactctgagagtgaggcttcgtcgctggagccatggatggctaccattttattacagacgcctgcagataggctagtcggaaaccggcccaggcccaggaggacgcccaccgcagactctctgctcgagaagatcgccaagctggacctcctgactgagatcagcgcgatccggagcaggtccgacctgaacttcagagggaacgtgagggacgccgtcgcgttggacaggagcgcgccgccggggcctccgcctttgtgctccatctgccagcacaaggcccccgtgttcgggaagccgccgcggtggttcagctacgcggagctggaggtcgcgaccggcggcttctcccgcgccaacttcttggccgaaggcgggttcgggtccgtccacagaggcgtccttccagacggccgggccgtcgccgtgaagcagcacaggctcgctagctcacagggcgacgtggagttctgctccgaggtggaggtcctgagctgcgcgcagcaccgcaatgtcgtcatgctgattggcttctgcgtcgagaataagaggcggttgcttgtgtacgagtacatctgcaatggatcgctggacacacacctttatgaccgtaacaaagaaacgctggagtgggctgccagacacaagattgcagtaggagccgccagaggcctgcgctacctccacgaagagtgtagggtgggctgtataatacaccgtgacatgagaccgaacaacatccttgtcacacacgatttcgaaccactggttggagatttcggcttggctaggtggcaacctgatggcgacatgggtgttgagacaagagtcattggcacattcggctatctggcgcccgagtatgctcagagtgggcaaataacggagaaggcagatgtctactcgttcggggttgtactagtggaacttgtaactggacggaaggctgtggacatcaacaggcccaagggccagcaattcctaaccgaatgggctcggcctctgctggaagagtgcgccatggacgagctgctggaccctcgcctgggagggcgcttctgcgagaacgaggtctactgcatggtgcacgcggcaaacctgtgcatacggcgtgaccctcatctcaggccgcgcatgtcccatgttctgcgcatactggagggcgggggcggcgacatggtggtggactcagctggcagcaggagctggcggatgcagcagcaccagcgttggcaggagcagagcagcccagcagctcaacgtgattcatcacagcgtgggcaggagactgcgggaagcccgtggagtcgagaacgaaggcagaacttgtgccatagatactagctagctagctagtatccctttcacttctccgggggatctgtgttgctgctgttcttgttcttgatgatttttttggctactagatggatgaactagtgtgtgtatagtggtggagattgtagtggccttgtactgcatgcatcgagggagaaatgatgcgcgtatcccattcaagtaacatccgttaacttacaagcacagaggcatctacctaggccgtgacatcgatgccaccatcggcctcttcttccgctgccgccgcg

SEQ ID NO: 35288 - DNA, 2121 bp, Zea Mays
atgacatgggccaaagttatgtgactgctgggaagcacgaggagactccagaggcttttccacttcctagaggcgtcgcaatagtgcgggcagatgctggatgggctcactgtgttgcaataacagatgaaggtgatgtttatacatggggttggaaagagtgtgttccaactggaagggttattggagaccaatcttcagttggaaccaaggagaaggatgaaagacaaatggcaatggccactgaccaaggtgtgagccccaggtcgcaggtgtctaggacaagcagcggggcagcatctggtccttctgaaagcagaggcactgatgatagcacaaagcgacgaaggttgtcttcagcaaaacatggccctgagagctcgacatccagtgacgaaagtctttccgcacccccttgtgttgtgacatttaatacaggagtgaaaatagtgtctgtagctgctggtggtcgtcatacattagcactgtcagatttaggtcaggtatggggttggggatatggaggagaagggcaactaggtctgggctctagaatccgaactgtttcttctccccatcctgtaccgtgcattgaatcagcactatacagcaaggatcgcccatcagctatgaaaggtaacaaggctgctgaaggacatgtcagtaaagtcttgggaaattgtgtgagggccattgcttgtggaggtcgtcacagtgctgcagtaacaggtcacttatatattttttagtttgtttctgccagtaattaccatgttcatgtagagacatcgctgtcactctggatctcaaggtagttcgaaaagttagctctatggaaaacaagggatttcaaatcaacgttttatgtcagctctgtaacagtataacatagtctttgtacaaacactgactttccaagctagtaaacatatgcttaccattttgcaagatcgcaataaatgcaagagcccagacataaaagtgacataatcctggcaatattttattctttgtaagagaatcatatcttcagaatggttatcacttgttttgttactatacaagaggatatatagttctggaatttagtctgaagatctcagttgctacttgctactaaaggggctttctcagcttaaaccacaataatattttcaaaccacctgcaactgcaaccttttagctatcagattgtagcgaggtttagtttcatttaaagctgaagtttttccaatagatatgccattttgttcaaatttctcttatttaacgctgaagtcctgcttgcagattcaggagctcttcttacatttgggtgggggctgtatggacagtgtggacaagggaatacagatgatgttttaagtccaacgtgtgtatcgtctatcctgggatccaagatgcaagacgttgctgcgggtctgtggcacactgtatgtacatccgtagatggtgatgtttattcctttggaggaaaccagtttgggcagcttggcactggttctgatcaggctgagactgttccaaaattggtagatgctaccagcctagagaataagaatgccagatctgtttcttgtggagctcgccatagtgctattataacagatgaaggcgaggtattctgctggggatggaacaagtacggccagcttggccttggcgactcaatggacaggaacgtgccttgcagtgttcctgtggacgcttaccaccccctaaacgtgtcctgtggctggtggcacaccttggtgctcgcggactcgcctacttgaaacctgacaaagaaattaccttagattgacaattttgttaggaactcgtaggctcgtgcagatgcggtgatgctgcatttcatcgtgtacatacatggcagtgcatgcagatatgtgtattcattctttggcggtgcactcttcaacctgtgcaacgtagacaaagcttgtatcgcaccgcgtatacagttgagtaggattgcctcgacaaattgtgcatttcctccgttgctgctaatgtacaaaattccacaagctagacagggcaaccgatgcgttcctcgttgcagaagacagatctccaaaataattaatgtttgtgtatcgtgatggttgcgattccgat

SEQ ID NO: 35289 - DNA, 967 bp, Zea Mays
cacgggaccaacttgacgaactcttggttctcaagctttcccggccagtctcgcagcaaccctttccctaccccgatcgagcgtgcgtcaaggtcgggatccggcgccgccgcatcccgatccgatgctctccggcgtcgaccacgacgttcccgacggcatcgggatggcgcggctcgcgtggacgcgcctccccaccgccgacggggagggggcgggcccctccacttccgaggccgcggacgacgaactcttatcgggcgctgccatagagagcctcgactacgaggtcatcgagaactacgcgtaccgggaggagcaggcgcagcggagcaagttctgggtgccctactacgtcatgctcaagtggctgttcgctctgctgatcggcgttggtactggattagctgctatattcataaacctggctgttgagaacttctctggatggaaatatactgcgacatttgctataataaagcactcgtattttgtgggattctttgtgtacacagttttcaatttagccctggtcttctcttctgtatatatagtcacaaactttgctccagcagctgctggatctggtattccagagatcaaaggttacttaaatggagtggatacacatggaatcctccttttcaggacattagttgggaagatctttgggagcattggatcagttggaggtggattggctctagggaaagaagggcctcttgttcatactggggcctgcattgcttcgcttcttggacaaggtggatctgcaaagtaccacttgagttctaggtgggtacggatttttgaaagcgatcgtgataggcgagaccttgtgacatgtggatgtgcagctggagttgctgctgccttcagagctcctgttggtggggtactatttgccttggaggaagttacttcctgttattcctttagctgctggcaacaaattcttcagtactaa

SEQ ID NO: 35290 - DNA, 2140 bp, Zea Mays
gctcttggtccacggcgacctcctctggccgagcaaaggaagcagacctgttcccacttcctcgcatctaaacccacgtcaccaaccccgaccgaacctcctcctctctctctctctgctccacctccgttcgtccgactccgaccgcagcccaactcctgctgacttcaacatccattcccccgccattcgcgccaggattactccatctctacttctactacttgttgctgatccctcctccccctcccaccaccaccctccgccgccggaccctcatcagccaacaacaataatggcgtcgatccgccggccgcactcgcccgccaagcagcacctgctgcgccaccaccaccccttcgccacgtcctccccgccctcctcgccgctccgccactcctcgacatcctcctccccacgcacccaccaccacctccaccacccgcaccccttcctcttcttcacgcgccgcccgctcccgcgcttcgccgccttcttcctcctcggctccttcctcggcctcctccacttcctctcccacctcccccaccagaccccgcacctccgcccggcgtcctccagccccgccgtcatcccacgccaccagctccccatcgaccgccttaacaaccaccaccaccaccaccacgacgacgacgacgacgaaagcaacagcaagctgctcgtcgtcgtcacgcccacgcgcgcgcgcgccgcgcaggcgtactacctcagccggctgggccacacgctgcgcctcgtccacccgcccctgctctggctcgtcgtcgaggccggcgaccccacgcccgaggccgccgccgcgctgcgggggaccaccgtcatgcaccgctacgtcggctgctgcgacaagctcaacgcatccgcctccgcctccgacgacgcgctccgcttccgcccgcaccagatgaacgccgcgctcgagctcctcgagaaccaccgcatcgacgccattgtctatttcgccgacgaggagggcgtctactccctcgacctcttcaaacgtctgcgccaagtcaggaggttcggcacatggcctgtgccagtgatctccgagaacagaaaggatggtgttggtgtggtgctggaaggccctgtgtgcaaacagaaccaagtcgtgggatggcacacaagcgagcatgccagcaagctccgtagattccatgttgcaatgtcgggtttcgcattcaacagcaccatgctctgggaccccaggctccgctcccatttggcatggaattcaatccggcatccagacacagcgaaacaaggcctccaagcaacaaccacgttcgtggagcagctagtggaggatgagagccagatggaaggcatacccgctgactgctcccaaataatgaactggcatgtgccggctggatctgagaatctcgcctatcccagaggatggcgagttgcggcgaatctggatgtgatcattcctcttaaatagtattcaacagctatgttcatcaaagcaactgactcctttgacaggtttgttttgtaccttcctgaaatctgctctggttctctacatatacagatgggttcttagttggtacccatttcttacatccttcaacttcacgcttaccatatagtatacagaagggccattgggtcccctttcagttgtctttagcatttcagcgacatctgctccacaaaatcacggcgtgtggcgtctcaacgaacgctatattaaattaattgttttctgattgcgactcatttcagctctgcattcatgatctgctctggaacccatatggttgattacagccaacttttacttcctatgccctctttgttaggttttaggttggaaacatttgcgtcatatcatctatgcctttcatttctgtatctgaaaaaagtgtgaaatagatcagctcagcttcttttccaaagcataaataattcaggtaatggaatgcatttcaaaagcatccaataatctctagcatatctgctaacatgattgattgggggtgtggcccaaatttctttttgtctgcatccatcgtctttatcctttccacttgtgaataagttcacatcatgtctaatatttttcttacctcagctatagctaattgccgttgctgttttccag

SEQ ID NO: 35291 - DNA, 2241 bp, Zea Mays
caaacaaggagcttccaactttcttcctcgctctttctctctctccgtgcgtctgcggtctgccatcggcatcgcccccaccccaccaccacacgtccacctctcccgcaattgggaatttctcctcaccgcctcgtctctgccgggctcgctcgatcgccttcggatcctgtgccaaccagagcgagccccagcccatttggaacgccgtcgcggggttcgacccgcaggtgttcgtctggctcggggacaacgtctacggcgacaacaagcgcccattccgggtcttcgggagggagcgcaccgtggggccctggaagaacgtgccgcgcttctacccttccaccgaggaggagctgcggaggcggtaccagctcgccagggcgcagcccgggtacgccaggctcagggagagggctcaggttcttggaacatgggatgaccatgattatggattgaatgatgcaggaaaagaacttagtgggaaagtgattgctcaaaggcttatgttagatttcttggatgaacctgaagacagtaaacggaggaaacaagctggtgtttatgcctcatacatgtttggccctgaaggaaaacgtgtgaaggtaatcttgctggataccagatatcacagagacccgctattaagtgatggaactattctgggagatccccagtggcagtggctagagagggagcttcatggtccacaatcagagatcaccatcattggatcttcgatccaggtagtgtctaatctttcagccactactgggcctttgttctatgtggagtcctgggcacgcttcccgagggagagagaaaggctgttcagattgattgatagtagtaagagacctggagtgctatttattagtggggatgtccatttcggagaaatcaccagattcgattgtggagctgaatacccatcatatgatgttacttcgagtggtcttacccaatctgtcgagaactctgtgccagaagtgtttcaacctcttatgagacttctggcaatactaacaccaactaccatgcgagttttgagcccaaattgccaatataaatcatgtacaataggtacaattctttcttgggtagaaccttataagtatgaatcaaccagtgtagataacttattttgttttactgaatttcttagttttttttaagatcaaaagttctttctgttttggactaaactaaaactccccaaacaaaaatgagttcatttatattgtattatcatagaacatcttaaggcatcactaagatttctctatgattatctcatttccttctgtgttctgttctgttctgtttatacttgtactgttaattcgtttgtgttttgctgtttcaggccaaccaaattttggagcgattgaaattgattggaacgctgtacctccgcggattaaacttgaactaagagatgttgagggtcattctgttcacagcgtagagttccctatatctgaactgcagccctcggaagcgcatgcaatcaaaagacaaacccatactttccaacgtcactgtactctcgaaacagagctcccatggctaacacgataccggcttgctctgatgctgtttgtcatcatagctgtttttgcggtggttgtggtgatgctagcgatcgcctgcttgtcaaactttaccaagtccagtaagaaaagcaagaaggaatagctgtgagctgcagaggagaaacgaagattcggtccagctataagctggatttcacactgaccagggatcacatatctcaaaccatgcctttgagcaggcaagagccagattgcaccacagtatcaagcagtacactgcgttgtgcaatttgcaaagcgcagattggataaatagatatgatagctaacaaataacttacaaccatgtgcctgcctcgtacagcttcgctttttgttttccgtcttcatgccttccgccctgtttttgttttctggtaagcattacattgactaagaaaaatcttggcggtggaagtgtcccacaagtcagctaactagtctgctgtgtgcctcctcgcacacggatggcatccctggtgctctcggttaattgcagtgtactcagacacgcgttcacatgtaccctgctagggccaatacggcctccagtctcgaaatagaactgatgtgaaacacgtgagcgacggtttatcttcgtatcgcatctatattcatatttaacattaaggactcgtttggtttg

SEQ ID NO: 35292 - DNA, 1424 bp, Zea Mays
gtagaagaagaagcagaagtactcaatcccgagactaacgccgagccgtgttgcggtctgcggagcgtgcttgccacactcacagtcgctcactccctgtgcagctgtgctcctgtcggttgtcgccccgcttcatctgtcgtctcctccagtgcagtccctcctccccctgtctccgccccaactctctccagtctcctcgcgtcggcagtcggcctggcagggctgaatcaatggcggtcgacccgcggcaggtcgtggcgggcttcctcaccctctccatgttcgtcatgctgggcaacatgatcaagcacgaccacttctctcccgtcaccgaggagatgggcttgaaggcaacaggtgcgcgatccaacacaatgaagcttgataacaatgctgaaatgaacagtgtcgatatggctggagtggaggacctgatggacactatcgaggaagttaaaccttgctggaccaaaccaagtccaaaaaatcagccatctaatggttttgttacattctccttgactatgggccctgaatatcacatctcacagatcacagatgctgtggttgttgcgaggtatctaggtgcaacatttgtactcccagacatcagaggaaatgaattaggaaataagcgaaaattccaagacatgtacaatgtggataaattcgtgaggagcctagatggtgttgtcgaagtaatagatgaaatacctgatgaagtgagtgctaagaagccagcagttatcagagtaccaaaccgtgtgactgaaagcttcatcatggacaccatccagcccatctttaaaaaaaacaagtacttaagacttgcggtcattttctcttcagtaagtttaaggccaaaggagacgagtaacaaggacttggatgcgactgcttgccttgcaatgttcagtggcctcgaactgaagcatgaatattctgaagtcgccagaaaaatgttggataggcttcaagaattaagcaagaaatcagatgggaaggtcttggcaatcgatttgcggaccgacttgctggaaaagaagagttgcaagacaaccagtggcgctcgaagaaaaggctgctataaccctaatgaggtcctggctttcctgaggagtgttggcttctctgctaatactaccatctacttgacagagacatggtggcacaaaggcctgaatgatctgaaggaggaatttccaaatacttataccaaggatgacattatgccagctgagaacaaaggtgaattcctgaaatccagcaatgcagacctagcaagcgctttggaccttgagatctgctcgcagagtgacgtgttcatccctgctgtcgctggcctgttctacgggcatgtcacagaggtgattttcttaaatgtagtgattttctgaaaataaatcagctggttggaagct

SEQ ID NO: 35293 - DNA, 5659 bp, Zea Mays
  misc_feature (1)..(2): n is a, c, g, or t
nntcacatccctatccctaatgggtcggcagcccaaagggacggcagatcgatccggccaaagggcggccagcggcgctaggagggaggaccgcgatcggccgccggtggcgcagagtgagaggggcgagccaagcgggcgcgccggagaggaaggggtcgacgtctcgggcggatccaaccacggagacaagtgactgggcgaatccagtggaggcgggcccgtccgtcgggcgtggcgtcccctaggccggggaggccggcggccggccggcgaggggagggagcagcgaattgggacggtcagggcaaaggggtggccggcggctgggaagggagccgccccaggagggaaggatgagcctcccggggcagcggctagacctaggcaggcggctgtgggggttggcaggtggcgactgtgggagttgggttgtgggaaccctaatcctctgataccatgtagaattatgaaagtgcttgatatattgataggagatggggtacaatatatagactcacaatcctaaccctaatgggtcgacagcccaatagtggtgccggcccatacacacacagtctaccaattaggacgcctaggagactgacaggaagtggccggcaacgctgtctcgactacaagacatggttcgtcttcttgcggttccgcatgttgtgcttttaattgtcatccttatttgcttgggctcctaccaatttgtgcgttgcctgatgagtgtttgtgcaccgttgtcaaacaccacgtccacatgaagagacagctcggtgagcctgcggagtcatagggtatagtgtacctaaagttgcccaaaacgagccccatgtcatattggagctactccgatggccttgacatgacagcctattgccagcgtcgtctgtcgtcaaagtgaaccagatcgagtgccccagagactcccgtgatgaccttggtctagccacctacgtccgactcatgccacgcttgttgtctggcatgtgcgccacgatgccgcattggtcatggtcgtccttgtgcccgccgccttttcaatgtcacgaggtcataccagtacaccacaacgcggttcattgcatccaaatctactgatgagcttcaatcaatcaaatcaaactaaaaaataacaataatggtatggcgtgatatatctgtatttattcattattatacatatatgtatggtgcctcaggctatataccatatatctctgtcgttctgcacccggagttcgagtccggtcttgttactactacataatatttgtacaaaaatatttagaaagattgccaccacgtttccgtgaaatatttggactctacaagcttgaatcaaaaaggagatagaagttgggagtttgcttgctttgtaaacggacggagaatataaaataaggaacacatggacatgatttttttgtctccctcttgatagagaactaaataaagaaagacgagcaaataaatagcagaacgactcttaccttttctatttgattattatataagggttctatttagagtactcatgatctgaggaacctatttagattaggattcctactccatattggtctagatgaagtcttgacaaagaaagtctctattgtccggtagttagagagagacgaacctaaaaatggatggacgaaaaaataggctgaaattttgtctctttattattagctatagattagggactacttttttattcatgatccgctgcatagtgcctagatgcccttaaattttcataatgagtatttgccatacataaataatcagaagaactccccgcgcccggacgtgcggacgtaggcgtcgtgcccggacattctgacgtaggtgtcgcgtctagacactcgtgtccactgtccgcaggccatgggacgaacttccatggatgcacgcacctctgcttgtggtacgaaacgacgcaggacatacaagtacttccctggatgcatgtgcctcttcctccacccgtccaactgaaagctctattgtgggttttggtggtttggatgacaacccaataaaaggactgacaagtgtgttaagcgttggacaggtgcttagtgtaaaacttgtaaagttcaacacaagtgttcaagagtgatggtccaaaggctgagttgattatgggtgtggacttcacaagtgaaggagaagattgcttatgtgagacttggtgtgcatatcttggagacaactggtcaagctaaggatagaggcaagaagagtttcgaggtaccgagtgcacggaagaaggtcaaggaggccgaggaacccaaagccaggggtgatgaagtgtcagggcctaaagaggcccacgaaggggctgcggcagcaatagctatgggccctccaatggggattagataaggatagttagagataagattagaagattagttgagattatttaggagattagttgagattatctaggaaggttatcggttagtagtttgttgagagtttttaggagagttttaaggagataaggatctctagctagataggggcggccaaccggcctatttatgtaatcaatggatgagaaataaagcaggcaagaattaaaggaagaaaccctcctcttgctcggtcgtgggtagaggcacccggccgacgttcctgcccatcgatacccctctctaatccctcaccgatctagcgaccataacatctggtatcggctatcttgggtttcgacctgatcccatggcttctgctgccaatttcgcggcgtcatcatggcaaccggcgtccccatctccatggacagcgccgcatgtcaccttcgtcacgccgtcctggcaaccgacgtccccatctccatgggttgcgccgcatgccaccttcgtcacgccatcctggcaaccggcgtccctgtctccatgggcaacatcgcctgtcaattttgtcaccacatcctggacgtcggcgtgcccatccccagggacaacgccaaatttcatcacatcatcttcgttgacaacgtctccgtccccatgggcgacgccactaggggcagccacggctcagcaatcaccagatccatcgatgggggatttgtggaccaacataagggctgatctcgcaaagatgcaagccacgctctagaaggttgagcaagggttgttgcaaatcaaggcagcagtgcaacatgagcagcaccagctggcgttgtccgcacggctccagacgtcggaggctgtgggcatacaagctgctgctcgtggcttccttgcacgacggagagtgcgggagatgcaccggcagatgctcgaggcagccttggtgacggttgacctcggcacacggggggcgcgacctcgccctgtcggacggccatcagcagtggcatcgggccgctatctccaagtgcgagcatggtacgtgtcccgtgggcgacgaacttcaactctacggcagcggcggtagggaagtcactcacctcatcatcaacaagggcgcactatttagcgccaccacattccgctaccggccgccacgagggcgcctccgctggttattgttgcaacctattccaggtgcccgtccatgtgctcctctttcgtacagatggcatccatgggatccaggtggctgcacacgtgcaagtccaatgcgcggagggtgtccaccttatcttatggggtaaaaaaattcagattcggaataataagataagccgagatgtaaaaggcatgtcttctaggtgtctggttttgggtcaagtagactcgatctttgagcacccgttatgcggcagctcgagggcgagttgcttgtccagtaggggtgtagtgtcagggcctaaggaggcccacggaggggctgcggcagcaacagccatgggccctccaagggggattagataaggatagttagagataagattagaagattagttcagattatttaggagattagttgagattatctaggaaggttatcagttagtagtttgttgagagtttttaggagagttttaaggagataaggatctctagttagataggggcggccaaccggcctatttatgtaatcaatggatgagaaataaagcaggcaagaattagaagggagaaaccctcctcttgctcggctgtgggaagaggcccccgaccgacgttcctgcccatcgatacccctctctaatccctcaccgatctagcgaccataacaagaagacttgcaagtcaagaattgatcgagttgagaaaagatatggtgcatcgagaatcactatctaaggacatgacttacaaccaatgatgtaacatctatggttatgtggtgtaagtcataaggctcaagatcaagctcaggtcataaagcaaggtcactagaagtagtgtcaaagcgagaacctggaagcaactcaaaagagctaagggtgtgtttggtttgacttttggctttggcttttgtccccctaaaagccaaaagccaaccaaagggctggatccaggaagcagcttttcctaaaagccgactttctcgtagtgcaaatctgaaagcacccctggacttgcttttagtggcttttcggatgaaactatgaaaacatatatcgaagaatttttaacgatttttagtggtttccaccaaacggtttttagctttttaacagctcacagcctacagcagctttttccacagctcacagcccacagcaacttttttcacagccacagcccaaccaaacagaccctaagtttactttgaccatgagtttgggttgttcttgtgtttggatatgttctgtgtgacctatgcagggtgttggagctcatagataacaatctggatcaagtcttggagacttggagttttggagtccaacatctacctcgaacataaaagctgggagaatatatgaaaagaggtaatcttctgggactcagtcaattgaattatactctaaatgtgtttgtctaagtcacaggaagatcctcccaagagtcgaagtcaagttgagaagaaacagaaaaaagcaagcttgggccagtctgggcctcaccggacagtcgcctgaggcgccctcgagagagtcgaaaatgcgctgcttgtccggggttgacctcaggcgagccgttacgcgggttttgtatatcatagtgatgtttatcgttttatatctatgttttatactatttttaactcctgggacaacatacgggcacatacctattactctattaagaacctaatgtgggcacctggtgcttcaccccgcctctgcgtcgtgccctgtgggcctcacgcccgcgcccgtgcagcgctctctcagctagtgcaatgtggacccccagcgcccgcgccgccacctgcctgtctagcacctgaccccgcccatacagctaccacaccgcacaaaaaatagtgcagagcgagcactcaaacatacaccccctactctagaaatgtggggctaaccacaagaccacacgtaccttagtgtttagaaacaaacaataattatatttgaataaatatctcaatacttatttatatgatatataacaaccgtagcaaagcacgtgcaactggctagttaatctataattagcaaatgttcaatgtagcatcacatgagtaaatcataacataattaggctctatagac

SEQ ID NO: 35294 - DNA, 2320 bp, Zea Mays
ttccaaccccaattaatcctaggcaggcaaagctcgttttttcttgtgcgccggttgattgggctctctgtttgcggagtcttgctctccctctggtcggttttcgttgatccctcctgcattggtttgctccggctcagatccgattctctaggaagagagaccaaagtatcaagtggaacaacagaattttagatttcattccaaacggggcataatcattgaagaccagttaaggggggcagtgagaagggatggcggtggagttggccaagcaattgcttgcggttattggaagctatacaccacctctctgggctaccctcatcgccggggtttttgttatcatctccgtctcgctgtccctgtacttgctgttcaatcatctgtcagcctacaaaaacccagaggaacagaagtttcttgtcggcgtcattctcatggtgccgtgctatgcagtcgagtcgtacatatcactggtaaatccatcaataagtgttgatatcgaaatcatgcgagatggctatgaggcatttgctatgtactgttttgggcgctatctagttgcttgcttaggtggtgaagataggacaattgaatttttgaatagggaaggtggttcaggttctgctgcaccacttttaggacaagcatctgaacaacgatacgtaaaccatccttttccaatgaactacgtgcttaaaccgtggccgctaggcgaatggttctacttggtcatcaaatttgggctagttcagtatatgataataaaatcaatatgtgctattcttgcggtgattcttgaatcctttggagtgtattgtgaaggagagtttaagttgaactgtgggtactcttacacggccgtggttctcaatttcagtcagtcatgggccttatactgtctcgtccagttctacaccgtgataaaggatgagttagctcatataaagcctcttgcgaagtttctgacattcaagtccattgtgttcttaacatggtggcaaggtatagcaatcgcattgctcttcaactggggtttgttgagaggtcctatcgctcaagaactgcagttcaagtcaagtatccaagacttcattatctgcatagagatgggtgttgctgccgttgcccacctgtatgtcttccctgcgaagccgtacgagctgatcggtgatcgtcttgttggagatgtttctgttcttggagactacgcttctgtcgactgccctctagatccagacgaggtcaaggatagcgagcgcccaaccaagttcaggcttccccagccagatgatcatgtccggtgttccactgccataaaagaaagcgttcgcgatgtcgtacttggaggcggtgaatatatcgtgaatgacttgaagttcactgtgaaccacgcggtggaacccatcaatgagaagctgcacatgatatccgagaacataaaaaagcgcgagaagggaaagaagaaaacaaatgacgatagctgcatcggttcacccacatccttgaccagggtcatcagtgggattgatgatcccctcctgaacgggagcctgagtgacaacagtggcccaaagaaagcgcgaaggcagcacaggaaatcaggctatgcaggcgcggagagcggcggagagagcagcgaccatggcctaggtgggtttgagatccgagggaacagatggattactagctagggagtgacaactaagagcaacctgtggagatgctatacaaatgtcacaggagttagcctagccagtgggttcaagtgtaggatgaggtatctggcatgatgttgtagcatgggcaaatcgagatgagtgagcaatcaggttgttgtctgttgattcttttagctgagcgcctgagctgctgaggccttgatcctgtatttaagatgtcaggccttgattctttcagcaagcgttggaaggaaggaagcaatgtgcctgttctgagctcccgtcagcatcacttgtaaagttcttataagtacagactagaactagtcatgcatacaagagaatagacagtcgatgtttctatctgtttttgtttcattctaaggcccttgtcacacgagcaccagaattttttttctttccttttggtaccatgatggtgatggacgtgagagttccttgagatgatcaaagcatctatctttccaattccatgtgtatcctgataactgaagatgatcgtttggttttccttttggtacgcaacatgccaagtgcaggatgaactctgccctgcaagaaaaaccacaggcaagtttgtccgattaacaactatctgcacaggtcataaaaag

SEQ ID NO: 35295 - DNA, 1125 bp, Zea Mays
aacaattaggcccgactagcacaacaagcggcacgcacggcgttaacctgcccagcgtgaaataattgctacctatttctctcgccggcgacgagcctccgcggaaaccagtgccaagccagagagtgcttctttctccgccagactgctgctccgcgcgagaagagccaccacggagtctgcgtgactcgggacagtggagaaaatcagcggcacagcgtgggtctcgcgacctccagcgaacgtggatttgggactgcgatggaggagcagttcatcctccgcgtgccgccatccgtcgcagagcggatcgagcgcctcatgaatgaatccgccgcctcctcctccaaccccgacgaggcctccctggacctctccttctcagaggatggaagaaatggcacatttatgatcggtaatgagagctttcctgcatctctcttggatctacctgctgtggtggagtcatacaaaacatatgatgattctgtactaattaaaactgctgatgttggtcagatgattatggtaagagaagaaaatgatcctgctccagaaggagtcgagtacaagcatgggcttactcctccaatgagggatgcacgcaggcgacgtttccgcagagaaccagacttgaacgcagagctggttaaccaagttgagaagcatcttatcagtatcatgcatggagtatctgtcaaccagaacgccagtgcgacaggaggcgaagaaggtggtgatcgtaagaaacctccagtagctcgtgcagcaaagcagcctggggttcaggagcccgccgcgaatggagaggaagctgatcctgagaggagcgacagtgatgattcagataactgaaatggaggacctggactgggtgcagcctcagtggtccaggcgagccatgccaaacttcgcaatttgaataaatcagaatgtatatatttgtaacaaacaatgtgtttgttgttcgctgaagcatgtactgtcacggtaaacatgatgtgacgctataatgccaaacaagatgatgttactgcatgtactagcaaaatagttataaataacaactgctaagtagcattttattggatttaatttgatttgaactcgttttaaaatcaagaa

SEQ ID NO: 35296 - DNA, 2175 bp, Zea Mays
cagcggtcgcggaatcctgcgcagaaagattcgcccatcgcccactggccactgcgcactgggcacggactggcaggcgaagaacctaagcagaacctaccatgtcaccggcggcgaggcgcatcctgctcgccgtcgccgcccgtcgccgccgcttctccacggacgcagcggcgtcggacccgtcccgggcgtcgcagcagctgcccaggggcaagcgatgggatgcggtggtgatcggcggcggccacaacggcctcgtcgcggccgcctacctcgcccgcgctggccgctccgtcgccgtgctggagcgccggggcgtcctgggtggcgcggcggtctcggagtcggaccttgtccccggattccgcttctcccgctgcagctacctcctcagcctccttcgccccgccatcctccgcgacctggagctggagaggcacgggctgaagctgctgccgcggagcccttcgtcgtttacgccatgccttgacggcagatacctgcttcttggccccgatgctgagctaaactactcagagatcagcaagttctctaggaaggatgcagtggcatacccaagatacgaggagaagctggagaacttctgcaagctcatggactttgtcatagactcagctccacccgagctgaggcaggaggcccacttctcgatggttgacaggatgaagcatagggttgagaagtcagcattctggggccaccttcttcggcatgtgatgcagcaggggcagaagaacatggtggaattctttgacctactcctttctccggcatcgaaaatcttgaacacctggtttgagggcctcccattgactactgtctactgcagagtgaggttttgaaggccactcttgcaactgacgccgtgataggagctatggctggtgtgcacactccaggttctggatatgttcttctacaccatgtcatgggggagactggtggtcagcgtggtgtttgggcgtatgtccaaggtggtatgggttcagtgtcatcagctataagcaaagcagctcttgaagcaggagtgcagattgtaacaaatgccgaggtttcccaagtaatggttaatgaaactagtggaatggtagaaggggtagctttggttgatggaacagaggtgcactcgccagttgttctctcaaatgccacaccatacaaaacatttgtggacctagtaccttctagtgttcttccggaggacttcctctgtgcaattaaggcagcagattacagctctgcaacaacaaagattaatgtggctgtcgacagactgccacagttccagtgttgcaacaccaatcttgaaggtggcccagagcacatgggcacaatacacattgggtccgaaagcatggaggaaattgacgttgcatacagggaagcagcagacggcatctcgtccaaaagacctgttatagaaatgacaattccttctgttttggataagaccatctctccgccaggtcagcatgttattaatctctttgttcagtacacaccctacaaactttcagaaggcagctggcaggattctaatgtcagaaaagcctttgctgagcgatgcttctctttgattgatgagtacgcgccaggcttcagctcatcggtggtaggctacgatatgctgactccgcctgatcttgaaagagagttcggcctaacagggggaaacattttccacggcgcaatgggcttggattctctcttcctcatgaggcctgccaagggatggtcggattacagaactcctgtgaaggggctgtacctctgcgggagtggcgcacacccaggtggcggggtgatgggcgcgccaggacgcaacgccgccgccgttgttttggaggaccacgtgaagacaaagtaggtgtagtgtagctcgctggaaaccaagatggcatttttatcatcaggagaaaatctttgatgccatggtgctgttttagtgcctttcttttcttttcctttttggagaattattgtcgcaatccatagtcggagaacttatatcatgtgaagactcgtgtaacaaatcctcactaacatttctgtccctgtccggcgggaaattggaactgtggtaaaatgtggacccatctctttgaaccacaaaggccctatgggcttattttgtgatgaaacaaccaatgg

SEQ ID NO: 35297 - DNA, 595 bp, Zea Mays
tgggaaaattagagtcgtccgattagaaacgggccgaccagatcgggcctaggcattaatgaagtggaacgtgcatacctacctttggatcttggatcagcggtgcagatttaaggcgcgaagggatacatatcatcaaatctcgactgtaatctagagatccgacggcccagatcaaactgccgcacgcattgatctccaccgttcatcagaaatggacggtcactgggtcatctcccaccttctatccgagcacgacggcgcggctagatccgtggcggcggctgggcgtggatcgaggaggagagggagatgctggccctccattgccgcagcggtgctgcccggttcgccctcgaaatcgccgtccaagcaatctctccgtgtgggacacggtagcgacatcgaagctctttctctctctgcgcggcaaggagctctcggcgaccagattccaccgggtttgtggcaatgggaaaaattggcgcagatggatgaggaaagggggtcacggcggtcggcctttatacacctgatgggcagagtccgattgccagagagctcggacggttctgtttagctaattcgaagtttg

SEQ ID NO: 35298 - DNA, 2264 bp, Zea Mays
atagctggtaagcgtagtggaggaagagagggaagaaaacgaagcgaagccaaagcaaggtctgagccgccggagagggaggtggccgggtgggaaacctctctcgcgcgtcaggcgtcacgtgagaactcccgatccaccgggacgacggattcccgccgctcccccgcgcgcggcttcttccggtgcggtcggcggccgacggcggaagctactggcccaagcaaagtgagtgaattgcgagtccaggcggcgatggcggggcgctgcgattgacgtgcgacgactatgggcatccaagggaacaaggcggcgacgcacgagcacgacttcctctcgttgtacgccgccgccgccgcggccgccgccgccaaggacgctcctctcctgctccacgactccaagacgccgcctccttctcaaggtaattttctcttgaagacgcacgacttcctgcagccgttcgatcagaagccaggagcgccgccggagccgtcgccgctgcccgctccagccgcggagatcaggcaccggcagcaggtggcggtcgccaagcagcgcgcgctgccccttcccctgcccggcggcgtcggcaccttcagcatcagccccgcgcccgtgtcggtcgcgctgccgtcggccgtcgtcaagtcggagccgccgccgttcgtgctctggggccaacctgcagcgacgctgcagccgggcgcgcgagggcaccagcagcagtgggcgctccccttcgccggctccttgcaggtcagtccgccgccgcagcaggcgcaaccggataggaagggccgcggcggaggcggggtcatggattcaggctccagatccagcggcggagccgggttcgacgacgaagacggcctcaccacgcgccgcgaggtctcctcctcgctccaagatttggcagtaagggtggattggaagggtgggagctgcagcgatggcggtacaaatcaggggccaaacacaccacggtcaaaacactcggccacagagcagcgcagacgcagcaagatcaatgataggtttcagatacttagggagctgttgccacacaatgatcaaaagagagacaaagcaacatttctcttggaggttattgaatatatacgttttttgcaagagaaagcgcaaaaatacgaggcaacattcccagaatggaaccaagaaaatccaacgatgcttccgtggtcaaatatgtattttcgatcattctggaaaaatgcacagagtaaaggccaaatcccaggagattccccgcctgacccttcacatttcgtgagaaatggatcctcccctggatctaatttcactgggaaactcgatgataatcacacatctgcagctgcatcaggggcactggaccaggcagaaactaatcacgtggctagcggctgctacagatcatcagaaactccggcgaatattacaaataatgctatatctcagtcccaacctcaatggacaggtccgtcccctgtggatgactctgcagtgaaaagtgaaatgcttaacagccaggagttggcaatagatgaaggaatgatcagtgtgtccagtacctattcccaagagttacttatctcgttgtctcacgcccttcagagctcaggtgtggatctgtcccaaaccagcatctctgtgcagatcaacctgggaaagcgtgctggcaagagatctgcatctgctggtggtgtatcctccaactccaaggaaccaccagccgatccagcatctagtaacgaactaggcggccatcacgtgacaacgttgggagctagcgctgacggtctcctcccccacgcgacgaaacggcataaacgggacaacagctgatgatgggcctctctcactccgcctcgttcccagacgacagacggattgatcattcttttttttttctcccagcccgacgggaggctctctcttggattggttgcacatcgcgtgctcggtgatgggctgagaccccggctgtattctttttgatttgatcgctcccgccgccatcccctgtctagcccattgtttttacgtagaggaacgaaccgtggagcttcccattgcggattgtgaagccgctcttcttgtacacaggcttccattcatctgagaagcttcttcccctccttgaacaggtctctccgcgttttagacctgtatactagcaacctgtaagatatgattatgatgtccagcagctctcccaggcacggcaccggccagtcaagttgttccgttatttctatgta

SEQ ID NO: 35299 - DNA, 4926 bp, Zea Mays
aagtttggaacgaattttaaaaaaccagtggtttaaccggttttataaaccatggttgccagttgcctgagcctcacagcgcgcgccaccaccaccgcgccatgccgttctccgccaccgccgccggcgcctccaaaccctaaacccgccgcagcaatcaatggcgtccctcctctcctcccccgacgattccaagtcgctgtccgtcaccacctcatcgctcttcctctcctccatcgcctctctcccctcttcccatgccttctccatcttcacctccgcctccacgcctcttccccctgtcccggtctctgtgcctcccgccgcactcatcccgggctcccgcttccttgtcgatgccttccgccatgccggaaacttctctgtcgcctacttcctctcgcacttccactccgaccactacagtggcctcggcccttcctggcgccgcggccttgtattctgctccgcgccaaccgcacgcctcgtctcatccgtgctctctgtcccgcctcaacttgtcgtctccctcgatatcggtgtccgtatcaccgttgatgggtggggcgtcaccgccgtggacgccaatcattgtcccggtgccgttcagttcctcttcgcctctcctgggccgagagccgagagatatgtgcacaccggtgactttcgttacacagagtctatgacgcgtgatcctaacttgctggagttcgtccgtgctgatgcggtgtttctggacaccacatactgcaaccccaagtttacattcccttcgcaagaggattctgtggattacatagtgaatgcaatcaaacgtgtgaaagaggagagttcagtatcaggagagcgtgtgctatgtctgatcgccacctatgctgtcggcaaggagaagattttgctggaggtcgcacagcgctgtgggtgttcaatccatgtggacagtaggaagatgaagattttgacactgttggggttcggtgggaagaatagcgtttttactgaggacgcaacagggacggatgtgcatgttcttgggtggaatttgttaggggagacttcgccctacttccagccgaattttgtgaaattgaaggagatcatgatggagagagggtatgctaaggctgttgggtttgtaccaactgggtggatgtatgaaaccaagaaggaaggttttgctgttagggtgaaagattcactcgaaatccatcttgttccttatagtgagcactcaagttacaatgagttgcgcgactatgttaagtttttgcacccaaagagtgtgatccctactgccggagtggatgctgggaagctcgatagtaaggaggcagttgctctgcagaagcattttgctgggttggttgatgagacagcaaacaaacaggagttcttgatggcattccatcgtaggtcaatagatgctactcgtagctgcaaagatgtggttgttaattgctcgagccagcttgatggggaggatgctgctttgttaccagcaatctcttctgcttctgaacaacaggataaactgatggagaatactatgcaggaaacacttaaagaactgtcagatttcttaccctcgtgggtgagccaggaacagatcacagacctgctgatgagttctgaaggtgatgttgttaaagcagcatcgattttttttgagcgggaaagagatttctttgaagaagcaaatgtttcttgtaatggcacacccaagacagagaaaaaccattcttctaatcatgggtcgtctgctgatgtaagtagtcagcaagaatcttctttattttcacagaagcctgtggaatactctgcaaaactggtaaatttgtctcctatgagaatgaaaccaaatactcccaaaaaggtaaataagaggggttccagcaatacaaacaagccaaaaaagaaaggccgattaacttcctcaacagaatctggtgggcggaagcagtccacaattacaaattatttcattagagctactgaagctgcttttaaaaggtgtagacctgaaagagtaactgtggaggcacatcaaaataacgtggaaaacagtgatcagttagctgatactgaaaaaacacaagatcagattgtagaccagcttctccagattgtagatggtagcatgtctagagaatatgcagtttatttgcttgagaaggcaaacggagatgtggctgtagcagttgacatattttacagttcaagtgagggtaataatgtaattgaggttgacaagaatattatgctgcagaatgcacaaggtgaaactgcagataattgtagtgaaacagacatggctagtggttattctcaggctactccaaaaatgtcaaacttacatgtaggaacttctttagcacatggagattctgccaacacatcactgctaattgaaaagtatctacctattgaacatgcttgctggatagcaggacagcctgcaccatacttgcatttggctcgcacatttgacttggttgaaaaggaaaaaggaaagatcaaaactatcgcaatattttgcaacatgttcaggagtttgcttgctttatcccctgatgatgttctacctgctgtttatctatgtactaataaaatttctcctgaccatgaaaatatggaactgaacattggtgggagtctagttgtaactactctggaggaatcattaggaaccagcagatctaaaatacatgaaatgtacaaaacttacggtgatcttggtactgttgcccaagaatgtcgtcagaatcaaacactaattgctcctccccgttctctctcgatttgtgatgtatattccacgcttcggaaactaagtgcaatatcaggtagtggaagtgctgggaggagaaaaaatcttgtcttgcatctgattcggtcttgtagagaaacagaaatgaaatttcttgtcagaacactggttcgtaacttgcgtattggggctatgatgaagacgattttacctgcgcttgcacatgctgttgtttttgatagaaactgtgcagcagatcctgcggtgtcattggaaggcataaaatcacaactacagagtctttcaactgaagttgccgaggcatacaatgtcactcctaatctagatttgctcattccttctcttctgagagaaggcactgcattttcagcttcatccttggcaatggtgcctggcacacctattccacctatgcttgcaagaattactaacgggttgactcagtcgttgaaagctttccatggcagatcatttacttgtgagtacaagtatgatggtcagcgtgcccagattcacaaagcacttgatggatccgtgcgaatattttcaaggcaaatgaaagaatcaacttccagatttcctgatcttgtgaatatgattaaggagttgtgcaagcccgaagtgtcaagctttatactggatgccgaggtggtaggaattaacaggaagaaaggaaatgagttgatgtcgttccaagagctatcttcaagagaaagagggaataagcattcctcaatttcaatagagaacataaaggttgacatttgtgtgtttgtttttgacatcatgttccatgatggagagagactactggattgccctcttcggcaaagaagaaagtacattcatgacttgttccatgagaagccaggatattttgagttagctcagcagctaaatatagaagcctgcgaagcttcaccagacaattctagcactttggctaggatggacacgtttttcagaaatgcatgccagtcttcttgtgagggtataatgttaaagactttggatgtcgatgctggatactctgcttccaaacgctgtgattcatggttaaaggtcaagcgtgactatgtgcaaggcttaggtgatagccttgacttggttccgattggtgcatggtatggaaacggacgtaaagctgggtggtacagcccttttctcatggcatgctacaaccctgaaactgaagagttccaaagtgtatgtcgtgttatgtctggtttctcggatgagttctataaagagatgaaggagttctattcgggggaaaggatactgcccaagaagcctgtttactacaaaacagacgagcaaccagagctgtggttcaccgcagaacaaatctgggagatccgaggtgcagacctgacgttgtcccctgtccaccatgcggccattgggcttgtccatccatcgcgcggcatctcggtgaggatgccccggtacatccgttcagttccagaccggagcccagaggactgcggcacggccgccgatattgctagcatgttcaaagcccagacccggaagatggatgtcagcagcgagggccaggagtagtaggcaatgcaaagctcagcccatttcctcgtcctagctttgcttatgttcaccagttctgtatatacacagaacgaaccagggtgaagtgaaccaccctactgatcaaatggtgaaaactgaagcgtaggacaggcagcactgatcccactggctttcaatttttctttgtacagaaactgaatgcagttggaacgcggaaggaagcccacgagttgcacgttcggggggaaaaaaacaatgcataagtacatcaggtatcagcttgctttgtactacagcgcgattattgtaacgcccgtggccgccggcgagtcagccgttgacgtgagcacagatttggtgggaagcgccggcgaggattgcgtcggcctgtgcgcgttcgtgtttctgaatatctgaatcgatcgtctattacaagtctcaggcacttatgtgctgttacacggatacaagagggttaacgctaataactcgaatacgccgccctaattcgaagacgtcttcccgtagtacgccatctttactgttcagctggagcactcgttacacctccggagatgaagcttgag

SEQ ID NO: 35300 - DNA, 2621 bp, Zea Mays
tttggagtttggacttccttccgcctccccgaccgcggctgttgcaacgatccaaccccacctcccgccgccaccgcccccgcccccacccccgcgccttcgtcgtcaaggccggggttcctgcggccgcgtctccctcccctcgcccgtacccacacttgattaacgtgtcagctcgctaccggaggccctcgccaactcgactcgtactcccgttcccggcggcgatccggccggcaccggaaccctagggttccaacgaagcaggaatgatgagtcatcaacagcaaattgcccctcctagtaggggttctgtgaatggattcccccatctaaagctggatagggtgggtagtggaaggcatgaaagtaaaatcgtgaggtcatcatctggcggttttaccaattcaggaaatgacatcaaactagggcatggaagccattcgagggaccgactaatctatgttctaacacaacttattgggcatcatgtcaacgtgcatgtgaaaaatggctctataatatctggaattttccatgcaacaaactctgacaaagacttcggagtagtcttaaaaatggctcaggtcataaaggatggttctgccagaggacaaagatttgcttctgatgttgtaaagaaacctgagactatgataataccagcaagggagcttgtacaagtttttgccaaggatgtagcacttggcggtgatgagctgccaaaaggtcctggtcatgacaaaaggaaggacttgctgattgattctgccatttcccgctctcattaccttgaagagagggaacttgagcgctgggcaccagatgaaggagattcagagtgtatcgaactggagaagtatgacagaaagggaaataggagctgggatcagttcgaaaccaatgcagccttgtttggggtaaagagtacattcaatgaagaaatttataccacaaagcttgagagaggtcctcatatgagagagcttgaaaagcatgcttcgagaatagctagagaaatagaaggagaagataccaaagatattcatcttgcagaggagagaggcttattcctgggtgatgacttggaccatgatgaagagataaaatattcagcagtgcgtagagacaccgataacagcaagtacaagccaccatttactaatgtcccaagcagtacataccaagttgatttgtttaacaggacagtcaatattgttcccaaggatttgctgggatgttcatcaacaatggatgaagaatcatcatcccacatatttgatgatattgatgcatctgccactattcaaaccaatagcgttagacagccaacatctgattaccttccagatagactctcgtccaatgatgaaaacaggttggacagaaagctgagcaaagggagtaatgaaaatatggataagagaaagttgcaacctgagaataatttatctgatggtgcaagacctcttatttctgaagggtcggatgggccaccctcaagttcatatgcatatgaaccctcatcttctggccaaggattcaaatctccagaaacacctgatttgacagtatctgtcaaacatccttctaagacggaacatgtgattaactctcaaagacctggtagttcaacatcgtcaacatcagagcgcattgctgcaaactcagctgcgagtgctcttggcttgtcaccaagctcttcaataggatcccttacctctgaaaaatcaactttgaaccctaatgctaaggaattcaagctaaatcctaatgccaagagtttcactccgtcagcatctttgaggccaccacaccctgcatcatctgatgcatcatattactatactaataacattccagcagcaccacttggacctggtttgccagtgggcatggggttcccaccggcatatggcacccagcctgtcatgtataatgctcaacctggagcatcacagcagggttacatgcatcctgttggtctacagtatgggcagcagatgatgatgggaggagggcagaatcgtcctgtttattattatgcgcctgagatgcaacaatacagaggaagaaacttctagatatactattttgaactgctgctaggtgaaagtcacaacaatccccacaagtgggataatgacccggcaaaagccgctattagaatggaaagaactggtgatgatctccctgactgtcgctccgattccttggacaaaaagccccatcgactttgtgttgcttggttgcctggtcaaaaagctcttcattgttctgtcactgttgctcagaagcaggttgactggattttttttatgttttttgtcagacttctgttgtaaattaaattgtgggtcatctgttcgacccagaaatgacattcataagggctagtgtggtgacagaaaattgaaggggatccatagaagagaatccacttgctattcaattttgaatagcaagtggattctcttcatggatctattttaatttctcggtcaccaaatcagtcctaaatgtttgagattgccccatattacatttatgtgttctttgacgcttgttctaatgtaaactttaaatggaattctcagctgaaatggattaaaattgctgac

SEQ ID NO: 35301 - DNA, 495 bp, Zea Mays
cccctccccactcctcgtccatttgtgcccacgccgtgagcccctcctcatcccatcgccgcgaaagagcatgaaccggaagcgagccgccatggacggtcttcaccctgaccatcgatccagccatagggaatgatccagggtggagagcagggcataggggaggtgcgcggactgacccaggggctcggtggtgtctgggacatcatcaattgatcgttgaagtgtaggcaactccgatgtgtcgcccttccccgttgccaaggttctacgtgacttggtagccggtaataagcccttcttcgttttgtgctcgctttcgtatcatgtggcaccagttgatctggagattgggtcacctgtgggccgtcttagacttctccggcgtgaccgccgccgcgggtcggaggaagggggtggagagaagggtctccattcgatctggtatggacgattgagattagaagctagaataccctttcgtctattgaatcc

SEQ ID NO: 35302 - DNA, 6251 bp, Zea Mays
cttgctatttttgcacccaatcgcccccgcgtcgcatccgcgcctagagaggagagccgccattccccgggccccatccgcagcgacccgccgcgcccgaacccgcgattggtcgacgccggttcctccttcaccgcgtcgctcgcagcaggcccccgccccgacaaattcccccattcccaaatcgcccgcgaactccccgccgcccgccccgcatcatcgacctggtcccgccgccgccgccgccgctcgccgccgtacggaatctcaggtaccccgtcgccgcgcccgcgcccgccaccctcctggcgtggtcctgccgggcttctagggtttcgggcgggccgaccctagggggtctgcaattcgcgggccgggctccacgccccgcggctcccccccgcgcctcggtcgccgatcgccgccatctgcccccgcgcggccctgggcggagcttccacacgctggcctgcctactacatgcggcagctgccacactgctgctcctgctcgatcgggactcgccccgcctcggattccgcgcaggatagaccgtttcctactaccgcggtgtgtgctgccgcacgtgggatgacctgaccctccgcctgcccccaagatgaatgtgggacatgctgcccacctgtccgggcagacagcgcacatgaatcaagttcctggctccggtgttggcattggtgttggcggctcagacgggctaccgcagcaccagccaatgcaggagatggcggcgctctcaggaatggaccagcagtttgtcatgcttcggaccgctatgcgcgacaagatatctgactatataggaagaaaacagtcaccgggtgattggcggaaacggttgcctgaactggcaaaacggcttgaggagatcttgtacagaaaattcccaaacaaggtccaatgtctaacgggtaccagcatttaaataccaacatttcacaaaattctaccacaaataatgtcgaatctacaatgggttcagttggcgttcagcgacaactatctcatatgatcccaactccaggattcagtaatcaacagaatgtaccttcaaatcctgactattcaaatggaactggatacttcaacggtgagtcagctgtggcgccacatatgcagcaccagaaacaatttcctagcaaccacaatagcaatcaaattcaacatattgggggacacaataattctgggatacattcaagcttgctggacaactcatctgcctatggtttatcagatggccacatgaatggtggcataggagtgcatgggtcaaatatgcagctaacaaacaggactactgccccagaagcatatatgaacatatcctcttatggcaattcgcccaaacctatgcagcagcaattcaatcagcaccctcagcagagaataccgacatcagttgatatggctggttccggcagcttttatgctattggctctacccctttaaccacagcaaatagtcagagcatgaatgttgcaaatttacaatctagatcaagcatgaatcagatgttggtttccaatcagctaaacattcagtccgtccagcaacagtcccagataaaaaatgggcctttggatcaaacagagaaggtgaattttcagtcaacacagctgactcatgatcaactactacaccagcacccaatgtcgcagcatcaggtgcaacctaattcccagtttattcaaaatcagtatcatataaatcagcagcagccaaattcacagcatcagcaggctatgttaaggaacaattcccttaaacagtctcaaatggcttccaaccattcaatgcaactgccagaacaggggactctgccacacactgaactagtttcttcacaagctagtgatcctgctgaccttccaaacttccagggtcaataccagcaaagaaatgctcttgacaatgttaaaggagggcagatgcttggtcatctatctagctctcaaaattttcttccttctgcctcacatggttctcagcaattgttgccctctaatccgcagcttgataacggttcaaatgctgtaagttatgtgctgaaaggatcacagacagagcaaatgctgctttctcaatggcagccacaaacaatggaaaaggctcctgtcgctactaattcatcactcgaaaaacaagtacaagaagattgttgtcaaagaataatgtcacaagatggagtacagcaaccattttcatcagattggtgtctttctaatggcactctcgcttctgttgatcctgcagtgccaaaacccacagctggagggtttgggcaggtcaagagaaatattcattacctccgtcagataaagtggttgctgttgctgtttcatgcaaaaacatgcacataccctgttggaagttgtaagttcaatggttgtgttcaggtgcaggagcttttgaaccattttcagaattgtcaaaggaaagattgttcgtacaggagttgcactaagtcaaaagcaatgtctcaccattataaaacttgtgtcgatgagcaatgtcctgtgtgcagcgttgtaaggaagtttttgcgccaatcaactgaacaggcatctaagcaaaaaactcttgagtctagaaaacttgctcaacaaaatgtgcctcagagaatcatgaacgggatagaaggtgatagaatggatgttgatccaatgtcagctgaagcgttcgaggatcaaccatctgttccaaaacgtttaaagatgcatcttccatcactcagtggcccagaaaatgatatctctgtagtctccaatcatcatgtaaacccaggctttctattgcaggaagcacagcctgagcagcttgagcacaataataggacaacatatctgaaacgagaggtagatgcaaaggctgacattcgggctcctcaaaagcccataaaaataagttatgacattgatgaaaatgtgactacatcaaggcataatgtgattcctggtgttcccagtgagatggactctcatatcaagcaagaaaacttgtcagttaacaaagagacaagtgaaactgcccttgaggttaaaaatgaaacaaatgatctaactgatgcgactgtgactaaatcaggaaaaccaaaaataaaaggtgtttctatgattgaattgttctatccagatgaagtagatgtacatattgacagtctaaagctgtgggttggtcagagtaaggctaaagctgaaaagaatcaagctattggtcattctgagaatgagaactcttgccagctctgtagagtagagaaacttacttttgaacctccaccaatgtattgttctccttgtggagctcggataaagcgaaacgcaccatactacgctgtaggtactggtgatacacgccactatttatgtatcccttgctacaacgagtctcgtggtgagactattgaggttgaaggtcaaacatttccgaaggcaaagttagagaaaaaaagaaatgaggaggaaacggaagaatggtgggttcaatgtgacaaatgtcaatgctggcaacatcaaatttgtgctctatttaatggaagaaggaacggtggaggacaagctgaatatacttgcccccattgctacgttgaggaggtcaaatgtgggctgcgcaaacctttaccacagagtgctgttcttggggcaaaagatttgccaagaactgttcttagtgatcatatagaagatcggttatttaaacgacttaagcaggagaaacaggaccgtgcagctgctgctggcaaaagtattgatgagattcctggagcggaaggacttgtggtcagagttgtttcatcagtggataaaaagctggaggttaaaccacgttttttggaaatttttcaagaagacaactaccctacagagttcccttacaagtccaaggctgttctcttgttccagagaatagaaggtgtggaagtatgtctatttggcatgtatgttcaagaatttggtgcagaatgctcttccccgaaccagcgccgtgtttatttgtcatacttggattctgttaagtactttagacctgagattaaaacagtatccggagaggccttgcgtacatatgtataccatgaaattctgataggatatcttgaatactgtaagctgcgggggttcacaagttgttacatatgggcttgcccacctttgaagggtgaagattacatcttatattgccatcctgagattcaaaagactccgaaatctgacaaactgcgtgagtggtacttatcgatgcttcggaaagcttctaaggaggaaattgttgttgagctgacaaatctatatgaccatttcttcatcactatggggggatgcaaggctaaggtgactgcttctcgcttgccatactttgatggagattattggccaggagctgcagaagatatgatcaatcaactccgacaagaagaagatgaccgtaaacttcagaaaaagagtaagacaaagaagattattacaaaaagagctcttaaagctgctggccacaccgatctcagcgggaatgcttccaaggatgctatgttgatgcaaaagcttggtgaaaccatatatcctatgaaggaagatttcattatggtccatttgcagtattcatgtagtcactgctgtacccttatggtgtctggaagacgttgggtttgtcatcaatgcagaagtttttacatctgtgacaagtgttatgacgcagaacagcaacttgaagacagggagaggcacccgtgtaatagtagagacacgcatatgctccatccggttgatattgttggggtgcccaaagataccaaagatagagatgacatcttagaaagcgagttctttgacaccaggcaggcattccttagcctttgccaaggaaatcattatcagtacgacacgcttcgccgcgcaaagcattcgtcaattatggtgctataccacctgcacaatccaactgcgccagcatttgtcactacgtgcaatgcctgctgccatgatatcgaaactggtcaaagctggcggtgtgagatctgtccagattttgacgtgtgcaacgcttgtttccaaaaaggagcggttactcatcctcacaagttaacgaaccatccatcagctgctgaccgtgacgctcagaacgcagaagctcggcaaatgcgtgttcagcagctaagaaagatgctcgatctcctggtacatgcgtcgatgtgccgctccggcagttgccagtatccccactgccgaaaagtaaagggactattccgtcacgggatgcagtgcaaaacccgtgcttcgggaggatgcgtcctctgcaagaagatgtggtacatgctccaactccacgcccgggcttgcaaagattcagagtgcaaagtgccacggtgcagggatctgaaggagcatctcagaaggttgcagcagcagtctgattcccggaggagggctgctgtgaatgagatgatgaggcagagagcggcggaagtggccgcaaactgagtagctgcctctgtacaggggtatatatctttgtggaaagaggataggaagtacgcagggcaacaagaaagattggggcggttgaatttgaagggggggattggttggtgaagacgaagcgcttcaacgtggatttcttatcctctgccccgtcgtcctccaaagagctcaagaaggcacaccattactgatgttaggcagtgctaaccagccacaccctgctcacgttgtctcctcaacccttgggggtgtggtgaattctttgatttgacctggtggtgctagctgggctgaagtgagctgatctcctcgtcgccgggtgtctctggacagtgccagccgtgtagttctgctgagacatttggttagccgctgatcttccccctcaccactctcctctcgtctcggtccaggatagataggagggtataggttaataaaagaaaaaaaagggtaaatagggacgggcgtttatttgtttatttctgcccccttctcccatccattttgtaggactcaaccttgataaaagtgtaaagcaaagtaatctctccatgtcttctcttgttccagtgctgctccatagatcgttgttgaaagtgcaggtggcccaggagggacagatttctgtgtggtatctcggaagcatgaatcatgtggactatctataggattcatgcttccaggtagtgtgatgctttgtgcccacattcctggcaaaggagatttttttttgggaaacagactac

SEQ ID NO: 35303 - DNA, 303 bp, Zea Mays
cactgtgtaaaatcgtaatattatcttgcgatattcgtcttgatattcatacatgtgcattgtgcatcccatgaggtacgttaattaatcacgagatgcggaggaccaaagctgagtcgaccacaagaggctagaaagcgtgagccacacgtaaggtgatgctgatggacgaacctgaagatggacagacggggcaagtatcggaacaaaagctgatcgccaagtggacgtcatctaacaaacactaacgtagtgtttattccaggcaagccccggtgcattatccctttccttgtgttttaa

SEQ ID NO: 35304 - DNA, 4696 bp, Zea Mays
caacaagtatatttggccaactgttcacggttcttcaccagttgcgttcgtcgttcccgttctcctcctcgtatcccctggtccgtacgtcgtggccaccggcgccgcctagctcgcaccgccgacagcgtctcagactagatcgcgcctccccctcccaaatcgggttccagtcgggctcccgcaaccgccgccgtctacaccaggtgccgaggccgatcttttcgtcggcaaagatcgccgagcagatctgcccctggccgtcgccctacaccaggtgccgatatcttcgccagcgaagagcgcccagcagctgcttcattggaaaggtcaggaagcttccgtgaaggcggtgatggctatgcgatgttttcagcatcaaactcatcaaggtcagcggcagtgaactctatcaatctagttcagtcacttgcactggacttgagaccggcaactgtggatcacaaaacatctcggttagatctaaagaaatcaataagttccatttttggaacctctgcagaagattcaacatcacttccatctctagggagaaatttaccaaatgctatcgaagagatcagacgtatgaggagtaatcttaacgacaattcaaataaggccagggaaagatctagagcttttggtggtgctatggcgaagattgataaactttgtcccaatattgtgcgaaaacgttctcgaggagacagttcatctaatgaacgatctagtgtgttatcatctggaggagttacccctaaaaatgttcctcagagccatttaaatgcagatgatatggaagctgggcttcagagagaagagaggacaaagaatgcaggacaaaataggagaatacgtacatccatggtggagggcaagcttggtgcagtggtgagagctgtctcaccgagtctccaggtcgcaggccttatttggcaatgtggcttagttgctgtttttagcatgatggatgcaagaacagctggtccatcaagaggccccggacctactgataggatctcagatcctggtaaagccaccaatggcagttctgcagttccagaagaaaaaatcagaggtttggcaactactatcgatggttgggaaaagccaaaaatgaagaaaaagcgttctaccattaaggcagacatgtcactggctggtgttttgaggactgttgatgtagaccgagagtcaaaacaaggcatgcagcacaagtttactaatgacggtagggcgagaatgacaagttctagtttcaggtctggaactgttgcatctggcacaaccaaagcagatttgctttctacacaaaatggtcttgttatgcgacccttaaataggagtgatcaagacaatggtttccatcctactaacaaaagggaacgtcaagctgcattagataaagaaacgcccaacccgagaaccattaacaagcctaatgaagacgacagtggatgtaacattgcatcattaccgaaggcgaatggatctgcgcggggaccccgatcaaattcagggtcaatattgaagtcatatccaaacattcatcgatcacaagctagttctgatgattgggaacatccgtctggtacaaataagttaatttctgctggtggatctggcattcataaacgtacaaaatcaacacattcattatctcctccgatccaatggggtgggcagaggcctcagaagatatcccgttcagcaaggaagtcaaatttagtccctataatcactactgatagtgcactggtaccaggttcgctggacagtcctgtcaatgaagattgtgcaggtttaccgaggcgtgcatctgtaaatagccttcaacaaacaaaacgaggagatcatgggctctcaactggacctgaaggcaatgagcctgtagttgctgagaaaaagctaagggacaagggcaaaagggctggtgaactggatgatgggcatggctctggttttcagaagattgctatgcttgggcatccttccaaaaggaataagttgcctgctgatgaggatattggagatgctttaaggagacaagcaagagttgtcccgggttttactctgaccaggcctgggactcctgtatccattgacaagcttgaaaatgctccgattacaaaacaaagaagtgtgaggacagtctcagagagaactgagagtaaatctgggagaccactgatgaagaaaatatctgagcgcaaaagtaatgcacggcctaggcatacaagtagcagtgtgcagtcagactctcctgtgcaatctgaagatgatcatgaggaacttcttgcttcagcaaatgctgccctaagatctgcttgtgcaagcacgttctggcggcaggttgaacctttcttcgcatttttgactgcagaagacatcacatatcttagtcaacagatacatttaccagatgattcctcttcaagtaggtcaatggaagggggtgaatgccaaaaatataagggtggtcttgaatacatttcacacccctcaactccagccgctagcaacaaagatgatcacgctgctcttccaaatggttttggcttgaatcagttggataatgacataggggttggctgggaggcaagctgcattgaacctatcctcgatcaacttgtccatgggattggggtaccaggatggtcttcagttggccaaagacttattcaagcattgattgatgaagataggatcgatagtattaccaacaacacttacataagcgagggctatgcatttgatacacatgaaattcattttgatggaggaggatggaagcctcactcaaataattataagttagaacctttagcgaattttgaagcttcaaggaggggcccaaatggtctgacaatggattctgactggaaatataatgatgtgtcaaatagaagtggcaatgtcatggataaaaccaaggtgtggcctgagtttcagtacagtgagatgtgcttcaatgataggattatcattgagctgagtgaagttggtgtatctattgaacctgtgcctgatcttgcacagagtgaggacgaggatattaatgctgaaatctgtaaattagaaggccaacttcgtaaagaggttgtggagaagaaaaacttgctattgaaactggatggcattgttgcaactgcaaaagagtctcagcatagggaattctcacgccttgccatggatagacttctcctgagagcatatgagaaatatatggccttctgtggtccaaatgtttcaagcagcaaaaatgtcaatagaactggcaaacatgctgctctaagttttgtcaaacgagtactagtgcgatgccaaaactacgaagaggcggggacaagttgctttgatgagcctattttcaaggacatgtttttatcagcgacgtctcacagacgcagtctagatactgcttcacaagataacaatacaacagcgagaccagtccacagggccggtgcaccagacgcttcgcgaggaagcagtcacccgacggacctgtcgtttgcaaaggaggatccctggacaaacaacgtaaagcagcgggaactgttgctggacgaggttgtaggtagcataacaggaggagctctgagaacctcctcctccgtccttggtatctccctcgtcagcaatacgaaagggaagagaagcgagagggaagggaaggggcacaaccgagacagcctcaggtccggccgtccgtcgccgtccaacgcaaagggtgaaaggaagaacaaaacaaagctcagacagaaggcagccaacatctctgctccttcaggaggtctacagcttccagcgaaaacaacgcctcccagcagtgggaacggcaaggaggagagcgcagcagcagcagcagctgctgctgccaggcatggtggtgatccggcggcgaatgcttcgaatgacgccgaaatgcccgacctggctaacctcgagctgccaggactggacgccgactttggcggctggttgaatctggacgacgacgacgccctccaggacctcgacctgatgggcctcgagatccccatggacgacatcaacgagataaacctcatgatatagccgtacattttccttcgtttctcacagtaacaaccaacagagaaaaagctcccgatagtgcgtgcacaggtaaccaccaaccctgcagttttaacaccaggcctggttattaagcttcacttagggctagtttggaaactcaaatcccttccggtattggaggtgattgaggggagaatgcaataatttcttcctcaatctcctctaattctggaggggatttgagtttccaaactagctctgataaaagagagagagagggacagacagttgatagagacctcttgacaatcccaacaaccacgtgttgtcttttttgtaccagcgtgtaatttgcctccctgccttgtaccctcccctatacgttcatctgtcgtgtagacgtcggtgtacatatctattttggcgccctagttacaaggtagggaggctagttactgcatctgttactcgctccaaaggttgtgtgtgtacagactgaggacatttctcatctcatggcagcgccgactttccccccttattgcgagcataagatcacattcttttatctcagattagattgaggctagagactattccagccaatcaatgttaacgtaaataaatgtat

SEQ ID NO: 35305 - DNA, 1224 bp, Zea Mays
cgcaagagcgccacgccagtacttttcgcagccgtcgtgcaaagctctctccaagccctcgccctttcacgctcccttgagggctttgatgcgggtggagtccagcggcggcctcccactcccagagctggaaagacagcaggcgggcgccaagagacgccgccggcgggcacgggcggcggcggcggcggcggcaccccgaacgatggccgcgcccgccaccgccgtgcagcggctcttcgaggcgtgccgcgaggtcttcaccggagctggtccaggcgcggttccaccgccggccggcgtcgagaggatcaagtccgttctagatagtatcacagcagcagatgttcgtctaacatccagcatgccatatttccgacgtgttgacccctacggcactccaaaaatcacttacttgcacctatacaagtgcgaggctttctcgatcggcatcttttgtttgccatcgaggggtgtcattcctctccacaatcaccctggcatgactgtgttcagcaagcttttgtttggtgccatgcatataaaatcttatgactgggctgcttctcaacaagacacacctgatgttcagttgcaagcaggaccacgtttggcaaaggtgaaggttgatggcatcttgactgcacctcatgaaacggcggtactatatccagaagatggtgtgcttgatgtccttggccctccatatgatgatggcagcggaaggcactgccagtactacaatgtccgttcctctgcaatttctgttgcaggctcaactatattgcctggaggtgacagatatgaatggctggaggagagcgagccatctcgagatttttatcttgttggatcaacatatatgggcccgaaaattttggaccactgaacttctatgcttgtgagataggatgtgcctatagctgttcggctgctagaaaagttgctgcacccacagcgtttcctgagaggaaaaaaaagcctactgctcacttcaacagttcaacagcatcgttacctgcctcttcagcagttcaacagcttttaacagatcagtatatgttggttttggaggaagtgattaggaagaagaaacgatggaccacaatgctacgcgccccacacggcctcacactcctcgtcactgccatccatgacccacccttcgatgcgttcaccagtatggactctagaggtggcaatgacccgatatccgatgagtag

SEQ ID NO: 35306 - DNA, 394 bp, Zea Mays
acgaaaaattccagaaatccctagaactactgatgttcgccctcccacaaaaattctggacaacacctctaccgattcgcatagataaacatataatcaattgaattttagcgcaaaaacatagataacttcaagatcaccttgagttccacctttttcatccttccttcctcccaccaattctccaattgaaacttgcacccacacgaagaagatccaacgaggaagaacgacacttggagaagaggagatgggggggtggcggctagggttgaggagatggctgctgcaaaaaacttgagaatggagagggggcggctgcagcacttggggaagagggaagagagaagaggggggaaagggtgacggccaaaggagggaaaggggggggcgg

SEQ ID NO: 35307 - DNA, 3431 bp, Zea Mays
cccctcatttactgtgctgaaattgcttctccggtctgccgcctgcccgccactctcacacatagcttcccttctcgctcgaaatcaccactcaattcgatcgcaagctgccgaatcctgaaccctatgaagatctccgagctctctcccgagtaccggcagccgccgccgccgccgcaatccgccctccttaccgacctcaacagggtcgtcgccgacgtcgaggcgctcgacgcctccgattcctcttccccggagaagctcgcagccgatctccgctgcctcctcaccaacctcgcatccgctgcttcctcctcctcctcgggtctcaatggggcgttcaggctcaaggtatggaacctcgccttccgcctctggaacgcgtgcgtcgaccgcgccaaccacttcgctgcgaggggtgccgaggccgcggtcgcggagacggagatccgacaggcggcgccggagctcctcctcgtagctggcctcccggaaggcgtccccaacgccgctgcgaaggcggcgtcccttttccaccgcaccggcctgttctggcttgacctcggccgcgccgacctcgcttccgcctgcttcgagaaggccacgccgctggtctgcgccgctgacacggaggaggatcgggacatcctgttggacctcaacctcgcgcgtgcccgcgcggcgtcgagcgaggggaaacaagccctcgccgtcgcgttgctaagccggtccaagcccctcgccgcggcgtcttccgtgggggtgaaagccctcgccgaggggtaccttctcctcggcaaggctgctctcgccactaaatccccggatcccgccatcgacgcgtcgagcctcctaaccgaagcgcttgatctctgtgagagggccgcggcctccccctgctgcaccactccgacgagcccgagatccagtcctgcaaccccaaatctccaagtgatcaaggatcaatgcctccgctgcctcgccgcagagcgtctccaagccaacgactatgagggcaccctgcgctgtatcatggtctcgagagcctcaccagggctggggaaggagcactctagcattgcgttcatggcgctccgtgcgtgtctcagcagtgggaaattgttggaagccgagagggagctcgataggctcatggccaacgctgaagcgccggagtttgtgtgtgtgtcggcagccgagctgtacgtagccagtgtggggctggacgctgcccttaaggtgcttgttgcacttgctgcacggtgtcgcgccagtgcttcagctgttgcagtgagggtgttgaaaacggtggttcagggtgcaggcggcgaggctgggcatgcaagagcgatcgctgaactcgtgtcagatgagagggtggttgcacttttcaatggccctgctaacgcccatgagcgtggcacgatgcatgcactgctatggacatgtggcactgtgcatttccatgcaaagaattacgagattagtgcggatttgattgagaggtcgatgctttatgtttcccgtgacgaggaaagcagatcccgccgtgcaaactgcttccgagtactttgcctttgccatatggcacttcgtcatctcgatcgagcccaagagttcataattgaggctgaaaaggttgaacccagtatccactgtgcctttctgaagtttaagattcttctgcagaagaaggaggaggaggatgctatcaagctgatgaaggccatgatgggctatgttgacttcaaccctcagttcctgatactctcgattcatgaagctattggttgcaagtctttctgcctctactctgctggaaaaccaatgccaatgagtgaggccaccgtcctccgcaacctgataactctcctccttcgtgagccaggatctgaggctgagattcttaagtactcaagacgtgccaagctacggatgggtgagcttggtttggaagcctttttcggaaaggaaactgtgctaaaagaggacaagtatgattattgctctgaattctttgagcttgcagctgaatttttcagctcaggtaatggtgaagatggtgctaaccttctcttgatttgcaaatcattgatcatgagtgtcagtagtatgctcctggctgacgacctaaacaagtctcaattatcagattctgaccttaaaaggggcattgagatgctcagaagagctgggaagctctggtgacctctgatcaattggagaacaacttgccctttcttcatacattcagcttctaccagcttctcagtagactggacactaacgcacaccctcagcagctccaattagccaagaactttgcggcatctaaagcatgtacaccaggtcatcttctcatacttggagacatggcttctaaaggtaaccaaccaaatctcgaggctgctgagtttctcctgaaggccagcatcagtactgcccttgcctctcactcaccaaactatggggtaatcagtgctgcccttagaaagctagtatgccttgctggtctccatgatttcagtggtagcatgagtgatgcagcctatgacgtatttcgacaagcttaccagattgtggttggacttaaagatggtgaatatccatttgaggaagggaggtggcttagtataactgcatggaacaagtcatatttacctgtgcggcttggacaacattctgttgctagaaaatggatgaagatgggtctagatcttgctcggcattttgacaggatgaagctgtatatatcagggatggaggaatgctttgagaactttcggaaattaactggtaaagaacctgatgaatgtagccagcaagatggggaaccaagtactggcatgtctggtactggtagtatgtctcagcctgtcctagtttagaaatttgtgggtggtggaggttcatagctagagaaaaatagaacatctgtttgaaccatacatacctatattcttcattgattgatgtgcactcaaatgctcttccattttctgatgagaattttgcgcacgttccgtgatttgtagagaactatgtgatgattttgttggccgtataatgtcctagaatatagtatgcccatgtgcaaggagaagtcaatatttgtcttatattgggtgactcttctataagtatgatgatctttgtatcggcagtaagggtctgtttgttggttcctcggggctcaggaagagttgccttgggttggatttcaactgcttgggtttcacatctctgcctggcagggtcgcaagcaaacaaccccaagcgtccctcgattttaatatcatcatgtgcaacaaatgttcattattttcgttaaaaaacattttgacaggaaactggttttccgaggtgattttttttgttaagacaactaattgaactccgtagggagctattacagttcattgtcataccat

SEQ ID NO: 35308 - DNA, 5423 bp, Zea Mays
ccaccgctccctcccctccaccgcggcgcttcacgcttcacagttcacagtcaccatgcggactcgcttcctcaccgccgactacttcgcgccgtcgccctcggctgccgcctcctccgacctagccatagcgctagcatcccttcccttcccttccctccccgtcccgactcttcctcccgaaccccacctcaccccattcccgttctccgccgatttcctccccgccgttagtgtagccggcgatgatctcgactcgctccccttcgactccgcggtgaccgagctcctcaccgctgtcatcccgcagcccctgcctgtgccggatatccctgtcgctgacgagggcttggatgattatctctacggtaggggtgtttacggcaacgcttttagctctactgatcccgttgctttcagagtcttcaagggactggaagacagccacacaaacggcgataaggaagagggcctcaatttggagggctcagcagttactaagcgaggggacctgttggaggccttgtttgaggttccagagctcgatttcctgtcggatttcattgatattgatactgagacaagaataccatatgcagctgaatttgcggagtcaatttatcaagtagaagtccctgtaaaacatgatgatgatgataactgtccttatgctaaagatagctactgcatggaaatcataggactagagaatggtcaaataataccccagttggaggttagtatgaattcttgggagcttgatgagtgcccagcaaaaacaatgatatccaatttttttcatagtattattgaacacttatttgatggagcacaagtctgtcttccatcatttggctcaaatgagttcttgagaccatgtgatattgacatttttgccttggtttgcaaagatgccccacttgtggagtatcaagcagataaaccaattacagcaaatgatgtagcagtaatggattttgtaaggatcaatgatggtattttactggataaaaagtcagcattataccctctcaaacctgatgggacctgttcacattttccttgcttcattctctttgaggaagtaaagatcatcgactttccttccaaggatgcctttaagtcacttgttcttattcagtcagagaaagctgagatgaatacatctgaggaaatattcaaagacgactttgatcaagcaaaacatttctatgaatcagtggttagctctgaattggctctagttgatgatacattcaaatcactacctacacctattttacatgatgataaagcaatgcgatctatgcttccccctatagaagaagtactttgctccctaaaaccacttcctctatctgcagcagatgggatttatttggattggcatcttttatcagaagggccatgcaaccgggagagttgctctacttatgagagcatggttgaggaggtaaagccttgcagtttaaattctgaactacaaataagtggccagcagatgccagcgcttgacattggttttctggaggattttccgagaagtgcaaagcctcaacatgaggacaagcagaatgaggtttatgttcctgggcctatatctcatgatccatcagctaatttggaagcaactcaaaagaacatgctagaaaatgttgttagaggtcatacccacatggataaattgagttcagaaaaggaatcatccttgtttgagtcaacgtcacagtccaatgggctaagcttctacttgaatgtgagaaatggcactaataaagtgagaaaagctgaggatatttctaccttagacatcccctcttcaaaacaagcagcttcaatttcaaccagacctaaagttaacaaactcatagaaattcatcctgtcaacctctcagatattatccaaggccttatcaatgacatccatgtaagttatacatctgctttgcaagaaagtgcatacttaaggcattctttctccgatgggcaaggtttaagcatttcaaagcaaaagcttcttgaactgataacaggggaaggttcagaaggcctgtatagctgctgtaaatatgaagataagatggagcttattgtactgtatgcattaaaacaggttgcatattacctatgtttctttggtctgcatgccgcctatctgtatgtaggcaatttgactggaacctttgaaattattcctgagaggttaagacatcttcaacgctgcattggtgaagctcgactgaaagctgagaagcaattacaggagtctcatccgtcattatctgtcatcgagacaatccttagatctaatacccaaatcgaccaaaagatccttatagtgtctgatagagctttctggttgccattgggccaaaagcttactgcaatgaagataacatctgttgagtttggaacataccattcaaccacttattcagatgcggtgattgagacaaattctaaaagatgtatgctgcaagaattatggaaatcagactgcattctgctagataacaagaacatcccagcttcattccccttcagtgaattttgcatgatagtggaatatggaggcccaaataaatcatctatcttgttatctctggctcccaaattagatgggttgccaccactgcatttcctgtatgtcacagttgatggtgaaggccttccaaatgctcttgtcgaggacaatcacacagacccggatttgaaatccacattggatgctgctttgcatacacttcagaaggacttgcaagagaagatgaacaaaatgcgcattgttgattcattaaactttataccggcaacaaatcaacagcaacatttgcagaccaatcatctcactgtggattcatcaaaaaaaattcctgcagatgttcaactgcacaatgcgggaaatctgaacgaaaagaatattgttgattcacacaacttagtgactgcaactgaacagcccaatggcttgaaccaaataaccattgccaatttacaaaattttgtgcctgtagttgagaagagcagttcgactgttgtatctgcgaatgtgataaaagccccccaagtcaaccaatctgccggtgtccttcctctcagtgagaaaatggacagcaccaaagcaggaagattgcctggcccagaggtggcgattgttgtcaatactggaaatcatggaaaaaatatgcttttctctcgaagatcatcttatcagcagatactagctttggagagaggaggtatgcaggttgtagagcgagatgttgatctgcctgtggatctaatacttactgcggcagtttgtttactatggtatgatacaagaacctctggttccagtgagttaacaatatcagcaggcacatctggtataacaaattttctagaggatattgctaccaacgttctgatggcacttagcttctgtttctgtggctgcataatggtcttcgagggtgaaaatcacttgctttctgctgtaatggaggcatctgattctctatatgcttcagctgttaacctggacatgaatttgcagctattcttctcagaaatgcccaaatcaacagatcaaatcattctcaattgcatcaggaatgctgttaggataaatcaggctctttgtccacaaataactgaatcggaaagtctggttgagtcatttctcacagcattcccttcagttagtcctctgtctgcacacatgatactttcttctggcagtcttatggatttcctcagatggtcacatgagcaacgtactcaggctgttgaaaagtatcatttgccaccgcagagcatttctctcttcagtgctttgtgcaaattcggtgaactaggtgaatcaaagtctgtaatgactgaatgctcttctgttgattcagatatcagtagtactttgctgcagtctccgaggaaaaagaaaaggcgtgccgcacaagacttttccgttgcagttagtaatcctgctttccctaatccatgtactcaattgcatggtgactgtgtagaaaatgacaagatattctcaccacctaagttaaggaaattctttcacatagaggatacaatgtctgacctccccgaagtctttatgattgatcaacggttgaatatgggtagtgaaggtgtctcttgtcagccaagaaagtatgatgtggatgctgtaactgggatcaatataatagatgatgacttcattaatgagttgactccaaatttcagaacatacaatgaaaggactagcagtatggtggacacatgcaatttctctaagcaatccgaattgggagctaaacagccaatcagaagttcctttcccgccagcttaccatcagtctgtacaacttccagtcatccaacattcccatccgcattggagatcaataatgaccctggtagctgggacgttccatgtagtataaatcagacatgggcaggtcatgtgcatggggatttcgccacaagctctggcagaaatgatcagggtgtcagatatcatgaaccaagacaggaaataatgcagactccagtaccttcactttcttttctgaaacaggattttggctgtcatggagcatcacaaggctcaggctgggaaattgactatctaaggcgaatgaatgaaaacagaaaagcatgccgagagcaatctagatgcagtgtttcaacgcagccaaattcaagaacaagggatggctcctcaagaattctgagtgctcctccaattgaatctttcagatatgaaagaaataaagatgcccctttcagggaccagaaccgttcagatattgaatctttcagatatcgaagagatataaacacgcttttgagggaccagagcccttcaaatgaggttcgtaggtatgggaaaggcaggggaggaactaaagcacagagccatagggtaagaaaggatttcaaggcacaacctagcataaatcatgaaaagagcataatgccatccatcgagccaacatggactcctcttgacaagagagcgagacaaaaacttacatttgcaacatatgggaacgaaaaacaaagcaagctggtttggagacatcaaagcagccccggtgttggatgtggcttccctaaaaagtaccatgaagaaggtacgtagattatcaggtccagtaatgtcctggacacccagagcgtgttattttaggagaaggtgcccacatgtaagtttttttttaatgttttggttaagacaatccatgaaatatttcttcatgagaactcgccaccatcattaacctcgcaggagctgtcaatgtacatattgtttttagcactcctgggaatgattgaatgtatccttgttagacttatatcctgtctgtttcaacttatatgaaatttatgtgccactatcatcttctataggttcaggtttcactgcagtaatcttgttg

SEQ ID NO: 35309 - DNA, 4516 bp, Zea Mays
ttttgggtgcttttgctcgccgtgaagtttgccttcagctattttctccaaatcaggccacttgtaaaacccacaaaagagatatacaatctgaatggaatccagtacacttggcatgagttctttggccaaagcaatcgttttgcggtgtttgtgctctggttaccagtggtgttgatctacctcatggatatccagatttggtatgctatattttcttctctgtcgggtgcatttgtggggctttttgcacatttgggagagatcagggacatgaaacagctgcgacttaggttccagttctttgcaagtgccatgtcattcaacatcatgccagaggagcagcaggtgaatgagagcttcttgcccagccgttttcgcaatttctggcagcgattacagctaaggtatggtttcagcagatcctttcggaagattgagtcaaatcaggtggaggcacggcggtttgcacttgtttggaatgagataataagcaagttccgggaggaagacattgttagtgatcgtgaggttgagcttcttgagctgccacctgagctgtggaatgtgcgtgtaatccgttggccttgtttcttgctctgtaatgagctgtcacttgcacttggtcaggcaaaagaagttacaggatctgatcgtaggctatggaggaagatatgtaagaatgattatcgtcgttgtgcagtgattgaggtctatgatagtgcaaaacacatgctgcttgagatcataaaggaggggactgaggagcatggtattgttacacaactgttcagcgattttgatggatccatgaagatggagaagttcactgtggagtataagatgactgagctgcacaatatccatacaaggcttgtagctctattggtcctcatcctcaaacccaccaaagatgttaccaagatagttaatgctttgcagactctctatgatgttgttgttcgtgatttccaagctgagaagaggagcatggaacaactgagaagtgaaggtcttgcacagtcaaggcccaccaggcttctctttgtggatgcagttgtgcttcctgaagaggacaatgctaccttctataagcaagtgaggcgcatgcacaccatcctgacctccagagactctatgattaatgtcccacagaaccttgaagctcgtcggaggattgcctttttcagcaattcattgtttatgaacataccaagggcaacccaggttgagaagatgatgtctttcagtgtcttgacgccttattataaggaggaggtgttgtacagcaaggaccaactctataaagagaatgaagatggcatctcaatattatactatctaaaacagatttacccagatgagtgggagtacttcgtagagcgaatgaaacgtgaggggatgtctgatattaatgagctgtacagtgagaaggaaaggctgagggatcttcggcactgggtctcatataggggacagacattatcacgtactgtgagaggaatgatgtactattatgaagctctcaagatgctgacctttttggattctgcctctgaacatgatttaaagactggatcaagggagttagctactatgggttcctcaagaattggatcctcaaggcatgacggagttgctggtgggtcagggtattacagcagggcatcttcctctcatgcattgagtagagcaagcagtagtgtgagctccttgtttaaaggaagcgaatatgggactgtcctcatgaaatacacatatgtagttgcatgccaggtatatggacagcagaaagctaagaatgaccccaatgcttttgaaatattggagctaatgaaaaattatgaagcattacgtgttgcttatgttgatgaaaggcagatcaatggcaacgaaaaagagttcttctctgttctcgtgaaatatgaccaacaattgcagcgggaggttgaaatctatcgggttaagttgcctggagagttgaagattggcgaaggaaagccagaaaatcagaatcatgcactcatcttcacaaggggcgatgcagttcaaactattgatatgaaccaagacaactactttgaagaagctctaaagatgagaaacctactagaagagttcaatcgttattatggaattcgcaagcctaaaattcttggggttcgggaacacgtcttcacgggttcagtttcttctcttgcttggttcatgtctgcccaggagacaagttttgtcactctggggcagcgtgttctggctgatccacttaaagtcagaatgcattatggccacccagatgtttttgatcgtctttggtttttgggccgaggtggtatcagtaaagcatcaagaataatcaacattagtgaggacatttttgctggtttcaactgtactctccgtggtggtaatgttacacaccacgagtatatccaggttggtaaaggtagagatgtgggcctcaaccaggtctctatgtttgaagccaaggttgctagtggcaatggtgaacaaactttgagccgagatgtttacaggctgggccaccgattggatttcttccggatgctctctttcttctatacaactgttggattctatttcaatacaatgatggttgtgctaactgtctatgcatttgtatgggggcgcttttaccttgcactcagtgggcttgaggactacatcaacaagaacacttcctcttccaataatgcagccctgggagctgttctcaatcagcagttcgtcatacagctaggcctgttcacagctttacccatgattattgaaaattcacttgagcacgggttcctcactgctgtgtgggatttcatgaaaatgcagctacagtttgcatctgttttctacacattctccatgggaacaaagacacactattatgggaggacaatccttcacggaggagcgaaatatcgagccactggcagaggttttgttgtggagcataagaagtttgctgaaaactataggctctatgctcgcagccatttcatcaaagctatagaacttggtgttatattaactctttatgcatcttatggcagtgcatctgggaatacattggtgtatattctgctgacactttcaagttggtttcttgtgtcatcatggattcttgctccattcatttttaatccctctggttttgactggctgaagaattttaatgactttgaggattttctaaactggatatggttccggggtgggatctcagttcagtcagatcaaagctgggagaagtggtgggaggatgaaactgatcatctccggacgacaggtctatggggctgcatcttggaaatcatattagaccttcgatttttcttttttcagtatgcaattgtatatcggcttcacattgctgataatagtagaagcatccttgtctatcttctttcgtggacatgcatcctcctagcttttgtggctcttgtgacagtggcttactttcgagacagatattcagcaaagaagcacatacggtatcgccttgtccaggcaatcattgttgggagcactgtggctgctattgttgtgctgttggaattcacaaagtttcagtttgttgacacttttactagtcttttggcttttctgccgactggctggggaatcatatctattgctctggtattcaagccatatctgaggagatctgagatggtctggaaaactgtggttaccgtggcacgtttgtatgacatattgtttggagtaattgttatggcacctgtggctgtattatcatggttgcctgggcttcaggaaatgcaaacaaggatcctgttcaatgaagctttcagcaggggacttcacatttctcaaatcattactggcaaaaaggcacatgtgttttgagttatattatatttgcccgtgctactgtttgtatgccatgttgaaaacaggatgatcttgcacactgaactgcagattaagagagtatgcacttgctttatgttcttgcagctaaatacatattccaactgaccattttccaaagtgagctgcttcgtcattctggaggactagtttgtctccatggcctatggtttatacaagctttatggcgtgtagagtagatggatgatagctcttccctgtacaggcaatctatttgtcgccgattcttcttaactttcgatatacacttggatgttcatgctagagatgatagtccatctaatgagatgtcgatgctgtccgtattcgtaaaatcgtaactccagatttttggtagcctttagatatctagttaaggctgtacaaaacttcatcatgagcgctattcaagctatggtttctgtcccctactcttttgttgtaaagggtacgatatttctgcatacctgcacatatctcagcgttatgtggaggactaatcctgtacacctaaattactgcctgaaatgtcatcttgcttggtccatatgtgtctcgctgctgggctgcatctaagctcctgtgcatgtggcacgttacgcgcgag

SEQ ID NO: 35310 - DNA, 2356 bp, Zea Mays
ctcaactatgcggaatattctgggagtccaaaaaatttgaaggatctacgagttctgctgagccctggtataacacaccattttcagttgaaaatgtcactccttcagttatacaggaatggattgaaaaagctcctactgaaaaactccatcttccaaaacctaatattttcataccaaaggatttatctcttaaagaagtgcatgaaaaggttacttttccaacagtgttaaggaagagcccactttcacagttgtggtataagcctgatatgctgttctccacaccaaaggttcacattatcattgatttccactgtccattatccagccactcccctgaagcagttgttgctactgagctctttgttgatttgttagtagattatttgaatgcttatgcttatgatgctcaaattgctggtttattctattcaatatatgttacttcagctggattccaggtttctttaggtggttacaatgacaagatgagagttctcttaaatgccatactagtgcaaattgtgaaatttgaagttaagccaaacagattttctgcactgaaggaaacttctgtcaaggactaccagaatttcaatttccgacaaccttattctcaagcgtcatactatgtctctttgatattgggagataaaaaatggcctgtagctgagaaacttgaagctctttctaagcttgaatcagattattttgcaaagttcgtaccacacctactgtcaaaaacatttttggaatgttatgttcaagggaacattgaaccaagtgaagcaaaatctatcgtagaagaaatcgaaaacactatatttactacgcccaattctttgttcaaatccatgtctccatcagaatatctgattaaaagggtcatcatgcttgaaaatgacttgaaatgctactaccaaactgagggattaaaccagaagaatgagaattcatcagttatccaatatattcaggtgcatcaagatgacgccattttgaatatcaaacttgagctgttctctctaatagcaaaacagccagccttcaaccagctacgaactgttgaacaacttgggtatataacaagtctttctctgagatccgactatggagtcctggcactccaggttgttatccagtccacagtaaagagaaatgtgaaatcattaattgattctaaactggagaagtttaaaaacttatgggaggaatctcatttctactggggagagattgaggcaggaactctgaagtttgatagggtcgagtctgaggtcgctatgctaagagagctcaagaaagaagaattcatcgagtacttcaaccagtatataaaagtggacgcgcctcaaaggaggacactaagcgtgcaagtcttcggcggcaaccatttggtagagttcaagaaggcaatcaacgaagccaacccgcccaaaatgtacagaattacagacatattcggcttcaaacgatcgaggccgctgtacagctcactcaagggaggtccgggcaggatcaccatggactgacagccggcaatagcatgccttgtttttcatgtatgtagtgtaatggccagtgcatacgaatgatgaattcgattctgaatcctgctcctgcatcagattcggttgcatgattgatctatacttcactgtgggtttcacgaccagcgtgtcactttctgggcaaaatctagggagctgtataaagtcatgtatgttcacatgtttgtttgcgtttcttctcacagctatgcagtttgtacagttacatatccacagtgaactagaactagaagcgcgtcttctacacaccaatatacagcttgagcctggctgaccgtgcccgacgccggccgagaaccgtcaaggtgccgtcatgcgcacatgcaccaccggccgtccggtttcagcacgccccggcgtgttcgcaaacgcccgccggcgcccccactcgaagccgttgcggtgccaccggcacctgaacgagccccggtgcgtcgtgggcgagcacacgcagtagtagtgcggcgacgcctggcgcgcccgtggcacagatggtgggggcgacggtgccacggtcgcctgctgctcccgccgcctgactgcgcagtccggcggcagaggcggcagccctggatggcacatgcttctaggctacaaaagggtgatgcgatcggcagctccaccagctataaaacagatggcgccgaagaatggaatcgggttctggcgttttcggatggtgggagatgactagacgtggggaaagggcggggaatatgtgtgggctagggtggtaatgtatggtatggtagcccgcaggcgatggtttttgcgagctggtg

SEQ ID NO: 35311 - DNA, 315 bp, Zea Mays
tgccatctcttgacatcttctaatcccagccgttcaaaacgcatcgcatggcaacggggccatcttcttcctcacgacgctaggccgagctgggcacccatgctcatgccggtgagctcgtcggagcacaccgacccggcgttcccgaggccgattagccaggcgacggggtgcaaagcaatacgaacatccagacgaaacaattaggaaggaactcaccgtagatgccacgcacaggagctttgcacacagggttaggcgaatcggcggcagcccgacagcaccgatgagcaatttcccccacaccggtcaccc

SEQ ID NO: 35312 - DNA, 1978 bp, Zea Mays
gtactgttcctttgccagcttgcctgctgccaccagtggcacctgcaagcgaacctccacgcgagctgcccggccccggctgcccctgcgccctgcgcccctgcccctgtccctgccggccccttccaaaataaagcgggagggagatgcgctgagccggatggcggcccactcgctctcgctctacctccccgtcgtcacgcgctcgcttgtgcccctagcgtttcgccacctcctgctcccgcaccgcctccggctccggctccggctccgcctcgtctccgccgtctccccatcccgggcgcggcccctcggcctcggcgcccgcccgccccgcccccacgccgcacccctcggctacggagggagaaggccgagtggtggactggaccacagagccatgtcaagttccacaaattcaacagtggccacggagttgtcggtgtctgagaatagcagggaaattgagccgctaccttttgtgaatgacaaacatggaggcgtcatcattgagatgaagactccaatggatcctggagtgttttcagcttacttgaaagcagcgctggcaaaatggagggagcaggtgacccccccccccttctctcagcatcaatgttaccatttatcctatcatgccaagtaaatatcccaatatttaagttttgaactgtggacgacatacctcaaagatccatcaatccatgcaagcatctttatatggtaggtttggtaggtgaaaaaaatggtgctgtgcatgacaactattttaaaggtttaaatacactgtatatcttctatgagccttgaagagccaaccatattgcaaggcatgtgacaatagacatgtggagattactgtacatgtacatcattattttcaatctcagttattcatgagtacctcaaggagagatgtggttacaaatgcatagcctgcacttgtcattgaaaagagctttacatctattactgtactttcctcattgtagggaataagaggtgtctggatcaaattacccatcaccctttccaaccttattccaacagttgtagaggaaggtttctggtaccatcatgcagaggaaacttacttgatgcttgcgtactggcttccaaatacaacacatacactaccagtaaacgcaacccaccgtgttggtgttggagcttttataatgaatgacaaaagagaggtcttggttgtacaagaaaagagtggtgtacttcgaggcctaggtgtgtggaaatttccaactggcgtagttgaaccgggggaagatattaacgttggagccataagagaagtaaaagaagagaccgggattgatgcagaatttgttgaagtgctggccttcaggcagagccacaaagctttttttgataaatcagatctatttttcgtgtgcctgctacgaccgctgtcatatgacattacgaagcaagactcggaaatagaagcatgccagtggatgccagtagaggaatttgcagcacaaccatttgtccagaaacatgagcttgtgaagtacatcctcgaagtaggcctggctaaagttgacaagaaatatgcagggttttcgccaatctccataaaatcggcgtttacagacaaattgtccttattttacatgaaccggagggacctggacaaagcctcaggatagagtaatatgtaattaaacacagggaattcaagatagttgaaatttcagttctggtatgtaaaagcaggccaagtcatattcatacttgattattttgttaacaaattggaagtttcgggcatccgacacttgtgatttttcgaccatatgtcgtctgctacacatctgtgtttcaaaggagtgttgcaatccaaaagtagagatgaaactgttgcaatctaattgtaggtctacagacaataaaatactgttttcctttattatatactccccttttgtcgtgaaatatatctaaatgatttattaataaa

SEQ ID NO: 35313 - DNA, 989 bp, Zea Mays
gccagactgcaggcccatatggtccatatggacacggctccatcacaggatgaaaccagcgctgtgccgccgccggcgtccggccccagcgccgcgtcgcgcagccacccagtgtcgagccgccgcctagctccagagccgcgtcgcggatctccgcagcttcgctaaatcgcagttgctagcttcatcctctcgatgatgtgtcgtggacttgacgtcgttcggcgtcccaactcgcgccccggcatcaattcgtctatgtaccgtgtcatcctgaatccggaacaaccgtccttgagcgctttggctcaaaaataaaaaatcctatcgatattatattaaaaagataccgaaacatgaccctggttacttaaaacattatcgtttatccctcaagtagccaaacttttgtgtaagatgcttatcagacccccttccatagaactgttactcaagcttgtctggctatcaaactttccacagtagagctgcctattggctattgatgcttgcagtgcactcttctttgaatctggcgtttcaacaactgcaactggagtagcatgcataagctggcagtggaatatataatattttctttggtattttgacagctacctgtgcttaatcgttgcttgtttatgcaactagattactggttgcaggttgaaagtaatgttatttgctgccgctttctatgactatgcatctgcttgcttgggtgacgtcttgctaacaatgattgataagctgacgtcttgaccaacgatgattgaagacttgtgttatctcaatctagtgtttgctgcatcatggcacccacattggtttattagctgatgttactgctgtctgtatgactattttctaattcaactggttcctaccaaacggctgtttgggtatcttcatggttgctgactggatgaaagcgctcttttttggcgatgttagcatttagcaaggtgtcatggataactcatagctgc

SEQ ID NO: 35314 - DNA, 1667 bp, Zea Mays
cttcctgccagaaccgagcggagatcatctggagccgggtcccggcgattaccctgcgcggcgccaatggagcccgaggcggcggtgttggcacagctgcagctgcagctcctcgtcctcgtctctgagttccgccatctccgcgagcgggagcgcggcgcccgcgaggagctccgagacgccggccagaggtgggaggcggcggcggcggaacaacgtagggaggcccgggagctgcgcgtggaggtggcctcgcgggacgactcgctacggaggctcgaggccagggcaggactctacttgttctatgcagtggacaatccagctgaaggataaacagattgctgtaatgtcagagaaattgaattcacatcttgttttgtttagttcggtagaaaaggaagttgctgctgtgaaacaagtactaggtgatgtgcattgtctagttggtgagaaggaaaatgtagttgctgacttgaaggataaagtccaaaggatttctgtgcttgagaaagattttgtagagaatcttaatttcttggaaagcaaaatcagtgcataccagcttgaactccgtagtagggcgaggatcatatatgagttaaaaaatcgccttcaggatgagaagcttaacagcagttttcagccccatctggaagaacttaataaaactttgttggtgaaggattacgctattgatagattaacttcagagaatcaggcaatgcgtttggaacttcataacatggaaattgctttacagaaatttcaagatttattcagtagtattgggcatgagggaatgaatagtttttcagcaatttctgaaaatcaggacgtacaggatgtgaataatgaacaacatgaaagggttccaggtacacaatgtggtctagcaaatgagcataccttggtaactgcagttgtcaaagaagccaccacacaaaatgtagatcaccagttggaaactgatccaggcagcatgcaagtacaaagcccagtgcacttcaagtctggtgcaatgccatctccggagctagtagctgcaaatacagaaaaagctgacagccttcttgaacccaatgtagacattggcatgggcagtttatctcctgcacgaccaacagattgtttgaatatggatcttgacacggagagtcagtcctgacaatgcaatttatatcccttcacacctggtattcggatacgtatatttaacaatctcgtagttggttgtggagcatattttattattttcttgtagttgatcaactgtcttgtgtgcgtagcctgtttagttagccactaaagagatagatcaggtagtgtaaagagcatcttggctcatctctctaccgccacaatgtccgagattcggatggcagctcagctgatgagaccgaggagaaagaaatgatagctgtcattgtctcttgggataaatctgagggctcttattggaggagatgaaaaaaacagactcttaaaaataggaggggctctcaaaagaaaaatagagagctatatttcgagggctgttgctagactggagatgctctaaggtgtatttgttttttggcttttgttctaagactgtctccaacaacgttctttatattcatcctctatatctgtcttttacagtcttctaaaagattcttttctct

SEQ ID NO: 35315 - DNA, 4126 bp, Zea Mays
ctcagatcctccctgcaaatcaaatccccatgcccgcagcgcctcgcctcggctgctctacctctatcccgcgacccgcgagattggaatcgcggagccccgccgccctcctccaaaacggcatcgtctctgctcggggtcacctttcctccctctcacttcctcttcttcatttaggtgtgttagttaagcagaggaggtggctttgcttgttgctcgtgtttctgcgtggatgcgtccaggggtttagcaagtcgctggccatgacggtgctcttcgagatcagggacaagaccttcttcgccgtcgcgattctggctatgcgccatcctaggaaactcgtattggcaggctgtttaactgcactaagaaggctgtttaactacactaagagtcatgacagctctatcgacttatctaggttgggttgcaccaaatctgagctgtcatgacaaaaatcatgatgcaatacaagcagaatatgcttcctgaaagacaaagtaatcacaaagttgaggcagataaaatggttgagcaaaccaatcaatctgaagttagctttgtgaaggctgagcatctgaatggaagtaaaattcggcagacaggcattgaggattactcctatgacaaggatgttgtagagatcaaactgccagacacagatctttcttctgattatggtgttcattttgtcaaggatgtctgcattgatgaaggagttcttcctgatcaaaagatttcatcagaaaagcaagtagaccaaaaagtgtctataagctttgattccagggaagagataagtgctgactctacaaaaactgcacatgagttgaaatcgaaaatagttgtcctacctgtcaagtgtgatactcatgacaatattgtggaacagaactcctcatgcaaaaagcgtgatcttgaagataacaatactacagatgtatctaccgagtctaatgatgagggattaaatcccaaacaattaccatttcatgaagttgcacaagattaccaggaggttgatagtgtcatttcggagagcaatgaaaatcaggaccgacttttcactggagatgcaacccatcaggtttcatcgaatgattgttatgaagctggaattagtatcgcgtcagaggccagtaatttatcattttaaaaactggcactacatcttgaaaaaaggataatttatcattttattacgttgtatacggactaataatttatcattatattataccgtatatctactaatattttatcattttattatgttgtatactgagtaatagttatatgtgctagaatttttactcttcgtagcatatgacaacgtttgacttctcttttagggacttgagaaatatgttatgacaaagctgtttaatcgggtattcgcatcagtcccagaagatgtgaagagtgatgaagaactttttgagaattaacttgtacgagaatgaaacatcatggctgactactggccagccactacattcgcgtattactcttccattgtgagtttttgctcttcactatccgatgcccaccaatctaagcagccaaggcatgcatacctaaccttctcgaggacaattcaggaggtttgcttttttcctccctgttttatactggcatactactatatacttcattgatttttttagcagggtaaaaaatataaagatagatttttagaaaataacaaatagttcataaaattatttcagctgatgaaccttttagagttcttttattatataatgccattaattgctaacagggtgcacgtcttctatttctaggtatggtgcataaaaaagtaggaaccacaatgagattgtgatgctgctcagggcacatgccttttgtgtgatgtctgaatgttcatagcccttgtgctcctcatccacccattttaagaatatgctcacgtctcatgattgtgtctttcttcagaatctcagctgttcctcatgtggagaacctccagaggctcacatgtattcctacactcaccgcaacgagaatctgattgttcttgtgaggcacttgctgcctaaatattgtttacctggtgaatcagaaggaaagatttggatgtggacttgatgcttaaggtgtgaacgtgaaagtggggtccccagatcatcacgaagggtgataatgtcagctgaagcacactacctttcatttgggaagttccttgaacttagtttttcaagccactcaaccgctagaaggctgccaatatgcgggcattcactcaatacggattgtctgcgctttttttgggttgggctccaaagttgcaatgttcccgtattcctcagtcgaaatttacaatgcctgcaaaccacagcctactcttgagattcacaaccccgatatgcacaaagatgccccaaggttgctgccctcgtgtttcgtgctctgattgttgagtcttcaatgagagctgattccagttatatagaggtgaacaagcttttgattatttcttttgttaatttggtgcaacatatagaggtgaacaagcttattaaaggaagatccttgtacaatcaagagttcatacaatagatgaaacgatattgtgattctctcaatggtggcttcatgagcaagcaatcattcaccttgttcactaaaatttcagactgtagctcagataaggctttgagcattccttggtagtattatatttcctttgtcgccaccaactttaagtagtattaaaagaatttttcttaactcttacatttcattttccctgttcttttttgcgtaatagctacaatgcttccgagagaagggaaaccggcaaaggggaaaagagacgaatagaagggcattggtgccctctcacacacaggccaagtatacatccacatgccacaaggctgaagcttccacatgaacaagagaatggtgcacattgccttacatgacacatttatttcccaatcactgtgcaattcttagtttagttctgtattggttgttgccaaataatttgtgagatattgagatcgataacttggtttaagtattgcaccttttgacaaatataatttgccatgaacatggatattgaaggctatactctgaaatgcagtctcactacataattgactaataaaaatatgttttcttattacatgattctgtttagtagaatctatggttttaaggtcatagtagttttacgatcgtatacttgaagttctggtccgattcaggatcactattttaacaaccttgtgtggttaatttgcaggatcgtgatagctattgcaagatgatgcacaagtacataggatcagatgttacataacttgtgacacttccagtcataatttttgagccaatgacaatgcttcagaaaatggctgagctttgttaggtgttccattttagttatctgtctacttcctttaaactggttctggttatatgcgcgcgtatctattattatgtataagcattgttgctactggtccttatcgagaatcgcataaggagacaacttcatgggtatgttcagatagtttatcttttgttgcttattgtccgtgtaaatacacaaggcgcctttgatagcacttggtttccctgttgggatttttagcttgtcttagtatccaacttacaccaccatctgatatctgatcctgacaacaggctaggaggcttaactgacggtttcgaccttgggatgaacatgctgttgggaggagacaaggaagatgatggcggttcaagcaagtcgcatggcaagagcggaaaccgaaagaagcacctgaagaacaacaagaggaagaggcattagccctggactcacactcctgtatcacttcaacatacttgagtgtgtgacatgtcagttattttacagatatgttagttttaccatagtattgttcgatgtgatcctagcatgcccgtgaatgctttggttccctatagagctgttgatgtcttacacaaatgtattacaaaacttttttcataacaatataacacacatttgtacataaattaccgtggtattatacgttcccgttgcaacgcacgggcacacacctagtgtagtctcaaggttaccaatttaaaccaatggcgg

SEQ ID NO: 35316 - DNA, 1964 bp, Zea Mays
gttataaactgttcaggattccctcgtaggcttttcatgttctggtactggatgtgcagttttgggaggcattgctacagagataggacttctagctgaaattgttgcccattgatcacgctttatcctattcctaagttatttgatgaatgttcatgctgtttgtgttctcagttgtcactatcaaataggtagttatccgagggtggtctcattgactgcagatctctaggtgatagctgggcatgaaggaaccagtttgcatctattcagacctacaaccttcaacttgcattgtgtttgttcagtgtcttctaccttgaagtagttaatgattagggtcattattgcaggtcttactgctattttttgcttgggcttgtcatcgtggattatgtgttgggggtactaacttatccaatttactaattcttgtatatgaaccatgatacttgtgagactgcttcgaacctgtgacatggtgacttagagcaactctcgctattgtaccagccctgcttcaaacccgtgacatggtgacttgagacctctctcgctattgtaccaggggaacttggtacagccatccatggtatcagaatatgacctgggaggagaaggggacctgttcaaagctccagaagccatcatcgaggaaccgctgctcctgaactgtctgtctgattctgttcatttgttgttgtgtaggctgggcttgtgccaagcttgaatcctcttgtgaaggagtttctcaatgctgctgatgacaagcggaaggaagtcctctctaaaatagaagaggatgttgctaagctcagcggttctgcagccaaatctcgcgtctagaattgccgctagatgggggaggtgagcggctcctggtctcttcgatccaatgtaatggtcagctaagaagctacaagtgaatgccgaggagagcagcgatgacttggctaacccaccgaaggtagaggagaagcttggtgctgtccctcatggcctgtccaccgactctgaggttgcccagagggaagccgagtctatctctaggaagactctcaggagctcagccgagaagtttgagttccaagctgaggtttccagactcatggacatcatcatcaactcactctacagcaacaaggatatcttcctgagggagctcatatctaatgcctctgatgctggataagattaggttcctttcccttactgataaggaagttctgggtgaaggggacactgcaaagcttgagattcagattaagttggacaaagagaagaaaatcctctccattcgggataggggtattggtatgaccaaggaagatcttattaagaaccttggaacgattgctaaatctggcacttcaggtacttcaggtactgccttttcatctttccagctgattactgcactcataatatttgtttatgagtgcaggaacaggagctgctcgagtctcttgtcgaagctgatacgagaaggcaggaaagagctaaaaagatggaagaaaagaaagtgtatctgcaactatacgaagcaatggaggcgttggtcaagatcaatctggagacgaacaagatcatggacttcatcaagtttgacgtcggcaacgtggtcatggtgactggcgggaggaacaccgggcgtgtaggagtcatcaagaacagggagaagcacaagggcagctttgagaccatccacgtgctgcttggagctttttgctatgtctagttttctcctatttgttgtacaggaaaacatagaatagaattcaaatttggtggtcgcaaaagtgtggagactttaattcatataaagttaggcttaacattagtgcaaacagttgtattttagtttagatttagagtacacttatgtatgcattgtttgacaatgtttatttatgatatattaaatggtacttatttatattatattaattataatgttgttcaat

SEQ ID NO: 35317 - DNA, 2939 bp, Zea Mays
ccggcacacctctgtagcacgcgcgagccatgccgcaggtggccgcccctctccgcctcctcctccccctctcccaaaccctagcagcccccgcgcctctcctccaccactcgcgccgcctcctctcctcctgccctgcttcattaagccgcgccgctggcctccgcgccctcgcctaccgccgccgccggcacaccgaacctcgccgcgggaccagcacgctcgggaaggctcccgccaaggaggagatggacaaggaggtggctttcaacaggaagcgggccgaggggaaggacggagggaagcgcggcagcatggagctcaagacccgcaggctcaaccccgtcaacaccacatgctacgtgcagatacttggtacaggaatggacacacaggacacttcaccttctattctactattctttgacaaacaaaggtttatttttaatgcgggcgagggtcttcaacgtttctgtactgaacacaagataaaactatcaaagatcgaccatatcttcttgacccgcgtctgctcagaaactgcaggggggctcccaggcctggtgctaactctagcaggaattggagatgagggcatgtcggtgaacatatgggggccttctgatcttgactttttagctggggcaatgagatcttttatcccaaatagagcaatgcttcacacacatagctttggtgctgatcgaaatgcatcttcaccacaatctacagactccgttattgttcttgatgatgaagtagttcgggtatctgcaatgtttgtcaaaccaaaatacaataatggaactggtagttcaaacgatagtgacatgaagcctggtgatactgctatagtatatgcctgtgagttgccagaaattaagggaaagtttgacccatctaaggctgctgcccttggccttaggcctggtcccaagtaccgtgaacttcaacttgggaattctgtgcagtctgatcaatttgatgaaatggttcatccaagtgacgttcttggtccatcaattcctggaccaactgttcttctggtggattgccccacacagtatcatatgccagaacttttttcactgcacccccttagctgcttttatgaagattctccagaacaaagtggcaagaaagtaaattgcataatccacttaggtccatcacctgtgactagatctgttgactaccagaactggatgaaaaaatttggtgcaacgcaacatatcatggcaggacatgaaattaaaaacatggaaattcctatcttgaaaggtagtgcaaggatatcatcacacctcaattttgtatgccctcagcttttcccatcctctgggttttggtcggaacaaccttcaaatgatgtcatggaaaatgataagagtgtttcatcggaagcctgtggaagtgtgtctgcgcaaaacctcctaaaggtttgcaaattctggcaaaataatgtgaatgataataatatactaacaccaactggcaatcatatgggtgaagaacaatggatcaataaaaaatcagataaggtagatgatggcactctttttcaagaaattgtcttgagaaagcatccaagggacaatcaggaaatcccttgttgtgtggaggatgcaacaagggaagatatggagatcacttttttgggcacaggttcatctcagccttcaaaataccggaacgtaagttccatatatattaacttatttgaacgaggaggtatacttctggattgcggcgaaggaactttaggacaactgaaaaggagatttggtgtaaatgatgctgatgaagctgtaaaaggtttgaggtgtatttggatttcccatattcatgctgatcaccacactgggttggccagaattcttgctctaaggtcgaaattgttaaagggggtgcctcataaacccttgcttgtgattggaccaagaccacttgagagattcctaaatgcatattctacactcgaacatcttgacatgcagttcttagactgcaggcatactttgaagtctagtgttgaggcctttctcagtgaaaatgatactgacccagccacacctcaactggagaccaccatgtttgcccctggaactagaatggagaactacaacaggaagcctgcaagtccaagggataccacagctcttgctaatttcaaagaagtcctacaggaatcaggtttagagattttgtacagcgtccctgtactacactgtccacaagcatttggagttgttttgaaggccatggaaaaagcgaacagcactggaaaggtaattccaggctggaaggttgtatattctggcgacacacgaccctgtccaggtcttatagacgcttccagagatgctacagtgctaatacatgaggcaacattcgaggacagtatgaaggacgaagcgattgcgaggaaccatagtacaaccaaggaagccatagaagtcggcacatcagctggagcgtaccggataattctgacccacttcagccagcgatacccaaaaatcccagttatcgatgaggttgatatggagaagacctgcatcgcctttgacctgatgagcgtaaacctcgcggatctgccggttgtgcccaaggttctaccgcacctgaaggtcctgttcaaggacgagctggtagttgatgaagccgaagaggtccaagaggctgctgtgtactgacatattgcatggataaaaatgatgtaaattaacttggatcgccttgtagcttagcgacattgtttttgacctgaactccagtccaattgaaggtctggatcatctgtctctgtgtctccctttaatggttgcatcgatttttacagttggttttgttgggtgagtgttgtgagttgagttgtgaaaataacaaagataattgtaattgttttgattgtgttggcgccgatctggacgctggtc

SEQ ID NO: 35318 - DNA, 4023 bp, Zea Mays
cgactgatgagaagagaatgagaaataaccagctcctggttaagaaaaaaggtcaacatctttgtactcttcccgtccagcccgtggtgcgctgcctgcctgcctgctgctggtaaacaagtgagtgagctgtgtgattagaaaaaaagggggcgccctctgcccaacaggagcgactccgactccgactccgactccgagggcggtgcgagtgaccttgcccttgtttggattggacgacgactgggtccgcgagctgccagcgcggtctcccaccactatccctctctcccctctccgtttgtctccatcctttctacctcggctgctgcgttgcgtgtggcgctgtgcttgggcagacgtgggcaccatgcctgggtgacttggtgtagcactgtagctgtggcatggagctgaggaagacgacgacgggggagagaagaatgctccccgggtgctaacttggccgccgctgctcaggggacgagtcgagggggagaagaggaaagtccagtttcttcagcttcttggttggatgcagcgaagtgaggcgcaggccaggaaggcatcactcgccgagtctgttctagcagccatctccgagctgatgccttcagcggcagccgccgtcgatgctgagcacgagagcttcatggatgtcggcagccacctccaccatggagccctgcccacagtgtcagtggaggcgcagaaggtgcagggttccccagccaacgcgctgcacgtgatggagtatctggctgccaatgttgacctcgccaaggacctcgtcacaaggtgcagcgccatcgcgcagcagctcatggacgacgacctcctgggcataaccgaggacttggacaaggtcatcaagaacataagcaatgagctcaacaagatgccagcagcgacgttcgagagcagcaggtttgcggaaccagcggtcagtggacaccttcaggttgtcaggaaccagcatgatctgttcgagcagcaatcctttgatggctactcggagggagatatgccaatggtcgtggcaatcgagaggccacccaagagaagaacgctgcacaacagtgacatgccgaggctggtggacttcctgcagggaatgtaccaggagtcacatgagatcggtggtcagtcatttggttcactccctgaagtcgcggaatatgtggagccattgtatgattctttcttctgccctctcacaaacaaggttatggttgatccagtgacaacggagagtggcatcacttatgacaggaaagctatagaggattactttgacaagtttacagatggctctgaacctgtgatatgtcctgttacaaagatggccatgcagagcaagacactgaggagtaatcttccgttgaagagcacaattgcagagtggattacaaggaatgaagcgacacgggtcaggatcgcacgcaccgcgctctctatggcgaccacagaggctatggtgcttgaggccatacatgagctgaaggtgctggctaggctgaggagaaagaacagggatcagatgcacaagattggcatcaccaagttcctagcacggcttctggaccacaaggatgcacttattcgctgtgactccctcgacctcctctgcttgttggttgaggatgatacaggaaaggaaatcatagcgaaaaccagagccgtctcaaggacaataaagctgctatccagcagtagtactgatgagaggcatgcatctatatctttcttgctagagctttcgaagtcagagttgctgttggagaacattggatcaactgctgggagcatactgatcctcaccacgatgaagtttaatagctcatctgatcctattgctgccgagaaggctggagaagtcctcgagaacctggagaaatgccccaagaatatcaagtacatggctgaaagtggctacttggatcctctgcaaaggcacctagttgaaggaccagaagatgtgcagatggagatggtgagctacctcggcgagctggtccagaagcaggagatgaccatcaatatagcagggagtgcatcagagatcctcatcaaaatggtgtgcagtggtaatacggcaattcgaaaggcgaccctcgatgtcctggttcagatctcgtcccaccaccccaacgccaagacgcttgtggatgctggtgccgtccctgtcatggtagaggagctcttcatacgaaagattgatgatgagcccatgggctctaagacagaggctgccgcggtgctcgccaacatcgtcgagtctggcttggatccagaggccatcaccgtgaacaaggaaggccacgtcatcacgtccaagtactcggtatacaacttcgctcacatgctcaagtgctccatgcctgacaccctcaacctaagcattgtgcgcgtgctgctcgcgctgaccgctctccccaagcctctcgccacggtggtctcggtcatgaaggagcaagacagtggacagacggtgattgagctgatgggctcgctgacagagtcgcttgtcatcgccgcaatgaggctgcttattgcgttgtccccgcagatggggcacaccattgccgagaagctgtgcaaggccccggggcagccagggaggcttgtcaagagcattggcctgcacgggcggatcatggagcggcacgccatgtcagctactctcctggcgaagctgccgtaccagcacatcgctctgaacctggcgctgatcaaccagggcgcgatggttaccgtgctagccaagatagaggagatgcagcgcggcgagacgcgggcaagccgccatgcgaaggcgtatatggagggcctcatgggtgtgctggtccggctaacgacgacgctgtatgacccggacgtgctcttggcggccatggatcacaacctcacgtcggtgctcacagatctcgtgcggtccgcaggcagcgacgaggtccagcggctcgccgcgattggtctcgagaacctcagcagccagtcgcccaacctttcccagcccccgaccgaggagcggcgcccgaagaagaagaacatcctccggcgcctgcgcgaggcgcacgcggggcgggtgcacgacaaccggaggccgccggcgcacagccgggtttgcccggtgcaccgtggggtgtgttccccgtccaccacgttctgcctggtggaggctggcgcggtggagggcctcttgtgcgtcctggagagcagcgagaacgggcgcgtggtggaggccgcgctcggtgcgctgtgcacgctcatggacgacgcggtggacgtgacgagcggcgtggccgtgctcgcggagcacgacgcggcgcggcacgtgcttcgcgcgctgcggcagcaccgtgacgacgggcggagagggggcggcggcgctgccgcaggcgagacggtcactcggaggtgtttctgggcggtggagaggttcctggctcacggcagcgagcggtgcgtgagggaggtcaccagcgatcgggcgctgccgagcctgctggtgggcgccttccacaagggcgacgccgccaccaagcaggtggccgagagcgtgctccggtgcctgcaccgcatgccggattactccgcgacctacgaatccgtcgaactgtaaccaacacatgacgcgcacgactgcgcatgtcttgcctctcttttatcaagcttcgtctcttggttatgtttgtaaaattggtttttgtgtgtaacatgggttgatgtattgtttggtgtagctaaaggaaaatagaaaaggaaaaactgaagatgcagttatgtatgcaagtataaccaaagtttatagcaagggaagatactagtcttttgattcttcttactatttttttgtgtgtgtgttcagtagttcttttttagggaccgtgttcaattcagtaggttttgacaagagtgcctcctaaaatcagtctccagataatttgttttgtaattttgatgtttcgtttgacatgcctctctagccttttctcgacacgactactagcaagtattccc

SEQ ID NO: 35319 - DNA, 1688 bp, Zea Mays
gttcagcgacacataaaatttggaatgtatgtcataaaaggtaaaagtcaaggaaacaatggagaaggctttctgggatgtggttgctgattcaatgagaggagacatgccagactactgttatctggtcagcctggtaaaggaaatcagggaagcactggaagagttatctcctacagggtggaaagaagaaatcagtgacaatattaaccttgaaatattgacccaggtaataatatttcagttagtattatggactatggtgaaccgtgatgcatatttgagacaaatatatatattttttggtggaaagttacttgaatcaggttcccaggacagacaataccttggacaaattttgcagtactctctggataagctgcgaaaactgtcttctcctgtgaaggaacacgagatgaagaagagtcatgatacattgttgggagaattggtcgaagactctaaatccaattataaagatccaaattcatttgttctttgcgttatcaagggtttgcgcttcactatggaggaattacaggctctaaaaacagaagttactagagcacgcatccaactattggaaccattgattaagggatcaggtggagtggagtacctgcagaagtcttttgctggtcgctgtggttccccttctgatgcgttagcttctctcccttcaactgcccggtggattttctctttgaaagatgtcgtggaagaacaatggaatgaacatgtcagctcgttatcaattctgccagaagcagaccatgttcagacacttgttgccaccctccgaactggccatgcagttgcaggtgtacaatctgtgatacctgcagcagacaatacaggattaccagagtgtaggggagaaatacttggcaagctaataaggattgggctattacagctcatcagcagcatggagggtgtagaaagggaatcggttcctgagacctttatgttgaattggttgaggctgcggtctgttcagagtaagtttcaacaagtgattgtgatagcgacaagcatgcttgttttgcatcaggtgttagcgagtgagaacccaaagatcacttcttctgagctggagaatgccacttcggaactgttcaacgtcctcacaaggctgctagacaactttccagatgttggcactgagaaaatcattgaggccatgatgtactcgtcaacctcaaggagcttgtcagatcatgaaaggatgaacgccagaaaagagatattgactagggtcttccttagaagcctccagaccgatgacaccgtcttcaagaaggtctctcagtccgtatactgtgcattccgtgcagtcaccctgggcggcagtggggagaagggccggatgctcgccgatgcatccctgaggcgcgtcggggcaacaaaactcactgcgcggctggtgaaggcagctgaagtgcttatcaaagcagcaatggtgtcagagcaggtccatggcccatggtacacgcagttattgtgaatggctctgctaccgcgatatatatatatatatagctctgctcatgccccgttgttacaactgaatgaatggtttgtgggagtgccgtgatgtctgaattccaataagcataggcgacctgaatgcatgtatatgtaaatatacacgaaacgtaatacgactccgaaatgctcctttctcc

SEQ ID NO: 35320 - DNA, 2331 bp, Zea Mays
cgagagcccgagaccgcccaggtgcccaccactccaccagccaaccctagagcctctccagtctccactgctcggccgccgcctgccgcagcccgccgtccactggtcccgcctcccggcgtccgctccacgcctccactgctcccggcgtccgctccattgctaccatcgtccggcgttctgctcctgcgccctccctttgattcgttgccagttgtagtgtccgggcagatttgagctgtggcagcaagcaaggattgacgaagcgtgcgttcccatcgcaccaccatgggctacacagagatcgacatccacccctctgggagcggcaagatgtgatagatattagtatgaaagataaaaactagaatgctatgcctgtcagaggagctttcttcagtttcagaacacacctctccatctttcggtgcttggtggatcaccgtctaaacgatccaccaccagaaccgcccaaccccaagataggtatgtgcaggttcaactactcatttagatattggtacaacctgtaatagactttggtacaataggatttggttctgctattcactttgtttttagttccaaacaatcaaaaaattgcatgtcctttaggaaaaatatcacaggaatattagtaacataacactgataataaaaaatgctttgattctatatatttttcatgttataaggttgaaaacattccgtctcacggatcaaaatgggtacaaggggacgtactgcatttacaaatatatttaaccataataaaacatctttggaaaatgaatatcattttaagtccaaaaatgtttttgttgaatgttcattaagctatagtgaagagtaaacttagcatttcttttctatatctctccctcgtgctcatgtcgctgcagtctcctccatccaacctttcctacgtaggcagctccatctcagtcgttgtacccgttcaatggcgagctggtggcagcgatgtaggagatgatccatgccgaggtgcacaagtacatgttagtggacggcacctgccaaagatacaccgtttctactggtacacattttattttttatgtttttcagttggagaaaacatttaagacaacattttcatcgtttgttctccatatggggcttgtttcacgccacttgaaggaagaagggaatggtggtgttaagttcggacaatacatctacacatcttggagcatcggcatcaatgttctcaatcttctcaaatttcaaattatactggtcattactttgaccattagaataaaatccctataaaacgtggccatgcaatcactggttgtaaactgatgggcagaatgttgtaggatggattggctcaagaactaatatagcttacttatgacaatgtagtaattcatgaagttattgttccttatgttcatggagtttgttctgctaggtttttatgcttttaatttctatttccttaacgaaacctcaggcaccttaaagacagcttggatgattggtttcatgaacagctagagaacttggatgatgattatcttgtgtttgattgccctaatatattctcaaatcatcttttcatgctttagttgtttcttaatagttgcacagtttcatctcactcatattcttgccacttacatgtatgtgacaaaacagacaatccgtcttttttattgcttatggcgttgtgcattatacatgtccaccaattatatacaaataccatttgtgggttacctctggtgtgtttaggtattcctcagattcctgacattttttctgtctttaaatgtcatatcactattaaaaaaattgatttttgttgtctaaaataccacaactacttttctaggtgcgagctgcaatcaaagttaaggcattagtcatcatttgcttcacctcttctggacaggctgcaagggtgttctggacaaagaaagcttgtaccttaaaacaagaggatacaagaagctggagtggttgtctaaaggcttttgaactgcttgaagcattagtgtagctttggtgattttgtgactgatcagctctggagcagctagagtgatgtagttgtgggcttttgaacaatagctggagtgatatgaaacattagtgatgtggttgtgggcttttgaactgcttcaagctggagtgatgtcgctgtgttgcttttgtgactgatcatctctggagcttttgtgaatgatctaactagctatatgtaaatgatctagttgtgaatggtattataattgtgatgattttgtgaatatataattgtggtgcttttgtgtttatgtgatggatctatgactggta

SEQ ID NO: 35321 - DNA, 4311 bp, Zea Mays
ataacaaggagtcctttattattattcttattatcttagtgtaaatattattattattaggggcgtttacagcgtagcaagttcactcttgcaagcaagggacttttacaagagcatgtagctagttagttcatttggagtgtgaacatgtcttatttgcacacttgcttttttcccctctctttattttctccatcttcaggatggctattattagctcctttgcatgcgttcatggaattctgcgtcagaaaaccaaaacggaaaatagcattattggtcagtgtaatatacatgatatatatatgctacggtggagttattaggatgatatatctctactactacttatgttagtagtgtaggcgtccacacaccctctcggcgcatggttctgcctctgcagccgcgacacccgcgcgtgccttcgcctccgccgccgcgatggccgtgcctctgcccccgcctcctccgccctcgcgacgctgcgccctcccccgcgatgcctgcgccttcgtccccgtgatgctcgcgcctacccccgcctcctctgcccccgcgacaccgcgcgcgcagcctcctccccgcgatgcccgcccaagctcccaaatgccggcccccgtctcctccaccgcgactcccctcgctctcccgagactcccagatgctggcccccgtatcctcggccctgatgccgccgcgattcccagatgccggcccccgtatcctcggccccgcgctcgctctcctgagctccgacgggctcccgccctagcccctgacaccatgttgtgcccaaccctaaacctagccaccacgccgtcaacaacgccaccttccttcctcgccaccacaccttctttagatggaaggcgcgactggtggcatcttcctgatctcggagcacgtctaatcctcgctccaaatgctgctccgcccccaatccgtgcggcatcttcagatggaagccgggacaatgccccatccccctctcccgagccccgacgactgacattccagggatgtcgctctgcgatcctcacctcctcgtcgttggcggtcgcgcgacctcctgaccgtcgtctccgcccgcgagatccccccgactcgcccacctctccgtccacagccgcctccatcacgcacctccacgccgacgagaaggctcgcccacctctcagtccacgactgcctacgacgcgtcttctgaataaagatctctcgaagcacccggtggatgggttctctgctgggctggtcgacgacagcaatgtcttcgagtggcaggtcaccatcatcggaccgcctgacaccctatagattggttgttggacctgtttggtgttcttcatgatgggaagaagtcgtacccgaccattctggcatttgtgaacaatgttgatgatgcagagtttatattagcccatggtactgaagtctttggttcaccttctagcaatcctcttcccaaaagtctcgagaagcttgagcaggttctaatgcttggcctagaaaagggacttccaatggtgctgcctaatccagaattccagattatgtcactgtcgaagcttgagatcttcgtgtcatgtctgggtttggaggctcgtcggcaaccggacaggaaaacagcaaggcggaagggcattgctcgatcgctggtccgatgagtggcactgtcagggagcgtgacaggggcgacaaatctagacctccacgtcggtaagatgttgtggcaaaatgtcagtgagctcacattttgaggagctgagggtcaatgtcagcgagctcactgttgaggagctgagggtccctgagtacctgcagttcaaggaacaacttatggaagaagggtatgaattcttatattcaccaatgaagatgatccttttggtactattacaggagcaacaacaataataatcaatggcacctaaacattttcttatcctctaagttcatgtatttcatgtttactaatcattcctattttagctttaaggttgaggctgggagaacttaccatcggacagttctagagatacttgaccaattggaaaaatgtgcaaaatcatgttctcctattgatagaagcatttatttagatttggcttacattgatggatgaatatgatttatatgaagttcctggtatctatcggcttcatggtatatctctactactcttaagaagataccaggtatgttcctttcctttcttttattttcttagccccatctttatcatgttttcaccattacagagtttgcctaccgcccccgttcgcccgcaagcaaactctagccgaggaagacgcggtttctcacctctgcgccctcgccagtcccacgagccccgccttccctagcctctcaatgcctccagattctctaccccttgccccccagtcgttgtttccgcccgcgccgctgacccatgacctcgcatgcggggctagggtttccacatgcgatggaagtagcggtgatgactttgctgttgtttgcatctgcctcgacttcctcggtccggtcttgccatctaccagcgctgcctaggtttgcctctcctgtcctgcagtgctgaagttccgcgtgtgctggttggtgtgtgttacgcgtcttggaacgagagggcaacttcgatgcggggctttgattggctgttttgtttgtggtgggggtagttgggtttgcgacattttttaggaaaccgattggtttcgtttcagcttgttttcagagaagggatagtggatttgtcaacactagactggattccataaaaatttgatagaatcagtgctttcagctttgagctagactacacatttttctgtgaggttgcaccatttttccctagataacttctatgttgaaatggtttagttctgaagctgtcattgttagataataacaaggcaaatagatggttactgtggcagtcaaaagtttgaagccagatgcgcttcaaggtcatagagaatgggtggcagaagttgactttctgggacagttgcatcataaacaccttattaagctgattggatattgtattgaggatgatcaaaggttacttgtatatgaatttcatggcacggggaagtcttgaaaatcatcttttcagaagatgaagattgctctaggtgccgcgaaaggactagccttcctccatggaggtcccaaacctgttatttacaaggattttaagacattgaatgttcttcttgatgtggagtacaacgcaaaactatctgatttcggtttagcaaaagctggtcatcagggtgaaaaaactcatgtatctactcgggttgttggcacctatggttatgttgcaccagagtatgtaatgacagatgcactttttttttggagactaagccctaagggcaacaatggagatgaccagcgtcttggtttatcaagaggaagttaatccctctcaactgaaactcccatcaaatttggggcgtagtgtgtcgattcagttgtaactattatatgtcattttgggttagcaaactgtatctactaatttctcagacttatgccttttgagctagaaacttgtgtaagaattttttgcactcagtgacatgctggatagtgcgagtagcagattacaatagtgacggatgaacattgtattttactttacatgatggatttttttgatgtgtaaggcttttaaggcatgtaaaaattcttaacttttaaaagatgctaacacgaatataaaattgcaatcattattcttgaatttcaatgtatcttatcataacatgttcactccgtagcaacgtacgggcatttacctagtatatatatatatacgcacgtggtgcagtcgaagttgagggtgagcgggaacggcagcggcgcgccgcactgcgcggggaggtcgcggatggcgtcggcgttgagcggctggtaattggccgccgcctgcttgacgcactcgcacgcctgccgccgctccgccgggccggacggcatggccctgatccgcttcacgccggcgcagcactcggcggccggggccgcctccttgcccgtcacgtagccgacgcaggggcgcaggcttgcgtccacgtccgcgcagttcacgtccgccctaaccgccgccgccgccagcaggaccaacgccactgctgccaccgctgttgttgcggcgccgcccttcttcttcatcatcgccatcgatcgatctgtgtctctctctctcccgaacttgacttgctgctgctggagctcgatcttagcttgttgctgctgcgttcatggagcggctcgagcgctggggtttta

SEQ ID NO: 35322 - DNA, 960 bp, Zea Mays
tttggaattgagaaaagttatccttagcacctcatttggccatagtttctgaatatggatccaaatgacctcacctaccataaactgcatgtgctctttttatatatatattttgtatatatatgcttcttgtgagcagtgttaattgattttattttatgttgcagttgagattccccaggaaattggtacacttgcgaacatgcaaaggcttatgtcagtactcaatgtatctgataacaaactaaaggaacttccagaatcaattggaggttgcagttccctggaagaatttcaagccaatggaaatgctattgaagatgtgccagcgtcaatttgcaacctagtttgcctgaaatccttatcactgaacggcaacaaaattcgacagcttccacaaaacttactgaaagactgcacggctcttcagagtttatccctgcacgacaacccaatcacaatggaccagttccaacaaatggatggatttggagagtttgaggcgcgcagaaggaagaaattcgacaagcagattgattcaggggtcatgatgggctcgacggccctggatgaaggggttgatttccactgattttagaactcgagtgtctcccattctttctagttggtcaggagtcaggaccgattgtagatttgtagatatcagtctcaacctacaaaacagggttcaccaaaccggttgtaaggtgaaaaccggcgcccagtgaaaactggtaaaaactggccgaaatcaaaatcaccccacttttcaatttgaaacggtttgaaaccgataaatcggctcattaatcggctcctaggctgattaaccggcgtcatagaagcagaaaccgatccatatgtatttttgcaaataaagcacattgagatctcataatttgaataaaagatgaccacaaatattatcacaagtctaatgacaacatttagtagttcaaa

SEQ ID NO: 35323 - DNA, 1490 bp, Zea Mays
ccgaagccaagagcattgcgaatgcgaacccgcgacaagcttattgctcctttcggtccttcccctgcgcgccgcgagtgaattccgctaccccaatcaatccgacgccagagagagagtggcgactggcgacgcggtccggtccccccaattcccaacggccggcggcgcgacaccccgatccggatcccatcgcctgccgggagcctcgattcgggcggcggggacgacgattcgaccgcgtcggtaaccaggcaggggaaaggaggggatgagcttccaggacctggaggcgggccacgtccggggggcgccgcccggcggcggccggaggagcggccgggcggggggcgccggcgccggcgccggcgcgtcgcaggccgtggcgtcgggcgtcttccagatcaacaccgccgtcgccacgttccagcgccttgtcaacacgctcggcacgcccaaggacacccccgacctccgcgacaggatacataaaacacggcaacacataacacagctagtgaaggatacatcagacaagcttaaacaagccagcgaggcggatcatcgcgttgaagtcagcattgctgatgcaaagctagctaaagatttccaagcagtcctaaaagaattccagaaagcccaacgattagcagcagagagagaagctgcatatgcaccttttatttctcaagcgggcttgccacagagctacaactcaagtgaagtgaataatggtgctgataggttggcagagcagcgcacacagcttctagaatctagaaggcaggagttggtcttcttggataatgaaatcgtgttcaatgaggccatcattgaggagagggatcagggaatacaagagattcagcaccaaatcactgaagtaaatgaaatcttcaaagatctcgctgtgctagtccatgatcaaggagcaatgatagatgacattgattcccatatagagaacgccgttgtagcgacttcgcaggctaaaggccagctttcaaaggctgctaaaactcagaagtcgaactcttctctgatatgcttgttgctcgttattttcggagtggtcctgctcatagtgataatagtacttgcagcctaaaagcttggaaggcagctggggttccgaaatctgatcgagagcttattgcgacaaattccttcataagttatttttgctgtgctgctaggaatgattcctggtacccaggcggtgattggcgctctgcttgtggtgtggcggtatatgtggtgatgatgaaatctgatacataaaagtactctttcctgcaagtgtagtgcctcatgcacgtttttgtttatatattgtgatgtatgagtgcgtgctgtagaacaaggttggattatccgtggcatgaagtttctcgatctcatgagaaacgcttttctatatttcatctcgcactacgcttctctatcagtatccgccaggtctatcattgtcttctgcttgcttattatgt

SEQ ID NO: 35324 - DNA, 363 bp, Zea Mays
cgaacctctccttcccccaggactacaaatccgagccccgcaaaccaattcgccgtgagctggcccccacctagggcccttcctgtgaaccccatgccgactcgtcgtcgtatactcgtatgggtgttgctcaggagccaccatcgtggttgtgtgctttcaccatcgtcggggaccctctgtcgggtcagggagactcgcctatcctggctgatgcatccgttgcgtcgtcgggcggttagggtcactagctctgactgaattgctcactggttcttggacatcaccgtcgggccgcactccgccatgggcgttattctccacgctacaatccctggtatggaccctccccgtggattcgct

SEQ ID NO: 35325 - DNA, 968 bp, Zea Mays
ggtgtgcactatgcaggcgtgcccaagtgcagcagtgccatccctgacaacagattcggagaagaagggcccagtgataatggaaattccactggaccaaatccggaggccactgatgcgaacgcgggccaatgatccagtcaaggtgcaagaactcatggacagtatccgtgtcatcggcctccaagtaccttttcttgactactgcagattgatgtgttggaggtcgatggggtctattatggcttctctggatgccaccgctacgaggctcaccagcgccttggtctcccaaccatccgctgcaaagttcgccgtgggacaaaggaaacactgaggcgagagcaccttccttcagcttggattccatttttgaattacttgatgcactgaacttcagtttgctctttcaggcaccatatgcgatgagttatattttattcagttacaaagtgatctgtgtatctagagctaaaacagaagcttccatggtcttttcgtcgtctcgtctgcaattctccatacctgtaaatgttgtccaaacagagtggtgaatagtacttctgtacccagcagcatcagaaaatgttaattttgcctacaacactcttttcgatcagtggatggatgagtaccacccgctcagtagatcattccatttctacgagatttttgtaaaaaaagaaaaatgcagcagcagtcggcacgctgtgtcatttagatcatctagaaaaccagaaaaaacgagtcatgtaacttgtttggctcgtgcaaaaaaatattcaaaaccaagtttgcttatactggatgctgatgtgtcatgctatgttggggcacactaatgaaagtttggagatttaatttatatgtcaagtttgggagctcaaatgctaagtttgatgatgcaagtgactctaacatggtacgtcaatgttggtatccagttttagcaaatctgatttaaatct

SEQ ID NO: 35326 - DNA, 3488 bp, Zea Mays
accaaatttacagatacgtccatcctctctcgaagccgccgcctcctgccgtcctgccactgcgagtggccagtgcccactgcccagtggccgttgctggttgctgctccccttccactcccacagttccactactttcaccgcgcccgcgccaccgtttgcccccttcctccgccaccaccacagtgccacaccactcctaaccctaatccgcgcgagccaaatcttagccgcaagatccattcgccgcatgcctctcccttcccggcggcagcgccggctaagctgagccggacaggtaactcccttcgacgccccggcgccgttgctgtcacagccggcgccatgggctgcgtctgcggccgcccctccgcctttgacgacggccagtgccgcgcgacgcctccgccggccgcgaagctctcggcggcggtgaggagcaaggaggaagcacggaaacagcagcagctccagcttcagcagcatgtgagggcaggaagcggaagggaggaggcgctcgagaggaggcgagcaatgatggcgatggcggcggtgtgccaggtgaggagcccggtgccgagggcggttgaggcggagcatgtggccgtggggtggccgccgtggctcgtcgccgtcgccccggaggccgtgcgcggatgggtgccccgccgcgccgagtcgttcgagaagctcgacaagattggtcagggtacatacagtaatgtttacagagctcgtgacctcgaaaaggagaagattgttgctttgaagaaagtgcggtttgataatttggaacctgagagcgtgaaatttatggcaagggaaatcctcattttgcgccgacttgatcatccaaatgttatcaaactagagggtctagtaacatcaagaatgtcctgcagcttatatcttgtttttgagtacatggagcatgatctagccggactagcttctttccctggagtaaaatttactgagtctcaggtaaagtgttacatgcaacagctcctccgtggtcttgagcattgccacagccgtcacattctgcaccgtgacattaagggttcaaatctcttgattgataaccgaggcatattgaagatagcagattttggattagcaagtttctttgatcctgaacaacgacaccctttgactagtcgtgttgtcacgctatggtataggccaccagagctcttgcttggtgccaccaattatggtgttgctgtagacctctggagtgctggctgcattcttgccgagctatatgctggcaagcctatcatgcctggtagaacagaggttgagcagttgcataaaatatttaaactctgtggttcaccgtcagaggattattggaggaaatctaagcttccccatgccaccattttcaaaccgcaacacccgtatgcaaggcgtgtaccagaaacatttaaagagttccctgttcctgctctggcattagtagatgttcttctttcagtagacccagctgatcgtggaactgcgtcttctgcattgcaaagtgagttttttacaacaaaaccatatgcctgcaatccttcaagcttgcctaggtaccccccaagcaaagagtttgatgcaaaacgtcgggaggaggaagctcgaaggtaagcacatccaacttggtgctcgcattttatctatcgatcaaaaacaattcttaatgaggcaatgatataagcacttcactaggccatggtgcaccaaatctatctttgtcgagcccatcaaacttagatgaatattattatgtttttcagaatcacatgaacatatactatctccatttcaaaagatccatcgtccacgatatctttgtgcaccttttgccatttgtactcacactgtgatagttgaaaaattgagttactggtgtgagtcatgtaacagaggacagcaattgttatcttttcttccttgattgtcgttctctgtgcccaagggatagatgttgtgaaacagagtgatgaggtgaatctgtcaatcccctctttctttatatattacacaacattgcatacaatgccatacatggatgctgcttcccctacacctacacagaattataacatttattttcctttttcatgtattagcatgtcctgtttattagacctgcactacttgtttcatttttctttctatttcctttagttcattgcctgctccatttgtgctatttaaatttcaatactcaagcaaaaggcaaccagcattgttgtcatacatttgattttttttttacaaatcatagtcatgcactttttaggcaaggtgttactggaggaaagcaacataaacatgaccctgaaagaagaaccagagaatcaagagcagtccctgcccctgaggcaaatgcagaattagtatcatcattgcagaaaaggcaagcccaagctaataccaggagcaggagcgaaatgttcaatccctgcaaagaagactccgcgtccggattccgaatcgaaccaccccggccaactcctgttaccgagtcttctgaagacccacaacgtgcctacccaaccaggatcttccattctgggcctctagttaaccagagccagccatcaaaggctggaggcggcaaaaatggtgaacctcaggtccctggtgttgcgaatcaccctgtggttttgtcgacaagatcaggtccccgggcagacgatagcggccggacaatggtcgctcaagctgaagcatttgctcatgggcggaggctgtcggagtccatcaatgagcatttcagtaacagtgggaagtacgatcaagtgttcccgaagaaggatgacaggaacattagggctgatggagctattggctacggatccaaaggcagcaagatccaccactctgggcccctgacctgtccttcaggcagcaacgtcgacgagatgctgaaggagaacgaccggcaaatccaagaagtgttccggcgaacccgggtggagaagtcgcgagcgaggagggaccatggacatcaccagggcggtataagacctggcgatttcggcgccatcccagtcttcccttccagccgctccagctatcaggctgtgcagcagtaaggccggcgctcgaacaagatcggttggcgttggaacctccgatgtgtttcggtcccacgctttttccgggaggggatgtgtagcatacgctatgctatgctatgtacagggacagggaggcagcagcagcagccgtgtagagactctgaaggtgaggagagggggaggtgatttgtttattggcggcgattcgagtgtctcggtgaccaaactcgtgtatcgtcaggtagttttgagatgttcgctgcaactgcaatgcaatatggtgtgtgtatctcagtctcagctcgccaagacgaagttggccaccaagagcattttcactgtgatggcatcaaatctttcaaacccatgctgagacttgggagctttgttgaagcacctgttcttgtgatc

SEQ ID NO: 35327 - DNA, 1896 bp, Zea Mays
aatttaacaaattcctctcccgtcccctttcccttcggggatggtattcgtcgtcttggcttcatcctctcgcccgccgtctcgactgtagcaagcggggctgctgtccgccgcattcaggagccatgcgtgaggggatgagggagagggacagaggcgggagcccggatgcgtcaggtcctccgcccttccgcggcccggcgtacaagacgaagctgtgcgcgctttggaggggcaggggcggctgcccccgccccaactgcggtttcgcccacggcgaggctgagctccgaaggccgccccctcgcgcctccttccagcctcgcccacgacctgggagaagggattacagagatcatgagtttagactcaggcctgatagaagacactcaccccatgggaggtattcccctgaaagagatatcaggcgtcgttcatttcatgataagagaccaagttctgaagataggggtaatcactttttctgtgcacatttgtgccaataaaaatatttgccactgtccattgtatcttctaactactccctgagatttgatttgcaggatctagtcattcaagatcacctattaggaagaggtatgtaggaacgaataacaattattagggattcaagatctagtcattagaagtacttaaatttgtttattacatcgggctagtttatcttcatgtaccatcatgacttaatccctgctaatttattggtttcctaattttttatatgtgcgagctgcaatgttaagtttgtggtttatgagaccttttattctattgttcaaccatgatctaccatggagtctcattaccatccatttataactttggggtggggttgtagccgtgtagggtcatgaatgttggtatcaccaaggagggttttgatcttatgttaggcatgtgatctgtatacatgctttttttgcaagtttatggcttgcttgtgaaattgcctatctttatgtttatgttctatggctgctcagtgagagaaaacatagtaaaagtcctgatggtggagaaaccgattcatccgtaagtgttcgaagtcctgataacgaagacagaggaaaagatgaaaggtacttaagcagtgatgagaaaaatggtcatgaagatcaactgaaacaaatgcatctggacatggaagcattgcgtgaagacaaatcaaagctggagatgatattagagaagaagactgatgaagagcacaaactttgtagcagagtagaagatcttgaattgcaattgaacaaagagaaagaagattgccaaaggatgtcctccaaaaccaaaaagctaatcaaagcacatgggcgttatataaaagcacaggaggatttaaagaggtctcaggctcgctttgagaggctagcagatttgcttgcttcagatattttgaagccttgtaccaaggagcagggttccatagggattactgccaatgaagatccatataatgctaatgaaatgagcccaagtgaccaaagacaaaaccatgtttcagcatcgagaaaaagacttatttccctcccaacaagtgaagaagcaaaaactggaaagagacagagagagaatggtgatgatatgatcccaacatcagagaactatagacctgaagatgccctagaacatctccaagatagcaagggaactgatctaccagaatcatttacagtgaagaagttaagggagggtgacaacgatgatgtaggaaacattgtctcttcaagcaatatttttgcggataggtgttttaaaggcgtcaccaaggtgtctaggcgccttgctcgcctaccttgcctaggcgccgcctaggcgtccaggcggtggtctagtgtcttgcctcaccataccgccttaagaaccatgcatgat

SEQ ID NO: 35328 - DNA, 890 bp, Zea Mays
ctgggcatgagagccacatgtggaggccatgtagtgctggtaccattgaaaatactctccactacatatgggctgaactcagagctgtctgcctttgatcagttgcactagggcttggttgtgtgaagtctctcccctgcccttgagctctaactcgtggccaccgtatgagtgaagtggtagtgttcagcctgagtaacctccctccccaaacctgatttgctcttgtgttgtgtgccatctactcggcttggtgttcatcacagccgattccccccccccccccccccccccccgccgcccgccgtcgtggctagaacgcttcaaagcgtgcttgtgacatcgcggcgcggcgctgtgaaccacctctctattgaccgtcaactggtgctttccccggctgtcttcgcgcgagcaccgaagtgttgaacacctagaagaagtggtgtctgaagaaggagttcacttcagtgcctgctgatccagtggtggagtttcatctaactgcttaccacaatagaaggattttagatcttctcctgcaataaggaaagaatttgatgacttgggctttattagttgcttcttgtggaggtcttgaagcttaggttacttatgtgtatattttatggaaaggtttcacctttccaaatattgtagttaagttatgcactctaaagactatcaggacttgtaataatttcaatcccttttgtggtgtaagacttcagttctggaatgtatagtgtattttgtaaaagtcttccgctctatctccaatgtgtgtatcaaatgtgattactgtaatatgcctgttatgtgggagatccttgggatgatgagttcaagttgatgaactcgatagccttgttaagttacccggtacacgt

SEQ ID NO: 35329 - DNA, 2879 bp, Zea Mays
gagtcggggacgagcagctccacaacaattcgtgcctgcctccctgcctcggcctcctccctcgtcctcccctcctccgccgcctcaaacccggccccctcgcgcgcgtgcgcggcgctcgaggcgacgaatccagccacctcctccgcacccatccccgccgccggtcgccgatgagctcggaaggctgggacgctgacccgaattttatggggagaggatgccagagctgcgaagcaatactcgtcaagcacgcttaaggtctaagaagcttgacgatctgcagccaggagagccgcttgcgaaaccggtgtcacctgctctgccgagcgcacggaagcgtgctcctacacgtgctgctaggggcagaaagggtgctgctgggagaggagtgcctcccgcaccaaagcctagaagaaagggggttgatattgtcgtcttagaagctgatcctgcttgtgaaaccccacttaaagctttcaagggactggaagttgctgctgctgcgcccaagaaccttcctttgaagcaggtagccgaagttggtgttccgaaaatgaatggtgaaagtggggagaagattgttggggctgaagatgaatcgacagctacacctgtcccagaaagggttcaagtaggtaattctccagagtacataactgacaggaagttaggtaaaggtggttttggtcaggtgtatgttggtcgaagggtttctggtggtgctgctcgcactggtcctgatgcatatgaggttgcattgaaattcgagcatcgtaacagtaaaggatgcaattatggccccccatatgagtggcaagtttataacactctcaatggttgctatggcataccatcggtccactacaagggtcgtcagggcgaatactatatacttgtaatggatatgcttggtcccagcctttgggatgtgtggaattcgatggggcaggcgatgactccaaatatggctgcttgcattgctgtagagagcatatcaattcttgagaagctccattctaaagggtttgtgcatggtgatgtgaaaccagagaattttctgcttggtcagcctggatcgcctgaagataagaagctttaccttatagatcttggtttagtggagagagaataatggtcatcatgttgattatgatcaacggcctgatatctttaggggaacaattagatatgcgagtgtccatgctcatttggggcgcactggtagtaggagggatgatttagagtcactggcatacacccttattttcctgataagaggaagattaccttggcaaggctaccagggagataccaagagtttccttgtttgcaagaagaaaatggctacttctccggagatgctttgttgttattgtccagctccattcaaacagtttcttgagattgtcacaaatatgaaatttgacgaagagccaaattatgccaagcttatctctctttttgatggtttgattgaagcgcctgcttcgagacaaatcagaattgatggggctctcaaggttggacagaaacgtggaagattggttgcagatctagaagaagatgaacaacctaaaaagaaggttagattagggagcccagcggctcaatggatttcagtttataatgctaggcggcccatgaagcagaggtaccattacaatgtggctgactcgaggctaagccaacatatagaaaagggcaacgatgatgggctttacattagcagcgtggcttcctcggcaaacctttgggcactcatcatggacgcaggaactggtttctgttctcaggtttatgagctctcaccagttttcctccacaaggactggataatggagcagtgggagaaaagctactacataacagcaattgctggatcatccaacgggagctcattggttgtcatgtccaaaggaactccttacacccaacaatcatacaaggttagcgagtcgttcccttacaagtggatcaataagaagtggaaagaagggttccatgtgacatccatggccaccgctgggaatcgctggggcgtagtcatgtcaaggaattcagggttctctactcaggttgtagagttggatttcctgtaccccagcgagggcatccaccggcgctgggagagcggctacaggataacttccacggcagccaccaacgaccaagccgctttcatcctgagcatgccgaaacggaagccgatggacgagacacaggaaacgctgcggacctccgccttccccagctcacacgtcaaggagaaatgggccaagaacctctacatcgcttcgatttgcttcgggcggaccgtgtgctgatcgcgcgcgcctgggaaatggaagtcgaagcgagggccaccgatccggtacggtggcgcctcgcatcaagagatgcgagatggggcgtcaagtcgaaaccagttctaatgataggatcagtgtatctctgaagatacggtatgggttaccctaccgtatttgtaaagtaatgatgccggccgaacgacctttcctaacgcgtttgggcagaaattcgttgctgtcaccatattttgacgggagtttctcccgtgttgtcggtagaaatttgcgtgtgcactcttcccgttttggcgcccatgcgatgtgtttcacccgatgtatcgctgggcttcctgtttcgtgactcgtgagccgcaatgtctggtggcctgccgactccggttggcattttattttgagagacgtagataaattgaattgattgaatatttagagctcagtcagtcaaggcccgattaagtaacatatgaacgtatgtctatattcattcattattattttaataaatatggatagaaaaaaaaagttggctaaaaagataaacaataa

SEQ ID NO: 35330 - DNA, 1452 bp, Zea Mays
aaccggacattgcggtgtagtatagggtttagcagacaagggaggggactgagaactgggaagccgacgctccgctcggcaaagcctgaggcggcgacgacgcttgatcgcagcccgactcacaccgtgaggagttcgagggatggctttcgctagtagaattggaaatgcgctcaggagaactttagcgcccacttgctccccactgcttcagccagactttcttttgccaccgacgaaaccactctgaaggatgcattttctgagtttgggaatgtacttgaagctcggatcatcattgatcgggaatcagggaggtcaaggggttttggttttataacttttacatccactgaagaagcctcagctgcaatgacttccatggatggcaaggaacttcaaggacgaaatataagggtgaaccatgccaatgaacgcgctggtgggatacgcgggggtggtggattcggagctggtggtggttatggtggtggaggtggatatcctactggtgggtatggcggtggtggatatagttctggtggtggtggaggatatagttctggtggtggaggaggatatagttctgggggttatgctgccaatggttacggtgttggatctggcagtggctatggtggcacctacagcaatgcatcaggtggtggatattcaggcagtgatggttacggcaatggagctgccagtggtggttatgctaacaacttgagcagcggatacaacagcaatggaaggtacaataccattggcagttctgatggaaacactggtgggtacaattcgtctcccaacccgtatggtgtaggcaactacaatactggaggttcgagttccagtggtggaaccttaggagagtttggtggtggaggttttggtggcaacaactttgctggaaatgttaccggggggttttctggcggtggggcaagctatggagctaacaagccgcaatacaatggcgacgacgacctgctgggcgaaggtttcttcgacaaggaagtggcagagtaaatgagggagcggcgtactcgcacctctcgcacggtgctgcggatcatttttttcccccaaactgcatcagatcggtcgtgctaaatggagcaaatagaactttgcctgagctcattaggatatagaacataatcctttgttcttttttattctgtttcagacaaggcacgtatgttattttatccactcagctagcgtagctttactacaactatattgtgagaagaaaaagttgttatatcaactatattgtgagaagaaagagtggttatatcttctcaacaagaaatgatgatagttcaggtgctaattttcttagcctttgtattcttacgtactagatagaaatgtccaaagtccaatgtcgttcccaataataaaaataaaaataaaactctagcatatgctggaatagctcat

SEQ ID NO: 35331 - DNA, 5961 bp, Zea Mays
ctcctcatcgccggaggaccaggccaacccatcagatgcgcggaggtgctcgtcgcggcacaccgcaacatcgagccgccactactaagctgctgcctgctggttgctagacgtgacggcgcgtgcactagagggcggggagaacccctagtcggttcctcaccgaccgccatgctccgttacagccgccggttcctcaccagaacacctcgccgccgccaacccaaaaccgccgggaaaacagagccatctcccacagccgcgccgacctatacccgtgacgtggtccgccgcgccactgccatcctccgcgaccagccctggtcggcggcgcgcccgctcctcctctccctccccggcctcgcctgggactcccacaccgtggcgcgcgtgctcaagacccacccgccgctccagaaggccttcctcttcttccgcctggcgaccaccgcctcgcgcaccttccgccacgaccgcttcacctacacctccatgatccacctcctcggggaggccggccgcgttccggccatgctccgcctccttgccgagatgctccgcgccgggatcgcgcccgacgccgccaccttcaccaccgtcatgcactggctcgcgcgggccggtgacgtcgacggcgccatgcgggtgtgggcggagatgaaagcgaggagcaggcctaccgtcgtcagctacaccgcgtgcattaagattctgttcgacgctcggaaggcagaggaggcgcggggggtgcttagagagatggtggctgaagggctgcgccccacctgcaagacctacacggtgctcatcgagcatctcgccgacacaggaaaatttgaagctactcttgagattatggacaagatgaaagaagcatgtgtacaaccagataaagcactctgcaatattttagtacagaaatgttccagggctggtgagacatcagttcttacttgcattcttcagtacatgaaggagcatttcattgtccttcgccgacctatttttttggaagcactacaagctctaaaagctagtggtgatagtgatgaacttcttcgggaagtaaaccctcacctttcatacgaaggcattgagaatgatccaatattgtctgatcaaggctatcttactgacaggagtattattctctaccttatgtctgcaaacaaatggtctgctatagaacaaatggttaatcaaatggccccaaagaatgtgaaaatggagacccatatcctgtctgatgttattgaggccagctgtgccgaccgtaaaccgtcttgtgggctcgcagttatgcgttatggtttaggagtaggctgtgaacttggtaggtctgcatattgttctcttcttggccagtacattagaactgattcatttgatttagtcttagagattgttgaggaattgattaaatctggttgcaatcttgggacatatgtatcatctgttttaatactcagattgggctatgctgggcagtctgcatgtgcagctcatatttttggattgttgactgcagacaagaatgtagtttcgtacacagcccttatcaatgcctattttcaagctggcaaagttgatggtgctcttgatctattcacacaaatgagaactaatagaatatctgcttgcttgggtacatatgaagtcctgatacatggcttagaaaaggctggcctgaaacaggaatcagattactaccgaagagaaagaatgaatatgcaatggcatcttcagtatcatggcccgcagtcacctgaagataccttatgtaaccatctgttttgtggcattcatgggtgatttttcaagatggattgatatacaatgttcttatcattagcacaattgttccagcttcatccttcctcagccttgaaggtaacacatgcccctttatatttgatttgatatgaaatcagataaaaaacatggattcatttaatctaaatgtataattggagcttcatgctgcggaaaactatgaatagtgaaattaaggaatgatttggaattgaatgcaaaactacaataaattggaaatcctgatgttggcttagggcgtccccaacaattgtcgaagtcgctagctgactcggattctcactgacatggaggagagagagaaaacagaaaaataacctcgctggcgacttgttcatcgctggtctcactaaaaaaacaaggtgagagaagatcaggtagaatgtggaaagaaagtgaaccagactccagtggtgcctcttggctacaaatgctggcatgtgctcgctggaggagtagcagcggacgatgcgtgcgcatgggtggccaccaactgcacgggcgtcctaccatcgccctgccccaactacaaatccaaatttctatgaaatgcctatgggagtggagtgagcggcaaggccaagggtgcatgggtctggaagtgcggcggtgcaagaagagacaaggccagcacacctggtgtcctgatcgcaaggttattaaaacgataaaacgttggaacgctcatgggtgaaattttgacttttaaacgtttaaacttgtttaaacgtagttttaaacagcatatgaaaaataccaatatatcataatttcagacaataatatgaagttaaatactaaaacagagaggtcagtggcttaccaaaacttcacccatgagctggattgaaccccaaaagtaactaatagactggacccaaaaataactaatggtctaaaatgcataaaacactgcgttttacagtttagaacgccaaaacgctaaaacgtgatttcaacctctaattagagttttgacgtttaaacgtagtttaaacatcgtttaaacgtagttttaatcacactgcctgatcggtagcagcgatggggctggcagtagcgacgtagagcaaacccgctcgcccgtgcctgggttcacacaatgggagagagacggttagagagaaaggattttttttaaaaaaaatacttacatgtgggtgctacatggtgacatggagcttaaatagctaacagagggtgatttccattgaggacgcccttactgatcttgtgggagaaaatccatttaagagttaaagaactggctgtaagtctgcaagtccatgacactggaatttgacatctcaccatgcagtcatccacatcactcctggatctccaaggtttatctctttctgtttcccctaaggagataaggaaaaggcgaagatggaaatagaagaatgccaaaatgttaaccataggcaccgttatatatttgttattgctatttactttgatttatcaccacctctcatgcggcatgcgtgtgggggttatttctgattagtgacataagcgcttacatgtcaaagtcaaactgattaaatgtcagtgccacatcagtggaaaacatcctttgagtggaatcagaaggctaatttggccagtttcagtagttgagggctgttggatgtcagtattatacttcagtggcagtttgagggtgtaaaatgtgctttaccctagagtttaagacaaaattagaaaacatgtttttccagagagtgaaaataagatttcatcgactttcctttcctcaacattttcactttacgtttggaagaactgttgcttcggtttctagccagtatggtaaatatgataggatcgccttacctattatgagttctcctaagaccgtatccagcagtttacccatagtttaccaaaatcattgatttacaatgttctgcactgtagacttcactgttcatagagtgaatatgggtatgaggatgaataagctattgaagatagtctaagtgattagaaaacttctgttgattttgacctttagtggtctgtgcatccttcagttagttgtaaggttgtttcataatgtcacatggaactgcagttaatcaagataaatttgaaaaattataggaacttctagaaagtaccatttttgcaggtaattgtggggaaacacccagtgtcctggaagcctggatcaacaaatagaggtcagtgaagtattattctaatcaccaataaaactgtaccttgctttatcatccaacaaggattaacttatttggttttgcaagaattgggctagagcaatgcccttttattattgaacattatttacaaattaggaagcatccattgtctcatcaataaggtagtagcaatgtagcatgatgcaccttctacatatatgccatatgtacaaattctgtgatctatgtttagtatcaatactgttttgtagtagaaaaggaaggttatgcaagatggtttagatgaaatgttcaaaaatctgtaaaatctggagctatgttactaagaatttctaagcaatttggaatcagcgtatcacttagggggtgtttagtttgttgaatgaaatgctccatcatcatctcactctagttttttgtttggtttgtagcatggaatgaattgatccatcactacatcatccctcttaagttaataattagtagtatgaggaatgaggtaattccattaatttgaggataaactcatatccatcacctcatctaatactcatggtgcaccatctcatctaaaataggttgatccccaactcaaacaccatattatggaagcattcttttatgctttgcatgatgttttccctaggtaaccagcaacattaggctacgtttggaaacaaaataatcccctccagtccatatatgtattggccttttgggaaggattggaggggaaaatagtacattctccactccagtatgtattgggagggaatatattttactcaaacaagccataagatggctgacatttttttgtttgagattagaacatcgacattgttaactccaatccatatgtattgggagtgaataggttttactcagacaagccataagatgactaacatttaagttttcttgagattagggcgtcaacatttcttgtcttatccccattgttcttctgtcctaagtaaatctaccgtagttatgatcactcaaagagaaaaccagttagcatactctaagtaaaccagtgacggacaggttaatattatgctattacaatgctcatattgttcttacgttggatggctccaatttattccgtgttatgtttgctgtcacacaggactaatagcttctcttatggtgatcgatttgtcttggtgctaactgcaacccaccttccaaaagcattcaactgcttgaggttgcaacaaaagctccacgtgatgaaggttggtgctactcagcagtctttccacaggctcaattaaacagttcccggctactattgcagaagggttttgccatgagactcagtgttaccagtcaaaagaatgtaaagatacaagctgcagaagcaatgtggtccaaaaaatagtcgagtattgacgagagcaaaactacatataaagtcatcacagattactgtaaagtgttttttgcattccaaccaaatgatctcaagtccaaaacccaaaggaagcgaaagtcgcaccgtgtgagctctcgaggaagatgaaacagacgtcttagattgggagtcacatgacattgaacggctaaaggattttctgtggaaacccctatgctgcctgctccttgacctttgtggctttggtgattgtgcatcatcggagactgcaagaaaaaaaaagattaaagaagccagcttttcagacgcatataaccacgttgcaggagatggttaggaaagaagacagctgtgcctcaaactaaattcaatctgttcagatccgtgaccttaaatggcatgtagatttttctcaggtgttctttaatcaaatgcaatgctaacctctataaggaacattatctgtttctagaacttttgtttttgtctttgatagatctgattgtatatcgggttattttcctactagttgccgcagaattttgcaatcca

SEQ ID NO: 35332 - DNA, 2501 bp, Zea Mays
tccgagcaggtcctcccatcagcgccgtccgtagcggagcagtgccagtggccgtgccgtgcgtcacgcacaaggcacacggccccccgcccggtcgtgggcagagcacccggcggcagcgatcgaggctttgctcctgcttcggcttcagcccccccaattctttataaaaatccctcgccagcgcttccctcttttgacaaatcggccgcgggggagagagatatatagagccaatttttgcccgatttgcctgtctgctcgggactgagccggtattcctcttcctcgtcgacgagaataaataagctaagccagggccccggggaagaagaagatgagctccgccggaggcatggacgggtctccgccggtcgccgaattccagccgacggtgacgcacggcggccggttcctccggtacaatatcttcggcaacctgttcgagatcacgcgcaagtaccagcctcccgtcatgcccatcggccgcggcgcctacgggatcgtctgctcggtgatgaacttcgagacgagggagatggtggccatcaagaagatcgccaacgccttcgacaaccacatggacgccaagcgcacgctccgggagatcaagctgatgcggcacctcgaccacgagaacatcatcggcatcagggacgtgatcccgccgccgatcccgcgggctttcaacgacgtgtacatcggcatggagttcatggagacggacctccaccagatcatccgctccgggcaggagctgtcggaggagcactgccagtacttcctgtaccagatcctgcgcgggctcaagtacatccactccgccggcgtgatccaccgcgacctcaagcccagcaacctgctgctcagcgccaactgcgacctcaagatctgcgacttcgggctggcgcgcccgtcctccgacagcgacatgatgacggagtacgtggtgacgcggtggtaccgcgcgcccgagctgctgctcaactccaccgactactcggcggccatcgacgtctggtccgtcggctgcatcttcatggagctcatcgaccgccgcccgctcttccccggccgcgaccacatgcaccagatgcgcctcataaccgaggtgattggaacgccgacggacgacgagctcggcttcacccggaacgaggacgcgcggaagtacatgcgccacctcccgcaattcccgcgccggccgttcgcgagcctgttcccccgggtgcagcccctcgcgctggacctcatcgagcgcatgctcaccttcaacccgctgcagaggatcacaggtcagtcagtcggcggctcgcagcgagcctactgcacctagcttgttttttttcgcacgtgttcttttctgttctcgtgccgtgttgacagttgactattacgatttagtaggagcaatacgcagatgctcccacttcttcgtacattttattaaaagaaaaactacactctttgtaatgctgtccgcactggccactctatatgttacgctacatagcaatagggttcaaaaacagctgcagcggcgtactgatggagtgatggttgaagcgctgctgctgttttgacccatcctcggcttcgtagcctcctctacatcgcctttgccgaagtgacgatgacggctatgtgcgtacaaaataaacatgtctcaagatggaaaaaaaacagcaaaggctatagataatcttgaagattagattcctctactggcaggcaggcagctgtccagaccagcggagtttacttcagagaatcaaccaatcaaccccctattggtttcagattagcagactttattttttttttttgggtttttatggttctagattacaaggctagcatatatatgatgtgtagtatgggctgcctgtatagatatacagtgactgtaagagttcacgaatggcaccatggcaggttttgtcctcgcacttctcacagtcaccgggatctgttctgccatgcagttgcggaggcgctggcgcacccgtatctggagcggctacacgacgtcgacgacgagcccgtctgcacggagccgttctcgttcgacttcgagcggcaggctctgacagaagaccagatgaagcagctgatattcaacgaggccatcgagctgaaccccagtttccgatattagagatggatcggatccgtgcacgattcctcgttaatgcacggtgtttgtaaataggcgtaatataagattgaaggctgcatttgtttgtttgtttgttttgatgttcgaaccaaggcaaccatcctgtgtctgtgaggccgtgtaatctgtcgctgcaggtttcaggcgtccctgtaatgactaatgagttgtaccaaacataaaaggttcggatcaaaaggcgatgagttgtaccaactaccaagataaaaaaggtgatgtgatggttaatggtatcattttcaagttatatgagaatttagtgataatttgtattcgtgggccctctttacgtatatcttaa

SEQ ID NO: 35333 - DNA, 1683 bp, Zea Mays
gatcgaatattacgaccttcattctgatagctcataaatgcatgtggaagatgttgctgaacttgtcgagctcattccactgagaggagcattggtggggctgccaggagtgaatggtttgtctaccgaacagaggaagaggctcactatagcagttgagctcgttgccaacccatccatcatattcatggacgaaccaacttcgggactagatgcgacggcagctgcaatcgtgatgaggacagtcagaaacacggtcgatactggacgaactgtcgtctgcacgatccatcagcccagcatcgacatctttgaagcttttgatgagctgttcctgttaaaatggggaggtgaagaaatatacgtcggccccttaggacacaagtcatgccacctaatcaaatacttcgagggtttacaaggcgtgaagaaaatcaaggacggttgcaatcctgcgacatggatgttggaagtgaccaccgtagctcaagaagccattcttgggtgcaactttgctgaagtatacaggaattcatatttataccggaagaacaaaattttggtcagtgaattaagcacacctccgcctggatccaaagacttgtacttcccaacacagtactcacaatccttcatcacacagtgcatggcctgcctatggaagcaacacaagtcatactggagaaacccatcatacactgcaaatagaattttcttcaccgcacttattgccttcgtgtttggaaccatcttcttgagcttaggcaagaaagttggcaagaggcaggacctgtttgacgctttgggatccatgtatgccgcggtccttttgattggagttcagaatggcctaaccgtacagccgatagtagatgttgagagaacggtattctaccgagaaaaggctgctggaatgtactccgctctaccctacgcttttgcacaggttgtaattgagatcccacacatcttcctccagactgttgtgtacggtctcatcatatacaccttgataggcttcgactggacagtccagaagttcttttggtacatgttcttcatgtacttcacgttcatgtacttcacgttctacgggatgatggcagttgccatgacaccgaacagcgacatcgccgccctagcttcaactgcgttctacgcaatatggaatatctttgctggcttcattatcccccgaccaaggataccgatatggtggcgatggtactcgtgggcatgcccagtggcttggacactatatggacttgtggcttcccaatttggagatattacagatgttaagctggaagacggagaaatagtgaaagatttcatcgacagattctttgggtttacccatgaccacttgggctatgcagccactgccgttgttggtttcacggttctcttcagtttcatgtttgccttctccatcaaagtattcaacttccagataagataagaacacatctcaaacggattcagctgtgattactgattacgctcacttttgtaatacaaggatacaataaggtgctgtttggtccgcatatttgtaatatgatgggtaactgataacattaaatcatttttatttaagtttaaccgtaatcggatgtcacactagaaagtgatactggtatactcaaacttattaccgttgctatttaagcatgaatcatt

SEQ ID NO: 35334 - DNA, 2758 bp, Zea Mays
gacctgcggtcctcggccagcggctggttggctgtgccctggttcctcgtcctcctagtcaccacgcaaccagtaaaaacattcccccaatcccgaacccctccgccgccgccgccgccgccgccgccgtggccaaggagcaagaaagggacacggcctatcccttggtcgcggcgccagatctcgccgctgctcgcctctcatccatggaggcgagatcctcgtcgtccgcggccgcagtgccgccgcccctctccataccttcgtccagcgaccagtgcgtctgggctgacgcctcgccgctcctcgccgccgcgtgccgtgatctcgaggatggggaacttgtacatggagaaaactttagtctatttgctgcaatgtctgcattggaaataatggatccaaaaatggattctggaattgagagaagtcgatacaactccattgatgaagcaatagaagatggtgttgccccaatcccacttagcttggacaggacacttgatgttcaacgctctattgatgtcatggatcatcttttctcatgcaacatggcacaaggggcacactctagctcagactgtatttacatgtatctaccttatgagaatggaaagaacttcatcgcatgctgtactaaatagcttttgcaggattttgcgtgctacttgtaatgctgtcatttctgctgtttctactgcccgaactcatgaggaagaggatctctttactatgtcctttggtctgcctttgagagatgaaggtgatgataagtgcctgtcaattctaaactcagtcgaagagataatatctcgtcaattacgtgcatgtaaagcccaggcgttgtccaagaaaaaaacactagaaggtcttgaatcccttcaagataatcctgatctggaggaggattactgcagagctctgttatgcagattacgttttcgtaagcatttctaccatgttattatgtgcatgaggaaacctcatggaagaggattggagttggcccggaagcatgttgcttcatgcttgacagagcttaatttgatgcataagtctcggaagtttctcaagtcccagtccagcactatggtacagcaaagtgatggaaactgcaccactgcatctggttgtcagcctgttggctttgatgttagcttaaacagcagacttttgagtcccacaccgccacgtgcagtaaaagttcttagctggagcaatgcaatcaggtactttgagaggcttctgcatgatcttgatgtcatctgcgctttgtcgctcaatccggtgcttgataatgtgcttcactttattgtccagttccaaaaaacagtgccagatttggttcctagagcatttcttcagactttgttggtccaagatggtaaactttatggggaatacttcttttctgatgtcatttcaagggctttatcactaccggacattataggagataaggagtttcagatgaatgagtttgtggtgcagctaggtcagttggttatcaacctgataaaaattctttgtacaaacactgcatggcaacggcgcaagcttgggaagagtttgcaggattggagtactatttccatacagttggagcttgcactgaaaagagagtttggtgaaactagaaatgtcttgcagaatgagaatatgtgcatgagagtatcaaagcaacttcttatttggactcaggaacatgcatactgggttgcttttcggtttctcacattgggttttgaacttgacctatattctccgggcgaatacagtatggtgtactggtacatgtatgtggtgctcacaaagctaatagaaaagatgcagttacgagttctggccagtagtgaaacctcacgaagaaaggggaaaaagaagaaggatcatttgaaggattcagctcgggatatggcattttcgtcgtcttgtttattgcctcaatgctatcttttgctatcagagggactctcgatgatgctagctgtcctcagaaacgaaagtaggtcattccaattaccaagtatcttcaacactgaacaagagagattcatgcagcactttgatcttcttctgaaagctcgagtccctgagcacatttccttctacagtttcaaggaatcatcttcccgggcaggcatgtcggatttggtgaagtacaacttcttcaaggaaattcagaagatagtgccctcactacggggcagctttgcaagtgaaccagaaaaactcgctgaggtccgtcggatagagcaggtggctgagcacaacaggatagccctaaatattatcagccaagttggagctggcgatccgtctctgagggtctcgtttgagtttacacaccaccctcacttcgcagtggcagttgtgaagagatcatgattcaagtttggcatcgccaattctttacccttctcaatcttgatagtgatagcggatgattcttgttcacgtgttgctcacgtgtttattggttctccagagcgcaagcaacaccatgtgttttaggctgtacacaaacaccattagcaattttgtaggcaagataagaaaaaaaaaacatatgctggggaaaaaagtcctttcccctggcattattttgtaagcaaatttttttagctcactttgttatgcgaaacatgattatacagatgtgtaatttgagtcgtaattcgttactggtatgacaaggacgacaattttctcttgtttggcattttctattttgcggtgataactgactagtattttc

SEQ ID NO: 35335 - DNA, 1368 bp, Zea Mays
aacaatgtttttttcccaaccacttgccacttgtgatacgctgacctctgagcagcctcgatctggctcgttcaaacttgaccgaacggcagccattacctggtggcgcctcctccttgccggtcggagccggctcgccggcgggtggcgacgctcccgccgctgtcacagggctgctcgcaccacgtgcactcctctccaggttagcaagcttgatcccgtgcgcctgcttgggtgtctgaccgcaccggcgccgagatggtagccgctgcggcggcggtgcggccggtgtccttccgccgcctcggtgttctcctccgcgctcctttgccctgcggcctgacaacctcccgcgtcgccgcacctttcccccgccgcacagattccatgaagatttgtcaactccaattaacagctacacgattttcaaaacagaataattctggcgaggatgacgagctcctttctgaactaaaagataaggttgcatacaaagttatattcctctatgctaataatcttggcacaaaaaattacgatgatgtttactacagtgggatgcaatggagaacaagtcctctcttgccttgtatggtgctggagcaatcctcgctgtctggatatccttggtcgtagtgagatctctcgactctgtcccattgctcccaggcatattggagctagtcgggctcagctactctggatggtttgtgtaccgatacctgctttttcaggaaaaccggaaagaattggcgggtgttatcgatgatataaagagaaggattgttggcgatgatgaatagctgtttcctggtttgtaattctatttatctcgccctgtttggttctgaggaattgaaaaataatccaatggtgaagtgagaaagcactttctagctattggttttaattcatggggtccaaacaggctcttgatagaatcttgtaggtttctgttcttaattaatgccagtcagagctacgaggtattggcctttccacatctcttgtgccgtctgcagttgaacatgttatttgcagaatctttttatttagcatggtctagaaaaattcttgtatcatccgtatattccgctgaggtatggccttccacaccaagatgtacctccagtttagcatggtctacaaaaaaaaatattttattctctgcatatgccgctccagttcctctcaaattccctgtgctgccctagccagaagttagccgtcagagcatataattgtaataagatataaaatcatctgaaacataaccggtagcacttttgtcctcacctgctcaaccgagcacctgagtttcggcttttttttaagtaagaaaaaagggaaaatctaaatcgattaaac

SEQ ID NO: 35336 - DNA, 1819 bp, Zea Mays
gacattattgccccctcttcccttcccaacccaacccattgcatttgcaagcccttttacattgcagagcgccagagcctcgctcgctctcggaacagagctaggcagctaacagacgaagaagaagcaagccaagcagaattgagagagaggcgaggacgtggcgacgacggcagccgcgatggcgacgacgacggacctggggttcgaggcgacggagctccgcctgggcctgcccggcgggggaggtggaggggagccggcgctgggcggcgaggggaggagctcttcctccgcctccggcaagaggggcttcgccgagaccatcgacctgaagctgaagctggagccagcggccgtcgtggaggcggaggaggaggaggaggaccacggcgttgctgttgcccttgagaaggaggaggaggccgggaagatgaagcggtccccgagccagagcagcgtcgccgccgccgccgccgccgtgctggctgaccccgccgagaagccgcgcgccgccaaggctcaggtggtgggatggccaccggtccggtcgttccggaagaacatcatgtccgtgcagtccgacaagggcgccgccgccgccaacggcgacaagtcctcgccggcggcaggcggcggtgccgcgttcgtgaaggtgagcttggacggcgcgccctacctgcgcaaagtggacctcaagatgtacaggagctaccagcagctgtccaaggcgctcgagaacatgttcagctccttcaccatcggttcaggaagctgtgggtctcaagggatgaacggcatgaacgagagcaagctggtggatctgctcaacggctccgagtacgtgccgacctacgaggacaaggacggggactggatgctcgtcggcgatgtgccgtgggagtgagcactgcatgcatgcgcttcttcctgcactatactccttattatattattgcctaatcggaaaataataataatttccatttcattttcaggatgttcgtcgaatcatgcaagcgccttcggatcatgaaaggatcagaagccattggcctggcgccaagggccatggagaaatgcaagaacagaagctgaggagaagacggacggacggaagcttgcatctcagcaccaccaggggtggatggatgcaagaagaacaaatctccatggcttttgcagctctgctcgtctctgtatcatactcgtcgtccctgcccttcaggcctctgtatctccctgatcaatgaagtcgttttggtgtgtcaactgttctctccgtgcccagcttgtcagtgaaagagtcagtcagtgtccatcaagtctcatcttgtcctatacagaagagagaagccatgcatgaacatgtacctgtcctataacaatgtctttttttgctacctgtttttttttctctctctctctttttttggcacaagatgcaaaggcaccctgctcctgatcaaagggccttttgcatcataagctgtttgattataattaccatggtgtgtcagtggaacaaataactgttgcaaggtgttaaaaaaaagttgtattgtaatatgatcacctctcttccttgttgttttcattgtctttggtattagctgttccatggaacaggattatatatataagctcagtgatgaaatatactgagctgctctgttgtgtgttgggttgcatagacgttgcactgctgtgcatacctgtctctgtgttttttttaacatgtggagccaagccaacttggagacagccagacagaaatacaggatccttcagaaaaaaaaaaaaacatggagacagaagc

SEQ ID NO: 35337 - DNA, 1221 bp, Zea Mays
atgtgatcaagttgctggagcgcatgcagattcgacaagaggtatacgaaatcttgagtgagctgtacgtccatttggaagtagcaaagaagcaactcctgatgatgcaactgtaaggacaatctttcttatagctctaagcagttcgaatatattggttcctgattattgtgtctcgtcatggatttattgcgttcattgaaccagaaaattgcatcgcagtgtctacatttgtattctagtttaccaaggtatgatctgtcagtgtatgattctttcagttgctggatatactcggatgggaaatcaaccattccattatgggagttcaaaaatctttgtatgcagatctttttgttggagggttcacagtttttagacatcttcctctttctaatcctttcaccgcgtcttattttactctcttctccaaaaaagttactgctctaagagaggtgttttgaaatagaagagagggtacatatttgagcatatgtagagcccaggtacctcgctctacaacatcaaggattatcttgtcattcataagagttaaaggccctttcttcagtctttcactattaagacacaatttcatgttgcaaagatcttcaatggatgatattgatgacgatatataagggatatcactcttgagccacataagcttgatgaagagattgttgaatctaatcttgagcttgaagcagactttgtacaatttaaatatgatgatcgatcacaaaaggtacttcattctgttgccacaaacatgtttagcgacaaggagatgtgctgctaagtctgtttttacatggaagatgggaaatggacataaacagtgaacatgaagaagggtgtgctagatggaaaggaaaccggtcaagctgattgaataagaagaagtctcttaactactataaatccatccatgaaatggagaagattaatgctaagccacttcaagaaaaaaggttgggtctagtcgttgttgtctctatactggcaaagggaatgcggagatacatttcgagaagaaaaaggcaatgatatggaggtgttttgtctttcattgataaaaaattagaaatgagcaggtgatgaatgtcacatgaatatatttagctatttcaaatggaaaccaactttgttattgtactggcttttgttcataataaaaacacagaaggcaatggaaaatctacatgcaaatgttttgct

SEQ ID NO: 35338 - DNA, 3948 bp, Zea Mays
atggagcagaggttgggggcaacgtatcagtggtggtcatggagtcacagtaagagctgtgaatcggtggagcggaaggggcgggagtggctggatgaggcaggacttgcctctggattacagcttgtattggatatgttggtgactggtttttgtggagtgactgttgctgagaagagaccaatgatgcaatctcgtgatgttgataaatatttgaacaaagctgacaacattaaccatgtgctcatgaactctggcgacatttctaaaattggtggtcactgcctgcatggtacacatggtttggggactcggctagattctgatgctcagagctcatcccctggagaaaatatgaacaacaaaatcagaaggcccatcgaaatatgtacctttgatgctcaaggtcggtgcaagaaaggaaagagttgcatctctcttcatgaaagggagggatttggttctgcaaagactggtctgctcgcaccagctggttctggaaatcatagaggtatgagcttcctaactagggcaatctgtgagcaacaacttgctataacagagccaacttcttattgctccctgctgtgcataggttctgaaggaggttctcaagtacaacatatatctgacttgaaagtgcatcagttcaaggattcagagggtttgtcaaaagatgaaatgtgtcggaatcttatttatgcatttggcaaagataatcagatgtcggtacatcttgctggtaaacacagctctcccattcctggggtttcacaaaggatgcccgtcagcattggtcattcattggctcagaatccattagttcatgagaagaacaacaaacgtttcatgggacaccatattgatgtggctgctgaaaactatttggatgctggaggtacctatccaagattagatggaggtatttttcagtttgacatagacaaggaaagcagtgttagtgattcccatgtctcaagaacttacctttcagattatccatataaatcatttggcttgtctatttcatctgatcctctccagctcagtgagaagctgtcagcatatggtggagtgacaaatactattcctaacatacatcagaaagaacatcactcatgccatgcttcatacagctcacatagcttaacaggatccagaaatccttgctttgctacctctgaacatactttcggtagcccatctcttctagcaacttctcatctgggaatacagtcccatcatctgttcacatctgatattgagaaggctgatctccatagatgccttgatgttggaaagggctatggtacttctagttctggacccgcattgcttgtgagcagtaaacctgaaccttctatgacgccagttgggccccactctccaattaagaatgaggtctgggaaacatcagtgccttttgtaccttcttttagttttcctgatagcacaacagcttcagaaagtcaatatgatccatttgttgactatgttgaacctcctaaagttgggaatacaaataatctcaagccctccactatatcctgcaacattacaagtcagcatacagatcagtacgcagttactgataaatccttgaattgcaatgacaaattgaccaggaatataactgccaaaggatcaaatgaacctgcttactttattgctcctgatagaggatgcagctctagcctggatgatactatcaaggtgaaagcttgtgacagaaaaaaggatgcagttgattacaatgagaaaacaagggatttccgttttcatttggcagaacatataaaggagttggtcaaaccaatatggaaaaaaggtaatctgagtaaagatgctcataaactggtagtgagaaaatctgtcgagaaggttgtggactccattgagccaaatcaagtaccaactactgaagagttgattacgaagtacatagccacatgtggaccaaagatagaaaaacttgtgaaggcatatgttgataggcacagtacatgtcatccaaccatcaaatacagcagctctgagatgggagcttgagcttaatgttcatacaaacatgtatgtccatgacttcttgaggcaagtagtcagcgaagttccagatattggtgcatctgatgttattgctgatgataagcttggcaaaggacgtatatctatcctgtagttgataaggttcttacatgtcaaaataatcttctacgaagtgttaataaatgctgaattgtcatcaggaaagctggagatggaagcgaggaggaattaaagaggacaataaacaaagcagaaaaccatacaggcaatgacaggttgtgcgaggggttgtgtacttgtgtgagaggctgccgcggacgtgtggaacttagcgggtgttgtcatagttcataaacaattcgtggagaaccaatctagcaagctagtagcctaaaagtggagatagccgatgaggtcttaagatgcaactgaagcaaaagaggctactacatcaaggagcagttcaaccactcatttgatggcatagtccatttgatgaggtcttagatgcaactgaacccactccaaggggtttgctcaggaacattgacttgaatttagatccaactgatgaagaagatgagattacagtgccaccccaagcccagtcgatccagcgactagttccgttgcagccactgcgggaccatctgttgcactttctgggtgcttgggaactgcctgacatgaacaatatggagatgggccctgtccagtttgctttgtaaaaaaaatacagattggagagaatgggtattatgacaatcaagactagctctgcccttatagctttcagagtggataagtaggatagcaggacagttgtaggttcatcttaactctttagagattctcatgtatcatgtgtatcatagccgccaaagctgcagatgcagcttataatgtgccagaggtttaaggttggctggctagttgactgtaacgttccgaagctagattcgctcaacacgtagtgctttggcatgtagtaccagttgtacttgtacactcctgtctccagttgctctccagtttaatgttaattatatgcttatgcttcattggatagttgaggaagatcttgctggatgcatgtatggcaaataaaaagcaagaaagagtttcagattacttatcacagctcattccatgacaggagtcaatattttcatatatgatagacctgcgaaaagattgcgagccttcagggataacgcgtcatcatactgggagatgatacctttatttcctgaaacatggttatccaagcacaaggaaaaagttccagcagtgattgcgactcgccagctcaaggtgactgcggaatccaagatgggatcgatgcttctacagctgcttgaagttgttccacaccgcccccaccttggccttgcacagcttctttccgctgccggcatccacctcgacagtaaaatgcatggtcctggcatcacgttctgcacatatattatacatgggatgcatcagtggtggctccaacgatatcaactaggtttatgcagagtgacatgtctttcggtcttgctgttgtgctccgtgaccgtgactgaagcacgcgagctcaatggcctcgaggtcgctctcacacccagtgggtgcgttttggacgtcgtccaccatcccacaggccgttctcgtctcggccatggctgctggagcctgtggagagggagaaaagctgtgcagagggagaaagaggaagctgcggcgagacgagacagacgacgacagacactcctgagtcctgcttgtagtagtagagcaccaacaacgggctattgcataccatcaatgggcaggtctcctaatctagaagtgaatttactttctgccaattcttccattatctgctattgcatagctttttcattacttcacttc

SEQ ID NO: 35339 - DNA, 3588 bp, Zea Mays
ccttccttccgtcgcggcccgcctccttcactacaaccaggacaggccaacgcggaagcccgtcctccccacccccttccagatttgcagctcgcacctcgcgaatccccgaattccccactgcctcgccacgccgcgcgctgaccgcggcacccggagccccacctgctattcccgaggcggaggacccatcctgccttggcgctcgttcctccctcgtgatcggcgccgcgggcgaatcgcgctgcccggtgggggggaatctagggttccggccatgccggcctagtcgtagggcgggggtaccggcctgcgtcgccggcgcgcgtggagatctcggtgcctccgaaccctggcgggggccggggaggccgcagctgctgaggcatggacgtggactcgcgcatgacgacggagtccgactccgactccgacgcggcggccgcggccgcccgcgggggcaacgccggaggttccgggtccgggagcgagacctcctcgtcgtccgcgccctcgacgcctgggacacccgggacgcccgcggcggccccgaatccggcgccggtcggcgctgtgggtccgaggccagcacctgggtacacggccgtgaacgcggtgatcgagaagaaggaggacgggccagggtgccggtgcgggcacactcttaccgcggtgccggctgtcggggaggagggcgcgcccgggtacatcggaccgcggctgatcctgtttggtggggccacggcgctcgaaggaaactctgccacgccgccctcttcggccgggagcgcggggatccgtcttgctggtgccacagcagatgtccattgctacgatgtgtcattgaacaagtggagcaggcttaccccacttggcgagcctccttcaccaagagctgcacatgtggcaactgcggttggaaccatggtggttattcagggtggaattggtcctgctggtttatctgcagaggatcttcatgttctagaccttacacagcaacgaccacgatggcacagagtggtggttcaaggacctggtccaggtccacgatacggtcatgtgatggccttggttgggcagagatttttgttgactattggtggaaatgacgggaagcggcctctggcggatgtatgggcccttgatactgcagctaagccatatgaatggaggaaacttgaaccagaaggtgaaggaccacccccatgcatgtatgccactgcaagtgcacgctcggatggacttctcttactttgtggtgggagggatgcgaatagcgtgcccttatcaagtgcatatggtcttgcgaaacatagagatgggcgctgggagtgggcaattgcccccggtgtctctccatcacccagataccaacatgcagctgtttttgtgaatgcacgtcttcatgtgtccggaggtgctcttggaggtgggcggatggtggaagactcctcaagtgttgcagtactggacactgctgctggagtctggtgtgacacaaaatctgttgttacaactcctaggacaggaagatttagtgcagatgcagcagggggtgatgctgctgttgagcttacacgacggtgcaggcatgcagcagctgctgttaatgatctcatattcatttatggaggtttacggggcggggtacttctggatgatcttcttgtggccgaggatcttgctgctgctgaaacaacaaatgctgctaatcatgcagcagcaaatgcagctgccacaaatttgcaagcaggacgaacacctgggaagtatgcgtataatgaacaaacaagacaaacaattacagaatcaggtcctgatggggctgtagttcttgggactccagttgcacctcctgtaaatggggacatgtatactgatatcagtcctgagaatgcggtgctgcaaggacagaggagattaagcaaaggcgtggattacttggttgaagcatcagcagcagaggcggaggcaatcagtgctacattagctgctgtgaaggccaggcaggttaatggtgagatggagcagttgccagacaaggagcagtctccagactccacatcaactagcaaacattcaagcctcatcaaactggacagtgctctttctaacaacttggcagctccacctggggttcggttgcaccatagagccgtcgtggtcgctgcggaaactggaggtgctctaggtggcatggtcaggcagctttcaattgaccagtttgaaaatgaagggagaagagtcagctatggcaccccagagaacgcaactgcagcaaggaagttgctagatagacaaatgtctattaatagtgttcctaaaaaggtaattgcatctctgttgaaacctcgtggctggaagccccctgtccggaggcagttcttattggactgcaatgaaattgcagatctttgtgacagtgccgagagaatattttcaagcgaaccaagtgttttgcagcttaaagcacctgttaaaatatttggagatttacacggacaatttggagatctgatgaggttattcgatgaatatggtgctccttcgactgctggtgacattgcttacattgattatctattcttgggggattatgtagatcgtggccagcatagtttagaaactatcactcttcttctcgcattgaaggttgaatatcctcaaaatgtacacttgattcgaggaaatcatgaagctgcagatatcaatgctttgtttggtttccgaatagagtgcatagaacgaatgggtgagagagatggtatctggacatggcatcggatgaataggctatttaattggcttcctttggctgcgcttatagaaaagaaaatcgtttgtatgcatggtggcatcggtcggtcaatcaaccatgttgagcaaattgagaatcttcaaaggccaattacaatggaagctggctcggttgtcctcatggatcttctgtggtctgatccaacagagaacgacagtgttgaaggactgaggcccaatgcccggggtcctggtcttgttacatttgggcctgatcgggttatggagttctgcaacaacaatgatcttcagttaattgtacgagcacatgagtgtgtgatggatggatttgagcgctttgctcaaggtactgcaaataatgccggagcgatcttggttttgggtagagatcttgtggttgtgccaaaactaatccatcctttgccccctgcaattacgtcacgtgaggcgtcgccggatcatattgaggacacatggatgcaggagctaaatgctaacagaccaccaactccgaccagggggcgtccccaagcagtagctaatgacaagggttctcttgcctggatatagtagattgaccacacattggttggtatgattcatatgaagcctgagtggtctggatcttgttattttcatttgtgttcgggagaggggctggtcgacagccgtaccgaaacgaaagattgatgtacaggggagcataaagactataaagttggtagaagggagcttaatctattttcttctctctccaattcgtttcattgaacacgagtagcaaacgaatcaagctgattcatcaga

SEQ ID NO: 35340 - DNA, 2166 bp, Zea Mays
gcctgtcggccactgttcaaacagaaaagtggtgcccatgtccatatacactgacgaatcttggatatttttgcttatacaactaacaagctggtttatttagaggttcccactggggaaaagcttgcccagtcacttcattcaaaggggataccatatgtggtatattggaggaatctattttcatcttatacagcatctcattttcgtcatgcgttaatgtcagtcattcagagttcctgcagccatacatgggatgcatttcaacttgcacatgcctccttccgactatactgtgtaagaaataatcatgtacaaagtgttaagcttggcccctgcctacttggggatgctccaaaaacaaatgtcatccctgctggggatgaagtgaatgaggaacaaggttgttctgaaggttttccagatataagaatatatgatgaagatgtgagcatgaaatttcttctctgtggagtaccatgcaccctggatgcatgtttgttgggggcactagaagatggtttgaatgcgctcttgaatatcgagattcgtgcgagtaaacttcagaaccgagccagtgctcatccacctcttcaagctgaagatcttccacatggagttgttacaatgcgctgcgatatcacaacttgcagttctgcacatgtgtcgtttcttgtttcatgcagtgcccaaacttgttttgatgatcagcttctagggagccgtatcaagaatgaaattattgagaagaggcagttagttcgtgctctattgaataatgaggataacaagccatcttcatatgagcctttgccttccatgtgcgtggcttgcggagcttctacttttgaagtctggataaccatgccaaaatgggcagcacaggttttgaaacatcttgcgccagaaatctcctacagaagcttggttgcacttggaattgcttgggtaaatggtacaccagtgtcctcatttgataggcaggatgcagaccggcttcttttcttttgctctaaccagtgcggagatcaagctattcaaaatggctcatatgctcatgtatccagctggtcagcaccccttaccaaggatagaaccactggaagtctcgagtcaaaacagatgtcatttggtgcaaaaggagttgtaggggataatacgatctccctatcatcattgaaaccaaggctaaagcctgcaacaatgagaccccttcctcactctcgcaagcaacaaatgcatccctttatggggtttcctcagtccatcattcacgatgctagtcaagttaagcctagcttgccagcccctcctgtgaagcacaacgcagtacctgttaccgcagtgacaccgagaaaatcatcatctgggtcaccatcatcctggtcacgtgttcagctaccaatcccattgaatcctctgccaataaagaaacatgagtgcaatcggttgcctatccacagttgctctgaagaagacttcttgaaagatgtcatgcagtttctacttcagaggggccacatccgacttgtacctcagggaggactggcagaatttcctgacgcagtgttaaattcaaagcgtcttgatttatataacttatacaaagaggtggtataccgaggtggcttttatgtaggcaatggcataaattggaaaggtcaaatcttttcaaagatgcacaaccatacagttacaaacaaaatgacgggtgttgggaacaccctaaaaaggcattatgagacgtacttgcttgaatatgaacttgcacatgacgatattgatggggaatgttgcttgatttgccacagtggtgctctgggtgactgggtgaactgtggattatgtggagaatgggcccaccttggctgcgatagacggaaagggctgtctactttcaaggactactcgaaggcggatgggatggaatacatatgtccccagtgtagccttgcgaaatacaaaccgccgttgcctgcaccatgaaatatgttgattaacttctgttactttcttaagggtgatggtttggatagaaattagtggctaaggatgtgtagtgttgacctgtactattgaatatgatcctgtacgatttgtacaatttttataaaatttctgatttccgaagggtgtctggtctgtttgtaagaccttagtttttaa

SEQ ID NO: 35341 - DNA, 1103 bp, Zea Mays
tttcttgcagtcgacggttagaaagttgaattgtggtagtcgttggaactctcatccaacccaagttcaaagcacgacacctcttaagatgaagccagggtggagtcccctgcattgtgaaaactgacacctcttcaatgggactttcaagatcaaacttcaaatcactgaaaactgactatagttgtagatcatgggcgaaggtcctcagtggtgtgtgtagtcaagactggacctagttttactgaagctgctatgggacgcctagcacaagggactaaagttttagcagaagggggctatgaaaaaatatttaagcagaccttcgaagttcttccagatgagcagctgaaaatatgctttgcgtgctatctctcaacatcggcgggtcctgtcatgggagtcttgtatatttctacagcaaagattgctttctgcagtgacaatcctctgtcatacaaagctggaaataaaactgaatggagttactacaaggtggtcattcctcttcaccagctaagagcagctaatccttcagtaagcaaattaagtcccgcggagaagtacattcaggtcgtatccattgaaggccacgagttctggttcatgggttttctaatgtacgacaaggctgcaaccagtcttcaagaagccttggctagcgcacgtgagttgcaaccgtgaagacaccggggtaaatggtgtttcttccggttacatcagtttccacatcttgagttcaggctgggtcgcaaggattccttagcttctgagtgtctcctgtttcagatccttttagctgaagcctttgacacggtacactcactagcttgcatacgcgtcagaaatgtctgttgttcctgtcaatgttgtaatcatgagatgtatgtggagaaagaatgcatgtcaaacatttaaatgtggcagaactaatgtgggaacttgattatcaagggcctagaaaagttagggggaccagaaggtcgaggagaaacaagcggttggtgatgcgttatatttttgtcgattgacaaagggagccaggatttttaaatgtttctctgcattcacaccattatatttatatgggagctttggtggcg

SEQ ID NO: 35342 - DNA, 2460 bp, Zea Mays
agttccgcgagctcgggatctctgctccccatcccgcgcgtccatcttggtcaagaaaccctaaccagcacatccatcccacaggcctgccgacggcgcgtcgcccctaaaccctagaccccctgcggaaatctctagagcctgggccagctctgtgcgccagctcttgctccatctctccgcggcggcagcgcaacaaccgcacccatgaaagtcgccatcctcaccccccgcgagcctgccccatcctgcttagtgtcgtcccccgccaccgcgcagccgcaacccatctggataaggatgcatccgcttctcccatagccgccactacccctgcctgccctcggctacgaacacgaagatcccctggatggaggtggagctctcagaggcttatgatctagaactctatctcatactacggattccacagggtgaggagagatacgagcagggtcccaccggcgatgcgggtcccatcttcggcattgggagcaatccgcctactcggacacgaaggttctctgaggcggtgtagctatagatcatgcgggcaacggggaaggacgatagctacgcagcccacatcacgaaggcatataagtgggagttcgccgaaagggaaggtttgcagctggttgtgctgaatccagggactactctgggtccatttttcatgtcatcagtcaataccagcctgaataatctgttgcaacacctaagaggttgaaaattaaccaggccaacggcttgagtcggaccctgtcaacacagggtggtcgatgttagagacatggcacaatctcgatcgtgacgtatgagaacccatctacacagggttgtgcttggcgtccatggaatgtttgtttgacttcaccgatagaattgctgatatgtaccatgatttcccagttcatagaatcaactatcaaagaggacaaacaggttggttgatgagagcaaaggagccctccaagaagttgatcgatctgggcgtttgtttccttccgtttgatgtgaccatcagggagaccgtcgattgcttcagaagcaaagggctcatctagccatgtgaacatttccagatgtaccagggttactattgcttactagaatgaggcgagagctgcttagctcctttgacattccttctacttagtggcaattggtttggttacttaaacctatgctccatatgatccacgctgattgaattttggtttgttaatatgttttgggcaagcagtgctatgagatggagatgatggttaggcatgatctttctataggttaaaagaacagattatccaacagctgatggaacctgcattagagatattatgttgatgtcacagatttagttgatgctcatgtgaaagcgctcaacaaggcagacactagaaaagttttaatcaatactttacttaatttacatggtaacaagatagagaggcccgcaaatagttaatctgggacaacatatctctgtactggccatagaggacaacaaaaaaaatcaaaagttgaagaatcaccaacggtgcctcctttgcaccctccagctcaagaacctgggcccgagccagttcaacaagtcatgcccacagctgaagtgctgaaccaacagatttactgggaatcaatgaatcagcccgaggcacatctgaaatagatcaaaacaaggtagtcgccttggtcgtggttccacatgataatccgccaaaagcacttgcttctaccagtcctggaagcgtggcgactagctggagcaaatcagattctgtgcgatgaaaagcaagtgaaagaggctattgttcaggtactaatttgccatagtgttggtctatgactgaatggtacaaaatacatgcaatgaatggatgatactttccagttaaatcatgtaattggaatacagtggtgccgtcagcggtgcggattgggggcttctagagaaagggtctagcgtcgtgccctgcttgacgaacagtgtgttgatatgtgccatcatcgcactgggaacgaacgtgatggctagcacggggagcatcttgagcatctgctttgtctccaccactcaccatgctctgagcctgtgttggtatgcagacttttccctttgtttcagaagaagatgcagttgcattgcacattgttggaacccacgatcaccacaaaattgagggaatatgtcattactcatttgcataactcattagtcattaccttgtcaaggtttatgctttccatcacgaacggttggagttgcaacataacgatactttggtataccaaataaagttactctgttcaccaaatgtagggttagtttttttgttgtgctaaagactgaacataatttgggtgtgttaatattttatttattgtctgcacatggtttgcgttcttatgatgatggctcatggatcctgtaaaatacgtgttaggattgggagatcc

SEQ ID NO: 35343 - DNA, 6150 bp, Zea Mays
ctcgcagtgtgaagcacgtataccgcatgaaagccggcccccaaatcacgagctcctccctctaacctccggcctcttcctgcgtcaccaccgcgcaggcgcagccatccccatccttcctcaaattcccaaccccacccaagccagatctcaccccctccccgatcgctacacctccgatgttcccgcctctttcgcctatcccttcatagccgcgtcgccaccggcgccgctgcgaggcggccgctgcctttctccgctccctttgtatggaaacgcgcagccgcaagcgggcggaggcctcttcttcttccgcgacctcctcctcccgctcctccaagcgctcgcgacacaaccctaaccctaatcctcccgccggcccctcccccgcccccaaactcgtcccgttgccaccacgcacccgccgctcgaccgctgtcaatcccctccccccgatggattcctcgggcgacaacaactccaatcccgtcccgccgccgcggcgccgcggtcgcccctccaacacagataagggtaaggagcagcagcagccggagccgtctcacagctcccgagtgcgcgaggccgagcgcctgctgggtctaggtttcgagggcattgatgatgatgaagattcagggttcggggctggggccatcccccacagcctgacttccgcgagcaccgcgctccagggtcttcttaggaagcttggtgctggcctggacgatatactgccatcgtcggcactgtcagctgcagctgcagccgcgtcatcgtcatcagcatccgggcagctgagtgggaggttgaagaatattcttgcaggtttgcgtgctgatggggaggatggaaggcaggtcgaggcgttaacacaactctgtgagatgctgtccattggcacagaagagtctcttggggcattctcggtggactcatttgtacctgtcctggtcggtctgctcaatcatgagagcaacccagacatcatgttgctcgcagcacgagccctaactcacctctgtgatgtgctgccgtcttcttgttctgcagttgtgcattatggtgctgtgccttgcttttgtgcccggcttctcaccattgaatacatggacttggcggagcagtcattgcaagctcttaaaaaaatatccctggagcatccaactgcgtgcttgcgagctggtgcactaatggcagtcctatcataccttgactttttctccacaggtgttcagagagttgcattatctacagctgctaatatgtgtaggaaacttccttctgatgcatcagattttgtactggagcatgcttctgtctgccttacccgtattgcggaatctttttcaccatttccagaaaaattggatgagttgtgcagtcatggattggttgcacaagctgctagcttagtgtctgttagcaactcagcaggacaggcatccttgagtacatcaacatatacgggtgtgattcgtcttctctcaatatgcgcaagtggatcacctctggcagctaaaacacttctccttcttggaattagtggcatacttaaagatatcctttcaggctctgggttggttgctggcacgactgtgtcccctgctttaacaagaccagctgatcagatgaatgagattgtgaagcttgcagatgagttacttccttctctgcctgttgggaccatttctttaccagtgtattctggtgttcacatgaaaggttgttctgtaaagaaatccacttctagtaagcagggtgaacatggttcaacagcaaatgaactatcaggtcgggagaagttattgcgtgatcagcctgaacttctgcagcaatttggcatggacctgttacctaccatgacacaggtgtatggctctagtgtaagtggaccaatacggcacaggtgcttatctgtcattgggaaattaatgtactatagctcagctgagatgatccagtctctccttagcacaacaaacatttccagctttttggctggcattttagcttggaaagatccacaagtgttgatccctgctcttcagatagcagaagttttaatggaaaaacttccagagatttttttgaagatgtttgtgagggaaggcgttgttcatgctgttgagtcacttatatgcccagaattatctggtcaggtgactcctcatgtggattccattacatcttcacataataggcgcaaccgccgtagaaataatgctgtgaacactggaaataacttgcctgatggaccaaaaggttccaattctatgattgccaattcacccccaagcatggctgaagttccaaataatagtcttcgtgctttagttagtaatcatgcaaagtcatttaaggataaatatttcccttccgagcctggctcaagtgacattgcagttaccgatgaccttcttaaactgagggcactttgtgcaaaactgaatacaacagctgacactatcaaaacaaaagctaaaggaaaatcaaaggtagtgtctgacaatagttttgatgtcttgtgcaatattgaggagcaattggatgatataatagctgaaatgttgtctgagcttagcaagggtgatggtgtttcgacatttgagttcatcggaagtggagttgttacggctttgctaacctatctgtcatgtggaacatttgggagggaaaaggtgtctgaggcaaacataccaaatttgcgtcatcaggcagtcagacgatacaaaacatttatatcttttgcacttccaaatgataaagatgggaataaaactcctatggcattcctagtccataaactgcaaagtgccctatcttcgttggaacgtttcccagttgtgctcagccattctggaagggcatcgactttgggaggatcccgcctgacaacaggtttaggatctctgtcgcagcccatcaaattgcgtctttgtcgagcgcctggtgagaagtcacttaaggatttttcgtccaatgttgttcttattgactcattagctagtctggcagctgttgaagattttctttggcctagagtccagcgcactgaaccagtattgaagcctccaatgtcatctgcaaataattctggatctggagcagcaagctccacagcttgtgcgccttcaattccatcagaaactcaatctgtccgtcgcacatcgttaagatcaaagtcatcagctgccaccagtggtgcaattaagaaggattatcaggagggaagcataaacacctcaaagggaaaaggaaaagctgttcttaaattgagtttggatgaacctaaaggcccacatactaggaatgctgcgcgcagaaaagctacttcagagaaagatgttgaactgaagccatcacatggtcacatcacttcagaggatgaagatcttgatgcttctcctgttgagattgatgatgctttaattcttgatgatgatgacgaggatgtcccagatgatgaagatgatgatcatgaggcggttctccgaggttctcttccttcctgtgttcctgagagagtgcatgatgtgaaattaggagatgctgatgattctagtgttgcctcattggcaaatgataaccaggcacagccctcatctggttctagtacaaaaaatacttctagcaggggattggacactgctgaatttagaagtccagccacatttggttcacgaggtgcaatgtcgtttgctgcagctgcaatggctggattaactccagtaggtggtcgtggaattagaggtagccgagatcggaatggccttccattgggtgctcgtgcaactgagcattacaacaaattgatatttacagctgctgggaagcagctgaacaaacatttgactgtatatcaagctgttcaaagacaagtagttcatgccgaggatgatgaagatcgattcggtggatctgatttacctgatgatggtaaccacttctgggatgatataaggggtgatgtgttcactataacgtatcagaaggctgataacacagcggagaaggggtctgttggaggttcagcttcagtgccaaaatcttccaaatcagattcttgcagaactttgtctgaaaaacagtgtacttctcttcttgatagtattttgcaaggagagcttccctgtgatttagagaaatcaaaccaaacctacaatatcttatcactattacatgtgttggagggtttgaatcagttatcacctcgtctgagactgcagtcagcctgtgatgattttgctgaaggaaaagttgctacattaaatgggctatacgatgttggagctaaggtaccctcaaaggagtttatcaacagtaagatgaccccaaaacttgctcggcaaattcaggatgttcttgcactgtgtagtggcagtttaccatcttggtgttatcagctgacgaaagcttgtccttttctgtttcctttcgaaacacgaaggcaatacttctattccacagcttttgggttgtctcgtgcacttcatcgtcttcagcaacaaccgggcaatgataataacactgcttttgaaagagaagtcaggattggtagattgcaacgccagaaagtccgtgtttctcgtaaccgtatcttggattctgcagctaaagttatggagatgttctctaatcaaaaggctgtcctagaagttgaatactttggtgaagttggaactggtcttggtccaactttggagttttatactctcttaagccgtgagctgcaaagggttgacttaggattgtggagatctcattcttcagataattctgggatgcaaattgatgcgaatgctgatgatttaataagaagtaaaaatcatgaatcagaatcacttactgagagcaggaacatagtacaatcacctcttggattatttcctcagccttggccacctactgctgctgcatcagaaggtagcaaattcttcaaagttgtcgagtatttccgcttagttggtcgagtgatggcaaaagcattgcaagatggaaggcttctcgatttgcctttgtcgacagcattttacaaacttttgcttggacaagaacttgatttatatgatatattatcttttgataccgagttcggaaagacattgcaagaattgcaaattctcgttgcacgtaaacaatttttggactcctgctctagtgagagccaaaagatagatctatgtttccgtggtgctcccgttgaagatttatatttggacttcactcttccgggctatcctgaatatgttctcaaggaaggtggagagaatgcagaggtcaacatttgtaacttagaagagtatatttctttggttgtggatgctactgttaagaccggcataatgcggcaagtagaggcatttaaggcaggattcaatcaggtgtttgacatatcatcactgcaaatattttctcctcaagaacttgattatctgatttgtggtcgctgtgaactttgggagccggaaacactgcctgaacatataaaattcgaccatggttatacctctaagagtcctgcaattattaattttcttgagatcatggcagaatttactcctgagcagcaacatgctttctgccagtttgtgaccggtgctcctcggcttccacctgggggtttggctgctctaaatcctaagttgaccattgttaggaagcactcttctgtggcaaataataattcaaatgcaactggagcgacagagtctgcagatgatgatttgcctagtgtcatgacttgcgccaactatcttaaactaccaccatactccaccaaggctatcatgctaaagaaactgctttatgcgatcaacgaaggccaagggtcatttgatctttcgtgaatctcaacactaacataggtattggtccacctagaaatctgcgtcattgttacccagagttagtttctacctcattcatgtatgacataggttaaactcagctctccggagtcccaccgaaggtttggagcccgtacctttgggtgtggatgtctatactctcttttcttcttggttgtatattcttgcggatctttatagtgaataatagtaataaattgttttgcgcttcttactatgctaatcatcagtgccccacccgaagcgtcagtcgtacaaattttgctcgatggtttcgctg

SEQ ID NO: 35344 - DNA, 6700 bp, Zea Mays
ctattgtgacgaaccacttagttctgcgtggaacttatcgcagtctcacccttgtaatttatggcaataccgccgaagaccttggtcaattcaacatagaactaggtctggaccattctcttgctaatgttgttagctctccatcagagggaaagcttgaagaccttccaccagcgctacattcatccaagttgtcatttgaagaatcattatcatcattgaaaccatcgagttttcatgccactgatgtcgacttatcaattgaagcgaagaaagtcttgcatttggctctgaaaatgtaccaaatatctgatgtggagaatcttattcccaacctaagaagtgcagttctctcagctatttcaaaatatgtgactgctagtacaaatcatattctacacactttgagtcaagattcagcaaatgcgtttatcaacagtgattttgattctcaggaaattaacaaaattcttgctgaagctggtaaggagctctctgaaatttggaagaatgtccatgctgttactgagagtaatcttttcaatgataatggttttaccattggagtagatgaagacttgcccacgaccaagattctaattgagttgtttaaccattgtttcccatattacaagaaattatctttacttgatctacaatgtccttctcagagcaaatggttggttctgtctttgagtttggttctcctgctatgctcctcaaaggagagttgcttttattttgttgatactggtgggatggagcaaattattaatctgctttgctggaggacaccaaaatctgcagctaccacattgcttctcctaggtattgtggagcatgctactcggaatggttttggatgtgaagcttttctgggatggtggccacgagctgagcacaccagcatacctgttggcagcagcgatggttattgctctttactgaagcttctactggaaaaggaaaggcatgatattgcctctctagctacatatgttctacagcgcttgcggttttatgagatactatctaaatacgagtctgcggtagtcaaagtgatttccaatattcaggcagataaactttctactgatggagttccatttcttatttctgctagtgttgaacttggtgaaatgctgaaattgataattttctgtggccctattgaagatccatcaccagtggctactgctagtagaatatttaagtctgaacatttagaaggcttgctttcgtacaaagcaacaattgatcttataacttcgtccaaatacagttttttgcagtatgatacggatccatacttattgtctcttatccaggaaagaagtttttttcctctgtcagcggccttattgtcatcacctatattgcatttaccaaatggccctgccgccgaaattttgatggggatagcatcatcaattgaatctattatcctctccctcctcttttgtcgttcagggttatcgttcttgctcagtcagcctgaagcaactgagcttatacttctttctcttcaagatgcagaaaaaatgaataaatcagaatgcataactcttcgacaggcttttgttcttttatcaaaagggttcttttgccgcccaaaagaagtgggattgataacagaattacatcttaaagtgggaagtgctgccactaggatcctctcagttcctccgaattctgatgaacttttgtgggttctctgggaactttgtgccatttcaaggtctgattctggccgacaagcattattagctcttgggtactttcctgaggcaatatcagttctactgagatctctctcttcatataaggatcttgattcagtcatggctgagaatggagggtcgcctttgggtcttgcaattttccattcagctgcagaaattcttgaagttttggttgtggattcaactgcttcatcgcttgaatcatggattgggtttgctgttgatctgcacaaggctctgcattcatcttctcctggttcaaacaggaaagatgcaccaacaaggttgcttgaatggattgatgctggtgttgtttatcagagaaatggtgctcgtgggcttcttcgttattctgctattcttgcatctggtggagatgctcatctttcttcaggaaatgtgcttgtgtcagattcaatggatgtagaaaatgtagttgcagattcaaacagtagagatggtcaggtcatcgataatcttcttggtaaacttgttgcggataagtattttgacggagttgctctatgcagcacttctgtggtccaattaacaacagctttccgtatcttggcatttatttcggatgataagcctgtggcgtcatccctttttgaagaaggcgccataactgttatatatgttgtcctgatgaactgcaagtctatgcttgagcgtttatcaaatagttatgattaccttgttgatgaaggggctgaactgagttctaccacagaattacttctagatcgaactcatgagaaagctattgttgacctcatgattccctcacttgtcttgttgataaatctccttcatatattacgtgaaacgaaagaacaataccgcaacaaaaaacttcttagttctcttctgcagttgcaccgagaagttagcccgaggctagcagcttgtgctgcagatttgtccttcatgtttcctacttttgctataggttttggtgttgtttgtcatcttatcacgtcagcacttgcttgctggccgttgtataattgggcacctggtctgtttcattgccttcttgaaaataccgaggctactaatgcgtccgtaccattgggcccgaaggctgcttttagtctgctttgtctcctgggtgatctgttcccagatgaaggcatatggctatggaaagttgaacttccttctctcagtgccattagatctttgagtactggagcagtgctagggcctcaagtggagaaaggggtgaactggtacctgcatcctgaacatgtgaccatattacttgtgaggctgatgccacaacttgataggcttgctcgtatcattgataactttgctacttcggtcttgatggtgatacaggacatgcttcgtgttttcattgttcgtgttgccttagaaaagattgagtgtgcagttgttcttctacgccctatatttatgtggttagatgataaagttgacaaaacttccctgtcagagagagacacctttaaggtccatcagttgcttcagtttactgtaaaattgtctgagcatcctactggcaaggcattgctttggaggatggggttcacaaggattcttagcaagttactacagaattgtagccgagcatctttcccgtatgataatcagacttttggaagggcgcactctaagaatgaccttatgctcaaatggaggatccctttgtttaaatctattgcatatatctttagtatcgacccatgtaataatgagaaggctgatgttgaagagtccctgaatgagaagtctgttcatgaatgctcttctgtcatgcatgacctcatgatgttctgccaggttttgcctgttggccgggaaatgttagcatgttcgttggcgttcaaggaattggtttattcttatacctgtagaagtgcagtaactttgatactttcacaaatacatacttccaacaaagatgttcttgaaaaagatgagagtgaccctaaccataactcaccatctctggatggttggaattgcttttcctcattgttcaagtgctggaagaagcttgtaaagtatgttggttctaatgaacgaacagattatttagtagaaactatttattccttgacactaggtgctatcaccctcagccagtatggtgaaaatggttccttggaatcatctggtgagagtccaagtgagattgagttattcatgaagacatatgaagagaagatatgccagggcattgaaaattcagcgactgctgttggaaagactcttttacgcaagctactgaattcgatcaaattactacgctcaattcttgagaattctggtcaatccgcagatacagttcagatggttcttgaagaaggcactgactcactgtctgaaattgctcgctctgttgttatgacagctcatcttatgccatccctagccaatgtgtcagtaaatgatgaatctccttttctcttctctaatatgtggaaggttattgttgattcagaagagcctcttgactgccaagagggtgaatttgcaaagaggctagtttgggagttgcctgattcttctcttgatagacaactagcacctggccaatctgccaggaggaaattagcactgggagagagtgcaagtaggcgtgtaagggataatcaactgcctgaacccactgggcagttctcacgaggtttaaatacatccaatgcttcttcgggacatacacgcagagacactttccgtcagcggaaacctaacacaagtagaccaccttcaatgcatgtagatgactatgttgcaagagagagaaacatagatggtgcaagtagtgcgtcaaatattgtgaactctaccccacgaggaacacttagtggaaggcctccatccattcatgttgatgaatttatggcaaggcagagagaacgtcaaaatcatgcgccagccccaactggagatgcacctcaagctaaaagtcagacaacaagtttagatgacagtcttcgtactaagccagagaacttgcgtcaacccaagactgatctcgatgatgatcaagaaattgaaattgtctttgatgaggaatcaggttcggatgataaacttcctttccctcaaccagatgatagtctccaatctccacctgtcattattggggaaaattctcctggtcctgttattgacgagacagaaaatcaggagaatgaaagagttccctttttccagagggccacatctatcccgaaggacgatgaaaatcttggcattggcatttcttcccagactgcaatgctctcagaagctaacagttctttggaactgaaacattcagtttctagcccagggaagaattcttttcgtgatcatgctgaagagtctaattatgattctattggtgtatctgggagaccatctttacaagcagatcatcaacaattatctcgtagacatgaaaagagaagtccacgaaaattttctgagacttctctgtcaaatggattccatgggcgtgagcatagacattccaataaccatccacctctgccaccaatgccacctccaatttcatccgtgtccatgcaaaatactgattcagttaataggcagtcatcttcgttcagtgctcgagatcgaccaacacctaatccttctggttatcctacacaatcttttgactctagtatgcctagtgctttcacaggccttcagggtcaaactcaatacatgcttgcaggcgctggcagttcatcagcgaatgagttacccaatgtggaggccaagcttctatggaacacatttccagcaaataggatccctctggagaccttcagctcaggtttacctgctcggccgatgccaccccttacaccttattcagctgttgctactcagcacgctacgatgaactctggctctcctgcaaacctgtatagccagggcagtgttgtccagccttctccaactgcttctattattagtgattcaaatttggccatgaactccgcatctggcagcatgcttgcatcgaatctgctgccatcatttgcatcacaatttctgatgagcaggccttcaatgcctactccgttttttggcacgcctcttcaacaagttcaattctcatccggtcttccacaaaatatttctaaccctcagccacctgtctcaatacaaccacggccacccccacccccaccacccccgcagcagccacatccttctcagacactccaacaacttggtgctatccaattaccacaccaagatcagcagcactcatatccccatagtgctatcttgccacaagttacgttgcagtttcctaaccagctacccattcctcaagtacaattgtatcatcaaagccagcaggaatctgggcaaacactgaggcaagttggtgaacaatcacaacttcagaaccagggtatgcaagcagatagtttctctcaacagcagcaagactcagggatcaacttaaaccagttcttttcatctccagaagccattcagagtctacttagtgatcgtgagaagctctgccaacttttagagcagaatccaaaacttatgcaaatgctccaggatcgcattggccagttgtagtcgcactggaggtgctattgtgaaagtgaaatctgatgctggtcgatcgctaggttcctagagtatggtgttgttttgttttcggctatggctgtagctagatgaaagcaactgccagcttgctagtcgccgaaatgtattcctatgtacattatatgtaactttgttctgtaatgtgaaaatttgtaatgttagtgcgtatctaatttatagttttaagtttaccttagtggttagatcgtgtgacatgcgcagcgacgggaaaacgacgccgccttttgtctgcaaaggcatttgacgctaactacctgtagagttctgaatatcctgttgcactcttgtgtgtatctggttgctttaatgctcgaaaatgaatatcctaa

SEQ ID NO: 35345 - DNA, 2760 bp, Zea Mays
atgccccaccaggcaccaggttgctgggtttgggcctcacggtccagcagatgccagccagttgccacgcgtttcatcagcccgacccaaccaaagccagaagacacggtgccgtcagctgtgctcccggcgctcccgcaccacaagcaagcgcgtgcgcgccgtcaagtcgcctctacagcaacttccaccgcgtactccctccctccctcgtctcgtcttcgtctccaggtttcgcgggggccaaggtttctgccggagcagtcgcggtctgcgctgcggcacggcgacgaggtggggatggagtaccgcgacaagctcgtgctggcgcccatggtccgcgtgggcaccttgccatttaggctactggctgctgaatatggtgctgatattacttatggagaagaaattattgatcacaaattcttgaagtaatctcttgggactactgattttgtggagaaagggactgacagtgtagttttccgtacatgcccacaagaaaggggcagggttgtattccaaatgggcacatcaaatgctgtgagggcacttaaagctgctcagatcgtgtgccgtgatgtttctgctatagatatcaacatgggttgtccaaagtctttttcacttagtggagggatgggtgctgcattactctccaaacctgagcttatacacgatattctgacaacactgcggaggaacttggacacaactgtgacatgtaaaatccgtcttctgaacacacctaaagacactgtggagttggcacgccggattgagaaaactggtgttcctgctcttgctgtccatggaagaaagattaaagatagaccgagagatcttgccaagtgggatgagatagctgatgttgtgtcagcgctgtcaattccagttatagctaatggagatgtctttgagtatgaggattttaagagaattaaagatgcaacaggtgccgcgtctgttatggttgctagaggtgctatgtggaatgcctccatcttttgtgccaaaggaaaaacaccttgggaggatgtcaaaagagagtatgtaagaaagagcatattgtgggacaacgatgtgaagagcacgaaacataccttgaaagaaatgataatgcactattcttgccttgaacttcctgaggggaaaggcgttataaagtgtgatacatctgaagatttagcgagactatacggggaagaggactactataattttgttgttgcaaataggaaatgaatacaatttgatgttgtgagctctcatgtgtaccaggtatctatttccgaatacattgggtctagagctagtgaaaaaggaaataatattatgtgaaactgatgaagttgatagtttcatgtagtctacatgcggtactttttccttgcaaataacaattacttgcaaaataagcatgtttgttgacatgggtttcaaaactaaaattggttccagttccttggccaggtagccactcttaataggggcttgcatgctggtagtctgtaaactagcgattagagtttgtaaatgtatgatactgatcaagaagtcaagaactggctaaactaaatggtattttacctggacccagcaaaaccggtgaaacttgcctggaacttgaagaaagatgttcacttgcatgattaaattgcaaatcagaggtacccatggccacaatgtaatttcgaaaggttttttcatcataataaaaaattgcaataattcagtgatcaatgggtaatggagcagaactctcaacttcatgattgattattcgcttcgattaaagccagctgtttggactgctgtagctgcaatccatagagataaaacactgtagaagcaatagaagcctacggattaaagtcaagcaaacaggctagacctctctctttctctgaaaaatgtactaccaagaacctgcatatctacatacaatgacacctctcctcacctgcccgtgacgctgagctgccttcgccccccccccccctcccccttcgccgccgctgcctagatgtttcatttcatctttgtgcgtgtgaggcacacggcacgataaggacgaatgttgggtggggctgctccctctttcaatggaatgacatggtcaatatcacgttgaggagggacttttgtgtactcctgacagaattcagagtattgttgcagtaaggcttgaatagccagacgaagagtgtggtgcctgcagagacaagctgttgagatgcagaatgaaactagaaatgcctttgttgagaagcttgttcattatccttttcagttgttcagtgtacgcatcctgagatgtacaatcctttaatgagaggagagtatcatcttctaaggagtcaagggtgttgttcaaggcatgttcctgaatagagaatgcagtgcctgttatgattgccccagatcttctgcttggattcctatctcaccctttattgatgggattaggaggaattcctgccaccaaggacaacgggatttgccattttggcgctgtctggacttaacactgaagctgctgatctttctcttgtactggtaatagttaggtttatacctgaaattaatcaaacaccatttttttgtaacaaatactaatttatttgctttctatactatggaaattttgtcatgtattgttggtggaaatactattgcgcttttgaaggaattgaaagactttgatatgttgactactattatggccctatggtctaagaaatattaaatgttttcatg

SEQ ID NO: 35346 - DNA, 3705 bp, Zea Mays
attgagggcccgttttattactgcatagtactaatattttttatcctggcaaaagacgggccagttgggccaaatgttgttaagcatggcccaacccaacgcaacccaatctgtttcaatctgtagaacaaccacgtggcgtccacttgaaccactctgtagagcaatcgccaatcggcagcttcgtcatccctcgtcgtcggattgtacgctccagctctccaagatttgccttggcttgccgtgccctgcgggagccaagccaaggacggctagcgctcgccacgcgcgatgtccgggcttcctccggccgcgcgaccgctgctaccgtctccctgcgcctcttcctccgttgttcgggcgaaggcagcgtcggcatgctgctccagcctaaagcagtcgcgcccaggccgaagtgctgccgcccgttccaccgtcgccgcgcgtcaggccgcgccgctcttggctgcggcgctcgtccttgtagcggcaccccctggcctgcctgctgctatctcaccagcatttgcacagccagtttcagaaggcgcagcgctgttccggaaggcttgtattggttgccatgacatgggaggaaacattctacagccaggagccactcttttcctgaaggacctcgagagaaacggagttgccacggaggaggaactgtataacatcacatactatgggaaaggaagaatgcccggttttggagagaaatgcaccccaagaggacagtgcaccttcggcccccggctatcggaagacgacatcaagatcctagcttcgtttgtcaagtcgcaagcccagaacgggtggccgaagattgagggggatggagattgatcaaactgaaaaaacgatgagaagacggtgcttgttagtcagatgaaaatggtgacgggaagatagtgtttgtatagtttaggaatctggtctttctgaacttgtaaccttttagtctctgtttctgaactgaacttgtaaccttctggtccgtgtttcagttttctgaacttctattccaggcagagtccacaccttttccagccagccgaacaaggctgacactgacagagttcagtgctcaggcagggtccccaacaagtcgcagtcgcagctcagctcctctgatcgagggttggtgagttcggttggtgacgccgcgcgaactgctaccaggcctggcgtggcgtcggcgtggtttaaacacgaagaaacccacgccctccgtcgcgcggctgctgctggtgcggaggggaggtggtggggaaggaaaacggcgtcgcaactcccccgcccgcctcgaaccgacatgttgccgcgcacgcactcccaccaggcgcggcggcgctccggcctgggcccgcagctctgcgccgcagcggccgcgctcctgctgctcctctccctcgccgtcctccactcgcgcctctcctcctcgtcctcctcccgcttccccacatccgcatcccgctcccgcccctccacgcccgcggccgactccaactcctccgctctcctcgccgacgaggaggacgaggacgtggccgccgcgctcgacccgctgctcaccgtcaccaccaccgccgccgagggcgattctctcgccaaccccgacgacgaccgcatcgatgagctcgacgtgttggacgaggacgccgcgggcgccaacgaggctgactccgcctccgcctctacggtgggggccgccacgcccctcgtatgggaccacgtcaccggcgccgctcgcctgccgttccgcctccccgcctccgtcgaatccctgcccgcggggctgccgcggcttgactccccgcgccggatcgccgccgcagccttcggatcggacgacgagctggtggatctggaactgcgggtcgagatctcgtccatcgccggtatcgaggacgcgcttctcctgaagcccgcctctggtaaggccgccgagacgcggctccgcgccgggtgggcacgctggctggaggggaaggccgactacctacggcgcgatcggatgctccgctccaacctggaatccctcaatccgcgcaaccacccgcttctccaggatccggacagccccggcctcacttctctcacccgcggcgaccgcatggtgcagcgaatgctactagccgagctcgacaagcccgcgtccaagagctttgagcggcgtaggcttctatcttacgagaacaagcagagcatgacaacaactgtgaaggagaagccgcagacgggaaggaggtggggatatttcccggggatcgatccacatttgggattctcagagttcatggagaggttcttcgagcatgggaagtgttccatgagagtgttcatggtgtggaacagcccgcagtgggcgtatgacatcaggcaccagaggggactggagagtctactcaagcagcacccagatgcctgtgtagtcatgctatcggagacactggaactagagtccttccaccaattcgtcaaggaaggatataaagttgctgttgcagtgccgaatcttgatgagcttttagaaagcactccaactcacgtatttgcatcagtgtggtatgaatggcggcagacaaaatattaccatttgcactacagtgaactagtacgccttgctgccctttacaaatatggtggaatataccttgactctgatgttattattcttaaacctttaacatcgctccggaattctattggtgccacaaatcatgtctctggaaattcccgttttggtggggctgtgttagcatttgaaaaacagagccctttattggaggagtgccttagggaattttattcgacatatgatgataccctcgtgcagtggaatggggctgaacttatgacaagagtgataagcaatatttctagcagagcagatgaaaacagggggcatcttgacattaagttggagccctttgttaaattttaccctataagctctactgatattatacgatatttctcagagcccgataacatggtccaaaaagcacatcatgatgcaatcttttctaggatcgtgaatgactctaccactttccatttttggaatggcatcacatctgctctagttcctgaacccggcagtcttgtttcgaaaatccttaaccgttactgtctccattgccttgatgttttatagttgcaacagtctgaagctcctgctaagagctttattttggtttagaacaggtacacagaagaaatctttcaatgaggtactcagaatggctagtattgctgaatcttgcaaaacattgtgatggggggaaaattaccggcagcactgtgtatatattcttttcactaaggtttgtgccggagctgcgcctgcaaagtccaagcatgttgacttgactagttattgtcgatagcaaaagtcttcctcctggcaatacagaatgcaacaactgaagacacttggaactagagagttttgactagttcggtaccccttctatatttgcacatatactgataattttcacaatttgatattttgaaaataacatgattcgtgtaagacagtagaaattgaaggaccatataccgaattcactgggtttatctagatgtttggtaaacttttatttctcagagcatgattttgtctgaattaacgacttgggaacgagaatgtcagcgttgtaagcatctgcataaaattatagtgcaggtcttggc

SEQ ID NO: 35347 - DNA, 694 bp, Zea Mays
ggatgaatgctctcaaacgattcttcgttacctccaagattgtattcttgatgtggcacatatattgcatctgcttcaacatcaagacatatgagtgggtaatttcaaatttcccatgctttagattcttttttcatcaattgcaggtcgtcttctcgttaggtgtttcttgtagctaaaaggtcagattttccagattaactggaagaaatatcctgagttccagatgaaggaacaacctcgatcagattctgaagtcaaatctatgaacccatatgacaaaggcatgctgtgtaacataagagattttctaaaaccagttttgagtacgaagacctgacctctgatggaactatagaaacatgggaaatctgaagtgcgttatactggagccaacatggaagcttgtttcccttgttgctgccgtagcatttattgagactcgtcgtgaggattctgctgtgtaatttaatgtgcaagtagcattcttttataagattacttccgaccgggaattctagtctcttaacttcagaactgatttggtgagtaggtaaatagaggggatctatggggtcccttactattcatatggagttcacatcgtgatcctgcatttttttcctgtctggtcttgccaaagggtaactcttgcaggtgaaaggaccacgatgctcaagagggggtgaattgg

SEQ ID NO: 35348 - DNA, 1923 bp, Zea Mays
ctcccctccccctctgcctggtgcctccctccccaaaaatacctcccaggccatctcacctcgctcacagaatcactcacggtcacttcctccacaatacagcaggagagtagcagggggttgaataggaggaagaagacggggcggagtcaagaattggtacaaacggaacgtgttgcctgcagaatggattcggcatttgaccccgctgtcgtgctcgcacgtacatgatgcctctaaaccagagccatctgctgcaggtttcagatatctgcagatttcatcaccacagctacaaagattactgcgctactctgaaggaggatatccaatactagatgtcaggacttcttgcagaagctcttggagctgctgcaggaggatgtgcactactacttattgtcataattataatagtactttgcctacagcatcgcaaaagaacctcagactcttcagaaagtggtttttcagatcaagctctaccagagtcgcaggaagcaagatgtcttagtttagaggaattgaattttgctacaaggaatttcagcaatggcaaccttattggacaagggacgttcggagaggtatataagggtttgctccaggatggcacaatagtagctgttaaaagacggcattctcctcctagccaggaattcattcaagaggttaattatctagcatctctctgtcattggaaccttgtaaaacttttggggtactgtcaggaggatggcatgcagatgcttgtttatgagtatatctccaatggcagcgtatcaacacatttacatggtaacagccatgctctaggttcaaggctagaattcaagaagagactttctattgctcatggcacagctaaaggcctgagtcacctgcattcgctgacaccccctgcggtccatatgaatttcaaaacttctaatgtacttgtggacgaggacttcgcaccaaaagttgcagatactgggattccaggcatgcttgatcgacttggtgttacaggactgtcttccagaacatttaatgatcctttcgtggaacctcgaatgaaggaagctatgaacttgaacttttccatacaaagcgatgtgtacagctttggcgtattccttctggagctaattagcggacggaaagctgtctctgatcaatgcatcattcagcacagagcttccaggaatcaagtgacatctccgtgatcgcagacagcagaatggccggtggctttacctcacaaagcatgaaggaattgctgagcctgacagcacggtgcgtaaatccgacgagcgagcagcgcccgtcgatgagctcggtggaggctgagatacaacggatccgcgagcaggagatcagcctcacagcagtcatggcggaaggtaccccaaccgtgactctaggcagtcagctcttcagaacatccaggtgaaacaaacatcagtgggatgtgtagtctagaagaaaagctagttctctcctcctcagggcagtagaccagccttgttctctttcggaattcgggaaaaaaaagaagagcccgtcttcatagcgagccagctgcatcccaagtgtaaaaaaaaaagagaggaaacagctgcgaggcttaccctttttttctccccagttttgttaccctgatggttccttcctaattctcccttttctgcacatgtttttaggggaattaatgacattttccttttgttgaataataataagaatgggtgggtggtggcaaaccagcggctcttgattgttcagcgcatcagtcttgcatgtgtttttttttctcttcccttcaaagtattggagaaaacatgaaaacaaaggcaattcatgcagaaagttgaagcaacagtctgcagaacatgtcgtgtattatatggcacgaggatagaacagattttcaggctctcc

SEQ ID NO: 35349 - DNA, 1281 bp, Zea Mays
agtcatctgcaatacaaggatattagacatatgaaaacgatcagtgtagctcattatcctgttaatagagagaagaaccgatatattgatgtcttaccatttgacgataccagagtacagctaaaatcctcagcacggcctccaaacaacgattacatcaatgcaagctttataaaggctactgagaacaacagagttgcaacatttatttctacacaaggtccactagtgaagacatttggagatttttgggaaatggtctttgaatatcagtgccctgcaattgtcatgctcacccactttgacagtattaagtgtgataaatatcttccactgggaagtgaacggcgaacatatggggattatgatatcaagattacaaagacaagaacagatagccaccatttacagttgcgtgatgtcaaggtgcaaaacatcgagacaggcaaggttcattctgtactccatatagaatatcctgattggcccgaccatggagtggcaactaatacagatgctgtacgggaaatctggaaacgactgcatcacattccaacggaacatcctatagttatccattgcagtgcaggaatcggaaggaccggtacttacatcacaatccatactacaattgagcgaattcttcttggagataaaagctcttacgatcttgccaaaactgtaaagaattttagatcccaacgacctgggatggtccaaacagaagaacaatacaagttctgctacagggcaattgctgacgagctgaaagacctgctaaattcagatcattgaggtgggtcacatgagacggacagcaacgctgttagcatttattacgtttttttagacatttctatgtgaaggaacacttaccctttagaggagtgaattagtcaatctcatttctctttaaactactgagctatgtttgttctagtcaaaatctatgtaataaaaaatctatcatatgtgaagctatgctatgtttttgactaatcgttgctattactaccgtaaaggagtacgatatgaaggcggaagcttaaaatgagatagagatatgacatttcgtaggtgtgctgatgttttttatcgagggattgaaaatcatgcaagcttatctctgacgcggcgtttggatactttattttagaggatttagaatttacttaataaaattatctatttaccttggaatttgatattccaccatttttcaaagttcagatatatgtctatctcaaattcatggggtgaagaatgagaaataattttgta

SEQ ID NO: 35350 - DNA, 200 bp, Zea Mays
tggcaccatgcgccatccttgacgcagaagaagagtggtcgcggattttgattcgggagtacacctgcggtggtcctcgggatgcggattttgatgctcaccgaggcatcccaaacgtgtgtgtgacatcttcttccatggagggtcgtctattgtcagtgaattgctcgccgtggcggagatcccccaccaagtcgcca

SEQ ID NO: 35351 - DNA, 2043 bp, Zea Mays
cccggctgcatcaccgatctctctccctccctcgctcgtcgcttccgcaggggcagccgcagcaccgcagctacctacctacccacacacgcgattcacgcaagcacacgcagccgctccttccgtcctcaaaccacaggcggaccctgacgagacgtacaagaacctccaccaggccattgagcccttgaccgtgtacgcaaacgaacacgaagcctagctcctccccaatggcctcccatcctcctcctgcggagccgtcttctaagtcaaacaaggggcagagcgagcacgaggagatccacgtctcctcgggcggcgttctggcttacaccgacgacgatgactgcgagagcaggcgccccttgctgctcaggactcccgcctccgccgagtgctactccgtctccgccgccgtcttcccgtttctctttccagctttgggaggccttctgtatggctatgacattggggcaacatccggtgcaaccatatcgctcaagtcgtcgacattcagtggtactacttggtacaatttgtcatctgtgcaaacgggtcttgtggtcagtggctcactgtatggtgctttgatcggctccgtcttggcatatacaattgcagattttttagagactgcaccgagccagataagaggcatgctcatttctctaaaggagttctttattgttcttgggatgcttcttggttatatagcaggaaatctctatgttgaagtggtttctggttggcgttacatgtatgcctccagtacaccattatgtctcataatgggagttggaatgtgctggttaccctcatcacctaggtggctcctgttatgtgccatacaagggaaggggaatctgccagagacaaaagaaaatgcaacccggtgcttatgtcggttgcggggtcaagcttcacctgatttggtctcagagcagattgacttgattctagaggaactttcatatattgatcaagagaagcaagctagcttcggtgagatctttcaaggaaaatgtcttaaagcaatgataattggatgtggtttggtgttctttcagcaggtcactggtcaacctagcgttctatactatgctgctacaatttttcagagtgctggattctctggggcatctgatgccactcgtgtgtcaattcttcttggcttactgaagctaatcatgaccggagtagcagtccttgtggtcgacagacttggcaggagaccattgcttattggaggtgtcagtggaattactgttgccttatttttgctgtcctcctactacactttactgaaagatgcctcctatgtggctgtaatagcgcttctactatatgttggttgttatcagctctcatttggtcctattggctggcttatgatctcagaggttttcccgctgaggctgcgagggcgtggactgggcgttgctgttcttgtcaattttgcgtccaacgctctggtcacctttgctttctctccactggaggatttgattggaacgggagcgctcttctctggattcggggtgattgcagtggcatctcttgcattcatattctggatcgtccctgagacaaaaggactcaccctggaagagattgaagcgagtttgtagttgactgatccagacgtcacgttcttccgtcctagtttcactgaactgaagggacttctggtatccttctgtagtttgctgccgtagttagccttctataaacgttctacaagctgttgtagcaataatacttctttccttccgggtataaaccgagatggtcggttgctgcaaagtgtgttctttaccgcagttcatccgattagtcacaattaattttcctgatcgccccctgcacttaactaggcaccatgactcaatcagagcgacgttgattattcaactagtactcgatattttcaaaatggttgctaatggaaagaaaagaaagaaaatgatcttctctctagatcatgatcaagaaaagattaccaggagattcttaaacaatacatcaaatgtctttgtattttgt

SEQ ID NO: 35352 - DNA, 610 bp, Zea Mays
gcccaaacctaatggcgctggcagcctctagccctctacacgccgtccctcctgctcctgctctccacacgccgccggagaaacgcggcggaacgcccagcacgggctgcacggcaggttctagcgttctgctgtccacggctccgcgcgtccaggaggatgtgtattccaagttttgggagggaaaatcctttttggaggatctgccattgaatcagaaggaaactttgtgcaaccaacaattgtggaaattacacgttctgcaccagttgtgaaagaagaactctttggtcctgtcctttatgttatgaaatttcagaccttgaaggaagcaattgaaatcaataactctgttcctcaaggattgagcagttttatatttacaaagtggccagatattatttttaagtggctcgggccccatggtagtgattgtggtatagtgaatgtgaacatacctactaatggtgctgaaattggtggagcatttggtggagaaaaagcagctggtggtggacgagaagcagggagtgattcctggaagcagtacatgaggagggcgacttggagggaggtcctagaggtagtaagtcacttgtttactccatga

SEQ ID NO: 35353 - DNA, 1958 bp, Zea Mays
ccggtctgaaactctgaatctgccaccgacaagtgggttcgtccaccgcaccttctcccttcttcgtctccgtctctcccagccccatatcaacgggggacggctctctcgccattctccatccgaaaaacccatagaaacttccctcgtttctctctcctcggccccgcgggagcgaaccattatcagtcgctctcgttggtccggagcagcgatgcgcaccgcctgcctccgccccaccattcgaataaaaccctcccctccgcctccctccttccgccactcctaggcccattcccacccgcgccagcctcggccgccgcggccgcaccacccacggtcccgcctcgccgtggcatgagaagatggccgcgtgctccaggggcctcgcgtggccgccgttcgatctgaccacggcgaggggggcggcgtcctggccgcgccgccgcgccacgatccggtgctgctgcgccgggacggacccagagccgcggaggcgactctcgagggcggccgcggccgcgcccgagcgtgccgaggagtggcgcgtcgatgggaacaagccgtctgccgcggcaccggcccggcggcgcgctagtctcaccgccatgcccccgctccccttcccggcacctcgttctagaagacagttcaagcaacaggacttctacccacggtgcacgccgaggggcccggctcctcaatcctgtgattccccacccaagagagtgagaaggaatggggaatcaacttgctggacgaagccgtcaaggagtctggaataaatgaagatggaagcacttggtatagggagagtggagaagatactggcgagaatgggtaccgctgccgctgggcaagaatgggaggacagaaccatgatggttccaccgaatggaaagagacttggtgggagaaaagtgactggactggatataaggaattaggtgcagagaaatctgggaagaatgctgaaggtgattcttggtgggagaagtggaaagaagtactgtaccaagatgaatggagcaatcttgcaagaatagagaagagtgctgaaaaacaagcaaaatcaggtgcagaaaatgctgggtggtatgagaaatggtgggagaaatatgatgccaaaggctggacagaaaaaggtgctcacaaatatggaaggttgaatgagcagtcgtggtgggagagatggggtgaacattatgatggccgtggatttgttttgaaatggacagataagtgggcagagacagacttaggcaccaaatggggggacaagtgggaggagaaattctttgcaggaattggttctcgacaaggggagacatggcatgtatctcctggcagagaacgttggtcaagaacttggggagaagaacactttggtaacggtaaagtccacaagtatggaaagagcacaactggcgagagctgggatttggtagtcgacgaggagacatactatgaggcggagccccactacggatgggccgatgtcgtgggggactcgacacagctgctgtccatacaacccgtggagaggccaccgggagtgttcccggccatcgacttcagctcggcgcccccgccaaaggacgctccgccgggcatgcctccttcccctctggatggagggaactagagctgccagcacaagcgaattttttctttctagaggctccaaattttgcctgtaagggaacagcattctttgtaggaagttaatggacccaatttcctgcgttcattggttggttcactctctgctacgctttcctttcctcccaaacatgccgttgcgttcctctggttggcgaccgggtgaatgcaataatcaaacggcccacccgtggtttgtattgctcgctgaggataaagcctttgttctgccttcaaggcagtgttggaaactcggccattttcctcgcgtaagggacagagattttcactccgaa

SEQ ID NO: 35354 - DNA, 558 bp, Zea Mays
cacatgatttttcttccactggagctgatttcatgcatctctgcttgcttcatgtaaacttcaccgtgccaaaaaaaatggtttgctggatggcacttagagaacgtttatacaaaagaggataagaaaatgaagcactgccgggcaaacaggatcacctggttcaacgtccatgccagggactcccacgtccttgtcgccaaaaggcaccgggagcactggaggattaaatccacctgacgtcgattcgaccgactccaatgctaaacctctggcgaccacatccctcccatctcttgctctgtcctgtttcatgtatattttcttgcagttgtggtgatgcatggatgatctagttaggttcagtagagcattgagatgcagcattgttgcatcgtgatctaagagacaccacaacagttttgtttcagggaattggttggttggtggtagccgttgtaacctgccgttcaagtgaaaggcaagagtgcccgtcagttggattctctcaacacattatgcttcttttggtctaaaaaaatcattatgcttcttttt

SEQ ID NO: 35355 - DNA, 3450 bp, Zea Mays
ggatttttccagccaaagttaaattaaaaacgggaaaaaaccacacgcctgcatctttctctctctcgtctctagacgtgcggtgcagcagctgtattcgccgcaacctcctcccatcccttgcgccagcggattccttggctgcgcggaattctcctagcctcccgagcctccccagctcgagaagggagctcacggtgacgcggcgcgaagggccgggtcagatcttggccgttggccccgaggcggcggtttcgcgtggggtccagcagagcccggcccgcgcgggagccgctctgattcgccgggggacgccgcggggaatgctctacctcaagctgccggcgggggatctagggttccgtccgggggcgccgaggcggggatccggcggcggcggggcctgagggtggcgcgggcgtcggaggcggccgccatggagcaggacccggagcgcgcctgccttcggagcttcgagctccacgagagcgagtcgagcctttacgttctaggaactaattctgacagaacactttggagactactcaagatcgatagatcagagccgtcagagcttgtgatagacgagtgttctactgtatatactgaaagtgaacatcctgacttgttgaagggtcttgatgacgagcacaggtcaactggcggagtaaaatttgttacaaagttttatggcataattggttttatcaaattccttgggccatattacatgttgattattactgagcagaaaaaaatcggggaaatctttggtcatccagtgtatcaggtgaccaggacttcaatggttgaattagcaaattctaagacaagatctacttttcaaaacttcaaggacgagaacagatacaggaagatcttgaatgcacttgatcttaggaaggatttctttttcagttactcataccacattatgagaagtcttcagaagaacttggctgatccacaggatggatggaccttatacgagactatctttgtgtggaatgagtatctgacacggcggatccgtaattgtctcagaaatactttgtggactgttgcattggtccatggtttctttaagcaggataaattctcaatatctggcaaggatattatgttcacactcatcgctagacggtcgaggcattatgctggaaccagatatttaaagaggggggtgaatgagaagggaagagtagcaaatgatgttgagactgagcaaattgtctatgaagctgtgcctggacctactgaaaataattatgaagctacagagcttcattttgaaaatcttagagcaagatatggaaaccctatcattatcttaaacttgattaagacacgtgagaggcgagagtctatactccgccgagaatttgataaggcgatcaagataataaacaagagcctgtcagaagagaatcatctgaggttcttacattgggatcttcatcaaaactctcaaggaaaacctacaaatgtactcgacgtccttctaaaagtggcatttcgggctctgaatttaactgagttcttctattgtcaagtcgcaccaaattctgagacttctgcacaatgccccaccctattgaatggtcttgatcaatatttatgtgatgacaacaatagtgacgacacagaatgcactgagattgttggtgatgtatcccaagaggatatctcaggcagctctgattcctctggtaatgcaaccacagaagataaatttgagaatagtggactgccaccaccaaaaccaccaaaattccaaaaaggtgttttgaggacaaactgtatagattgcttggatcgtacaaatgttgctcagtatgcacatggtttagctgctcttggacatcaattgcatgcgcttggttttatagaatctccagaactaggtttagaagctcccttggcccatcatttgatgcacttttatgagatgatgggtgacacacttgctgtacagtatagcggttctgctgctcataacaaggtattctctgcaaagagaggtcacttgaagctttttattcagtcacaagagttctttaggacacttcagcggcactacagcaacacctgtatagatgctaacaaacaggctgctataaacttgtttttgggatacttccagccacagcaggaaaaacctgcactgtgggagttagaatcatctgctgggaagcataacaataatctttttgatggccacccaagtacattgaaaagagtaaaatcagatggcaccattcttcatgaaagtaatgcttctatatctggctctggtcgttgccataatgaacagttaagtgcatcgcagcctgatgtccagaatgggtttcaattcccaacttcagaatccgattcacttcatgaaaatgacatttcatcagcttgtggaagtggagtagcacacctaaggtatactcctacagcctctgacgtgcttcatgtcccaagagctaaagttgaatattgccatgattctggtgattcaaactttttggatcttgaatggctttccacttcaggcaactcaagtgatgaaaggtctattgcaactagcacgccagatgcaaacctatcaaatgagaatgtcattagtggcataactcctgatatcatggaaaaccatcttgctgaaatgcagtatcagaagttacctcggaattttgtgcagtgggttaatcacggtgataccttttggtactaagatcgcaattactggaattcaatatgtcgccagcttcccagggtgggcattaacacggatctgagtagtagattatagagtgatatggatgctgcggcaaggcatttctcccgtgatatactccgcaccatccccaaagtcctttattggtccacgtgtttttacaatgggtgagtagatagatatctttctgttgaaagaaaatagagatgataattaggcttattattgttgacctgaaattgtcattattcatgggaacatgtcatattttcttgtgtaaatatatatgcttgaggtgcctttggtggtggttgttctgttgcggagcagctgtcgccccgacggaggacggtcgcagggcgaccacgtgcagctcccgcgcccgcgtcccatcctggctgagcgcacccgccgcgactattctcacttctcagtgcattgcgtcatttcaaaatccaaaattgcaatatcactcactggatgaaatacccttccacatgcttcagtattcaagacatcatgtgtataataattgatgcatgttctatggttaaatataccttgggaagggaaaaaagcgtagagaagatgtatgtatcggcaaaatataaactgtgatatagatccgctctgccatggtgggcctgctagtacacgttatttataccagtgaaaaatatctagctaattctaagtgagttccattgtttcaatagaaatacctc

SEQ ID NO: 35356 - DNA, 2190 bp, Zea Mays
caggcccacgtccagtggaggaaacaggcttccccacgaggccacgattatttacgaacgaccccaactcctggagcgctctggaccgccctccccagaccccaaccaacggacgacgactccgtccagaattccagatcacgcatatctctctccctccctctctctcctcggcctcgccgcccctgtcccctcctacactgccgcgcgcgcatcgtggaatggagatccctccggccatgaagtgatctatttcttcgtcgcccctagctcgcgcacaggagaaggagaaggagaaagagaaagcaggagcccgctcgcggcgaggcagcaggatgtcttcgtctaactcgccctgtgccgcgtgtaagctgctgcgccgcaagtgcacgcagggatgcgtgttcgcgccctacttcccgcccgacaatccgggcaagttcgcgagcgtgcaccgcgtcttcggcgccagcaacgtctcgaagctcctcaacgacctggaccagctgcagcgggaggacgccgtaaactccctggcgtacgaggccgacgcgcgcatccgcgaccccgtctatggctgcgtggcctacatctccgtgctgcagatgaagatcaaacgggtccgcgacgagatcgccaacgcgcgcaaggagctggcggcttacattgggaccgcggcctttgcgccttacgtcgccacgccgcagtaccaccaccatcagtacgcggcaggcgccgtgcctctcgccgtcggcgtcgggccgcagcacggtcacccgcaccaccagcagcaacagatcatggtgcaccagcacctccaccaccagcagcagatggcagcggctgccgaggtgcagcagcagctcgctgtggccgtggaggtcgcgcgagagcaggatctcatgatgcggcaggccgcggtatacgcgcacgccgtgcccagcggcggccccacggtcgccgttgtgccgcccgacgcgctgccgtacgagggcggcttcctcttccagcagcagccgcccccttcgcaggcgcagaccgccgtggcgctcacgtaccagatggagcagtccccgccgtcgtcgtcctcgggccagtctcaccccgaggtgtcgcagcagcacaatacggatggcagcgacgagggcagcggtggcggtggtgtcgtgccgccggcctgatctgagtcgtctcgtctgacggcgcgctgcacgcttgcctctcattcgagcttgctttagccttttgctttcttgtgtttggtgttcgtaatgaatctttttccccttccgtcgtcttcatcatatggccggcgtacgtcttggcatcgtctcggtctagaatccatgcacgtttcaagtggcaaaattccaattatttccctcccgaagccagactatagctggattcttatcaaggttccacatgatcagttgcctttcttcctcaagagttagagccaaataaatgctggacagaaagagtggtaggaaatggcctggggacagatactcatcatatggatcagtgtaacacagagaaattaatggtgggaaggtggaggtagacagaaacagcagagagaagcatgcatggtgtgcttcagcgcaggaggggagcagtaaatggtgaagtaagataggaaacaagatgcatgcaagtagcttgcaatttgcaggagggagcagcagcaggcatgaataaagaaatcaacacgaacatgataagcaactcatataatatactgactccgttctcgaatatttgttggccattagtttatttttaaactaaaacatgacataaaaaagaacggagggagtatcttagttcacttgtgcatttggtgttgaacatatgtttttttttcaccgcttaattttattattattctttcatcttttcccctccttttctgtttctcattggtaaattctttctgtcgtcttgcattgtgtgtataaagaaatagaatcctttcatttatttgaacataaatggatggaggcaagagctagttagtcatcgttttaatttgtaaagtcaatgttgttttgtctgaattattattatatatccggtagccttcatgactatggtagggccaccaggctcacttcgacattctaaaaatgagccctaccatatagtcccgtcaatatgtatcagtttaaataagttaaatgtgtg

SEQ ID NO: 35357 - DNA, 1320 bp, Zea Mays
cagaaggtaccaagctagtaggtgacaagcagaggagaagccttacatgtcaataagggcctacctctgatagccaaggatgacttgcctatgtcctttgtttacaaaggacctgaatgtgtggaccattgagaggttcataggcagtctccttggctagcctgagtggcccctattgctcatgctaggcttaatcgagactctttgacttggtgcacgcaattagacacaggagtctcctcgacttgtgcatgggcgtgcatgcaattagacacgaccttgtcatatgtagctgtgtttcagtgtccatgcatgctccattcctagcattttcttgaaaggccaatatagcttggcagtttctctggaaagaatcagcatcaaacaatgttcttgaccagatgttttgatattgcttacgccgcacaatataatacggatcgatagtatgaccagcattctgaaagagcatccagcagggttcgagcctgagtgggtgcgtggccacagcctccttgacagctttgttgcatgtatggagattggagaagcagggaagccgcgtttgcggcaggtcaggccgagccatgcgccggttgctgaggcaaccaatcatcgctaaattgcacatgatacaactgcagctttagctggtttacctgcatcatgtctgggttcatcagcgtccagttttaattaacttgtggtcttttgccatgtgcggtaatgaaaaacgaaagggcctaaagtagagtagattaacatttcggtgtcgcctcaatttgcagaaagaagcttcaggcagagagtctctcactgctcctcgtgtctactgattgtcatgttgctcgccagctcctatgctctcctccaaagtccaaacccgggcccaaaggtgttcaacaaagagaagtaacatttacgagctcacacaagtcacatgagatgagattcaagagaaagagatatatgttacgtggcattccttaagtttagggacttagagatgcattttcaatgttcgtggatataagtgacatctcttgacaagttcagtttcattcatgtattgaattgatattaaaattagatgacctaatctcatgccaccataggggcgggcccactatgtagacatgggtattcaagatgaatacccaagattttattaaataaataaataaatataatttaaaatacatgtagatataaaaaatataaaaaattgtctatttagcaatccgcaagagcccatctctcttgcagtggctcgctcttacgcccgctagcttcaggtttcatgcgcttgtgttctcctta

SEQ ID NO: 35358 - DNA, 936 bp, Zea Mays
caatacatgaagggatgcggactcccatgcgaagtcgagcctgggctcctatgagccctccgagggataattgggaagatggaaatcctgctacttggggtagcagtccagcttaccagatgtgtaacccccacatgtcttactccaattatccaaaattttcagccaggaaccccacaagctcggccatacgaagcccccacacctggatcagggtgggcaaacactccaggagttagtttcaatgatgctcctactcccagggataactatgcaaatgccccaagtccatacgtgccttccacgcctgttggccaaccaatgacgccaaactcagcctcatatcttccaggcacacctggtggtcaaccaatgaccccaggcaatgctggaatggatatgatgtcgccgataataggtggtgagggtgaagctacatggctgctgccggatgttttggtcaatgtgttgagcggaggtgatgacggtcctggtgtggttagggaggtactcggggatggatcttgccgagttgcacttgggtcttcgggcaacggtgacatggtgacggttcttccgaacgaggtcgaggtcatcaggccgaagaagagtgacaagatcaagatactgaatggtagtttccgtgggcacacaggaaaacttataggtatagatggttctgacggaatagtgaggcttgacgacacatacgaagttaagatattagatatggtgattttggccaaactggcgacttgaaatggatgtatattttgttttgtaacgtgtccaccatagaacatattttgtaacaatgccctcgtttgcaataaagctttttgttgcttacgactacaatagttttgcacacttgtgcttttgcccaagggccgctcgtttttagaccttcagttgctgactggtcgtatatatcat

SEQ ID NO: 35359 - DNA, 689 bp, Zea Mays
attcgccaggccggtcttcttccctggttggttgtgcctggaccgattctctcggctgggaagtcgccagggtcgttcccttgctccccgagggccataaatgcacagacctggtccaccacttcgccgtgtgccgcatcctccccttgccactccttgctgccgagccgtgcgcagggaataggctaccgcatcccggacccaacctcccacgccgctccttcctgaagccatcaccaagaaatccaatgccacagccagcgtccttccctcccgtcgccgaatcggtggtccgctgtggtgagacggcttccacggggtctggttcttggacgcgctcgcggcgcccttcgtgtcggtccacgtccgctcgtggccaccgccctggttgatccccgtctgaacctcctgcttggcctccgtgactggttcgggtgaagatggacactgcggatgacgttcggtgaaagctttaggcacagatctcgttggccctcgatgtcgtggcagcaccaattactcgcctggagctatggggctgggagatccgccgcgggagttccacgcgccgtggtcacctctcaccgtcgtttggcgcttccggtaagtcatcttctagaagttcgcaaccatgcccacgtcgtgtatcaccggttaggctcgggtatagggcattagaacaccagact

SEQ ID NO: 35360 - DNA, 1129 bp, Zea Mays
tcaagtgccacatcatcttgttatgtagctacagagcctggtaggttcaggagcttcctgctcgacttctcgtacccgagggttccaagcagcgtgagagatgatgcgtggcaatggcaagggatgcagcatggcggcgacaggatgctgctgggtaccgccagcgccatccagtggcatgggaaccaagaacctcacccaccacatcgcagcgcagctgcgggctatggcaaccatgcgtacaacaactgccatggtggcggcggcttggtagcagcagcagcgggggcgtcaatgctctcctctgccttcgagcccccgcctggcggtggcggatgtgtcgcaggagctaccgcggccgactccagctgtgctctctctcttctgtcaactcagccatgggatacgcccacccaaagtggcagcagccaccacaaccggtccccagcgatgtccgcggctgcaggcgccttcgaagtggcgccgtcgtccgtcgtggcgagcagctacacggcgtcgagctcctggtctggctcacgggaccctgccgacggcgccaggaaaaacgcgcagcgtcacgatgatggcctgcacctggtccatccaccaggccccgtccaccacggccacttctccggcgagctcgagctcgccctgcagggaagcggcccgccgcatgtcgaccatggcggcggcacctgcttcagccattctgacaccaacgcgatgaattggtccctgtagggacaacaacttttgccgccactgccttgatccggtcggcacgccacgagacatggagcacttgggattgggacaccctggttttgtgcccctgaccttgccgttctggtttttcagggtggaactaactgggattccctaggcgtagatcatgaatcccctttccccgtgtaacccattgcgtccatgaagtcggcccaacaccggatcatatataattctacaactcccataacctaaatcattcttcagttgtgaagatatatgcttgtcaagtgacctggttttattttatctgccatcaattcatcatcatcacttctttgcttggtttggaactcaatgtctctgcttcgatctaccatagtaaatgcgtatgcttatc

SEQ ID NO: 35361 - DNA, 6336 bp, Zea Mays
actgccgccgccacggcccacggcgccacgccctgttgcccgtttcgtctcccgtccccttcctagtctccccccaaaacaagaagcgggctggcggctgcagtttcccgcctgctcgcacattggcgcgaaatttgccgagctaccttgcgcgctcccttcccgcatcccagcaataacactatctacagtgtaagccaaagttcctagtccccctcccctccgctcccttctctctcctcctcacggacgtcagagctccttccccattccggcgttgccaagaaggccggtttccgggccctgtcttccgctacctcgccggccgcctttcaccgtcatacaaggaaataggaaatatttttctgtctgtaccattgctttccagacccacaatgcctgcttctgctcacaaaaatctcgattctggttgtcctaggagatctacaaggtttaaggatattcatgtagtttatgaagattctgacagggatccttcttcttttaagaggatcaaaactgaagtaattgattctgaactaagtgttggttctgtcagtgacaaggatagtgaacacaattgtcatgatgtattactcaaggatctcaggactcagtgtaaagctaagaatcggaagatttcaaaaatcacattggaaggatgtggcattaagaatcaggttaaaacagaagatgacattgatcttgataagcctattgttgcattgaaacagaagaggctgaaaacatctcctgctaaggctaatataaagatggatgcgctaagatcttctccatgtgctgctaaagagaaagatacaacatcagccagagacaagattcttagttctgcacagactttcctgctgaaagcaacaatgcaagaccgaggattagagaagcctggaaggagaattgcagaactggagcagtctaaagttgttattgattctgctgaagaaatagttggggagcaaatttattgtgctgaagtgaacaatacagctggagttctagcgggttgtgtaaaacctgatgtactatatgaaataaaaactgaagatacaaattattctgaatttggaacttctatgtgttccataaagaatcctgatcattcatcctttgagctgcaacagaagctggtggatgatgatgactgtgtgcctccattttgtttcatgacccgaccagctcaattagctgatgtttctgatcattcctgcgaacaaacctgcagttccaaagaaaacaattctgatgacattacagctgcaaaggcaactgatgttgtttcttcattggatctcactgatgaagtgagaaatcatcagaaaacatctgaaaatataactaatttagatgtggataagtcttctactgcaaatggacttatggcttctttcagtgagtcctgccatgaccgtatagataaagatgagcaatggaatttatttgcccatggggaatgaacctgcaaagattttggaagagttgtctcctattgatgagtctagcacagatactcaatctgatttgtgtagaagcacagaaatgaatttcacttcacttgagggggttgtacggatggaggctgagggccaattggattcaatagtctgctgtggtgtaagaccaaagcatatgttactagatatggaaattggacatacagccactggtacattcacctttgacaagactatcgacttagctcatcctgccaattttgttgcacaagatggaaggctagaaagtatagtatatgatgttttgaataatcatgcacaaaggacaacctctaaaagtaaatcttctgttggacttccagatactgctgtgcttcagagctcacttattgagttcactgacaattgtctggaagataaaagggcttcagatgataaattttcacatcccaataatgtggacttgccattgaaggatacgttaaattctacaatagactatgacatttgtagatctattaataatgaaggatcagaagaagaaatagtgcctcaacatcagttataccagtcatgtagtgataagttcaaccttagcagtgtcatgccagagatctctaatgctgaaaaatcacaaaaattatctgctggaactcaaaattcttctgctacttctttggaaactgacggacgaattaaaaggccaaatttttttgtggatgaggaatcaattgaagaacatgctccaaaagtattactgtccaagagaaagattatgtcaccaacgtctcaggagaagctttacagtgctgtgactggtattgatttgtgtgatggagtccaaagatcgaatagcaaaatcattattgaagattgtgacaaaactacaatatcattgcctcagccagcacacatgcaaggcaaatcaatgttccacacagacaggagacttaaggacaggacatctgtctcccctacaagcaaaggacttctgaagtcaacaggatccccgcccaatcaacagacttgttcttgcatgagaagttcgccagtggtcttagacactgagaaagctgttgagttttcacaaagacagatgcatgatatagaaaatattgctgcaaagcttatcaggagcttgaaacacatgaaaagtatagtggatgaaagtttgtcaacagaagcatactctttacttcctaattttaacattgcccagatcagagcagcctctgaggatgcattagaagtggagaggactacgaggaaatggctgtcgataatgaacaaagactgcagtcgcttttgtaaaatattgagcctagcaaagaagaatgatgtttctcatcctgaagcgccaaggaaacaaagaaaaataacgtttgcagatgaagctggaggaatgctctgccatgttaagttttttaaggatggacaagcctctctttctgaatgccagagtgatttataggcactaagctggtcttcatcatgaaatttgatcagaaaggaaaccttgttgacaacagaatataatcaaacaagctgctcagctcagatggaccaaaataatgaacgcacgcacagtatattgaaccaaaatagtgaacgcacagtagaaaacagacggagaagttagcgcatgttgaacgcacagtatgtattttactgtaaattaattgatgacattgttgtcccaactcaggtattatccttgtatgttgagttcaagagtccatgtaaagcggcaatttttacaatgttcgctgaggccacaagtatttgtaacccagaattgtagcctctgtaatacaattattggatactgttggtccaaagtgctttatttgaaggaactatttaagtttcagtaataggaatattctcttttaagttatactaagttttagattagtacgtaataaaaataaatctctactactaattataagcataacgtaggcgtccacacccccacggtggtgcacgttctgccgcccgcgcatcccgcccgcggccgcaccttgccccgcatcacgcagtccaggcgcaattcctgctcgcgaaggtttcgggaaaggttgaacaccgcatttcgcctccggtgtctgtctgcctgcctggctcgtgctcctcggcgtcgccctcacccccatctcgaggccgccaccccgccgccatcctggctcaccccacgacgcaaatctgtgtgccgcccctcccctcccatatcgccatctctcctcccctccccggtcaccacccatacctcagccacctcggcggttgtgctaggggcgatggtggtggaggctgcggtcgcagctgtgttagtggaggagatgtggtggcggcagctagacagcatcgtgagcgcggtgtcgtttgggctcatgtccatgttccttgccattgccatcctcgagcacttcctccgccccctggcccacacgctcgagcacgcgccgccccgggggatccgccaccgcctcctcctcttcctcagccgtggcggtgagcgcagcgccgcccccagtttagatcttgaggcggcgacgaagcttcaagcccacgcgcccctcgagatggggccgatgcggacgcggatccgaaactggaccatggggccgacggggtggccgcgtggtgggtgtgggtcgcgctcaccgtctgcgttgatgtcgtcggcgtcggtctcgcgctcgtcgggttcctctactgaacaaggtttctagggattccccggtttctaggaattccgtcgtcgcttggcgctgccctgttatcgtaggtgtcgccagctgccggtcctgtggcccgtgcaggtgcagccatgcccttccatggtgtgccacaccagctctcggaggtgcacaagaagcgcacgctctaccatcccgagttgccctctgcctccaggtacgcacctcctcgttacggcggtcgaaatgttcatgaacgcgagctctcagaggtgtagaagaagcgcacgctcagaggtgcagaacagatacgcacctcctccagagcatttcgtttgttactcatccatcggacatgcatttggtcccaaaaaaagggtcaagctcctatcactgttcatcatttggaatctttgagaactacaagtttgtagcggctcatttatctcttcaaaatcctaccagcacgtggtagtaaaatatagatgataatttaggtgatgggttacttatataatagattttgatgtcagttgtgttgtttttttgcgttctccattcacttagattagaatatttgtaatggcgaaatattcgtcaatataatattagttgtatgtacctgattcacgcattttttatgcattactaacaatttatttacttttattttagttgtttgtcaggatgaagcttgctaacgaacaaaactagatatctccgccactagcactgatggcgagaccgccccggtgcatcttaaggggcgagagggcaggggaaaagcagcagcagcaaaactggtcaggggccagcacaccgagatccaagcatttcactatcgagcagcggagaaggacaacgataaatgacaggtatgcatcttgactagctcgctgagggggatggcttggtggatctaatgttcgtttgcttgtatcgctactaggcctgctgttgatcgaaaggagcaagcgagcaacaccagtggactacccttgaaaattgtgacctggcaagtctagtaagtgatgcttgcatcataatacattcacttgagactacatgaatgccccctaatattttagggatgaggcgacagggaatagccctttcactgtcttcatctacttttgttctccagatgacacgatggccatcttcctggcgctgcggtcgccgaagctggaggtgttgggcctcaccactaccttcggcaacgtccacaccgccctcgccacgcgcaacgcgctccacctggtgccgccgcctaccttccttcctctctctcccccaccctgctcgtctgttccacccactccgaccgcggctcacatttgcttctgatgtgtgtgcttgagctggaggctgttggcaggactgacatccctatggcagagggatcccatccaacgatcaagaaagccaccaagctgaggatcgcaagctttgtccacggttcagacggcctgaggatcgcaagcttcgtccacggttcagacggccactgtggatcgaggtgcggcaggtcggggcgccgccgcggattgtaggctcgaccgagactacttcgtcaccaacgtcctcgtataggttaatgccaccaatgctgggacagaaacaagtgagttgaagcaagatcgacagatttgataaaggttctcatatatgggtggaagataaagatttgtcctgggttgatggtgaggtatttcgaattgatggccaaaacgcccatgttcgcacaaccaaggggaaggcgagtttctcgcacaaccaatgttgttaactgaatagttaaactgaataaaagggatggcgtattgtggcggctacgagggaccgatgttcctgtgtggcagtgacaacgataccgtggagccaaggcaatgtcagcaagctgatttttcagattggaatctatggttctttttaaagatcgaatatgttctagcatcttaaaaagatttgtcagaatgtaaacatttgttctgaggtcatttaggcctcaaacagaatttcttggacttatttcgttggagggaatgggacatcttgagatctaaatgtgtatagaagatccaaatgtgtatagaacatatatttttatgggtatcaaacatgattgtgtgcaaagcacggacatggtactataacaatgaaac

SEQ ID NO: 35362 - DNA, 421 bp, Zea Mays
ttctgactgaccggatggaccctggtctctgcaggtgatgatacaatggaatccataattgacgccttgtgatccagctggggccgtacgtgtagccgtgtgcgccatatcatcggctgggcggacgcagccggtcatgggtctccagctttccgttgacagcgacggcagcgcccggatgagaccgggctggcgtgcctgaagcttgcgccgtttctaagcggattcctgcaggaacagcagctatcaggatggattcgctgtagccgcgcgcgaaagcttaggcttgtgcgctgatgacacctgatgatcccgtgcctagccttgttcaggtttgttcagatcaatcgacatgctctgttcaggtttgtgtgcaatgacgtctaaaagaccctggcctgataatatactaccgtaacac

SEQ ID NO: 35363 - DNA, 1975 bp, Zea Mays
cttccacaaaccccataaccctagcaccgccgccaccatgtcctcatctccatcttcagtgaaccgccgtcccccgggcccgctagcgttggggctggagtccttggggaagaagatcagcatcggctggtctccgtcccgggcggcatcctctccatctcgtgtcgcacctacgcgaccccactgggccatggcttctttccccgtggtgcaggtcttttcggtcctcaggcttcatccctgtgcaagtgcagggataattgcttctaatctcccgaggctgcataacctaattcagaggcagagcaagggggcgtgagggagatgagggagatcatcagcatccatatcgcgtaggcaggcatccagtgacacctctgtcgggatcgcgagggatgcgttcaacacgttcttcagtgaaacgggcgcagggaagcacgttccaagggccctgtttgtcgacttggagcccactgtgattgacgaggtgaagaccggggcgtaccgccggcttttccatcctgagcagctcatctcacacaaggaagatgctgcgaacaacttcgcccgtggacattacacaggctcaaaatgttcttggaaacaaggggactgaaattgcaaaggtagcacatcggcgaactgatgcggaggcgggcgtggaggcgctcgatgccgtccagcaatcagtagttgtcgctgcatcggcgacttctttcccccaccagcatggccgcgtgaatggttcaggtgagacgtcgttgctttgtttgattcgagagtgacgctgattcgaattcctactcgtgggaggtcagtttattcggattcaaccatgcatgtgatcgatctatcagagagctgaccaccttctttgcttgtcgcttggaaccatcgcaaagttctttccaaagcctacagcttctaggaaatcggatacgatcacccgaaaaaggcaagggggaaatcttcttatagatctgttccgtcattgtgacaatcatttgggagagaaacaaaaaactccatctggaagtgcacgacagccactacagttgactaccgatgtaaccaagatgatgcaaaagcatcagctggaaacgccatagttgctgctactgagacttctttagtgatcttttggtacatcgctgctgatacaaacagcctacccagactgcttttgtgaagcacactgctttctgagaagccatttgcagtgcaaggatgaaacttggtcagagtgtttaccatatggattggcagccccaaataaagctctggattgtcctattcccatgacaaggttgtgctcttctcctgcagtgaaaccaaaaaagaaggcgcgctactgttcttccgttttcatgtcaatgcaacaacagattactgatatagctatgcctggtgagtggagataagtggaggtggcactaccaattccttgatgtaccaggaatgtttggattgttgtattctgacattgtttggctcaacatattcaagttggagtgtcaggtctccaacaattaaacaagatacggaatctgtgtaagcaagagcattcataccttgttagcttccttctctctctctcaagatcgatctagagaccaacaagatcatggacttcttcaagtttgacgtcgataacgtggtcatggtgaccggcgggaggaacaccgggcgtgtaggagtgatcaagaactaggagaagcacaaaggcagcttcgaggtcatcgacgtgctgcttggagctttttgcatgctatgtctagttttctcctatttgttgtacaggaaaacatagaatggaattcaaatttggtggtcgcaaaagtgtggagacttgaattcatataaagttaggcttaacattagtgcaaacagttgtattttagtttagatttagagtacacttatgtatgccttgtttgacaatgcttatttatgatatattgaatggtacttattt

SEQ ID NO: 35364 - DNA, 1696 bp, Zea Mays
acacacacaccaggcgcggtatccactggtggtgttggtcttcgtcgccgtcaaggtcgtagcactcgcgtttcacatgacggcctggtgcgaccgcgaccgccttgagacacccgcgttctgtgccatttccgccccttcaccgtaccatttcgtcccgattccgcggataaatgcttgcccctatttgctcagcccgctctcggacgaacccattcacccgtccggccgtccgtgcgcggcgcacccacccggcaccggcaccagcatcaccgcccgcccggcgcccgtcacgctcgagaggaggaggaagaagaagggactgggcgacagcgcgcgatggccgccgtcgtgtgcgtcaccggcgccggcggcttcatcggctcgtggatcgtcaagatcctcctcgcccgcgggtacgccgtccggggcacctcccgccgcgaagctgctgaccccaagaacgcgcacctgtgggcgctcgacggcgcggcggagcgcctcaccatgctgcaggtggacctgctcgaccgcgccagcctccgcgccgccttccgcggctgcgacggcgtcatccacaccgcctcgccgatgcacgacaaccccgaggagatcatcgagccgattatcgccgggacgcggaacgtcgtggaggcggcggcggacgccggcgtgcggcgcctggtgctgtcctccaccatcggcaccatgtacatggacccgcgccgcgaccccgacgccccgctcggcgactccagctggagcgacctcgagtactgcaagagcaccgagaactggtactgctacgcaaagacggtggcggagcagggcgcgtgggaggcggcgcgggcgcgggggctggacctggcggtggtcatcccggtggtggtgctcggcgagctgctgcagcccagtatgaacaccagcaccctgcacatcctcaagtacctcacgggacagacaaaggagtacgtcaacgagtcgcacgcctacgtgcacgtcagggacgccgccgaggcgcacgtcagggtgctggaggcgcccggagccggcggccgccggtacgtctgcgccgagcgcaccctgcaccgcggcgagctctgccgcatcctcgccggactcttcccggagtaccctattccgacaaggtgcaaggatcaggtgaacccactgaagaagggctacaagtttacgaaccaacctctgaaggaccttggcgtcaagttcacgccagtgcatgggtacctgtacgaagcagtgaagtcccttcaagacaaggggttcctcccgaagacatctggcgccaaggtgcctgaacgacgcagctgcctgcctcaaacgacatcacagccaccacccgaaatcgtttcgaaactttgaggtggatctgcacacgtgctcaaactggccatgtgtttttttgtcagaacaagccgttcatttgattggttattaaaagattttgggcagtctgttcttacatagcaaaaatgtcttgtctctgtctatggtgcatcctgttgcttttgcactacaactatacacatccttgtctgggtagtctgttctttacatagcaaaatgcgaagtctgcagggtgatttcagcgatgatggaagcatgcccgcccacctcttgactgcatgcgctggtcagctgcggcttattctacacatcttgcttgtctgtactagcc

SEQ ID NO: 35365 - DNA, 2593 bp, Zea Mays
cgcagatatatcacagttgctgtttaactactataaacttataaactttggagaggataatggttctcatttgacttctctgaatacaaatactggggagacagaggttttaggatctgcttatgaattgcaagaatctctttatttcaggtgtcctggacagagaaaactaaagcgatcaagagttgatggttttatttatgacgtcaatgaagttgatttagatgcatcaaaggatgcagacttctcgatcgaaccatgttctaaatcaaagaagaaatatttgaaaaagactgtaaaacccaggcatgaagtagttgctgtaaatgaacgaaacaacacaggaaatattaaaggatcattgtcctccaatggagaaaacaaatcccttcctcttatcacggcaaaacagtatgcttgtcgtgctgcacatttgtcttcccttgtagtttcatggtctccagttgtgtcatcaagtgataaaacatcttgtttattgaggcattggtgcattattgctgttggctctaaatccggaaatctttctttttggaaactacctaagccagaatattacacaatagatgctggcgtggttaccagtgatccaatgctcatcggggttttgcaagctcacaaatcatgtgtcagtgtcatagcttggcaagttctttctgcgggctcttcaaaatcctcgttgcttttagctactggatgctcagatggaagtgttaagatatggttagggaatattgaagggttaaatcaatgtgcaagtggagaagtgccatttgcgttagttgctgtggtcgccactgatttatcatctccagtgtcatcaatctcattagccatacctgcccagtctcaacacgaggtcagtttggcaattggaagagtatctgggtcactagaaatatggatatggaatgcatctagcaacaaaattgagattttcagtgcatggcatgcacatgatcaagtggtttacaatgggctatggatggctattgtttattcagctgcagtcaggacaattctgcacgttgttggatctctcacgaaaaccaccttgaagaaatttttatgcattcaaattttccagagctaagggagtcagcagacctatcagaactctctgatcgatgctatggtcttacactagcacctggagaacagatgattgctgtggtccgcagtttggatctgaaccttctgaaccagatgtatcaagtcaggacacaaaaggcggtggttgagttcatttggattggtggccaatttgttggtattccactagacaggagcattgatatttgcagttcacagtccacagacttatcctcaagtaatctcatgtggtggggatccaacattttgtggtcgctgaagaaatacgaaaatgtagaaaagaggcttgtgatatgggatgttgtagctgtgctgcaggagttgaagaaatccgcacctgcctttctggagactctagtgcatagttgggtctcagtgttactttcgggcgacccccagtgtgtttctatcgatgctccatcacgttcaatgcatgacatgatgccctatgtcagcacgcggaagctacacttactgaacataatgtgcagaaaagtaatggtcagcattcacacacatcatggtcctggtgctgaaaacggcaatgaggaaacaactgatttctggagcactcttttggtgaggagcgaaacagagctgcgagagaggctggttggcttcacctttgctgcagtcctgaaacggacagcgtatttgttcaatggtacctctactgaaaattgctggtttcctgttggggttgcccagatggattcttgggtaaccatgaattacgacggacaagtgcatgaccagctgcagtctatcagatcaaagatcaaagatttaggaagcaggatcgacggatactctgacgtagaaagctgcccctactgctcttcgccggtccatttcgagtcgcctgacgtagccatctgtggggaaaggcacacactgccgcggtgcagggcgtccatgatcctgtgctccgttgtgcagcctttgtggcactgcgtgtgctgcggaggcacggtcaacaagctgttgccggagtcgttcttcaccatgcaggcgtccaccatgcatgatgaaggatcgctcgatctgtcagcagcctccgtcccactttgccccttctgtggcatcctcctgcagaggtcgatgccggcgttcctgctctccacctcgccggcatagaggctctctgtggatgctagtaggcatccaccaggtgtagcatgcagtagcaatgtagtactagtaaagtttgttctagtcgatgctgcttacactcagttactcttaccaagtatggctggcagagtgtcggttactggtcattttttaggtcccttttgaatgaatacgatgagttcttttgtttggtttcttttggaccctgacggtggcagattaccaggccaagttcagctatctcgaattgtctcattcgattgttgcggacatgcagttctggcagttccaattggttgttgcggacatgcagtcctgtcagttgact

SEQ ID NO: 35366 - DNA, 3341 bp, Zea Mays
gtgttaacggagatattgtttcatcagttgattcattgagattgatgatggaagaggaagaaaggaaaaaaagaatgttcaggcaattgaactcagaacatagctcgcttagtgggacttttacgtgcttttctgtggatggatctaaatcattgtgcaaagggaacccaagctctgcatctgctaatagcctcttgaaaatacgtaatgtccaaagaggacctcagaaacggatagcctgggacaatgaacttctgtacgtaccaaaggagggtattacagaaatgcttagaagcttcatggatcaatttttatctggagcatacaatatcctgatgcagtcagtctgtggtgatatcatggatgagcaccactccattgagaaatctgacataactacattcttcaaagttgctcggtttgttctagcttttcaacatgaaaaggcttcaaatgatcagctaccgcagttatatcttggcttatttgtgatgaatatcataactatgtctatccagaaatctgctaaagggattcaaccatctggggtttctcctagcaatgaacctgatgataatctgccatttcatggtgatatatgtggacctgttgcggccacgttgaatgaagatatgttcaatatagtcatttccaggtggcgtgagacgtatgaggctcttaaggaaactaacgactacaaaactctttcagcagctgggtctttaatgaagaacatgattgacatgatatatttggtgctaaaagtactccctgaagattcaagggaatctcaaacagctcgtgttttgctctataaactgttttatgatcagacagaacatggtctcactcaatttctgctgaacttgttcagatcgtttgatagtcacaagcaacccaaaagtgatctagtggatttattagaaacaattcatatcatgctacagctcatggaaaagcttcaagcacgtggtgcattaagggttgcaaaaaagacaaaaaaggtcagaagaaagaagtccacaaatgataaaaaggagaattcagaacccaaagtggataatgcagaaccaaacgatgctaatcctacagatggaacgaaatgctcacctgaaacacttccagatttgagaagcgagggtcctgctttagaatcttctccctcagaacctggaaaagtagacactagtggcgcacatgtactggatacacttgtggacactgtagttaacattgagagtaccgcacatgctgaaggtgacccatcttgcacagacagtggcgtaatgaagagaaatctcattgaagaagaggtcttgcaaacaattctgttgtgcaaaatatttgctggctgttgaagcattacaaaagtaactcctaccgtacaaaccattacataatatgcatgctacggagattctgtgaagacctagagctgtcaccgatgctgtatcagctatcacttttaacaactttctatgatatattagcggaacaaaagttgtctagttcaaaggagtacacaaacattgtaaattttctttctaaagttgtgaggaaaatgttgagaacaataaaaaaacagccactgctatttgtcgacatactattttggaagacgcgaaaggagtgtcattgcattgatgctgatgcactactgaatgagcttaagaatgatgttggaagcaaagacagtgaaattggttcaagtaaggggtggagagatcgaataaatatagcagattctcttggtgacgatgaagttgacgtagttataccgcaggcaccttatgatgctgataaggatggagatctatcagctggtgaacatactgatgactttaggaagagtagtactaaatataaacggagcagattgtcactttcagatagtgaggctgatgaaatcgagaggttcttgaaccatgtatcaagagattcggtgcccaaagttccaaaacgacgaggtcgttctctttttacggaagagcaagagaggctcataagagacctttatgaaaaatataaggatggtcctaaatgcagtcatataatagctgagtctttagaccccagcgggaagatatcttctgctcaagtttctcgtaagcttacacagttaggtctcaggaatgtcacaaggagaaaaaaggttgcaggcccagaaggaaaaaattacacacggcaagtgatgaccatgatgacacaagtcagagaaaatcatctgatgaagacacattacaaatcaaaaagtaagaaagttccattggtggatagttcactgagtggatcacagcatcaagaagctcagcatgacccagactctgatgatgcgaccataggatccatgattagaagtagaaaaaagaagaggttatccacgtcagattttgaagggaatgtacgaaaccatcaagaatcttcagacaacaccaaagccaaggactgttcaccgattatatcccaacatgagaaagcattgcaagacatttatcctgatgatgagaccattggatccatcattagaagtgtgaaaaagaagagatcagtgacatcaaatttctcagcgaatatagaagcccaagagtctttgagaaatattaacctacaagatgaaactgttgtttctaatatcatggatgcttctgtaaatcatgggtctgatccagtcaataacagtgacaatactgttgaagatgaacttttggatgattttgaaactgagctagtcaataacggtggcaatactgttgaagctgaacttttggatgattttgaagttgagctagatgatcatgagcatactgaccaaaggatcactgatgatgaaattatgactgaatcagggaaagcaacaaactccgatgctaagggaagggctggtttgaaaagaagacacagaatggttattgacgatgaggatgatgattagtaactgttcaggactgaagaacccgtaactattgaggagtggagtttcaaatgggaaatgggattaaaaaaagaacttttcaggattgtttcccttgcactgctaagctctgagcacgattcaagctgtttcacacctactagtgccagatgttcttccatctgtaatgtttagtggggtcacaatctaatggaattttgcagatgcaaagttcaggctgccctgctgtgtggcctgctgtacagactgataatttcgagtactgttttttttgaaatgaaatactgtagagaagccccccgcagcaatttcgagtactgttggctgtatttgaaactccgaacactgcaactctagcgaatgcgctcagttatactgttttcactttcacctaaagtgctctttagac

SEQ ID NO: 35367 - DNA, 1667 bp, Zea Mays
gtgggcctacgtctcggttatcttcctggacggagagacaggggattaggggaaggccgaggcgaggcagcatccagcaatccgccacgctcgtcgctcgcccggtcgccccctccacccactgccgcttcaactctctcgctccctgtcttctccaaaaccctaaccgccgacggcgatgctctcgacggcttcggtgccctccacctcgttcgccgccgctttcctctcctcccgcgctcgccgccggcgccgcgccccctggctgcggtccgtcgccgcagccgccacgtccggggtgggggacggagaggtggagaggttcgctaccagcagctccatcaccgactacctccgctaccgccgccccgagcttggctgtgccggaggggcaggcggaggcgggctgccaggcggggagctgcagacggcggtggtgcgcttcaagaagcggttcccgtggtcgcttctccaccccttcctccacatactttgatagactgcagcgagagcttgaagattacgattgtgtcctgtatgaaatggttacaactcgggagaatttgagcaatccgaaaggtccaatggctgctaagaagatgaaatcttcacgcagaggatttagtattattggtttcatacagaaacaaatggctcgggtcctttcgttggattatcagttagactgtcttgattatggcaatgagaaatggcaacatgctgaccttgactatgaaacattcaaacagcttcagagtgaaagaggtgaaagtattctcacgtttgccatagacatgacactgaaatcaaccaaagccttggtgcagccaagtaacatgccagatggccttaacttttggaggtcgaagttactatgggcctcgcgtgtgctaccaatgccacttgttgggctactcgtcatcactgggctgtgtctgccagtggaaaagcaagatgggtttccagagctggaggcattgtccaggctagattttggagctgcactgaagattttcttggcaaagcaactgacatctgaattcacagctgtgcctacacccgttgaggagaaatcagttatcattggggagaggaacagagttgctgccgagaagatccaggaagcaataaacggtgggtacaagagaatagcggtcctctacggcggcggacacatgccagacctgggaagacgccttcgagaagagctggacatggtcccggccgatgtgcagtgggtcaccgcgtggtcaataagaagccgggagatagacagcgaatccctccccttgttgaagacgctggctgaggcttcaggctggcctttgaatagatacgagacgctcgccctgctcatcttctcttcggttctcgcggtggatctttggttctgggaactcttctttggcaccgcggttaattgtgcatctctggctggttcctggattggccagctagcttagcggcacactactatatatagaaatggcagtataaagaaaaatagaacccccccagtttagttttgatttgtccagctgttgctggagtactgcagcaaaccattgtagataagacacttcatttcgatcaaagttgaaacgagattgactgctttctctagtcatgtgattgggttttgctgaatgatgcatgtttgactcggc

SEQ ID NO: 35368 - DNA, 793 bp, Zea Mays
tagtaaagatgttgacttgctatggatttaaacatatcaagactatccaaaacccaccctttaaaaggtgtattctgtcaatggtacacgagtacgatcctggagcgtcgatggcggctatggatgcggtgatgcaacgcgtcctcgaccagttgtcccaaatggagagtcgataacagacgccatgattgggcgctgcagcgagctcgagcaacgaatcaaagcgtcggagcacaaggtggagacccgattcatctccctagagatggatcaggcgcggttcgaggagtggcgcccagatgtggagaagcgcctcgacaacatgttcttgaactcgccagggcgaccaggctcctggagcgcggcaccttcactgccgaagcttccaaacccggtctgattgtgtcttcggggtcggcgttcaggcgctcacctgccggattccacaacgccgacgggccggatggccactgcgtcgaacacaatcaccgggagcgtgagtttggtcgcatcccgacccaacctcacggcccggtcaaggaccgcacgaagggcatagggacccagaagattttaagggggctatggtagtcttcctcgtctgaattttcatgtattcgatggggataatctacaattatggaagtcgagttgtgagaattactttgatacgtatgaggttgacccatcgcactggattcgggtgacaacaatgcatttctctggccgcgtcgtgggttggctgcaagctgtgggccgccgcgtgcgttttttgtcatggtcagagttttgt

SEQ ID NO: 35369 - DNA, 1679 bp, Zea Mays
cagcagcacaccacatatgcatccaccggcgtccactggctcggtcgcgcgagcgccaataattgccggcgggtttcggcccgcgtccgcatcgtccgtgtcacctgccacacgacgcaacaccggccgttgtttctggggaggtcaattgttggtttggcttgcgccctaggtacctgtggagagcggaaacaacatggctaggttcactgtcgtcgacttgttcgtctgcatctgccatctgcatccacggtcggtatcgcctttggtgtcatgcgcgcagcggggtggccttgtggggctccatccggtggaacgggacaccagggcctcccatgaggccatgatgcaaggtccgactcgttctcgttcctttcccccgctcaagttgtggagggccttttgcccttttctggctgcacacacacagacacagccttctcccttcgcctcgtgcctccttcatgagtcatgacacactgcggcgcttgatgggccggcccgccccttcgaacaaagttgggcctccatcccagtccgcaggccgagacagagtgaactcacgtcgtgctgccaacgacgcaaaaaccgtgtgaagccctcaaatctcgactatggccctgtttggcacagctgctatttgttgaaaaggcaacttatctaataagctggtggaaaacagcttctgcttgttggctgcttttagtgtagtctgagaagcagctgaactgataagctgctgcagaagctagctatttggcagaacttctgcttaaatttgtgaaaaaaagctgaaaataagttatgtcaaacagggcctatatgtagccaggcgaggttatatgggactagatacgacgaaattgacatgtagtgacaggttggcccaaagcacgacatgggtcgtgtttgggctcggaaacaagctcgtcgggcagcctaggcccaacacgattaaagacgacccgtttagctcgttcctgaacccggttagcccaattaacccaacacgacacaactcggcctgttataggctcgtttactaattcaccatatggccaaattcctgcactcgtgtgagcgggagcagcccagtccgcagtcacaccacaatccgcagccggagcccctccctaaatcagccaggagccagtccctcgccctcagtctctccgtcttcggtccgccccagcatcccctaagaaacgcccacaccgacggtggcgcatgcgcacacggcactgcgcagccagccagtcgcctcctcctcctccctcccccatccgtccgtctcagtcgtcgcccgtcgggcatcacgatcagaacgaagggcgttcaccggtcgcatctctctcgccacacgcaagctgttcagagggagcgggattcaacggtccgttgtctctcccgccatcgccatcgccgacgatgaaatctaacaccaacacgtgtggagatgttgtaccttgccaaagattgggagcaagttgcagctcgacaacaacacagtgtggagaacaaagaacttgaagacctaatggcgaacatgtatcttggtgcacaagaggatatttctgtttctagtagttgtagtaatgaacatgaagtagtgaaccgttagatcactaaaagagctagattgtactcttatttcctttagggttttgttcccatgtggt

SEQ ID NO: 35370 - DNA, 1180 bp, Zea Mays
agtgcctgatttagtagagcgcactagcgaaaacccctctcgtatgtcgcatcgcgtctaaacccttctctccttcagtccttctcatccccacctccctcgcggatcactcgccgcctccgccgccgccgccggtatctcatacgcccccctcctcccttcctcgagtgagactcttcccgtgcccggaatccttacccgatccgtcgttctgcaggccgcagccgccgccgtgattctgtccctccaacttccttaaatcctagagccagcagcaggcaaccagcgccgacgaggaggaggagcgcggagtagaggggctccggcgaccgcgtcggagatggcggcaagccacggcgcggggacgctcaagtccacctccatcaacggggtcaagctctactcgctcaacggcggccgctatgtcgccccctgggtcgtcgcgaagaagaagcgcgccctccgcaaggacaaagagtatcagcggaggctggatttgatccacgacctgaggttcgagaccgccaccaccaagatcaagctgacgcccgatgaccagtacctgatcgcctcaggtatttaccccccgcaagttaaagtctacgagttgaaggaattgtcgatgaagttcgagcggcacatgatctcagaaattgtagatttccagatccttggtgatgactattccaaactcgcgtttttgtgtgctgatcgttctgtaaatttgcacgctaagtatggaagccattatagcttgagaattccaagagtgggaagggacatggcctacgattgctggtcctgcgacttgctatgtgctgcttcatcaccagatctgtacaggataaacctagagcagggacgattccttgcttctctttcctccgaatcaccagcaataaatgcggttacacgaagtaagatccatgggcttgttgcttgcggtggtgaggatggtgcggttgagtgttttgatatgaggaaaaaaacttctgttggcagaattaatattccagctgttagttctgaagattattctcaggaggtcacgtctttgcaatttgatgaagatcaaggatactttatggcagtggggaccagtacaggaaaggctattgcatgtttgacctttatgttctttctaaagtgtgctaattgatgttggaacctacaaagttgg

SEQ ID NO: 35371 - DNA, 1550 bp, Zea Mays
cgccgatccaacgggaatgtcaccgacgcgacgcgctccagtcccctccatcgctgcgtccaccttctgtagtccagttgtagccgcttgccgatggcgcggccggcggcgaaggcgcgggtgccgaagcacttggtggcgctcgccgtcgtcgccatcctcggcctcgtactcgtcgctgactacctctgggcttcgtcctccgcgtcgtcctcggccgtctggtcctccaggcttaatctccacaccggacccgccggttcgacgccgcccgtcgcgaagaagattaaggaggacaagaaatctgtaggttcgactggcataaatgcaacttttgcggacttgccagctccagaactgaaatgggaggagatggctgaagcacctgtggcccgtttggatggcgctgctatacagattaagaatctcttatatgtatttgctgggtatggcaccattaaccatgtgcattctcatgttgatatatacaatttctcggataatacatggggtggaagatttgacatgcccgaagacatggcacattcacatttggggatggttactgatggaagattcatctatgtggtaactggacagtatggtccacaatgtaggggaccaacaactcgaaattttgtattggacacagaaacaaaagaatggcgtggcatgccaccattgccagttcctagatatgctccagcaacacaactttggagaggcagacttcatgtgatgggtggcagcaaggaggataggcatgaacctgcgcttgaacactggagtctcgcggtaaaggatgggaaagcattggagaaagagtggaggagcgagaaaccaataccgcgtggaggtcctcatagggcttgtgtagttgcaaatgataaactccttgttattggtggtcaagaaggtgatttcatggccaagcctgggtctcctatatttaaatgtgttagaagaagtgaggttgtgtatagtaatgtttatatgcttgatgatggaacgacttggaaggaacttccacctatgccaaaaccagattcacatatagaatttgcttgggtgaatgtcaacaattctcttgttattgctggaggaacgacagataagcacccaataactaaaaagatggtgttggttggtgaagtatttcggttcaatctgggtacgctggaatggagtgtgattgggcggttacctttccgaatcaagaccacattggtaggatactgggatggctggctgtatttcacttctgggcaacgagacaaaggaccaaaagacccgtctcctaaaaaggtgaaatgggtggcgttggggactgtctgccattgccaccggtgtgttgtatgtttattcttttagttaggatcaccaacttttgcaccattttgtacagagagaatcgatctgtccaggtgctgtcgcaatcttgtaagttgtagcgtgtacctttttttttattgagctcttacactcatcttctaaaattaatcacaacttcaacttgagccaagctaaaattaaattaaaaaaaacacaaa

SEQ ID NO: 35372 - DNA, 3666 bp, Zea Mays
cccctctcctgtttatcttctctgaatcgtctcccctgcctaagtcgcccacgacgcatgaggatcggcaacaacttccaccggccacccctattcaaacgcacttgtctacccccacttctttgtaccgcagccgttcctcctctcgcctcgcagcaacacgctcttgccgtcacgtggtgcctcggccttgtagccgtgtctaatctccgtcgagcagggaaccagcgctaagctcgccgcgatgtcgccttgccaagtcgccgtcgtccatcgcgatggagttctttatcgccgttcacattttgtcctcgccgtccgagcttcgcgttgagatcgtgagctgttcccgagcttcgaggaatcgatgatcaaacttcgacgatcaagtggacatgttcttcgagttctacaaagttaaagatcctgagcatctgtttggtgaaggttttgggtgtagatatatgcaagttggctattctctcctcatggcccacgtgggtagattggatggagaaagacggaccactgttcaaactgcctcagagcttttatgagaacttctctagtgttttctagagctgaaggcgcaaagatggaacacaagtgcttcagtgaaatttgatttctgcagctaacttaaatgcatcgatgttgtctctgcatttttcaaagctcacattagttattcagtgaacccagattattttttaacatcattaaaatcaaaaggattccactagaaacgttgcatgtgaaaatttcctgctttatttcgtgtctgcaaaggtacgtaccactgattccaccataaatcttctccacgtttggttttaggtactaatttttagtccctctaatttagtcctaaattatcaaacacaatgactaaaagagagattatctctattttagtcaatattcttgacaatttagggattaaaattaaggcttagaaaccgaacgccccctaactctgctgttgtttattatttgtaagaattattgatagtttgtagcaatttaagtgtattatttatgagaattattgacggtttctagcaatttcaagatgcaaattctgcttgcgaagctgactcgtgtgctctgtatttgtggatcttctgcactgtacacacatttgtcaccatgctagatggcactgatgatagtacggaaatcagttcataaagtgttgtcgttgtctcaaaggggaaaatagaacccaagagaagatggcagatgaacacattttgggacatgtctgtgacagaaaatctgtcaaccagcctagctccaatggccgacagcgtcccattaggtactgaggctaaaaatggaaaacaaatgccaaggaggggggagggcagcggctctcgtcctggaaatgtggcatggcggtgcggtggagcactggaggttgggcaatgtgacgctttgaagcctacttccctttcctccgtctctgtggtttggtttcaaccccttcgcttcttccgcagaagaacaaggagaaaagggaggggttcgtcacgaggaggaggaggaggaggaggtgcgtcgttccaatcgaaccccggcgcacaatctagaggccggggtggatcatcatcctcaccaagacagaactccatccccgttaaggtgttaaacattaatcatggccacaccgccagacggggcgcccgctggacctgatgacacgtcgccgccgccttcttccaactcgtcgacgccgcctccttccgactcatcgacgccgccacccaagtcctccggctcgggctcgccgtcgccatcgccacccgcaccgtcgttgtcgccgccaccaccggcgtcgccgcaggatagcacggcgccagcggccagaggctcgccggccgcgccgtcgagggactccccgtcaccaccggctccaaagcgcagcgacagtgactccgataatagtggcagcagcaagagcggaagcggaagcggaagcagaagcagaagcagcgggtcgacgcaggtggatgtcatcctggccggcgtggtgattggggtcctggcatttagcctgctgatgtgcatcgccgcgtgcgtgtgctgcgccaagaagaagaggaggaagaagcccccgcacatgaacatgccgtactacaccgacgagcacgggaacgtcttctacgcgaacagcatgcccaagtggcagagcagcgcgatggaccacggctggcacgcgccgtactcgcccgcaagcggggacatgagcggctcgcacgggccggggctgggccagatgccgccctcgccgggcatgccgtcgctgggcttctccaagagctcgttctcgtacgaggagctagccgcggcgacgggcggcttctcatcgacgaacctgctggggcagggcgggttcgggtacgtgtacaagggcgtgctcgcgggcagcggcaaggaggtggccgtgaagcagctcaaggccgggagcgggcagggcgagcgcgagttccaggccgaggtggagatcatcagccgagtccaccaccgccacctcgtctccctcgtaggctactgtatcgccggctcctcccagcgcctgcttgtctacgagttcgtgcccaacaacaccctcgagcaccacctccacgggaagggtgtgccggtgatggcctggccggcgaggcttgccatcgccctcggctccgccaagggcttggcttacctgcacgaagattgccaccccaggatcatccaccgtgacatcaaggcagccaacatccttctggacgagaatttcgaggctaaggtcgcggatttcggacttgccaagctgaccacagacaccaacacgcacgtctccacgcgtgtcatgggaactttcgggtatttggccccggagtacgcgtcgagcggcaagctcaccgacaagtcggacgtgttctccttcggcgtcatgctcctggagctcattaccggcaggagaccggttgatcccacgaactacatggaggacagcctggtcgactgggccaggcccctcttggcgcgcgcgctgtccgaagacaacttcgacgagctgctcgacccgcggctggagaacagggtcgaccggctggagctggagcggatgtgctcctctgccgcggcggccgtccgccactcagccaagcggcggcccaagatgaaacagatcgtccgtgctctggaaggggacgcgtcgctggacgacctgaacgagggggtgaagccagggcagagcatgatgttcagctccggatcggagtacgacggggccaactacgcggccaacatcagcaagttcaggaaggtggccttcgagagcagcgagttcagcaacgactacagcgggacaagcgagtacggcgccgactccggggaagcggcgacccagcggcagcaacatcgctgacctcctcgtccgagatgcgtgtgtggtgtacaatatttataccaaggggtcgatgtcgactgtcggatactatcagagatacccaaccctcgatcgtgacagctttagtacatgtaatgatgctcataaaatgtcatgtaacgtacgtatttgtgtgtgacatgttgctgcttgcttgactggcgaatttcgctgcttagttgtgcaaattttgctggcgggtgtccaaatgcgccgagggattaggaactttc

SEQ ID NO: 35373 - DNA, 3048 bp, Zea Mays
tttgtgtgtgtgtaaataaatatatctataattcagtattgtaggaacagcatgtgaagtttgaggaggtgaaggatgtacaataggaacagcaatttgaaattttgaaaaaaggcgggaaaacattttcactggcggttccttaagaaaaccgccagtgaaaatgcacttttcactggcggttccttaagaaaaccgccagtgaaaatgcccttttcactggtggttccaaaataaccgccagtggaaatgctgatttccactggcccctagcactggcggaactgagaaacgccagtataaatacgttttcaaccgccactacagagcttctgtgtactagtggaagatactttatttaattgcgtgaataacgacttgcacaaacgacgacacacacgattagcacgcgcgatcaacacacacacgacgcgtgacaacgcgtgcgaacagcaagcgcgacccgcgagaatgacgcacgacgacgcaggcgaacagcacgcgcgtatagcgcgtgacgatgcccacgaacagcgcgacgacacgagaatcactatatttatcggtttatactaaagcatggcccacaattaattaattataattaactaaagcatgaggtacgacaaaataatatttttaacgtgtacacgatattattgtgaaggtaaaacaattagaataaagtaaatcgaacgaccataaaagttaacgtgtatttactgaaccgttgatttaatattgtgcgcgcgacaagcgacaatgtgcaaaaacggcacgcggcaacgcatgcgaatagctcgcgcgacgacacgcgcgacaacacgcgaaacagcgcaacgcgcgaaaggcacgcgattcagcgcgtagcaacacgcgagaatcacaattagatatcgtgtttatactaaataagtattaattcaaaaacatttgtatagatataatcctattaacatatataaataaagcgtgactaaaacaataaatagtttaagtaaactactaatttaataactcagataaataaataatcaactaattaattaaaacgcgtatcgcgacaaaataatgttactaacatgagtgattataagtgaacgatttaatctcacgctcggataacgcgcgatacacgcgaacaacacgtggcaaggcgcgtgacacaagcgtaggaacagcactgcgacacgcgcgaatgatacacgaaaatcattaaatagatgccatgtttatactatacaattattaaaaaaatccaatttagtactgaccctatcagcatttatttaaaaggggcaagttaaaagctactaattagatttgattagagagctaatttaacaatgttaattcagctaacatttaattaattatataaaacatgcttaacggtgaaacattagtattaacacgtagactacgctaatacgaatatatcgtgaatagaacggaataaatcaggtttataactcaaaagtaatcaaatatttattaatctcggattaacgatgacgtggcatgattctatggctggaaaatggccacaatgaggaccacaaagagggtagtcataaagcatcctttccaaccaataactaatagaaatattggcacatggccatgcatacgggggaagatcattttctgacgcgcattttgcttttgggttgcatgcgacgtgcatgcggatggagtggatgtgagcctgctctccttttccgtggtgcaggaacgaaagcacggcctcacgcatgcaacaaaggaaaaacaaacaacgcgggattgtggcgtataggtggggccaacgcatggtttcacttttgacttcttctctgttgaacggcacgcacggcaagcggttctgccagccaggggaagggggcgcgggtcaggctgggcccgacgagcacgccggcggcgctagctgtggccgcgcgcaggggtttcggcctagggagtggagcgtggagggtgctggagatggccacgcctgctgcgacaagcacgccggaatggagagaaagagagatcgtcacgggaaaaggaggaggaggaaggggctcacctcgggacggtgcacgacgaggagggaggaatgggtgcgcagaagctttgacgtgaccgcgcaacgggaggctacgccagccatggctgctcggagcgtggtgatgcgaggatctgcagggggccatgggtggttggccgtgcgcaagggagctcggccgagcccaggactccaagccgcgagcgcactgccggggacttagtcgcacgccatggctgcacgacggggctgcgcacagaggagctcaccacggggacgaacgacgactccggcgaggcgagcttggacgccagcgaggacgggggcgctgggcggggtggtgcgcatggaggtggtggctgggagcgtgaggcacgcaacgcggctgggcgagcggttctgctcgcgcgccagggcgctggccgaacggcgaagtgggcgagatgggtgggggaaggcggtttggagaagatgaataggagatggggcgacctggtgagtggggcccacacgcaggcggcggcgctgggtggctccctggctagagcgtgcggtgctcagctcgagcactgggccgcacgaggccgaacgggccggcggggcaggcctgggtggggagcatgggagggggtattgggtttattttctctttttatttttctcccttttctctatttgaatattgttttaagttttgaattcaagttcaaccacgctctgcgagtttaaatagatgcacaccaaaacaaatcatcgtacaaaaatagatgtattctggcataatgcaataatcattattacctttagggttttgtttactaggcttacgcctatatacataacaaaataactctacaatatttaggaaaataaaaagaaaagcaaggacaagagagggtaatacctgaatttgatggatatcaaagaaaaaaatttataccctaaattcagggtgttacagacgcgcacgggagcaaacagcagaatcggctggggaaaat

SEQ ID NO: 35374 - DNA, 3069 bp, Zea Mays
gccatcgcgcgctcgcctccctccccgcgcccgcagtccccgccgcaatccccgcgtccgcgcccgcagtccccgccgccgagcagtcccgccgcgccccctctccctgcaaaccccgccacgacgcagcaactgatccaccatcgacgcgcgcgccgcgcgccccgacgcggaacgctggatcccgcgcagcagaaggcggccaaccagtcgccgtcgcccccggcccccaccccgcctgctgcagcaagcggcgtccgctaccgcatgccctcgtccccggacctcctcctccccgccgacgctaccaagatgcgccgctactccgcgctgcccaacggcggccgccaggagacgttggccgaccgcgtgcaccgctaccagggcgtcatgctcgtcatcctcgcctcgctcgcgctcgtctctctcgtcctcctcctcatgccacgctcacccgctggcaccatgggcggcgcccggggcagacaggtacgcactcccccgcccggtgacccgttgccggacttggagtcacgctgcctagactcgcccgctgggtggattcgtcgcgttggaggtcggattgtgaccacgccgtccagttaggatgtcgtcgtctccagatccaggggatggggttgctcggcatggcggccaagggcccctcgcccacgcgtcgcctcctatcgcagccgcacttggccatctcctcgctggtggcctccgtggctctgatccactgcttcctcaacacccggagatggttgacgtcgccttcgccgtctcctcgccagtggcctccaccagccccgcagtccaagacaaagccgcgacatgagtcaacccaagtccggtcgcacctacaccgatgaccgtacccaacgtattcaatctctctattcggcaacaccttaaaaagtggattgcaggcttagataatttttggaacacaacattgctccaaaaaagtttttctgaagaaaaggtatcaatctgcagtttggtaagtgagtctgaatctgcagcaccaaggacttcaataattagtttgaacctgcacttacagttctatgggtcttctcaattcttaataatattatatttttaatgaataattgaatatatattgagtctgtgtcatagattcagtcgccttaacaccctttgttgttttcccacttaagttagttaatgagatgaatggatggaaattacgtagtgaatgtatgataagtccaggctacatgttaaaagacacacttggctacttgagctctgtatttccatgaagaaatcttattgacgggtgctttcatctgctatttggatccgttgctgatggatcttacaaagaagaagttgagctttaagaggaacgtggtgtcattgtcatctgagctcaagggtgtgaggagcaagcttgcttcctaggagcagttgtttgtaagggaatctcaaactagaaagcttgcggagacaaaaacaaggagcatggaagaggaagtaatcaagctgcagaaatgcttataggacaaggatgaacaactgcattcattcacaagtagcacagaacagtaccatcatgagttggatgatcttagaacacatctgtcatttactcaagctacaggagaagcaggaacccaactgaaccttcaacttgcttgttctgggagatctgtgagcaagcgagttgtcctataacagttggctcctcacaatgggtattcgacatgagccccatccctgccacagacttgggaaaggcacagtgatttttatggtgacatgaagacattcctcttcaaattatatctttaagcaaccaattttcgccctactggtgcaaacaagaatttgcaatggataggttactggctgcacttgtttgtgaatacttggagtgaccacaactaagtcacacaatgaaactttactttccagagtgtaacctggtaactgccggacttctaatagaatgaactgaaagacttctctaacaaaagtggagctgaggggagcaagagtgctaaaagtggtccaatgtttttagatgttctcgaatgttatctgaaatatgaggtttatctcttgcttgatcaacaatagaagcaaaaaatcatccttttgtttatttatgtttcccaatataaaggaaaaaggggaaatattttggtgcagtgtgcccaattcttttgtccctagaaaactgtgtagccgcctataacaggcgctatagtcagttttagctattttagacaccactactatttgtacacacatttctattatcctattttagcctgctatatccatgtatgagccttatgggaactctgcaactactatggatcctcttatacattatgttcgacatgcagacaaggtattatattgagttggaccaataatccttcatatttattgatgtgaattatgttgtactggtgtcctgtccttttgtttgtgctttataatttgtaattcctagctgctgatatggtatgatggatgggaggtggctgaaatcgttcggataagtgtcaatttgttgttttctatttttatgaatggttttctatttcagctgatgaaccttttatagttcttttattatatactgccactgattgctaatagggtgcatgtctcctatttctaggtatggtgcataaaaaagtaggaaccacaatgagattgtgatgctgcacatggcacatcaaggtgcgcaagatatgtaccatagaaattatcgtaaagtgcacacagctgtatgtatagatgtttagaagtgaccgaagttaggcttgctcaaccggggcaatgatttacttagcctgctgaaatgtactataggtagcattcaagtttgtgaccatcatgcaagtacatgtgggtttgttgaaattgtgtggtcatcggagatgtagcaaaatgttccctatcgagagctcgtgtactatatttgttttatgaacttaattttgttgatgtaggactattacaaagttctagagacaacttaatttttattacaacataatatgtggtcatacatatgttaatgtt

SEQ ID NO: 35375 - DNA, 8617 bp, Zea Mays
cccccctgcccgtggcctccgccccaattccagcgggacagcctcgatgagccgccaggatcgtcaccagtggcctcgccctaaccacggatacgaccctcgcgccgccgccgccgccgcgcaatggtatggcgccgcttcgatgctgtttcccgaccccggcgcggcggcgctgcacgggataaacccctacggcttcgcccctaaccctttcttcaataacttcctcccccagaactccgctgccctagctgcctaccaactgcagcagcagcaggctcatcacttcgcctcccatgcctaccaccaagcccctaccggtaacaccatgcaccgctctaccaaacccgccgccgctgccaaacctgcgccgccaccgggcaaccagcaggccgtgctggaccgggctcaagaggcggcgaggaaggctcgggaggagctcgtgaagggtggggacggcgtcacggcgtggaaggtggcgcaggcggtgctggtggcgctcaaggctgattcgtgggactccctcggcgtccagccccaggatgtgcctctcctgcgggatctcttcctaatcgagggcaagagaaaaaatcagtctctgggaaggaaaaacttggtgtgcgggtacaaagcttgggaaaggccattccattttttactaatttagggaggttttgtaggttgcatatttccttactacgacaggccaagcaaacagaagtgtctgctgcgaagcttcgagcaaatatgagtggatctggtaatagtagtcaggagaaggatttgttgaaaaatgcaagtttccatactcacaagaaggctttggacaagaggttcatttctttaactaatcgtataaaagagttaccaggcatcaataagcatatccattttgattcgaccgatgatgaaactaatagttgtactggttctgaggatggtaaatctgatggcaatgagaatgagaatgaatgttctattcttgacaaaaaggatggtgataagcgtgtgaatagctgcccatatccgtcaaaaactgaagaactggaaaggcttggtttgaaatctgaaattaataaaaggcaatctttagagaatagcaagccaagagacagtgggaaaaaggggaaagttttggaaatgttagcaaattactatgggagaacgatatcagggaagaggagaattagaaatttcttctcacagtacccaggcattggccttctcaatgttgctgttaaatcaatgggatgtggtctgctggatagcatttacgatgtgatacagcttgctgatgagaatgatgtagcttcaagccctcctcctaacaccaccactgaagttatggaaattgagcctccaagtaaagaaaatacaggtagcactaatggagcccatgagaagagtgaagacaacatgactgcacatggtgttgctattgatgatgtcatcaggaggatttcagaatatattgaatccaacagtaaaatctctggtgatgtggctttgcaagtgagggcacttaatgattgtgaaacatgggtaactactcaattttcagcaaatcaattcagtgctcttggccatgggacattccttgagtttttggacaaacattgtcaccagttccgaactgctttgagtagtttctttaaggagggtccttctaattcttcatctctggaagtttctgtactgcagcagcaaattgaatttttactctgtcaagctgagagtaattggctggaagatagtgacttttcagaggatagttttgttatgcttcttaaaaagcaatttccaacaataagctttaatattgtgcaagacaaatctgatggtggagtttctggctttattgaggggcagaagaaagacatacggacatatagtttaaaattttccatctctttgttggagaaacgatggtctggaactttgccaagtagacatgggaatgttgatgaactggggaacattgtcgctgaacaatcttgttaccataccacagtttgctcacgagaggcaattaattgtttactgagggctcctatgctgtctgatctgcatctttggtcccattgggattcgctatttgctcctacactgggctcctttgtacattggttgctgaatactggtccaattcaagagctcgcatgcattgcgaccacagatggtaggtttattagagtagattcatcagccacagttgaccagtttctggaagctattatccatcgatcaccacttcaagtggcagtgaaactgctttcacttctatacatttacaatggttctatgaacaccccaatgtcattgctaaaatgttatgcacagcgagcaataaagctcatagtagataacaacaatgatttgatgaatgctaaatctgaaaacaaaatatttatgcctgatgagccccaaaacctaagtagtgaaagctctacttgttttgctgatcagtgtcaagaaagctctcaggcgtctcctggaaggttgatcaggtctgatagcttgccaaacattaataacactgttcatttgatcacaaaatttgtacttgattgtcttgatcatctaccttcagaattccgtagtcttgcagcagacatactattggcaggatttcgggttgttactaagaactggcatgcagttatgttgcatgaagccactgaaaacgggcagctttgcatgcttcatgatattggtttgtcacttggagttgtagaatgggttgaagattgccataggttgtgtttaactgatgaagttcatgtgcagacagaaatgcattcttctgccaagcttgcaacacctgcctctgtgggagccacccatgaagattctaacatgcatatttctagtgatgttaatatgatggataagagaaaacaattgtttcctgtcataaatgatcgggctggtatagataaggaagacaataagatgttaaatcctgctggaactgaggcagatgttgcagaactacatactaccagcagatcttctatgatggaagaaacaagtcttgaggaagcatctcttgttattgagactatacgccgtgaagagtttggtctggatcaggcactaagtgacactgagaatagcttgttaaagaagcagcatgctcgacttggcagagcattgcattgcctttcacaagaattatattcccaggattctcatctacttcttgagctggtacagaatgctgacgacaatacatatcctgaggatgttgaagcaacattagcattcattctccaagaggatggtattgctgttctaaacaatgagaggggcttctctgctgagaacattagagcactctgtgatattggtaactcgacaaagaaaggatcaaaccagggttatattggaaataaaggcattggatttaaatcagttttccgggtaactgatgctccggagatccattcaaatggtttccatgtgaaatttgatatcacagatggccagattggttttgtgttgccaactgcagttccaccttacagtaccacttcttttagtagaatgttatccgttgaagatgacaaggatgcccattcattgtggaacacttgcattttacttcccttcagatcaaaatttagggagtgcactgatctgcacccatctctactgctgttccttcatcgactaaaatgtatcaagtttaagaatttgtttgatgacacacttctgattatgagaagggagattcttggtgatggtattgtgagaatctcgcatgggattgagacaatgagttggttggtggtcagtaagaggctacaaggtaccattgtgcggcatgatgtgtgcaccacagagatagctgtggcgtttactttgcagcagactgaggaaggagattatgaaccttatttgaagcagcaacctgtgtttgcttttcttcctctaaggaattacggtcttaaattcattcttcaaggagattttgttttaccatcttccagagaggaagtggatgcggatagtgcatggaatcagtggttgttgtctgaattcccttctttgtttgtaagtgcccaagaatctttttgtgctcttccctgttttcagaggtgccctggaaaagctgtcacagccttcttgagttttattcctctagcaggagaggttcatggattcttcagccagcttccacacttgatcctttccaagttgcgtctgacccgctgcatgtttttggatggctctactgtgcaatgggtctatccatgcaacacacttaggggttgggatgaacaaactaaaatgttattttcagaaggcttacttcatgaacatcttggtcttggttacctctcaaaaaatattgttatatctgataagttatcaagagccctaggtattcatgactatggaccaaacattttgctagatgccatctcatctatttgccgaattgatggttgtattgagtcattgggcctggaatggctttgtgcttggtttgttaacctttatctgacattgctgtctcattcttctcaaaatgtttcctcagcaagaaacctcgaagacattcttttggataaagttaggaaaataccatgcatcccactttcagatggttcatttacctctatttcagatggtcgtatatggttgccatatgatgttgccagttccattcctgaatgcagtagcattccgaattttccagctctatatggtaatcttcgaactgtaagtccaaaccttctctctgcatgctgcaaaaataaatacctcatggaggaagtcagaataaatgatctggcagacatgctccaaaggatcggggtgcggaagttgtctgggcatgacattgttaaaaatcacatcatggtgtccttgcgtaacggtttagatgctaatgtggctgatatagtgattagagagtatgtgagctttattatggttcatcttcagtcttcttgcaccagctgtaactttgaaagaggagagatagtgtcagaactacggaagagtcctatcttccttacaaaccatggatacaagagcccagctgatgaaccaattcacttcagtaaagattatggaaattccgtggatgttactagactgcttcagaatgtagaaataagttggattgaacttgatagtagctatttgcagcatcatggttcacagtcgtcatcatttgcacgggaaaaatggaggcaattttttgaagaaatgggtgtgactgattttgtgcaggtagtgaaagttgaaaaaactttatcccaagttgattctattctagcaggaggactttctctagctgatgtatctacaaaacaatgtacagtgtatgactgggagtcaccagaattatctagaattttatcaatattttcttcaaaaagatgcaaggaaaattgtgtatatcttctggaagttcttgatagattctgggatgatcattatagtgcaaaatctaggatcttcacagatgctacacattgtggtgaaaacagagcagttgaatcatcatttatgaagtgcattcaaagcttcaaatggatagcatcaagaatggatgaggatcttcattatgcaacagatttattctatgattgtgaaaatgtccgctctctttttggtagtgtggctccatatgctgtaccgcaggtatctagcagttcacttaagaaggccattggattcaaaacagaggtatcttactgtgatgcattgatggtcctgaagtcttggataacgtcaaaggttccctttagagcaagtatgagccagatgtgcaaattctataccttcttgtctgaaggcgtggcagacgcaaagattgacattaaacgggagttcatgtcgtctccttctatatttacaccactacagcgtcctcgggcaagtgaggttattcctggaaggtttttggcgccagaagacctctattggcatgacccaacaggatgttctgaaataacagaggatttcgttgcaacgaaaaacagaagtatgttcccaagaaaaatgctgtctgcagcctatccaaacctttatgaattatttactctgacatgcggtgtaccaaaggccccaacaacatcaaattatgttgagatgctgctacggttgtcaaccattgcattgccttcacaggcaggaaaccatgtcttttgtgtatttgtgagatgggccaagtgtatgcattctgaaagtgacaagatgaatgatatattgtacttgaaagaatcccttcagaaattagaaacaacaatattgcccacctcagccgataaatgggtctctctacatccttcttttggccttgtttgctgggtagatgatgatgagctaaagcaacagtttgttaactctaatgatgtttacttcatacaatttggcgacctttcttctgaggataagcaaatgttgtatggaagagttgctgctttaatgaaaagcttaggcatccaagcactttcaaaggttgtgtatcgtgaagcaatattttatggtacatcagagaacagagaaaaggtttccttgatttgttggctgttgccatacatgcaacgttacatctataagatgcatagagatacttatatcaacttccagaaaaacgacatcatgaagattagcaacctgcaagtagtagttgttgacaagttattccacaagtatgtactgaggggactcgagagttcttctaagaaaagattccaatgtcattgtcttttgcagggagatactctatatgcaacacaagaggctgactcacattcagtatttttggagctttctagaattttctttgatggatcccatgatcttcattttgcaaattttctacacatgatcaaaaccatggccgaatctggcactcatgctgagcaaatagagacttttatcgttaataatcagaatgtgcctgagttacctgagcatgaagctatctggtccttctcttccttgtctgcagccaaacatggttcagcgaaccaaggtggtgctgatacccagggggttgatttccaacctgtccatgaatttagtattcccaatcatcagaaggcacaggtgatggtttctagttggcctctaaactattggagaacagcacccgtcttcagaacacctctcataaaccagcatgcaagcatgcaagaggcaaaggtgaatgatgctggaccttcatcaaacttaaacatgcctgctatgtatggacacaccgaagatagtttgctttctgctgatcttgaaagggattggattatagaagagaatccaagaactgaaactacattgtttggagatagttcatcggaaatccttgatgagcctcagatggtgatgtctgctgaacctttccatgcacctgcttatttgaacttggaggctggaaattcaagcccaacggttcatgtcgagctaacaaattccgatgagaaactggccaatcttgcagaagacaagaatcagcgactttcagatgcaaaccagttaagaacagggaggcttggtgaagaactggtcgagaaatatttggccaaacagctaggttccaacaatgttaggtgggtgaacaacagaattgaaaccggactgccttatgatattgttataacacacccagagggtttcacagagtatgtggaggttaaaacaactgtatcttcaagaaaagattggtttgacgtctcagcaagggaatggcagtttgccttggagaaaggggattcatttagcattgctcgtgtcatcttaggtacaaagaaagcaagtatagaaatgttgaaaaacccacacaagctttgtaagcagaaagcattgcggcttgctctcctgatatccagatcggcagcaacctagactaaaatgtcggttttgttgaggctagcaccgatcatccttctgcagattgttatgattactctgactaataatcaacatgaactggagtgagcatctgcatcttgataggtatttgctgatccaagttagcagattcttctttttggagagagatggggtaccgggtacggcatgagtgcaagacaacatacagttgagccgctctatagtaggctcctctttctattattctaactcgggtaatcttctccaatggcggctctctaccatgtctcttgttacatacaacttacgctctgcctttgtaacccattctggtattttgttgcataatgtatgtgattttgtcattagatttgtttttcaatttctgccctagacatcgtcccataggttgattgtgtaactaaacatgaaactgtacataaatggatggaatttgattttaccatgtacatgaaatttgattttgcgtgcggcggctgcctggtctgtgcgttctggtctctgtgcgcagggcgcggcatctgcccggcagcctgctcgccggctgctcggtgagaaaattggctagttgggtactggttttttttttcaattgataaaaaaacaggatctgatggagccttttcatttttgttttactttccgtctcttttatcagcagttgaaaggcgatcacttattctcaatttggtggaatctcctttatcagtaattgatagttgaaaggtggtgacttgttttcaat

SEQ ID NO: 35376 - DNA, 1439 bp, Zea Mays
ccgagcggcacaactctctcgcaggcttctctcccctctgcgcccttcccgcagcaccctgctcgcagcgctctctccacaggactgctccgcgcgcgccgcccccatcgccggcaaggcggcggtgctgctgcatattctcccggtcccccctccggagccaccctccccttctccgggaccttgagtaactttggagtaccagtgatgcaaagggacactagctctagcgatgtttctgcttctcatgtagggcgtgtaagacgtcgcaaacatccatctgaggctaccacagatgggaatagagctaatggacaaccgttgcttgtcaatgatcagaacaagtataaatcaatgcttatccgtacatattctacagtatggatgattggaggctttgcctttattatttatgtgggtcatctatatatctgggctatggtggttgtgattcaaatatacatggcaagagaacttttcaacctactcagaaaatccagtgaagagaaacaacttcctgggttcaggctactgaattggcacttctttttcacggcaatgctgtacacttatgggcgctttcttagtcggcagcttgtgaatacagtaacttcagatcacttgctttataagttagcaaatgtaatgggccgtttccaatggttgacatgcccaagaaaggatctgtcaactgggtggctttattgtgatcctggtccaatgtttaagccagagcattactcattgggagagtcggtgccacattggttcccatggaaagatctagccattatgcctgtgcagtggcatgctttagccctaggtttatttgcgtcaataatagcaccattcggaggattttttgcgagtggcttcaagagggctttcaaaataaaggattttggtgacagcatacctgggcatggtggaattactgatagaatggattgccaaatggttatggcagtgtttgcatacatataccaccagtcattcattgcacctcagaacttctctgttgagataatcttggatcagattctaagaaacctgacctatgaggagcaaaaatacctatatgaacaacttggggaaatgttccatgagaggcaattagggcaaaactgagagttagcgtgcttatgaaatgcatgataatttcttgtgtatttaagcattctgctcattatgtagctatagtccttgtccaaacctttgtatagaatggtagaatggagagaatgattgggttttaggtgctttattcactcttcactgacgctgcttaattcactccccttgtcatgatttctgcactctttgtaaaaggggacctgggaagttttattgtttcttatcacttcgtggtgctgtcctcagatcatatattcgaggattcacagaatataagatgaagcagcagtgctagttcttatttg

SEQ ID NO: 35377 - DNA, 2851 bp, Zea Mays
gaaccggaaagctgcaccagagaaaagaacgagctagaagaaaagatagcagccaagaagtctcacaagatcacgcccgagacagcgaggaaacggaaaaacggaggtgtgactgtgtgttgtgagtgaccagagcggcgaggagcgggggcggagagaggacagacggggtgcagtgcacgcgacgcacgcggcaccctcggctcgccgttcacaataaaatccagccacgcctgcgcatccctcgtcctcgtctctctcacagctgctttcttccttcctgttcctgctcgtcgcctctcgaaagccaggaggagtctcgcctccccctcctcgcgcgcgtgggcagctatggcgatggacgacctcgcgggcgcctcctcctcctcctccatggcggcggccgcctcctccgacccctcgcacggctggcagacggtgtcgtatcccaagcgcaaccgcaagcaggcgcagccgccccgcaccacggcgcccgatctggcgctgcagtccaacggcaagcctggcggcgtcttcgacgccgtcgagaagcgctcccaggagcgccaccgcgcgctgcagcagcagctcgcctccagggcggccgacctcgacgacgcgcggatcgccgttgccacgggcgccgcctactccgacgacgacgactccgacgaggccgctgccccgcgccaggagggagaggtcaagaagcctaagaagcccaaggtgaagaagccgaaggtgacggtcgccgaggccgccgtcctgatcgacgccgagaacctcgcagcgcacctcttcgagatctcggcatcgtacgagaatcaacaggacattcagctcatgaggtttgctgattactttggccgggcatttgcagctgtgagcgcatctcaatttccatgggcaaagatgttcaaagaatcaacagtgtccaagatggttgatatcccactgtgccatatatctgaggctgtgatcaagactgtgagtgattggatcagtcaaagatcttctgatgccctgggagactttgttttgtggtgcatagatagcatcatgtctgaattgtcaggtccatcagctggccctaagggttcaaagaaggttgcacaacagtctccaagggcccaggttgcaatctttgttgttcttgccatgactttaagaagaaagcctgatgtactggtaaatgttatgccaaagataatgggaaacaataaatatctgggacaggaaaagcttcccatcattgtctgggttattgctcaggcctctcaaggtgacctagtgtctggcatgttttgctgggctcattctctatttcccacattatgtgcgaagtcaagtgggaatccccttgcaagagatttggttttgcagttgcttgaaaggctacagaaaggtttgaagcagcctacccaataatcaaggagttggctcttgccggtcctcctggctcaaaaactgtgaaacaagcatcacaacagcttttacctttgtgtgcaaaagcaatgcaagaaaacaacgcagagctcaccagggaggctgttgatgttttcatttggtgcttaactcaaaatgcagagtcttacaagcagtgggaaagaatttatcttgaaaatattgaagccagtgttgctgtcctgagcaaagttgtgattgattggagggatgtgtctcctaagctcagttctgaagctctcaaggcaacagtgaagaactttaaggctaagaatgaggctgcgctggagtccacaacagatgctggaaagcaggcatctatcaaagaagcagacaagcactgcaaggcgatctttggaaagctgacccgtggcgccacctgcctgaagagcagcctggtggtcatcgcgctcgctgttgctgctagttacgtgctgtctcctggcatggacctcgagaaggtccaggcgatggtctcatcgcacctgtcgttctaaacatacctgtccagaatctccagacgtggatctaaattatacgagccatccaaaggggatggctcactcatcagtgaagagagctcagggggtgagaataagagggggataggcgctagaaccgaaagggtacagtttcctgagttgcctttttttatttttcccgcgtctcctcgagcagcagtgcgtgggaggagacgcagtcgactttgcagggagttggttaatcggtagactgatgggtgcgaagaaggtcaagtcaaacggctcaaccagaggattaacacctttgcttttctctttctgcatctgagatgattgcaaacagttttggtttaaaaattaagaatcttgaatcgtattcggtgctgtgtgcttgtcggctaaatgtatctgttgcgttgatatccgattaaattgcgtgtgatgctgtgctcgtgtcagtgtgctgttgtcgaagatctccctttttgcaggtgtgaatgtgatgcctgaaggccttttgaaacatgttccatttttttggacgccggaggtgtgatgtctgatgttggagcgtgaagatcttttgaaatatgttgcatttccagatggtttttggacgagggagatgctggttaatttctgggtttttttatttgaggattcgatctgaatctcaagggactgtatgttatctactgtctcttggtggtgtggatactgtggatgagaaggttttccttcatgcccgattattatctgcagcttatgtgggactggtccagatgtcaattttttatgatctaccatatcatttttcctcttaggtctctaatttctccatgatctatcgtactgggaatagaagagatgagaattttgtctccaggacaaaaaaaggttttgta

SEQ ID NO: 35378 - DNA, 241 bp, Zea Mays
cggggcttgcctttaatttaacacttggatagtgtttgctggggtactcgcttggcgagcatccactggttaagtccattcttcaggtcgttcaccaactgcgtcttgtggttggcaccacatcactggcttgatcatcatctctcggtcctatatgaggtgcaagatgcatatgtatgaatataatgaaatagcacaagatattttaagtacgtgctagcgaattaaacaccaagtaacg

SEQ ID NO: 35379 - DNA, 2580 bp, Zea Mays
aaatagacgaataacttttttttttacgtgcttttgatctgcaacagcaggtatgctgttggtttgtatcgcagtcagtttctgaagtcctgaagtcgtcttctccacctcgaagcaaaccagcaagcagtgcgaagttagtcgccggccggcagcgtccccctcgccccccaagtccctagtggttgacactgacagaggtctgcagagactagcggcgatggcgccaccctgccccgaaccctaaccccactccaccaccggccatgggatcccagccgccggcctcccgcgcggccctggagcacctcgctacgcttgaccccgccgcactcgccggcctccctgtctcctccccgctcaccgtccgctccgccgccgtctccgcccacctgctctatctcggcaccggcggcggcaagctgctcctcttctccctgcaggatccctccactcctgagttcctccgcctcctccccatcggcgccaccctacccgtctctgctatcgtcccgctcccctccgtcgcccgcctcctcgtcctcgctgacggcctcctcctcctcgccgacccgctcctctcgcgccccgtccgccgcctcggctccctgcgcagcgtcaccgccgtcgccgcccgccgcgtcgtcctcgcggacccatcatcatgctccgtcgccatctccgtcgggaagaagctgctccgtgtcgacttcacgctgcacgacgccgacgagctggatgtacagacgcgcgagatcgcctcagtcgagggggtcaaggcgctcgcttgggtcgacgattctgtcttcgttgccactgccactgggtactccctctactcgagcaccaatggtcagggtgtggatatattctcgctcccagaatccgccggtcacccaagggtgaagccgctctctggaggtgacgaggtgatgctcctggtcgacaatgtcggtgttgtggtcgatagatttggccagcccgttggaagcagcttggtgttcagcaccacgcccgactacatagctgaggtattcccctatgtgattgttgctggggactccaaggtcgatgtgtacaggaggaggaacgctgcacacctacagaccattccggttgccaggactggtcaaggcgttctgattgtggctggggatgatgatgggatagacacggagctagttgtgatcgctacaacttataaggtcttttgctaccgtaaagtatctgcattggagcagattaaggcatctttacgaagaaagaactacaaggaagctatttctttgctagaagagtttgagtcggacggtgaaatctcaaaggatatgatctcctttgtccatgctcaacttggttttttattgtttttcgacttgcgtttcgaggatgctgtgaatcatttcttgctatcggagactatgcagccatcagaagtatttccattcattatgcgggatcctaaccgttggtcagatctggtgccaagaaagcggtattggggtttgcaccctccccctaagccccttgaagaatttattgatgatggactggtaacagttcaacaggcattgtttctgaaaaaggcaggtgtggatacagttgtggatgaagatttcctttcaaacccaccaagtagagctgatcttttggaactagcgatcagaaatattatcaggtacctttgtgcatcgcggatgaagaatctaccttctccagagatggaaggagttgatactcttctgatgtatctttatagagcacttcatcttgttgatgacatgtataatctcgcatcttctcagaatagctgtattgtggatgaactggaatcccttttggatgactctggacatttgcggacacttgctttcttgtatggcagcaaaggaatgtgctccaaagccctttctatatggcgtgtactggcaaggaattatagtgcaggtttgtggaaggatctgtctgagaatgattcttgtggaactttggttactaaaaggtctggcgaggaaattgccgctgtagaagcagccaagatcctcaaagcattatctgatgaggaccttgttctggaacatcttggatgggtggcagacattgatcaagatctagcgattgcagttttaacatctgagacgagggaaaatcaactctcaccagaaaaggttgttgcttctgttgatgcagaaaaggttgtgattcatcaaagatatttgcagtggttgattgagggtcagggctgcgatgatcctcactatcacacatcatatgctctttcactggccaaatctgcaattgaagcagttgatatggagtctaaatatagagggaaagatgatagtgaaattgattctgatgcacagtttgtttattcagtaagagaaagcttgcaattgtttctgcaagcttcagacctgtatgacccagaagatgtgctcgatgtgatagcagaatcagagctatggctggaaaaggcaatattgtataggaagatgggccaagagaatattgtacttcagatactagcattcctgttagttgctctattgaatgtctgctgcttgttatgtggtgaag

SEQ ID NO: 35380 - DNA, 1262 bp, Zea Mays
gaagaattaggccccgatctctccaatagtctagtccctcccaagccgactccgcctgattatcttcccggcgctgtttacccccctatgaactaggattcataacagccaccacgacctctgcagctgccggcgcactgcatcgcacacgcattggcgttggcattgagggctcaagtcctctgccagtccaagtcattacggtgtcctccacgacgttggcgttgagggctcaagtctgctgccagtccaagccgtcgttgtggctggccccctccctggcgttggcgttgagggctcgaggccgatgctagtcacgccctcagttgcggccctcgtggcatttctcaccaaggccgcccgctcgccccagactcaacaagctggagtactactttgatagtcttctaccaagaattcctctcccagtaactcgtcagattacagccaatcttgaaaagatgaaattgcccactaagctttctggggcaactggagactccagtcgtcagggatcagaagatactgcacgccgtcctccttcagtgaaagcttctctgtcagtttcctttggacagcgtgctccacatcgggcttccaccagggattcatctccagttcgtcgaacagtcacccgtgatggtcatcgaagttcatactcaccatctcgtcgtagtggtagccgtgagggtcctgatcatgaccgttctgaccgggaactggatcattctagtcgtgaccgtgaaagagcccgggatcgttcaaaccgggatcggtatcattcaagccgagaccttgaccgtgacaaggatgccagagattatcatcggcatgagcgtgatagcagggatcgtgagtactacaggtccaggcattcagaagaaagacgggacgacagaagagatcatgaaagtagcaggcacaggcgctctagctctcgccacaggagcaggagtaggagccgaagcaggagcaggagtaggagcaggagaagccgcagccgaagcacgagcaggaggagcctgaatgagcagcgatccagcccattcagggatgcaaataaagagaaggcagccaccgtgtcgagcaacctagcaaagctgaaggacttgtacggtgacataactgcaaagaaggaagacagtgatgctgaaaagcttcaccgtgattcatgcgctgaggaggtcatcaggctgggaggccctcgatggaggaagtcgcccgcatgattcaaggcacttttggacatccttgtctttgca

SEQ ID NO: 35381 - DNA, 914 bp, Zea Mays
atgccgtcctcctttctgacctcttcttcctcttccgcttcgtcgcacctctcttacctgatccctgctagggcggcgccgccgcctccctttgccatgggatacggtgccaccagtggcggcggcgtggcgaacgccacgagtgccgcggcggcgcctccgcctccgaggcagggagccagcaggaacgcgggcgcggggcacccgccgctgccgcgcccgccgccgcggcagtgcccgcgctgccggtccgccaacaccaagttctgctactacaacaactacagccgcgagcagccacggtacctctgcaaggcgtgccgccgccactggaccgagggcggcacgctccgcgacgtgcccgtcggcggcggccgcaagaacaggcgcggcgccaagggcggcgccgctgcgaaagggtctgcctcggccgcggccgcggctccggcgcagcagggagggaacgtcctcggcgccgacacgttcccaggggacttgctgcggcagctggtgcagttccagccggacgcggccgtgggcgggggcggctacgccatcgacctgagcgcgtggcaccaaatggtcgctgccacggcgccgccgccgccgccgccgggaactggcggcgatgtcagcagtctcggtctcggagcggcgggggcgggagcgggagcggaggccaactgcgtcgcgttgcagtactggagcgaagacggcatgcccggtcttgatggggcctgctaagtgcgtactactactagagctttgttattactattacggtattaccacaggagtatgttccagcctacttatatatgtgtgcgtgtactgcgtgcgaaacatacatactagttagtatatatgatcagcttgttttctctacttccttgtggcgcgtactatgtattctt

SEQ ID NO: 35382 - DNA, 2116 bp, Zea Mays
cacggactctgagtctctgacgctgccttttgctctccccttccaccccgtctgcccgcgcgcgctgtctcgtggcgacaactgggcgaccgccgccgccgtcgctgccgccgctacgccaagaagctaggtcttcatcggtcccttcgtcgagattttctccggagacaagcacccagcaggggactacaagattgattttgatggattatgacaagtctagaagaagtaactccaaaaagaggagacattccaattctgatgacggaaagaggaaacggttgagctctaggcatgatgacacatctatgtcctctgagccaattgaaaccatctacaggatattgtgcccggcaaaaaagataggcagtgtcttgggaagaggtggtgacattgttaaggcccttagagaggaaactaaagccaagataagggttgccgattccattcctggtgcagatgagagagtaattatcatcttcaattaccaaaatcaacctgaacttactgatgaagcagctgaaaaacaaattagtgatggcttagggaacatgaaaccccattgctttgcccaagatgccttattgaagatacatgataagattgtggctgatgaaatttatgatgaagtcgctcatgatgaaagttctgatgatgtcactgctcgaattttggttcaaggcaatcaagttggctgccttctaggaaaaggtggctccattatacaacaactacgaagtgatactggtgctgggatccgtgtcttgtcatctgaaaaccttccccagtgtgcacttcaaagtgatgaactggtgcagatatctggagcaccatctcttgtaagaaaagctctatatgaaatatctactcgtctccatcagcatcctcgtaaggaaaatagacctcttgaacaaataatagatgcaagcacacaaaggaaacacgagtctccaacactgcaacatgaaaatccaatgttgccgcacctgcatagtcatcatccacctccaatacccctgcttgacccatacagaagtggacctcagtatcctgttagtgaaactgaagagttttctatcagaatcctatgtgcttctgagctcattggttcagttattgggaaaagtggggctaatgttaggcgggtagagcagcagactggtgctcgcattaaagttcaagagattgacaaagatgcttctggagaaaggctgatcattgtttcatctaacgagataccaactgaaccaatatccccaacaattgaggcactcattttgctccacgataaagctgctggacaaattcatggactggaggactatagaggactgccaagtgcttctggaaggttctcgagcactattgaactaaggattccaaatagttctttggagtctattgttggtgttggcggggtcaatttagcagagatacgtcagatttctggtgcaagactgaggctacatgaggctcatgctggttcttctgagtctgtggtggagatccagggcacactggaccaagcaaaagctgcgcagagcctcctggagggctttatcagcgcgaacagcaggcagcagcaatcccattcttctcgcatgccactttacccaagatggggatagcttctggttgtggcaggggaaaaccgagtcagcagggttggctggagttatctcagactgcagattagatgcatcgatgatgttaatggtagctgtttaaattgaccgtgcaagcatgataacttatattatgccataggacaagtaatgctgattctctcatgaaatactaagtgacaagctgtctctgtagttgtatttgtttctgaatgtttgaaccctactgttacaacggctgctattttaggtcagatttcagaggccggataattatgttatctgcagagttgggccaaaaaaaaaagctcaatctggttgagactggcttcacccatgccgtttcatttttagaagttacagcatctctgcaaaatatatgggtaaggcctcttggaacgcatgaatttcatagaaatcagtttattttctcagaaaaaacatgggaaacaggggaaaaaaatcccacgttccaagaggcctaaagtttg

SEQ ID NO: 35383 - DNA, 1053 bp, Zea Mays
atgttcctatacggagcaacaccgacaggcgggggccattttccagtccagttcctattcctccacaatattcagttccgctggatcaacggacgtgaactcaccctcctgcgagaacaagccgctggcctcgacaaccttcctctgcgggatgtggctgatcttgagccggtcgtcatcggtcagctcccagtcgaatatctcgaggttctgcttcagcctctccctgttgtagctcttgacgatgcacgtcactccctgctcatgtatccatcgcagcgccacctgtgccacggtcttccccctcgccctggctatctccgcgagcacctccgagtcgagcacggcgttgccccgcccgtcccagttctgccctcccagcggcgagtaggcggcgacgtggacgccccggtcggcgcagtacgcccgcagcgtccgctgctgccacgccgggttcagctccacctggttcaccgcgggcgggaccgcggcgatggccaggaccttgtccaggtgcctggtggtgaagttgctgacgccgatcgccctggcgaggcccagccgctggcactcctccatggcgcgccacacgcccgccacgtccagcggcaccgcgtcctccttcctgttcgggaacttgggcggcccgccggccggcctgaggcacaccggccagtggatcagggacggcagcacgaggtccgcgtgggtctgcgaacaccacagcttggacgtgacgaagagctcctcccgggacctcaggaggccgcgccgcagcgcctcggccacggcgtcgccgagcggcttctcggtgccgtacaggaaggccgtgtcgaagtggcggaaccccacctcgatggccgccagcacggcgtccctgacggcctcgtgcaccacggggaacgacgccgtgcccatgcccaccatcggcatcggctttccgttgcccgaccgcagggtcacctccggcaccgccgccgccgtcgtccccgtggatgccatgctgatgcggtcaagtatggcgcgctgcagttggaggtgcgtctagtctag

SEQ ID NO: 35384 - DNA, 1313 bp, Zea Mays
gctgggtaatcttctacattgattaggatcacagcctgatttgtagctcacgttggctatattagtagaagagagaaaacagaaaatgctaagtcattccagccgccaaatccacttgtggtcatgtgtgtcctttctgtgtgagctcctgggtgtcctgttagaggcatatttgtcttttaggtggctgtttaaaacttttgattttgggagcacttagaaggttttagttttatatgatgggttggttgaactttttttttgggtccggttaggtggaacagatttgttgcttgtgctggaagtttcccatacaatccttttacctgacagtctttcttgttttagtttgctaattatggctatgcttgaaaatgaaccaatggaatactagtaggcatgccccatctgtgctacaagggtcggaatggacttgataggacatttgactatgcaacatggaagttatttcaagatgcaacgcaggcgcagagtccgaaaagtatcttctgggtcccattctttattatctttgttgagaaaggacttgagaaatggcagtttgcagtcatttctcggtggatcatcctatgtatccaatcctcctgctgcagcaccagatccatttgtgtcatctttaatttgtactttgcctgtggctgaaccatccaaagatttacattccgactcatctgacaataactttttgctaaataaattcccagatgaaaagcctgtagagaggtacgtcacctcaagcttgtcctttctgctgcctcactcatctccctctttgccacgataccattggatctgggctgaaccatcattgtcggagaaagatcagaaggaaagggttcaaaggagcaaattcgtccgagggcttgtgctctcgacaatatttgatgatgataacttgtaaagggggtcatcaaacttgataacagcatcacaatagttaaggaacacgaagagaatcatcagactctgctgctgttgtcgtgatcacacaagaggcccatctaagttcgtatatgtacggatggaatatttatgcatgtatgtatttatgtttatctccctgcatttacccttagtgcaacagggtggtaggggacggttgtagtattccaaatttatgtatcaaataaatgaggacactgtccttggggtgcaattgtgtatataatataataatagggagctactcgccatgatttaggatattttatttaactgttgtaataatatgcagtgttttgtatgatgaccccatttttttatatataactgttcattttagtcctttaatg

SEQ ID NO: 35385 - DNA, 444 bp, Zea Mays
tggcattttggtggtctgtcgccatcagttacttcaagcccattggtatattcaggagtatgaatttgtttctgacgtcatgtttttcctctaccctattatgacttggctatggacatggattggctagcttccttcaattccatgagagttgcatgggctaaaaaatggttgaccattccctataatggtagcactgtaatgttgcaagggaaatctgaagtcatccctacttgtactatcattaagttgctatcgtggattcatctattgtttcagtaccacactgtaattggcatcccaggattcagtctatattgcaccaatatgattcagtccttgaggacccaagaggactaccacccaaacgagagtgtgagcatatcattccactcgtacctggtgcacaaccattttcagtgaaacattatagataccctccta

SEQ ID NO: 35386 - DNA, 2524 bp, Zea Mays
ctctctctgaaaaacacacgcaccaaacccaacaccgctgcaccgtgcattccgcctacccctcctcccttccatcaccgcttgcatttattaaccacctcccctccccagcgacatctcgtgtctctgttgggagctccttcaacatctcgtctctctcatcctccgacgccatccgctcccggcccggccgagccgcgcgttgtgattccaaaagcaatcatacaggggctatggcgaggccttacaaacctaagaatatcctcattacaggagctgctggttttatcgcctcccatgtcgcaatccgcattaccaagaagtaccccgattacaagattatcgtccttgacaaacttgactactgctctaatctgaagaacctgcttcctgtgagctcatcaccaaacttcaagtttgtgaagggtgatattgcaagtgttgatcttgtcaacttccttcttgtcacagagaacattgataccataatgcacttcgcggcccagacacatgtcgacaattcatttgggaattctttcgaatttaccaagaacaatatttatggtacacatgtacttcttgaggcctgcaggattagtggccagatcaagaggttcatccatgtcagcactgatgaggtctatggggagactgacgaggatgcagttgttggcaaccatgaagcatcacagctgcttcctacaaacccatatgcagccaccaaagcgggagcggagatgcttgtaatggcatatgggagatcctatggactgccagttatcactactcggggaaacaatgtctatggcccaaatcagttccctgagaagcttatcccaaagttcattctcttggccatgagaggggagcccctccctatccatggtgatggagtcaatgtccgtagctacctctattgtgaggatgttgcggaggcatttgaggtcattcttcatcatggagaagttggacatgtttataatattggaacaaaaagggagaggacagtgcttgatgtggcaaaagatgtttgcagactcttcaatcttgaacctgacaaagtcatcatgtttgtcgagaacagaccttttaatgaccagaggtatttcttggacgatgagaagctcaagagccttggatgggctgagcgcaccccatgggaagaaggcttaaaaaagacaatggagtggtatgtagcaaattctgattattggggtgatgtttctggggccttactgcctcatccaaggacattgatgatgccagggtgcgaggggtctgaggagattaaaggaatactcagccggtttaataacattcaaacaaaggtcggttcaacatcagataatgctccagaaccgcatgccttcaagttcttgatatatggcaggacaggatggatcggcggacttcttgggaaaatatgtgagaagaaaggaattccatatgaatatggaaatggccgcttgcaagagcgttcttcactcgtcctagacatccaaactattaagccaacacatgtcttcaatgccgctggtgtgactggaaggcccaatgttgattggtgtgaatcgcacaagccggacaccatccgtaccaatgttgtgggcaccttgaatctagcagatgtatgtaggaagcatggcttattgatgatgaactatgccactgggtgcatatttgaatacgatgcacatcatcctgaagggtcaggtatcggcttcaaagaggaagatacaccaaattttactggttcgttctactcgaagacgaaggcaatggtcgaggagttattgaaggagtatgagaacgtctgcactctgcgagttcggatgccgatatcctctgacctcagcaacccgcggaacttcgtgacaaagatcagccgttacaacaaggtggtgaacatccccaacagcatgacgatattggacgaactcctgcccatctcagtggagatggcgaagaggaacctgcggggcatctataacttcaccaaccccggcgtcgtcagccacaacgagatcctagagatgtacaagcagtacatcgaccctagcttcaagtggacaaacttcaccctcgaggagcaggcgaaggtcatcgttgctccgcgaagcaacaacgagatggacgcaaccaagctgaagaacgagttccccgagctgctgtcgatcaaggactcgttgatcaagtacgtctttgagcccaacagaaaggtgcccacagactgaagcccgaagggctggcacagctgataccgtacaacacagcaaccattagtgttagactatgtgtgtgggccagcactactttacttttgggctgtcggtctattagggttagagtcctgtgagtctatatattgtacctcatctcttatacaatacatttttgggctgtgagtctatatattgtcgaacagcagaggaggtcgagggcggggctgtccgcccagatccacaccgccgccgcttctagggcaggtcgtcgtgacctggacctcccccgcacggacatcgct

SEQ ID NO: 35387 - DNA, 209 bp, Zea Mays
cgcgcttcctccttgctgccgcgtacctggccctgctcggatttcgtgtagctccctactggccgtcattgctcggcatggccgtcgcgtcctcccagccatggagctcgcccggtcgtgcgctcgcccagctcggcctctagctctagcgcgagctctcctctagtgcctaggtcatgctcatccgtcgctgctccctggtgcccctg

SEQ ID NO: 35388 - DNA, 415 bp, Zea Mays
ataatatcgtgacatcgtctgtccgccaccgggtatctctttctccgggtagtgcaccagcggaacggcgaggtgcagtcgtgcagacgggaacggggatgggaagcacaggggcgctgctttggcacccgtcgccgcaggtgcactccggtggcgtcctcttccgccagagccggcgcatcgtacgccagcgcaacttgcctctattatcgctagctgacgcggcgcttgagcccgagcgccgccgcgggcagcgcctccgctgcgctgccggcgacggggacggcgggccccgggaggctcagaaggagtctccgagcggcatcggcgcagcactcgaggatccgtctccaggacctcctggataactgcgccatttgttatattaagaaggtaaaagaaacatggtctgcag

SEQ ID NO: 35389 - DNA, 1982 bp, Zea Mays
accctactgctatgtatacctatcattgcaagtgcagcggataaagaatccaattcatctcagacattgcaacatcttgaattgtttgagatggaatgtcgctgtttctagatggaaagattcagggtaccctttgttctaagttgttgagtgagcagaatgaaggctagaagtagaagctacactggccggtttcaggtcgcgttgtctttttgtatcattcttgtccaaaagctatataaaagaagcatgggcaaccagtgacatccatctccatgatctatccacaaaacaaacaatggcgaagcagactgagagctacgagctgcacaaactgcggccccaggtggatgacctgttcaaggagttcgacgccctggtcgacagacctctggatgagagggaggacctggctgcaatcttcaaggtcctcgaagagatcagggacaagatcaagatcaaacacggtggcaagaaagtagacgacgacgagctccttccgcggagcaagaggggggacctggccaacctgctccccctcatcaggactgcactggagctacgcagcaagccgccgccgccgcctgtgcagcaggacgccacgggcggtgcccacgacagcaagccgaccggctgcatcccctgcaagccccggccgtcgcagcagcacaaggaagaaaaagaaggcagcaaggaagtcgtgtcactcaagctgctgctccggctgacccagaacgtgctggagccggagcagtactacgagtggacgaccagctacgtggacgaggagaggatctacgggtgggacaaggaggccggcgaggtgatcgacgccctcgtggccgccgccgacggctcgggggcgcggatgttccgggccgcgggcatcgcgggcatccacggcagcggcaagacggcgctggcgcggaaggtgttcgtgcacgacaaggccaaggacaacttcgcgctccgcctgtgggtgtgcgtcggcccgccggactcggaggaccgcttcaacctcctctaccggatgctcgacaacctcggcctcgacaccgacaaggtcgaggaggtcgtcgacaagtccagcgtcgtcagagacgccaggggcagaacggaggcggagctccggaaggccgcagccagacctgccgagcagaagaaggcgagggcagcgtcgtcgtcaccgaggccggcgccggtggagatgccaacaggcaggcaaaggacgaggagctgctcaaggagaaggtagagaacagccgcgccgtcgagaaatccaaaatcggagtgctgctctacatcctcaacatggtcctgtccaagacgtcgtacatgatcgtgttcgacgacatccgggcgtaccgccacgacgacgacgacgcacagggatgctggtacagcaacctcacgctgctgccgccggcggagggcgagtggggggaccgcctcgcctacggcctgcccaagacgaaacacaggggcgccgtgctggtgacctgccgcaaggaagacgacgccaagaccatggcgcgcacgggcctcgtggtccgcccgcccaagctcgaaggtgatgacgcctggaagctcttcagaagagagtacgaccaggccaaggacgacaagcgcaacaaggacggcggcggcaaagaaggcagcaagggggaggaggaggacctgctcctcaagcagctgcaggagatgaagaaggagatcgtgggcaagtgcctcggcctgccggtggccatcatcgaggcggctaggggcttcgccgacctcgagcccttgccggatgatactagtcccctcaaaccggtgaccagcaaggacattgacaaggacaagcagctgtctcaagcaaataagtaacagattagttgaattcgtgctgtgtaatgcttctgcgttgctttggctctcttctaataaaatttaattatgggctataaaagtcaaaaattttaatttgaaatataacaaat

SEQ ID NO: 35390 - DNA, 1015 bp, Zea Mays
gccacgccacgcacttggtccacacgtcgtattcggatgaagcatgagagagaagagcaagaaagacttcgtcacgtcaggtcgacggcgaaagacgcggagatttcgcagttttgctgggggtaactacggaatggggggcggatccggatctttcctcaaggtcttggtcaacaacatggatgtcctcgcggggcctttggtttcacttgcgtatcctctgtatgcctctgttagagcaattgaaacaaaatctgctgtggatgatcagcaatggctcacgtactgggtgctgtactcatttatcactctattcgagctcacctttgctccggtactcgaatggcttcctttctggtcttatgcaaagctgttcttcaattgctgctgcacagaggtacattgagcaaaatggatcaaaagcgtttgagaatcttgttaacaagtttaagagttcgaacccaaggcgctcaattctggaggaggtagaggttgaaaggagggccaggattcaactagaatctgaagcgagggaagtgaaccctttcttcaatccagaatatcagtactaggcaaccattttcccttcacttgccaggaatgtgctaggatcggtttggaggaagatgtctggatattaggattgcgttttgcacctactgaatcgatgatattgtgtagatggacaaccataattgttgtagatatgttgtggcgatggaactcatgtaatggtcatgtcgcgaatgtttcatgctgctggaaattatgtattcacactggactctagttatgtgcctcactagtttcttgaaggtagttgttgaactaggtatttcttcgtctcttgtctgatataggtgtaaaccatgtggcactgccatgggaggttgactgtccgaatgctacgcttttattaaagctgccagaagcactgaccagtgcactcgactcaagtttggatgaggctgtccgagcagtctgcctaccgtctaccgagcctcacgctcagtag

SEQ ID NO: 35391 - DNA, 1071 bp, Zea Mays
aacaacctgaagaacggagttcccaaaggaaagccccacaaaacctcggttgctccccttggcccttgccatcctcgttcctatcgccagttcgccacctcctttgctctcgcctcgcgcgcgctcccccccgcgcatcgtgccgttcgccaccgcaccgcgccgatggaggtcgccgccgtgcccagatccgccgcggcctgccgtgcggcgcccctgctcccggccgtccgagccgctgcgtgccacctggccctgccccggcgcgcgttctccgcatccgtcgcggcggcaccggcgccgcgccgcctcgccgctcgtcgcgctgcggatggtgacagcgtggagacggcgccggaggcggtccccattgagaaaaggttccctcccttcccgagcgtcatggacatcaaccagatccgcgagatcctcccccacaggacattttcctgaacgccccataatgcccggtgtcctcatggtcgaggctatggcccaggttgggggtctggtgatgctgcaacctgaagttggtggatctcgagacaacttctttttcgccgggattgacaaagttaggttcaggaagccagtgattgctggcgatacactgatcatgaggatgacactgactaagtatcagaagaggtttggactcgccaagatggaaggaaaagcttatgttggtggtgacctagtttgtgaaggggagttcctcctagtcagcgcaaccgagtagtgcaaagacacttcatgattctctgggaagaatcattggttggaatcagatctggttggatgtttgaaagaaccgagttttgaactaattatacaatcggcagttgaggcgatcctttacctgttcttaagcatgttgttgagtccatgtggtgatttctatcggttaccaagggcccaaggctgaatccacgccatgttatgttgcaattgaggattacaatatattgggtaattgtttgatggaataaacgataatgcttttgtagtttcttgccttttcttgcctgaaccttctcatttaccaggtgaccatacaaaattcttagtttc

SEQ ID NO: 35392 - DNA, 1401 bp, Zea Mays
cacaccggactaggctacccttcgaatcgtcactgcccagaaagggaagtgtgcaccgagggcccctctccggttgttggagatggaaattgtgttaagaaggctgtagcaataatcactgatcgcctaaaggaaagcttacaccgtgaccgtggtcccttccgtgggcgaatgaattcaccagagcctcgaatttctcaggaagatgattatttgggtgtttcgcagatgcctgcatacgaggaatctctgggacgatctgatcagattaggaacaacactagcatggagccaccaggatatgagtttgattcaaatgatggcaaggtgattgaacatccagatatcctgtacgatgacataatttttcgaattctatgcccaaatgacaaggttgacaatttagttgcaacaaatgatggaatactggagatgctacaggctgatgttggtgttgatgttagactatctgatattattgctggttctgatgaaagggtagtaatcatcacatctagagagggaccagaccatgagcttttcccagctcaggaagcagtgctgcacattcaaactcatattgtagacctcggcccagacaaggataacattatcacaacaagactacttgtaccttcaagtgaaattgcttgctttgatggaagggaggggtcattatctgatatacagcgacagactagtgcaaacgtgcagatattaccaaaagaagatcttccattatgcgctttagagtcagatgaactcatacaggatagtggaggcagtgcaagtggctcatttgatcaaggcagcaacattattgatgagatcagacaaggtgctacaaaaagatttgccgttcctctagtaactaggagcacactagaagttgtcataccaaatagtgctgttgcaagcctcaccatgagagctggtagcaagcttgctcaaataagcgagatctctggtgctactgtaacgctagctgaggacagacctgacatcttagagaaagttgttcgaatatctggtacccctgagcaggctagcaaagctgagaatttgctgcagggatttattctaagcattccagatgacattccttcaggctagttgaagacactctgcatgtcatagttgttagttcgtaaaattcctgtgtatattcgaggtagaatatgctgatgtcatgtgattatttgtttaattgagcagcatgtattcatgtgtggatacatgctgttttccttgtagccgttaactggctgacgggggtgtaagattagcatgtgaatttacagattgattcaacattcaattctcatgtccatatgtgaccgctgaacatgaaacctccaacttatttaattctcagtctggtgcttagctgtgaaaacagta

SEQ ID NO: 35393 - DNA, 1063 bp, Zea Mays
gataaaaagggaacatcccgataaaaagccgccagcctcccggcctcggctgcaccgctctgtatactctccggtgaatcgctcccagtcccaagtccggatcgcaccgcgaagcgttcagccatgagctccgctgcagccgccgccaatgtcgccgtcatcggaggcggaaggaggtgatggaggatggctcggagctgcggttcgaccacggtgcgccctacttcaccgtcaccaacggcgaggttgcccgggtcgttggtgggtgggaggcgcgggggatcgtcgccgagtggaaggcaacgttcgcgtgcttcgatctggccaccggaaaatttacggacttcgagaagatttgtcgtcatttccacgcctgcctacagcacttcaagatatcccagttcgtccatgttttgctcttatggtagcattctcggagccattggctacggtacctgttcatggtttctctttcaacaattccaattctctgagctgggccttctgtaacagcagtaagccagggcgtgcttgcgtacctccaaacagacaatcttgggtgctgcattcgacaactgagtacgcttccaaggtaataaataatattggtccacgcaaaccttcggcggaggcgcttgctaaggtggcagaggaattgttcagagaattccaggcgactggattaagcattccacgaccaatttttttgaaagctcacagatggggtgctgccttcccagccattgcaattagtggagatgataagtgcgtttgggacaagagcacgaacttggcaatttgtggagatttctgtacaagcccaagtgtcgaaggagcagtccttagtgctacgagaggagtttccgaaatccttgaatgtttaaggtgcccgtcaagtatctaacgttattgttaccatccccagggcccctctctgtgattggttgtatttatgcctgcattctcttacacaaataaacaattcaagccttatttggaggcacatattgttcgtttatgctaaataagaaataaagtaacagcagaagttgcaacctttttt

SEQ ID NO: 35394 - DNA, 779 bp, Zea Mays
ctcggtacattacctgccgtgccgcagcattagaggtcctgtgtctcgtaggtggacatattctccgcgtgacttcaggtgtcgtcgccgagttgtctccggccgagggcggcggcgcgaccggtaaccagcgtcagcgtgagtgtgacaggcgacatgactcatatccttcccaaaccctgtttagatctgcgcgttgggggctcttcctctaatccatcctttgcttcgtgaccgcgatcgtgagcgcgcggcggcgcggaagcccaacggcaaggggccccaggacgggctcaccccggagcagcgccgtgagagggacaagaaagcgctggaggagaaggcggcgaagaaggcgcagcaggcagcggccggcggcaccgggacctccacggacaacaagaataaggcaggtggcaagaagtaggccgcagcggcgagcggcgccacctctgtacgattatcgatccatgcctttagcttgtaacctgttcgcatcctcgtagatgcgatgcttgttgggtcataaactcgttttctgttactctgatatcaaaatttggtgatgagaataatacgtggtgttctggttttgtgggttattattttcttctctttctatcgttttctgttctgttccttgagtggccagccagtcgatggatgggaatcctctagtttagagagtttagaggatgaactagggtgtgaaggagcttttgcttgctattgtgaacaactgggatatgatagcttttgaaattggaaattagattcaa

SEQ ID NO: 35395 - DNA, 1506 bp, Zea Mays
cctctgtgtccgtgccgcatcttccttcgcctttcttgagatgagagcaacgtaggcagcaccatcccgttgcaatagctgatagtagattgctctgtttctaggcctctcgtgcgatcatagttccgtaggggctggtagtctaccatgaaccctgttccttctccgtcaagctccttcccattccttctatctctactaccttgtggtgaacaaaacatcactaatcacttgaagctccttcacaggcggtagtggggtcctaggggatggtgcacgagctcttaaaggcatacagggacacggaggaggaagtgaccggactagggtcgagcatatgtctgggtggtcgcacggtgatgcacgttgttgtgctcacgagcaatggatgggcccgcgacccctgtgtggccttctctactccaagtgtctcgacgtcgagcgactctggatctatcgtcaacgaccttgagagcatcggggtaacacaaatggaggatagaatgtgattgatcattattctttctggaatgacttacctcatcaagcacggtagcaagtcttccacccgcaaaccctcacgccatcgacgcagctgtctttggtctctcgtgcttccctttgagagatcggtgtgtgtcctctcctccaagcagtctccatccctaggcagtcattgacctgttgcttatgcatcctcgcgcatgtgcctgtttattcggctagggctctcatcattttgtttgttgctacctgaggacacatcgttttgtttgttgctacctgctaacatatcaactagcacgattttgagcctatctaaatgcccttctgtttatggctgtcaaggtttatggctgttcaggttcttattgattttggtctgagtttcacattgacaattcctgaggacaaagcagtggacctatatgttctagagagagctttgatttccatgcattcgtcctgtggggaagtggctcgactgatctgtgcaaacatttacgactccgcatcacagattagtccagttgcaattggatttatgccttttccttttgttcgtggcatcttgtttcctatggtttttatgcaggtctgttatgttgtgttaatcatgccttagcaaacttatgtgggtaacaacactgatcttgatgatgaaccagatggagaaaatccttgcggtgtatagaaaggcttcaaagcaatggtgttccacccagaacaagctggctcaagtgaggcaacgggtcaggaagcgcaccatggtcggatgaacgaagaagaaaaaattgtggcatggaatggatgtatgttattagattaaaataacaaaatttatgtatggatagaatcacagatggattctgaaacattttctcataacaatataacacacatatgtatataagttatcgtgttattatatggttccgttgcaacgcacgggcactcacctagtatatatatatagacttattgtcatccatttgaatatgaaaa

SEQ ID NO: 35396 - DNA, 472 bp, Zea Mays
cagatggcgcatgacgaagaggttgaggaccttggcgatttggacggcacgctgcccgacagcacgctgcccgagacatcaggggtggggctggcgccgccatccgatgcggacaagggcccctcagtgacccccgcgccgactagagctggcgaagactccgcgctagcccctgcgctgatgggtgaggacgcctcaaaggaggtgggcgaaccagctgccgaagaccccgcggcggcggccaggccttcgcaggtggcgcaataggggttagggattttaagtgtgaacttttgtctgtgtgatactgaacctcggttgctgcgcaggttccgatgtttgggcctgcgcaagcaaccactgctgacaatgatgattttgtggtggcctcgaccgtagtgcctgccgatgatagtttgtttggttgtgtctgagtgttttgagtctgatggtgaatatgggagttcgtttc

SEQ ID NO: 35397 - DNA, 2909 bp, Zea Mays
gacgccacgccctgcccgccggggctgcttgccactcctctctcttcctcatccatcctcgccccggccccgcccccagaaccaaaccagcctccctccccagcagctcacgagagagcgcaagcaagtattactgcgcaccgcctcgcccgcgggcgtcagcgtgaagctgccgcacagctaccccgcgaggcatggggatggacgccggcggcgggaagctgccgtacagctaccccgcccaccaggacggcaagctggtgaagagcttcagccgcgtggagccccgcaagttcggcctcgccctcgtcgcgggcttcctgctcgtcacctgcgcctacttctccaccgccaagttcgacgccatccacgtcgccatgatcagccccgtctccggcaatgcggctgggatcggcccgctagtgggcgccgccaacgccgacacctccgactccaagcagcgattagatttgggcaagcaagacccggacgacgcgctgtccaggtccgaggaggaggaggggagcagggccgacgaggtgctggagaaggacgacggcaaggcatcctcgtcgtcggggacagattccggcagcaatgcgccgctggaggacacgaggagagacgagacctttgtgggggacagcggtggtgcatcttccgcggcgggcgccaggagtgaggcggttcctgccaggcacgagcacgacgatgacgcccccgctgccgccctgcttcctcccgtgacgtcagagggagccgcgaacagcacgcaaggatcaggagttcttgaggacgaggagctgcaggtgcaggacgctgtcgccaatccttccaagaggagcaacgattcagccgccacgcgcagcagcagcagtggccgctcgccctctgtggttcactctgatcctgccatcctccctgctccctcgcagcagattgctcctgctgctcctcaagaggcagataaggctcttgctgttcagcatattccagcgatacctgaggttaagcaatcaggtatcctccctgatccttctcctcttttgtggtaaaaaggatgttttctctcctgtcaaattacggtgccggtaagcagctagtcaatgtgagggacgccgaaaagaaaagaaaagaaaaaaccgtgcttgcaattctacagcgtctcaggcatgtcgttgcaaaatgcactttggtcagcctacagtcgtagtagcgttttttttctttgcagccttctatctcaacgaagggcccgatgctgttgctgctattggaccactgcttttgatcacactctgtcctatgtgggctgtggctctgtgtccgtgctcatgttcttcgcctttcttgagatgagagcaacgtgctactactaggcagcatcatcccgttccaatagctgatggattgctccatctctaggcatctcgtccgatcatactatacttttccgtagggtccggtggacggtggtctaccatgaaccttgttcaccctccgtcaagctctttttcctgctattgaaaacacacgcacgcacgcactctctcttttggagctgccttttcttgtccagccggtcattccatgattagctgacaagcaacgtgctaaactgaaattttttttaatggtcgcaagattcggagacgccggcgcgggagtggaagccgctgtgcgacatcacctcgaaccgccgcatcgactggtgcgagctcgacggcgacgtccgcgtgctgggcgccaacgcgagcgtcacgctggtggcgccgcccggcggggcggacggccgcaccttccgcgcggagtcgtggcgcatcaagccgtacccgcgcaaggcggacccgaacgcgatgcgcgtcgtccgcgtgctgacggtgcggtcggtgcccggcgaggcgcccgcgtgcacggaccggcacggcgtcccggcgctggtgttctcggaccgcgggtacacggggaactacttccacgcgttcacggacgtgatcctgccgctgttcctgacggcgcggcagtacgccggcgaggtgcggctgctgatcgcgcgcgcgcggacgcggcggttcgtgaacgcggaggagatcgtgcgcggcgcggagaagctcgggttcgaggtggtggtgtcggaggggacgcacgaggtggcgcccttcgcggagctggccaacagctgcgacgccatcatgggcgtgcacggcgccgggctgaccaacatggtgttcgtgccgacgggcggggtggtcatccaggtggtgccgctgggcgggctggagttcgtggcgggctacttccggggtccgtccagggacatggggctgcgctacctcgagtaccggatcacgccggaggagagcaccctgatcaaccagtacccgcgcgaccaccccatcttcacggaccccaacgggatcaagagcaagggctgggagtccctcaaggatgcctacctcgacaagcaggacgtgtcgttggacatgaagaggttccggcccacgctcaagaaggccatcgcgcacatcaggaaggccagggccaaggccaacgccggcggcggcggcaacaactaggcatcgccgtacatgtgctcattcatcctcctcttactctacttttgtttttcctcccctccttttcggattatggcagtacttgtatgtagcaagcagaaatcgatcaaatgtataatatggcagggaaagaagttagagcaaatcatatattctcttttccccccacttttcggtgagggtcaatggtggatggagagtatgatcaggactgagattctcctataaacattttagatttagtttctctcgaggaaaaaaaaaattcagatagcgaatagtacctacttagtacataatagtaattttttatacaaatttaataaaatatag

SEQ ID NO: 35398 - DNA, 2587 bp, Zea Mays
cctccctctcctctcactccttcccactgcagcgaagtaccgacgcctcccacagctgggagtaatcttcccacctgcctcggcgcctcctccctctctcccaacctcgcccgttctcgcctcgctgttctcctctgtcacctctccctgagaagcgtggctcctgcaaccggcctccccacctgctcctcctctacgcgccgagcaccacacgacgcgacacaaccgagcacggccgctccgccactccactgcttccgcggtggcgccgcttcactcccgtgctgcagcgagcgttacggagatccgtggggacatgaaccagggtttctcctatctgttggtgaacataaagctggatccagaccacagaatgcatgatattatgcaccattgcacacgtccccagagagttcagagttcccagtcatagatgccttttactgcgtgtcttgacaaaatgaacagtacccagtgcccttgaaatgtgctaggaatataaagatatgaactaaatttatcagtggtcctattgaatatggagctactgttatatgtcattgtctcatgcaaatgatggtggctgtaagttgtgattgaggaactccattgtctgagaaatggatgaaacaccaactagttctgggcaatctgaagctagttcatgtgaacctaattggtggcctccagacttcttggagaagatacagtctgcttccataccaaggaaacatgatgttttgggtaatcaaagttcctcatcctggaaggcttctcaattactgtggtcaacaggatcttattcagggttaatccctaatggtttctattcaatcatcccggataaaaagttgaaggagactttcccaactattccatcactagatgacttgcaaactcttgaagcagatgggcttaaggctgacataattattgtagacactgagagggataagaaggttttcatgttgaagcagcttagtgctgcacttgtgaaagggttaagctctagcccagcattagtgataaagaaaattgcaggattggtctttgactgcttcaagcgccaaattcccgatgccagtccaactagaggctcgattgaagatacccatttctttggaaataaaggaccacaacttctggggcagataagacatggatcgtgccgaccccgagctattctatttaaagttcttgcagatgccgttggccttgagagtaaacttgtagttggtctaccagatgacggtgctgttggatttgtggactcttacaaacatatgtctgtggtagtttcactaaactctatggtgcttcttgtggatcttatgcgatttccaggccagctgattccgttttcagctaaggctatatttatatcgcacatatctgctgcgggtgaaagcgactcagctgaaaatgactcttgtgattctcctcttgagcccaacagcccactttatggattgtctgataaagttgaagttgaaggaattgaatcttcatcatatctatctggacgatcactgcgtaatatgatgttgagatcaaggacattctctgaggggaaattaagcacgtcatgtagtgaaccaaatatagcaaatgccttttggaggcgcagccaaaggagagttgccgaggaaccccgtggtgctagttccagccctgagcatccattaatgagagcaaggggaagatctatacttggtagtgagaagcaatcatttcaagaatacacagaatctggagctgcttcaagatcagatggtcttgggggcccttcaacctctaatgctcgaagaataaggcgaagaagcattagcattacacctgagattggagatgacatcgtgagggcagttcgggctatgaacgaaacactaaagcaaaatcgcctccaaagggatcatgtcgaaggttcatgctcatatgttatggaagatcaaagcaacaccaatgactgcccaaataaagatgatgcatcttggagaattggtgctactgacagtgactcaagaaaccgaactggttctactcagaaggccatgtcactaccttcttcgcctcatgaatatagaggtcaagttacccaaaaaagtgatgattttataagtaaagagaagatggcattggcatggaacaaagttttccagagctccccatttcttaataaggctttgctgccttttaaggaatggaacatagatttctccgagataacaattggcacgcgggttggaataggattctttggagaagttttccgtggtatatggaatggaactgatgttgccatcaaagtgtttctagaacaggatttgacaactgaaaacatggaagatttttgcaacgagatatacatcctcagccggttacgacacccgaatgttatattgcttcttggtgcatgcattacacctccacacctgtcaatggttactgaatatatggaaatggggtcactgtactatctcattcatatgagtggtcagaaaaagaaacttagttggcgtaggaagttgaaaattattcgtgatatatgcaggtctaatgtcactgagcaatttgaccataaacggca

SEQ ID NO: 35399 - DNA, 207 bp, Zea Mays
tgcggtggtggtgctcgttgccgaggcgacccggggccgcaggcgccgtgttgcgcgtgcgcccggtgtggaccgaggcttcccgcacgaatcgggaagtcgcggcgcgatgctctgaggggtgcccctgccttcgggaggcagagctttcggcccgtcggaccgcggcatcctccaggagattcttgagctctccctggatgcgcc

SEQ ID NO: 35400 - DNA, 3218 bp, Zea Mays
cctcccgtaagctccacgaccggagagagagagagcgcgcgctatccaagccaagaaactccccccgtagtccgcggcccgggctcacgaccgatccggtccgggcccgatggagctcctgagcggcggcgcgctggcgtggcagcagtaccgcgcgctgctccgcaagaacgccacgctcacctggcgcaaccgccgctcggcggcgctgcagctcttctcctcgctcgtattcatcttcctcatcttctgcatcgaccgcgccgtccgctccaggttctccagtaccaccgcctaccgcaacgtgcccgacccggaggcgctcgtcgcgccgccgatcccgccctgcgaggacaagttcttcatcaagtccccatgctacgacttcctctggagcgacggcgggagcgcccgcatcaggggcctcgtcgacgccatccggaggaacaaccccggccgacccatagcacccgaaaaggttttaggttttaggactccagatgatgttgatgcttggttgtttcaaaacccaatgcgttgccctggggctttacattttcaagatataaatgccactcagataaagtatggtattcagacaaactctactccggtagcacggagaggaacatatgaagaccctaccttcaagttccagataccactccaagttgcagctgagagggaaatggcaaggcttctgattggagacccaaattttagctggactgttggatttaaagaatttgctcacccagccacggagaccttctctaccattgctcaagcagggccaactttttttcttgccattgctatgttcggatttgttttccaaatcagtgcattggtggcagagaaagaactaaagcttcgtcaggctatgtctaccatggggctctatgaatcggcttactggttatcgtggtttacctgggaggcctttcttacaacactttcagcactttttactgtgctctttgggatgatgttccagttcgatttcttccttcataataattttggaatcctattcctcctgttcttcctattccaactgaacatgcttagttttgctttcatgatatccacgttcgtagcgaaggcagcatcagctactactgttggatttgcaatattcattattgggttcttgactcagcttgttaccacctttgggttcccttattcgtctgactacaaaaagttgtaccggacattgtggtctttatttcctcctgatttatttgccaaagccctcaacattctaggcaaggcaacagccactcctgaggataaaggttttagctggaatcagcgtggggagtgcccatcttttgagactgactgtgtcattactattgatgatatatataagtggctcatatccacatttttcttgtggtttgtccttgcgatatactttgacaacatacttccaaatgtaaacggcgttcggaagtcagttttctactttcttatgccttcatactggacgggtaaaggaggcaagatggaagagggaggcctctttagcttttttggttcaagccgtcctgcagatgatgctacccctactgacgaggatgtccttgcggagcaaaacctagtaaaggaacaagctgcaaacaatgcggtagatcctaatgttgcagttcaaatacatggtctacgtaagacatatccaggaactttcagcattggatgttgttgcaaatgctctaaatctaagccgtttcattcggttaaaggcttatgggtgaaccttgagaaggaccagctattttgtcttcttggtcccaatggagctggaaaaacaactacaatcagttgtctgactggaatcacaccaattacaggaggtgatgcactgtgggaatgtcaaacatccgtaggatgatcggagtctgcccacagtttgatatcctgtgggatgcattaacagctaaagagcacatggaattgtttgccagcatcaagggattgcatccagcagcaatcacatcagtagcagaagagtcattagccaaagtaaagctcagccaagtaactaatgctcgagcaggcagctacagcggaggaatgaagcgccggctaagtgttgcgatcgcactgattggtgacccaaaattggtttttctcgatgaacctactactggcatggatccaataacaaggaggcatgtctgggacatcatagaggaggccaagaaaggaagagctattgtcttgaccacccattccatggaggaggctgatattcttggtgaccggatagctataatggcaaaggggaaactgcggtgcatcgggacatcaataaggctgaagtcgaaatttggaacaggatacattgctaatgttaatttctctggaaatggccacatgcagagccccaacatcaacagcaacactgaggctccggttaatccgaacatagaagctgtcaaatggttcttcaaggaacggcttgatgttaatccaaaagaggagagcaggacattcttgacatttgtcatccctcatcacaaagaaccacttctgacgagattctttggagagttgcaagacagggaaggggagtttggaatatcagacattcaactcggtctgacaacacttgaagaggtgttcctgaacattgcaaagcaggcagagctggagacctctactgctgaaggtaccctggtgactctcaacctgtcatcaggaacaacaattcagattcccaagggggctcgtttcgttggtattcctggaactgagacagaggagcatccaagaggcatcatggttgaggtgtactgggatcaggatgaaaatggatcgctctgcatttctgggcactctgacgagatgcccgtgccagttcatgctgagctgaggaggcctccgtcactttctcgtagggcctcaatggaccgtggacgtccagttgggtatatgattgacctgaaccaggtcccatgaaaaaaaggatgagtccaggtgcaacgtttagattggttttgatgcagattatctggtacatatagtatataggaatcttgtattcgtgtctttgtattagaagtcgtaaccttgtattgcagtagtaattggtaaagacatgctttgtaaaatatcctatagtgtaacacagtattttctgttgtatggcaaacaaaggctcgaaatatgacgcaatagaattacatggtaactacaccctgcgtctc

SEQ ID NO: 35401 - DNA, 3604 bp, Zea Mays
gtgcaatctatatgccttggttattgaccttggcagacccaaattacatttcaaagttcatgatgccatcaaatgctgaatgttttaccattttatgtcacggtggattctgagtacattccggacctttcagcaaattctcctttgtgtgtgtctggaaaataccgaggaaaattcccagacacagtgaaagctaaaggttacttagctgacatgaaggaagtcctgattgaactgaaggtccaacaactaaaggaagtaactcttgacaaagtattggtgacacaacatattgatcttatgacagcaaaggcatggctttctgcggccaaacaactggagagaaaggtggggtatttggtgattaaattaagcatacaaaatggtgttccatcggagtacacagatatggtattacttcaaacaaatttggacaatactggaacacaaaaggacgctacaagggaaaatctcgtcacaggattttgggacgtgaactcagcagagaaaattgtgatgctccaaaagggacctggctgttgcagccgcgtcgctgactgcctttgctgcatgtgctgcatcagggcgtgcaacaggatgaacgaccagtgtgctattctgatggcacaggatatgtttgtagatattcaagatgaaaagattttgaaacattttcgaggcttaagaactcggaagataaatttacctcgcaacatcaactcatggtggtccttttcatcggcttgcaagtaagattggtccatgaagtgtagtttatgcacagctcatccctgcttctggtggtactgtcaatgtaaggaggggatcagcatcccttgtctatgcgccgggcggccccattgtttctgcaccaagcccgtgtaatcaggagctattgcccagtgacgcacctttcctctcaggcttgttggttgaacagctctgataatgaagagcccagtcagagtttcgcttacggtgattatagaagtcgtcgtctgcttcccttgatcacacaagcattgcgggcttcgaactgggacgctgccagaaatataagcttcagggagtgtgtgaggttatacgggtcatctcaatcagttggtttgtttgctttgatcatgcaggcattcttgccacggagaatcagagaggtacggtgcttgattcggagcattgttgattactgtggaaatgctgggtcagagttgtttgagttggctcctatgttggtcagcaatttgggtcagtcaatgaccctgttacaagtttatgctgcagtcatccgtatttttgtagagtcttcgatgtttgaggacgctcttctcacttatattcaggccaagaacattggtgttgacagacgtttgtgcaatttcttgttgaagtgtttagttgaggggaatcaaatcatgtacgctaggagcttatttgatgacatgaaaagttgtggtccttcacccaatgtctgctcttattcaattttgatgagtatgtacacacatggagagagatcatgcttggaggaagcttttgagcttctttgtgaaatggaatcaaatggtgtgagaccaaacgctacaacatatggaacttatctctatgggctttgccgttccagacaggtaacatctgcatgggactttcttcaaactctttctcagagtggaggcccttgcagcaattattgtttcaatgctgtgattcatggtttctgttgtgaaggtcaggttgacaaagccatagaggtatttcatggaatgaagaaatgtgggtatgtaccagatgtccatagctacagcatattagttgatgggttatgcaaacaaggggatttattgaaaggttatgatatgcttgaagaaatggcaagaaatggaatatgtcctaatcaagtgagttacagttcacttctgcatggcctttgcaaaactggacaggttgcattggcattgaagattttcaagaatctccaagaccatggttttgagcatgaccagataaattacagcatcattcttcatggctgttgccaacacttagatctcaaggccatctctgacctttggtttgacatgattcatcataatatcgctccagatgtttacaactataccagtctgatctacgcattatgtagacatagaaacctccaagatgcattgggagtgtttgagctcatgcttgaaaatgggttgtctcccaacatcgtgacatgcacaatcctagttgacagctttagcaaacaagggctagttggtgaagctttcctattcctggatagaatgcatcagtcattgggaatcgtcccaaacctttgcatgtacagagttatgatcaatggcctttgcaagaccaacaaatatagtggtgtgtggaatgtttttgcggacatgataaagaggggctatgttcctgatgttgtcctgtacagtattattattgagggcttcgtgaaagctctgaagttgcaggaggcgttaaggttgtaccataagatgttggatgaaggtgtaaaacctaacatatttacgtattctagcctcataaatgggctgtgtaatgatgatagacttcctgaagctatgggattgattagggatatgattggggaagacctgttacttgacaatgttttgtacacatctatcattgcttgttattgtagacgtttaaatatgaaggctgctatggaaatggctcaaagagatggaaagaagcggtgtgttgccagatgcttttgtatatacttgtatgattgatggctatagtaaacttcctgcaatggatgctgcacgcttgatgatggaagaaatggaaaaaagaaagcttaaacctactatagtaacctacacagctctcattattggataccttaaaatgggggatgagaaggaagcttgtatgatgtacgagagtatgcgtcatgtaggcattgctccagatggaaagctgtgttgcattttgggcattggcaatgacaggggtgattgtgatgattctcagaaagcgaagggtgtaacataattacataattttcacagagatttattaacttgatgaagggacttctctatgatggctgaatggctctgagctctccagtgcaggacacactgtttgctccatttgtttcctccacttccacactgccatcctatggacaaggaatggaaagcagtaacctgaaatgtggcagttaaatccgtggacaactgctgagggtgtgaccgatacagatgaacacacaataccatgactccggcaaaatactcccatattttgcttgaagatttactgacaattaatatagaaaaagccatggatttggatgtacccatgtaagtttttctcctgacaaagaaacacttaaattccatttatggtgcaactttctaactcactatttgtgttgcagtttgctaaatatattgcattttcagatgatgacaatagtgtcgtaaatcaatagcaaaggaactcaaaaatagatgttgaatcttcacatgaggctcaagcaaatctctggaacacaacttcctcatgaaagaaatattgtcacaggctcaaacaaattcgattatgcagatccacttacatgaca

SEQ ID NO: 35402 - DNA, 301 bp, Zea Mays
gcatctcatacatgcgccaaagaaaacaacacatataatacagagtgtatagagataaatgtcacaatataatcagagtacttattacatagcggaagtcttacaaaataaaatataaatataaatcgaactaaaatccatccttggcgccagaaagtcaacagggagatgccacctagatcaaatcgaactccacaatgtgtggctccacttgaaccacctgttcttctcctgtgggggtgtgagacaacaagggtgagctcacacatgttcatcgctcaataagttgtggggaataatg

SEQ ID NO: 35403 - DNA, 1402 bp, Zea Mays
tggacacgtagcactagcacatctattccgcttccctctcccactccactcgccatggcggaagcgctcgtgggcctccgcatcgctgcccccgccgtctcgtagccgcagcctaggtttcatggcagccagcttcttcccgttgtgcacctcgccgcgtcccggcgcaaccgactgtgcaccgcccgtgcggccgtctcagggccaccggaggtggacgaggacgattccatgagcatcgacaacttgcatcgcttcttcgacctcaacgtcgggaagtgggatggccggttctaccaattcgacgcgcacgggaaggttcttcaggagattagcacgaggctgtccgtgagctcgtacggggaggacaaactcatcagcctcctgcaatcgttgtacattaagcaaggatcctctgcaatatcgattgtggacgaagaggattctgaacctgaatgggtggagtacaaaatcaaagagacgaacatgttcactgtggacaaatatcagcagatagggttctttcctgaacaaaaggcatttgctctgaggtaccagactgctggaatgctggagactgttcttcggattggtgtgcttggagaagatgatactggtgaagaatcccccaaaaacttgaagataccttctcgtaagccatctattgtatgtgaaaattgtctttactcccttgaaggcaatggtagaatcagggcttttcacataatggatccaaagggagtgctcgacacacttcttgtttttcatgagaagaggcagggatctaaagtgccacagccacttacaaactattcagttggtaccaagagtgctagcagcgataggataaatgcactacttggaagatgggaggggcattctgtgactaagcggagtggggtgtatggagcaacacttgttgaggcagatacagctattgttctcaagatggacagtaatggccaattaattcaggatactttatcaactaaattcggaactggaacaacaacggtcaactggacaggatcagcaaatgacaacttgcttcagtttgatggaggatatgaaataacattgctacctggtgggatgtacatgggatatccgtcagacattagcaaatctgttgcccaattagattcttttcatttggagttctgttggatggaatcacctggaaagaggcagcggcttgtccgaacttacgattcagctggtttggctgtttcgtcgacctatttttctgaaaccaaagtatgagtcacagtttcctcttacaaaatgtattgcaacgaattttgtaagtgatccaataatctcactaactatttttgttgttccgtgcatgatacttgagtgtatattctcagattttttttctctctatccaaaaggcaga

SEQ ID NO: 35404 - DNA, 2701 bp, Zea Mays
ccagaccatcacacactacgcacggacgacatcgaggaaccctagactagagcacattgcacgggcgacggcgcgccaccggtgactggcgtcccctcctcggtcctcactccccagcatggcgacgccctgccgcagcagaaacgatcaaccgatcggaaaacattaatttgtattcgatttgaaagcgcacccggcacctgctccgttcctgcgctgcttggcttccggtctgtgtcaaagcttgcatctcacgcgagtcgcacaaggacgaaccctatacagctccaggaggtcggtgccctagccacctaggccaccttcctggagaccgggcggcgacgacggggacgaacgaccgcgatgggcttcgagcgtgtggagctgcggtgtcccagggagctggacccacggccgagctggacgctcggcgatgtgctcgctgagcttgacgcgctggatgccacccgccgcgctgcgccacccacgcccctgaagcagccgccggattgggctaacggtggtggtgagaaggcctttgtgatgcgggttgatgacgacgacgaagacgacacagaagatgaagacgatggtacaagtggtgggaagtcccgggctctggtggccaaaggagcaaggttctcgtgtaatgatcttgcatcaagtgattcagaggatgaattagatggtcaggttgccccataccacttaatggagaaaagggacctagcgaagagcattcttcttgagctggaacacgagcatcatctaaaagttcaagaagaagttagaagtaagctagcttcattggaggtatgccaccaaaatgaaattcggagaacgatctctgcatttgcccgacttcagaaatatgcagaatcaagaaaggagatagacagaagacttgatgtacacttccagagaagaattgagcagcatttaaggcatcaagcatttcttatactattccaatatttgtatccaaatgcagaagtactcgataaacacttatctatggtccaaagggatcatgaacaaaaatcccagattgttgaacgccgaataagagatgatgcagctcttgaagaagctaaaagaaaagagcaagctgtcaaggaagaaaagttaaggcaggaaagagcccagcaagaagcagaggctagacagaaggaagctgcaaaattagcagctgaagcacgaaaaacagcatttgaggctgctaaaaaggaagcagcagaaaaggaagcagcagaaaaggaggctgctaaattgagagatgcagcagcttctcaacctagtccgaattcccagaataatactgcagaaggcattaaagtttttggcgataaatacgcactagaagcagagtcacggaggcatgcattagtacagaatcaagtgccagaaaacattcatcacagcaaggaattcagcaaatatgaccgacaaattgccaaatccataagtaaacttatgccaactactgacagtgtcagaacaagggctagtgagcttgttaaagctttaaatggacaggattgtccccgtccaatctcttgttgtctatttgctaacaagattatttccattgtcaagagtagaaatacaaaggacaagacctttggaaatttggcctttgcgtgtggatatgtcatgctattagttacaaatcaggtaccagacgcaatggattatcttttagctgagttcaacagagtttgcatatacacggttccaaagcatatgcatgctttgaatgcacaagcacgaaatagagattattacagactgataggttaccaggaagaaaatggacagctcgagagcactgaaagttatctaacatacgtcgttgcatatgttaaactctacgcagcaatgattcagacggaaatcaaaggtgttcgtcatcctcatggtttagctgagggatggaagtggcttgccatgttcctcaattctctcccagctactacagccactgcatgtgcccttcacgctttcctcaagatggctggttttgcacttcacaagaaatatgggtcacagttcatgaaaatcctggatgtaatatcacggtgctttttaccagctttgaaggaacaaggcaacaagatgcaggctgaggctgtcaacaatctacagaattacctgaacgacaagatctacctggaggaaccagaagggcagtacctcgtccagcaactactatccaaggagttgttcatgtaaagatcaaaacaccagatcggtatgagacatcgtgtgtgatcgtctgaagggcggtacctcgtccaagctaccactatcgcaagaggggcctcatgtagagatgaaagcaccagatcgatatggagctgttcgtgtttcagaaacacgatcgagcctttcaaatctcacgaacattatttatgggacagtcccccagatcatttcccccctctgcacgggatcctgacgatgtatttgtttatgtgacttgtatccggccaaggacaggtatgataggttgaggttttatgtttgttgtagttgtacatgtactactagaatcgtgaccagaacaaaataatactcgaccacttcggcgtgggcccagcggtggccaaagtcaaggtcaacttgacacgcgacactttgtctactctgtttgcaatgaaatctaatgtttgtgcttcaaacaaaatagttttaatataaa

SEQ ID NO: 35405 - DNA, 1572 bp, Zea Mays
ccatacacgcagatcttctgtgagcaaaggggccaatggaaggcaacaacccaatctcaggagttccttcgaacccttcaacgctactacaataacgcctacactgatcacgagaagcaggatgctataaacatgttcttaggtcatttccaacctcagcaagggaaacctgcattgtggaagctggactcagatcagcattacaacattgggaggcaaggaactttaaaagaagagattggaagatcattcataaagaggtcactatcagatggtaacatactgttggagagcagcttgcctgtaactatctgtaacaatgaaacagacaacacagaattgctcccagtgcaacagctggatgatattagagaagcttctgattctgcgccagagatctccatatgcgaacctaacctgtgctccagtatgaactatggcacagtgcctggaagacactccatgtcagaagagcggcagagttatttgaaaagattaggttaccctgaattgcactcttcaaatttctttgaccttgatttgttgtcatcttcaggaaattcgtttgacgaggaagtttttgagaggtcattactgatcaattcacctatggatgtgatcagtcctgaatcatctatgtcatacagtgaacaaggacacactgatgagggaagagatgacacggatctttcccgttctagcagccagctctcagacattcgggactactctgaccactttgcgcagtgggtcgtgaatggagacacgctttgctactaggccctggacttttgtcttggtgacagctcagtagatgtgacacggcaggaaatggaagtctgacggatagagcagatgaaatggctgacgactagccgggctaggtgccgtgcatctacctgcagaggcggcgtagcagaagaggtggtggacatgggagaagtctcgcatcggcatgcttgtggtcactggaaggcttgaacgatgaacgctgatattcgtcggatgcagctttcggtggggtacatgattcaatttgctatggtgaaaattttgaccgtagcttagacaataaataggcaaaatatatctgttcttttagtttagcttaccttgcgtttcccttctccatagaaaagtatcaaaaggaaaaacaatggaaaatctattaggaaaaggaaaaaacaaacaaaccataggtaaagaacacttctgttgtaaatagttagtttgctacagaagtataaatatctggtacttgttgggtttcttggcggtgtctgtttcataattgtttctgtgaaaaagctgaaagaaactcggtatgtcttttaatatgcaccatttttgcttgaggactctccatgacattgcgcagagaggagtgcaagaacttgaatgtctcatgcttctcttgcggtggacatccacgtcgatgacaaaattctagtatatggtacgtagttcattcgaaaggtgcaaggtatccaatttagttttggatatctagagttcacaagatagtacttatctgaaaaatgaaatcaaattaccattgcaaaatataaataa

SEQ ID NO: 35406 - DNA, 3894 bp, Zea Mays
ctaggccttacatctctagccacacccacacctgtacctgtttgctgctgttttttctcccacgcgatccaaccgtttgtttacgccgggctaggtttctcgaccgtacggggacaggacatcagtgcaactgtgcaagcgaccgccaccgcattacccggaactgcccagatcttcgtcgaatcgtcgggccctttgctggcgacgagcaaccacagcttgcaatggcacaatagtgacatcttgggaaacaatgaaacgttttgtctatatcaatgatgattcgtgccggtattcctactgtgacaaccggatatccaataccaagtatactctgtggaattttctcccgaaaaatttatgggagcaattcaggcgtttcatgaatcagtattttctactaatagcctgccttcagttgtggtcccgtatcacccctgtcagccctgcaactacatggggtccacttatcatcatcttcattgtttctgcttcaaaagaggcttgggatgattacaataggtatctttctgacaagaaagcaaatgagaggaaaatatggttggtaaaggatggcgtccgcatacagatcaaagcacaggaggtacatgttggagatttagtgtggctccatgagaatgatgagataccatgtgatcttgttctcattggcacttctgatcgacaaggcatttgttatgttgagactgctgctttggatggtgaaactgacttgaaaacaagaaccattcctccaatttctgctaacttgtcagtagagcagctaggaaaagtcaagggtgtaattgagtgccccaacccagacaatgacatacggaggtttgatgctaacatgcgcttgttcctccctataattgacaatgaaaaaagtcctttgactatcaacaatacacttcttcagtcatgttaccttcgatacactgaatgggcttgtggagttgcagtttacacaggcaatgaaacaaaatctggaataagtaggggagctgcggagcccaagttcactgctgctgatgtaataatagacaagctcactattgcaatattcatgttccaagttgttgttgtacttgttctgggttattttgggaatacttggaaggacactcaggggcttaagcaatggtatcttatgtatcctatggaggtagagggcccatggtatgatttcttgattatcccgttacgctttgagctgttgtgctccataatgattccaatctccataaaggttactcttgatttggctaaaggtttgtatgcaaagtttattgactgggatgagcaaatgtttgattgggaaacaaatacacctgctcattcagctaactattagcgaggacctcggacagattgaatatattttgagtgacaaaactgggacactcacagagaataaaatgatcttcaaacaatgctgcataagtgatactttgtatggaaatgacaacggagatgcattaaacggcatgcttgttatgtgtatgaattatgagaaattgcggaggtggaattgggggataagggtacatcagccctctaaatggaggagactgagctgggcgtaatacaacacgtcaacacccatggttctatttctgcaagtgagcagttgtaacactccaactactccaagataagtttccgaaaaagaagatgtcagacttgtaaatgcggtctcaagtaatgatcctgatgtcatcaaatttctgttggttatggctctttgcaatacagtggtccctatcaaaagcaatgatggtactgtgtcatacaaagcacaatcccaagatgaggaagctttagttaacgctgcagcaaagctgaatatgatgctcatcagtaaagacaccattacagctgagatttgtttcaatgggtctaagttttggtatgagttgttggacattttggaattcacttctgatcgcaaaagaatgtctgtagtggtaaaggaaggggagactggtaagatccttcttttatcaaaaggtgctgatgaagctctcctgcctcgtgcctgtccaggacaacaaatacagagatatcttgaagcagtagaaatgtattctcagttgggattgcgaaccttatgtttggggtggcgtgatttaaaagaaaatgaatataaggaatggtccaaaaactttcaaaaggctagctgctcattggacaatagagagtttaaaattgctgaagtttgtaatagcttagagcaagaccttcaaattcttggtgttactgctatagaggatcgtcttcaggatggtgttcctgaaaccattaaattgttgaggaatgctggaattaatgtgtggatgctaaccggtgataagcaaaatacagcaattcagattggacttctctgtaacctcataacttctgggcccaatagtcaattgttatctatcagtgggaaaactgaagaggacgtgctaagaagcctagagagggcattatttattatgaaaaatacatctgaaacaaagggtcttgcatttgttttggatggttgggcacttgaattaattttgaagcattccaaggagtcttttactaggttggcgatgctgtcaaaaacagcaatatgctgtcgaatgacacctttgcagaaagcacagcttgttgctatcctaaaatccgttggctacctaactctagcaattggtgatggtggtaatgatgttagaatgattcaagaggctaacattggagtagggattagtggtagggaaggactgcaagctgcaagagctgctgattatagcattgggaagttcaagtttcttaagagattgatacttattcatgggcgttattcatacaatcgaacagcatttatttcacagtactccttctacaagtcacttcttatgtgctttattcagattctgtttgcctttttgtcggggctatctgggactagcttattcaactcaattagcttgatggcttataacgttttctatacaagtttacccgtcatgactataatctttgacaaggatatctctgaaacaacggttatgcagtacccccagattttactgcattctcaagctgggaggcttttaaatctcactacattttgcggatggtttgggcgctcgctatatcacgcactcgtcgttttcttcattacgatatgcgcctactcagatgagaaaagtgagatgcaggaactgtcaatggtagcactgtccggttgcatttggttacaggcttttgttgtgacaatggatacaaactcattcacttgcccgcaaatccttctcatctggggaaactttgtggccttctacatgatcaacttaatactcagtaccgtcccaagtctccaactgtacacaatcacgttccgcctgtgtagccaaccttcctactggatctccatggctctgacggttgcagtaggaatgggaccggtggtggctttcaggtacttgaagaacctgtatcagcctagcgccgttaacatactccagcaggtcgagcagcgcaatggatctatcagaacttctgggaatctggagtcggcgggagccaatctcactaatctactgactggctcacgtaaaaacagggattctaattatcgccctctgctttcagagtctgcggagtctgtaagtgcaagcggcagctaagaattgtctaggctttccgtactagcatgacagtcatacactcatacagacggcagaacagtgaactgtaacagaatcatgcttgtactaaaaaatatttcgtcggggtcaaagccaataattgttttgttggcctaaatttgatcatttttctcagtctgcgctgtggcaccgtctgtgctgtccgctgtcgcacgtagggatggtaataggatctaaattttac

SEQ ID NO: 35407 - DNA, 388 bp, Zea Mays
attttctcagattagagagaaaaaacaaaataagaaatatacacaccatatcagaataacaagtgcttgcatataaacaccagaacacaccatatcagaaatgaccactactctagaccagtagggaatgcagcaattcagaattacagttcacatatcaaaaataattgaagcatggacaacactattattctagctaaacatgcatgataatattatagttcacatagtaacacaataatatgtcttttctcttgtgcactgctgttgctagcctgcagtaggtgttcaacttcttcatatataaggtagggatagggagcttcaccttccctccttgaaagcaaatttgcagcacctcccagtacatggtattcccagccttgaa

SEQ ID NO: 35408 - DNA, 981 bp, Zea Mays
ctccaggaaagacctgacaagactgagtgctggtacatgaggggaatcaaagtcgcatccctagtcatacgctctccatgatttgtgaatctatgcatactgtgtggttgtggatactgtttagtggaagatagaggtgaaagcagcatggttgcaacagtacaaaatagtggagatgaagcttctagcacaacaacgagaccttcaggcaaagattcctgatatagagaagtgtttggatattgtttcaacattacaagctaaaaatgatttgggtgaggcacttatagctgattttgaattatccgaggggatatactcctgtgcgaaaatcgaggatactgactcagtgtgcctgtggttgggtgcaaatgtgatgctggagtactcttgcgatgaggccaatgccctcttgaagaaaaacttggaaaatgctaaggccagcttagaagtccttgttgctgatcttcagttcttgcgagaccagcaaaccatcactcaggttacaattgctcgggtattcaactgggatgtacaccaccggagaagcaaacaggctgtaaaggaaccttaatcagttagatcacgaggtcaaccaatgtgattgggacaaattttttcgtaccttttggtacctctggcagattagtccatcatagcgagctctttgtttgttgatggtttctttgctgtgtaacaatgtatcggtttattctctttaatggtgtgggaacattagtagaagatggaacattttactgcctttttccccactggatgtccactggatcacgtcgcaaaatattttttttttcatgattcatgcataattcctgctttccaaagggcttcctttatgtttactgcattacagtccaggagatagacggtccattgtcatgttgagcaaagatagaagaaaatcgacaacaggtgaggtgactcgtttttacatatgtagggctttactgcttgacactt

SEQ ID NO: 35409 - DNA, 218 bp, Zea Mays
ccacattagagttagccatcctagcttggagtctatttcaattccttccttcatttgtttggatctatcacgaggtggtagatcaaagttttcactatcttggtgatggttacagcagaaccgtagctatttacaacatgtcacaacactctagcagagtaacaactcctgcttgctcaagatctttcttacactatcttccagcagcacctctgtag

SEQ ID NO: 35410 - DNA, 175 bp, Zea Mays
ctcctggctagaggctggacggacgagtactgtgctcccgggtagcgcggaccggttcacgttgtggaggatctgtgggaacggttgacatatgcaggggttaagtgctacatatgtcgtgtggttagagatccccagctgggtataatcggttcgaatcgtcgttgctcctcgg

SEQ ID NO: 35411 - DNA, 322 bp, Zea Mays
gatcaattcattatatttttcaaacaaaaaaatagaaataataatatgatagactaactcattcctcacaccaaacaccctctatatacataagaaattactaggtgtgtgcccgtgcgttgcaacgggagtacgttaggatgagcatcgacacatatctgatcagatcttatatttcctttggggtcacatgtgttcccaaacatattaatacgtgagcatgtgttcccttgtgcctcatcagcacactgttccgcgcatgtataagtcttgttaatttgcataccttttgtatagtctctcaccatctattcactataat

SEQ ID NO: 35412 - DNA, 1687 bp, Zea Mays
cacttggggttctgctgatgacatgggccaaagttatgtgactgctgggaagcacgaggtgataacattgatgctttcatgctttcctgccccatgtgagaaagttcaggacctattactaaagatagaatattatacctctcaggagactccagaggcttttccacttcctagaggcgtcgcaatagtgcgggcagatgctggatgggctcactgtgttgcaataacagatgaaggtgatgtttatacatggggttggaaagagtgtgttccaactggaagggttattggagaccaatcttcagttggaaccaaggagaaggatgaaagacaaatggcaatggccactgaccaagatataacaaaggcaactccattacagtgagccccaggtcgcaggtgtctaggacaagcagcggggcagcatctggtccttctgaaagcagaggcactgatgatagcacaaagcgacgaaggttgtcttcagcaaaacatggccctgagagctcgacatccagtgacgaaagtctttccgcacccccttgtgttgtgacatttaatacaggagtgaaaatagtgtctgtagctgctggtggtcgtcatacattagcactgtcagatttaggtcaggtatggggttggggatatggaggagaagggcaactaggtctgggctctagaatccgaactgtttcttctccccatcctgtaccgtgcattgaatcagcactatacagcaaggatcgcccatcagctatgaaaggtaacaaggctgctgaaggacatgtcagtaaagtcttgggaaattgtgtgagggccattgcttgtggaggtcgtcacagtgctgcagtaacagattcaggagctcttcttacatttgggtgggggctgtatggacagtgtggacaagggaatacagatgatgttttaagtccaacgtgtgtatcgtctatcctgggatccaagatgcaagacgttgctgcgggtctgtggcacactgtatgtacatccgtagatggtgatgtttattcctttggaggaaaccagtttgggcagcttggcactggttctgatcaggctgagactgttccaaaattggtagatgctaccagcctagagaataagaatgccagatctgtttcttgtggagctcgccatagtgctattataacagatgaaggcgaggtattctgctggggatggaacaagtacggccagcttggccttggcgactcaatggacaggaacgtgccttgcagtgttcctgtggacgcttaccaccccctaaacgtgtcctgtggctggtggcacaccttggtgctcgcggactcgcctacttgaaacctgacaaagaaattaccttagattgacaattttgttaggaactcgtaggctcgtgcagatgcggtgatgctgcatttcatcgtgtacatacatggcagtgcatgcagatatgtgtattcattctttggcggtgcactcttcaacctgtgcaacgtagacaaagcttgtatcgcaccgcgtatacagttgagtaggattgcctcgacaaattgtgcatttcctccgttgctgctaatgtacaaaattccacaagctagacagggcaaccgatgcgttcctcgttgcagaagacagatctccaaaataattaatgtttgtgtatcgtgatggttgcgattccgat

SEQ ID NO: 35413 - DNA, 2607 bp, Zea Mays
tgttcgcttctccgcccgtcgcgtccacactccccctcacgtagtgcgagactgcgagggatgatcacgcgtttccacaccatcagctcctgctgcccttttgtcttcccctctggatgctctcgtcgtcatcacttgttcttcttcgagctaccagctgcctatcatggtcatcatggtcgagctgctgcccccacttgcctctctaatcctcagtcctctgtagagctggtcctcctacccctcactttgccttgagcaatttggtttctagcatctgtggggtggcttgtgggtggtcgccttggactgctccttcctccacctgccgcgccggcagggcgacgaggtccaaaagcctggtggggctcatcatcaagaacaccgaagcggcgagagtggcatgggatctgatccgaggcggagctcgaggagctgaggggctgtacgtgctcttggatccggtagagattccgtgccctcgtgttcgtccccggccgccgcgatggggaacacgtgcgtcggccccagcatcaccatgaacggcttcttccagtccgtgtccacggcgctgtggaagacgccgcaggacagcgacgcgctgcccgccgccgccgccaatggccccggcggcgccagcccgggccggtcgcagtcggcgctgccgaagccggcgtccgacgtgcaccaccacatcgccgtgctgagcgaggcccctgagcccgtcaagatcggcgcctaccactcggagccggcgcccgccgtgcagagcgaggcccctgagcccgtcaagatcgccgcctctcactcggagccggcgcccatggccgccaagcctggcgccgccgccgccaacgccagccccagccccagccccaggccgcgtccgcaggtgaagcgcgtgtcgagcgccgggctgctggtgggctcggtgctgaggcggaagacggagaacctcaaggacaagtacagcctggggcggcggctcgggcaggggcagttcggcacgacgcacctgtgcgtggagcgcggcacggggaaggagctggcgtgcaagtccatcctgaagcgcaagctggccaccgacgacgacgtggaggacgtgcggcgggagatccagataatgcaccacctggcgggccaccccagcgtggtcgccatccgcggcgcgtacgaggacgccgtggccgtgcacctcgtcatggagctctgcggcggcggcgagctgttcgaccggatcgtgcggaggggccactacaccgagaggaaggccgccgagctcgcccgcgtcatcgtcggcgtcgtggaggcctgccactccatgggcgtcatgcaccgggacctcaagcccgagaacttcctcttcgctgaccactcggaggaggccgctctcaagaccattgacttcggactctccatcttctttcgccctggccaaatcttcaccgacgtcgtgggcagcccttactacgtggcgccggaggtactgaagaagagatacgggccagaggcggacgtctggagcgctggcgtaatcatctacatcctgctgtgcggagtgccgccattctgggcagagaacgagcagggcatattcgaggaggttctgcacgggaggctggacttcgagtcggagccgtggcccagcatctccgacggcgccaaggatctcgtgaggaggatgcttgtcagggacccgaggaagagactgaccgctcacgaagttctacgtgatcgccgagaacctgtcggaggacgagatcgccgggctgagggagatgttcaagatgatcgacgcggacaacagcgggcagatcacgttcgaggagctcaaggttgggctggagaaggtgggcgccaacctgcaggagtcggagatctacgcgctcatgcaagccgcggacgtggacaacaacggcacgatcgactacggcgagttcatcgcggccacgctgcacctgaacaaggtggagcgggaggaccacctgttcgcggcgttccagtacttcgacaaggacggcagcggctacatcaccgccgacgagctgcaggtggcgtgcgaggagttcggcctgggcgacgtccagctggaggacttgatcggggaagtggaccaggacaacgacgggcgcatagactacaacgagttcgtggcgatgatgcagaagccgacggtgggggtgctcccgaagaaggccgacctgcagaacagcttcagtatcgggttcagggaggcgctcaggatggcctagacctctctgtctctgctcccctgctgcctgcgtgtaggtgtagatgattgaattgagtgcatgtcagtgcagttgctgtagagaccaccgtagcatagagagctgatgagatgcgagttgaggcgggccaggagacgtgtacatgtgccatagtccatagccatacaggcggccctgcagcggtttggctgcttggttccaaacggttctgtttcatgtcgcgtgcactggagcacatgtgccatatctgcctgctgctgctactgctatatgccgtgcacgtgcacgtcggtgacctgaaacctggctgtccgccggccaccgagctctaacggaattctgccatgctctccgg

SEQ ID NO: 35414 - DNA, 1389 bp, Zea Mays
ttccaatccggtcttgcactatttccgtcctcctccccttcctttcaatcctgctggttgcagcccctccttttcttcgattttgcagttcaacggcgaccggctgaccgccatctgccgggattggtccggtgtggaccctcttgccatctctggcgctgctgcagggcgcccaaccagcagccagggcccactggtggggcacccgtgtgagtgctgtacgccattttttgcaatggaggagggtcacgtgcgtcagacgggcgcgtgagggcggaccgacgacgaaggaattttctcccttacgtacttaatagtagtacagatggtctggtctccatgtatttcttgagaactaggactttttgccggtttaattagtttgtgatcctataccagtgaaaactagtcactttactggatcatgtttggtactgatctttttagatcaagaagtatttatttcctggttgagttgcatggttaaacctccaacctggagtttgtagatctttacccccctaggcccctactctagtcatttcatggctacaagcagtcacctttaatatccaactagtttatatgtgcaagttagtttagcgtaatttaatgtcttaatatgctctgtatctctgctacagcaatctggccctgttactttatatgtaaagcatattgtatccaggaattttttgtacatccttttgtagcagtgtcatatggttaagaaccactcacaatgagggatacatgattaatcaagtatgaatttaatggataattcgcagaagttatgaaagctgttttttatgctgggataccttcttattgacttagttaggttcatgttaagcttttttgattcaacactgtggctgtgatgtttcacttgttttacatagccttgaaacacgtgggaaacattttgaatgtgcgcttaaaatttaatgtacaatttatcagtatatttttaacggagacaattctatgcttttataaaaaacattttattagtatgttatgatcgtgacttttgattttcatgtttcattaaggtcaataagtttcccttagccttagcatgctgagatttttaaatggctttgtgctattatgtcagcattgcaaagttcactgactattgactgtatgttacatatgtaggcacgttcaagcttaccttgcagtttacagaagattacccaaacaagccaccaactgttcgatttgtctctaggatgtttcatccaaatatatatgctgatggaagcatctgtttggatatcctacagaaccagtggagtcctatatatgatgttgctgcaattttaacttctatccagaacgctggaactagtttaacagcccaaaattgaagggatcttg

SEQ ID NO: 35415 - DNA, 1084 bp, Zea Mays
cgtcttctccctctcccctagatccttcgacgccgccctccctcagctcattccctgccgccgctcatctgctggccttgtctcactgccgcccaaccattttcctccctcaagctagcacgcagcctcaactcctctcccacctcacgcacgtctctcccagccgttccttcatttctctggctcgtccttctccatgaggtcgcgccctgctgcgccgtcgtgctggtcgccggctgagcccccttcagtgcctgacgccgcatctccctgccacctcccatggacgccagccctcagccatggatgccgaaccccctctctttagtgcctttctttacagcccctgcgtcgccgtgcgtgtaaggtgtttgtataaatgctcaagaggagtgacgtgtcatggccaacccttttggcgtcgtcggatgtttgatgttttgtgcatcccgtctacgacgccgtcgaccatcggagcgaaatccgtgaaatctaggtgaagaagagacggagcacgtcgtcgtcatggttgcagctttgcttttgtcgtcgtggagcctccaccagcgccgtgtagcattcaggaacaatggaaccaaaatacaggacattttcctacttcacgtctggatgccatccaattaatatcttctctgcgatattgcaatggaagggactgctcttatgtgttattggtgctattccgcttgtacggccaacgaaataggtcctactacacaagggaaatagaggataccatactcttagctttacagaagcctgaagtgtatgatgacattgctcgcgctacatgctgcaaatttgggatagatagacctcaagttgtacctgtgcaaggactacctcaggaaaagatgaaatggaactcaaattttagtggtcgcacaagtgtggagccagttgatgaccaagtttttcaattagtattttagtttgaatttagagtacacatatgtatgagttatttgacaatgcttgtttatgagagattgaatgatacctatctatattatattaattataatgttattaaataaatgtgtatatgtatatttctctttca

SEQ ID NO: 35416 - DNA, 2192 bp, Zea Mays
ttcagactgcgcctctctgctctcctcctatccatggccgcacctctgattgtctctatataaatagacaagctcccgagccgccgatttacgcatcggccggcatgacgcggcgtattcagagggagaagatgagagcaacgtgggctttgccgagcctcctcctcttcctcgccttctcttcttccttttgcaaagcctcagcctccgcctccacaaagcaagacaaggtctacatagtgtacctgggcaagcacggcggcgcgaaggcggaggaagcggtccttgaggaccatcgcacgctgctgctctccgtcaagggcagtgaggaagaggcacgggcgtcgctgctgtacagctacaagcacaccctcaacggcttcgcggccatcctctcccaggaagaggccacgaaactgtcagagaggagcgaggtggtgtccgcgttccagagcgaggggaggtgggcgccgcacaccacgaggtcttggcggtttctgggcttcgaggaggggctcgaccgtcgcccccccgacgacggtggggatcagtggctgctgccgtcgtccctcgacaaggccagcgaggacatcatcgtcggcatcctcgactccgggatttggccggagtcgaggagcttcagcgaccaagggctcggcccggtgccggcgcgctggaaagggacgtgccaaggcggggattccttcccctcctcgtcctgcaacagggtcaaaccgtgacaccgtaccagctccccggcgacaagccctatcctttggtttatgcggcagacgcagttgttcctgggactcccgctaatgtttccaaccaatgcctgcccaactccctggccagcgacaaggtgcgaggcaagatcgtcgtgtgcttgcggggcgctgggctgcgggtggggaagggcctggaggtgaagcgcgcgggcggcgcggccattctgctcggcaacccagcggcctccggctccgaagtccccgtcgacgcgcacgtcctcccgggcaccgcggtcgccgcagccgacgccgacaccatcctccgctacatcaactccagctccagcccgaccgccgtgctggacccctccaggaccgtggtggacgtccggccgtcgccggtgatggcgcagttctcgtcgcgtggccccaacgtcctggagcccagcattctcaagccggacatcacggcgccggggctgaacatcctggcggcgtggagcggggcgtcgtcgccgacgaaactcgacggcgaccaccgcgtggtgcagtacaacatcatgtcggggacgtccatgtcgtgcccgcacgcctccgccgccgccgcgctcgtcaaggccgcgcaccccgactggagctccgccgcgatccgatcggccatcatgaccacggccacgaccagcgacgcggaaggcggcccactgatgaacggggacgggtcggtcgcggggcccatggactacggctcgggccacatccggcccaggcacgcgcttgaccctggcctcgtgtacgacacgtcgtaccatgactacctgctcttcgcgtgcgccgccagcagcgccgggtccgggtcccagctggaccgctcggtgccgtgcccgccgcgcccgccgccgccgcaccagctgaaccacccgtcggtggccgtgcgcgggctcaacggctcggtgaccgtgcgccggaccgtcaccaacgtcggcccgggcgcggcgcggtatgccgtcgccgtcgtcgagcccgcgggcgtgtccgtgacggtctcgccgagacggctccgcttcgcgcgggccggcgagaagagggcgttcaggataaagttggaggcggccagcagggggaggagcggcgcacgcgtggcgagagggcaggtcgtggccggctcgtacgcgtggagcgacggcggcgcccatgtcgttaggagccccattgttgttatcttcgactgatcatcgttcggtaagctagtggctagcctcgcgcggacagacaactctggaggaggataggtgtttagccataccttgttcgaagcaggggatgcaaggcaatgaaaaccttcggctatgtgtggaagaataatcatcacatcaagcagaaaaataaaatccagttgtcttatgtgacgttataaaccactaattgatgactagtcacttgcgcgcgccagcgcgcgcacgtaag

SEQ ID NO: 35417 - DNA, 1872 bp, Zea Mays
ggtgttgattaggcgaggaatgctttgatagatgcgttggtaagtcgtggttaactaaaataggaactaaattgaattcaaaataggaactaaattgaattcttgctgtttgggactgcatgaccagttttagttgtgcaggtagttcaatgaagcaaattatgtttttttagaaatgttatatatgaaagttgtagttcacttctttatcttgtttgtgtaaaaatttcatgaccataggtctagtagtttaggagttacgattttttcaagtccagtttcagaatctgtccaaattctgtctaggtttcgaaaattggactgtttggctaagctaaactgagaatcagcccttagtaattatagaagaattgtagtacatttcttaagctttccaacaaattttggagcaccctttttggtggtctagaagtcaggttatggctgtttgaaatgtgatgtctgaatctgtctaaatctggacagcaatatttgtttgtattaactgacttcgatacacattgaattaatctgagatgtttataaatgaattgtagacaattatattagctttctaaaaagtctaggatcgcctgatttcgatgtctgaaactccagttatgaatttttgaaataaagagctgaattctgtccaaatctagacagaattaaagtttagcactgtttgaccttttaaactgtcgaatcaggttgtgatgataatataagagttatagaggactttctaagctttccagaaagtcctagtttactatttttggatgcttattttgtgagttatgaactaaacaaatagttgctgttctgctgtccaaattcagcaagcatttaaatgactatttggagtttcttttgtgtggatacctagatttagttagtccttgtcttgataaatgaagttgggtggctaattttcagatctgcacctgttatggctgtagtggattgagctaattgtattggctaatatagtgcaacaaaaatcatcaatgggttataagtgtttggtagtgttgactgccttgggcatgttctcaattaggtttattgtcttctttgctgtagaatagaatcgtgactgtagttgactagttttgtttttataggtatgatcatgtaactccattattgataacccattggtcatgatacttacaacctagaattagctttaccagtgttcttgtgtccttataattataaataatgggttgttcattagtgctaataatagtgttagtccgttggcagtgtgctccagtccatgagcttaagacttgtgtgtagtcttatgattgttcgatgcttgagttagatatatttaggtgtaaaagatgcgcttgtggtacttagtaatagcttcacatatagtgtgctcataggaattgtgatgacttgttttaagtatttatcttctttagtatagattatctattttgtgttcttgctcatgctcatatgcaatatgcatctccaataggtacgctagataattatgcgaattggagggcatggatcaggatggatcacaaggtggcattgatggacccatctcgatatggacgacttgatcaagtgtcaggattgttgatgctcgccaagcgaacgtcatctaaccacactaagctagtgtatcccaggttataattttgttctgttatggatggtgctaagtgccggtgggctcggccttcttatataagtatatctcatctttagctttcttattgaggattgtcacttaagctagcatgtattttaaaacttataaatgttttatacattcaaattgtaattcttttgaatcacttgcttttgtaatcaactctgatgatatacattgtaatcttg

SEQ ID NO: 35418 - DNA, 2338 bp, Zea Mays
tccgaagaagagtagagcagagcagacagaggatagcgtgcgtgaaagccgcccatggcgtccactgtccaccacaacagccaccaggcgctcctcctccggcctctccccactccgtctcgccacccccgcctctccttctcgccgcgcccagccggcctccgttccttcttcccggcttctggttgccgccttggcacgcatggcgttgcgcttgcagagccagagttcgttcccctacaggaggaggaggaggaggaggaggacgcccgattcgtcgtggtgaccttctacaaattcgtgcccctctttgacccccacgccgaggtcgccagacacctcaacttcctccagggacgcgacatacatggtcgcatttacttgaatgagaagggaatcaatgctcagctgtaactgggcatgcctttcctagactgaaactacggtacaaaccatcacttgttcagttagaaggaggtagtttgcatcttccgttgctggaccctaacatgcgtgcgacaccattgactccatcagagtggaaggaaagacttgaagctaggacatgccttgatgtgtcctcaggcgaaacatctggaagggggcttttgctgcttgatgtgaggaatgattatgaatgggatgttgggcactttgaaggtgctcagcggcctaatgtggactgcttcagaagcacttcctttggactttcgggagagacagatcctctaaatggtgtagacaaagagaggacagatatactaatgtactgcaccggggggataagatgtgatgtgtattcaacaattcttaggaagaagggctttcggaatctgtatacactggagggaggagtgtcgaactatctcaaggtggaggggccagcagggtgggtgggaaatctctttgtctttgatggccggctctcgttgccaccagcgacattcaatgaggaagaagatgaggaggaacagcaggagaacaagaggtgggtggggtgctgctacgtgtgcggatcagaggtggtggagctgcggcaccgcaactgcgccaacatagactgcaaccgcctttatctgtgctgcggttggtgtgcggaggagctgtgcggctgctgctgctccgactgcaaggtcgcccctcggctgcggccgctgctgccaggccaccagagatacttgaaatggcatgtctaccgcgacggacggacggacgatgaaaacaaactttatggttttgttgacgatgacagcagtggcctgtgaggttgagatagttcacgactgaaaatccaacatcccaggagggaatactttgtcttgtcgtgtgcctacctacttttatacttggacagatgagtgagtgagagttcagagttgagccggctatgtttagagtcacatgaagcgttcagatgcaacaaactttatggttttgttgggtttcttacaaattccattccactttagacctcttgtttctaaaccatatggtatttttctcgaaaacaaaagagaactgcgcatcattgtattaagaagagaaaaaggtctaaaccgacaagtagaaaccagaaatttggagggattttatcaaacacatagcggttccgatgattccataggatccaaaaccctaaaataattagagaattgagaccctctttggctacaccttgcagctggtcacttaatctctcccaccactgcatactgctagattcacctggttgggggctgaatccctgcaaattaacctgaccgagcaaacgaaaccagaaatgcctagcaaagacacatccaacctgtcctcaggctcttgcggacaactttctggatggataagacctctcttttggagtcgatccgctgtccaacatctcttaaaagcagccaaccattgaaaaaaaaattgcatttgggaggggcccaagaatgccaaattctctcccagtgcccaaaattagtagaaccaatgaaaagactttcgtatgcagctttggcagaatactttccatctgttgcaaatctgaatatatgtttatcttcctgattctgcagcaggttaatggagcttaaaatgtcccaaaggtccaggaaatcaactagcactccaactgaaactgcacctctaatatctgtcaaccatcttctatctgtcaaagcctcctggactgatctagtgttcaaatttctcttgggcacagcagcaaatagtctaggagccaaatcctttttccttgcagccagcgatccttccagaaaagggttgaagaaccatttccaatttccgttataacagccacagaaaagaaagccttcactgttccagggatctg

SEQ ID NO: 35419 - DNA, 2530 bp, Zea Mays
atcgcctcgtggtttgtcattgcaaggtgcaagcaaacttgaaaaaaaaaacacacgtcctgctccgtccgaatcgctactccgccgcgcttctcatcaccgtcaagagatagtcagacagttccagccccctttccacacgcacactcctctcccttcctctcctccgcttccatccctgggctgtgcgctactactccccctgctggccgctgctctgctctcacgcatgttttcacatccaagcgcctgcccctcgccctcgccgccacagtggtaacccgatccatgccgggcggcggccgctgacttgctgctgttggcttcaacggccgcaggcaaaggggtggtgacatataatggcctcgagacctgcattatcaacagttccacctatgacgatgacagtggcatcagtgcaacaacaggcggagatggctgtatcaccactgattcccttgatgatgaagtctctagttgctctagtaaagatgcttctggttcttccttcacttcacacagtcttagcaagcaggaggagcattcactagatgagttgggtacacccatggcaattcatctactccctttcaaagggaagaaaacaatcacatataccttgagtgcttcagatattgaaaacatgaaggaaaaatttgcaaaactattgcttggtgatgatacttcaggaggagctaggggcgtttgtgtggctctggccttgtctaatggcataatcaatctctctgcaactgtctttggagaactctggaagctggaaccactgtgcgaagataaaaagatcaggtggagaaaagaaatggactggttgctgtctcctacaacttatatggttgagctggttccaacaaagcaaagcggagcagatggatgtacatttgagaatcaaagttatgaagggcaggcctggtgtagcggtgagacctgtctcactgagtcggatttgaaatagtttctcagcatttgtggagggaaggcttgtctcgatttatctcgagacctcattcatgtgggagcctctggctctttattcagaatctaacttggttatttttcaactgaaccatgcagattatgactccaaaggcccgctcagatgtccatgtgaaccttcctgcccttcagaagcttgacatgatgctcattgaagtaatggactcaatgatagatacagaattctggtatgaggagagtggcagcagagctgatggtcgggggaaaattacaggtccaaggaagagtaaaaagtggtggctcccgtctcctcgtgtccctgagcaagggctatctcaattccagcggaaaaggcttgtttttcaggctaagcttgttcaccagatcctcaaagccgcaaaatccatcaacgaacaagtcctgtcccatatgcctattccggccgctgtcatggatgcccttccgaagtctgggagggctagcttgggtgaagatttgtatcaggctataaccacagattatattcctgtagaggaaatatttgtttcgctcagtttgaaaaccgagcatagtgtgctcgagactattaaccggttggagggcgccgtgtttgcatggaaccaaagaattctggaggaaagaagcaagaggtccccaggacgccattcctggagcttcatgaaggatagctcgtcggaagttgacaagatgtccgcatgcatcgaaagggttgacgctctcgtgcagcttctgaaatccagatatcccaacctgcccccgacttttatagatgttttaaaggtccaatacaacgtggacgtgggccatgcaatcgtggaggcctacgctagggttcttgttggggtagcgttcagcatattgtcgcgcgtggcggagatactgctggaggatgacctgatcaagaagccgaacacccccatgaccacgctgaagttcgacctctcctctgacgtgtacttggccggcatcaccgagacgccaccgggacacatccggcggtccctgatggaccagatcagcatggtggacgggcgctacgatgccgttgttggcaagaagaaagaagtgaagcagctgaggtggtgagggcagtcagcagctgttgtgtgaatcttttgccgatgtacagggtgatgcggggcccagtgtccgctccacaaggttacctttagcaaatagcgcgatgtaatgtatttttgcgacgagtttatagcgtactgtactgtaagatcagcattaggcgagtcctgcctgtcgaagtctccgggtgttgctgttgcgtctgaacgatctgacgatgctcttggtcagcctctgctgcttttcttgctggcaccttgatgatgatagcatgtcgatgacgagaccttgcttgagtgcttgacgggttcatgctgacgcgtcttccgttctcgaagcgcggtccgtgtttctggggcgtgtggccctgtggagttcgggcttcagagaatgaagggaccgtgcccattcaattcagagaagagaatgaatggaggggccgtgtcaactctga

SEQ ID NO: 35420 - DNA, 2265 bp, Zea Mays
cagaaaagggacgggaaggtgccaataaattgcgaggatgccgctttatctcttctcctctcccgccgccgccaagctcgccaccggcccacacgcgtccctgcaccggcggcgccagttcctcttccgagttccccaccgccccagccgccgcgccccactgctaacttcggcggctgagcgtccagcagggcgcaccatggctactgcggataccggagcgtccacggtgaccgattcgaggctccgaggagtgaagcaagcactgatatcattgtcagataaaacagacctggctaatcttggaaatggtcttcagcgtttggggttttctattatttccactggtggcacggcatcaagtttggaagcatctggtgttaatgttacaaaagttgaagaaattacacagtttcctgaaatgcttgatggaagagtaaaaacattgcaccccagtatacatggtggtattcttgcgcgaagagaccaggagcaccatctgaaagcactgaaagagcatggcattgggacatttgatgtggttgtagtgaatttgtatccattctatgataaggtcacctcaggtgcaatatcttttgaggatggcattgaaaatattgatattggtgggcctacattgatccgagctgctgccaagaatcataaggacgttcttgtcgttgttgatcataaagactatcctgctctactggaatatctagaagggaaacaagatgaccctgatttccgcaggacacttgcatggaaagcattccaacatgttgcttcctatgattctgctatctcggagtggttgtggaagcaatctaataaagcagattcatttcctcccagctttactgtgcccctcacaatgaagtctacacttcgctatggtgagaatcctcatcaaaaggctgccttttatggtgacaggagtctttctctagtaaatgctggcggtattgcaacagcaattcagcaccatggaaagggctttgcaattttacgtacgtcgtcttacaggaaatgtcctacaacaactatctggacgcggacgctgcgtggaactgcgtctcggagtttgagagcccgacttgcgtcgtggttaagcacacaaatccgtgtggcgtagcgtctcggcacgacatcctggaagcgtacaggttggctgtgagggcagaccccgtgagcgcgttcggaggcatagtcgccttcaacacgacggtcgacgaggatctcgcgagggagatccgggagttcaggaggccgacggacggcgagacgaggatgttctacgagatcgtggtggcgcctgggtacacggcggagggcctggaggtgctgaaagggaagtcgaagacgctgaggatactggaggcgaagcggaggaggagcgggaagggcacgctgctgtcgctgcggcaggtcggcggcggctggctggcccaggagcccgacgacgtgaccccggaggacgtggccttcacgaacgtgtccgagagggctcccgacgcccgtgagctctcggacgccaagttcgcgtgcctctgcgtcaagcacgtgaagagcaacgccattgtgatcgccaagaacagttgcatgctgggcatgggcagtggccagccgaaccggctggagagcctgaggatcgctttcaggaaggcaggggaggaggccaagggagctgctttggccagcgacgccttcttcccgttcgcttggaacgacgcggtggaggaggcgtgccagcgcggcgtggcggtgatcgcagagcccggcggcagcatccgggaccaggacgccgtggagtgctgcaacaagtacggggtggccctcgtcttcaccggcgtccggcacttcaggcactgatcgacggcgacggtggcagcggagaccgtgacgacggacgatgggagggacctctatatagctgcgtcgatctggccggtggctggaaggaaggatctggcgtttcatcccagcgctgatgccggctggcgtttcttggctactagggagactctgatggtgctgatacaaccaaatgtcgcctctcgagaggatgggtcggtgggtcccggtttgtatatatgacgtcgtcagcctggcaagaggttgattgagcttaatactaactcttgcggtggatggaaatcggaaacggtcgctgaccggtgggatcgcacagtctgctgctagaagcatgcaaaggctacatgccgtgttattattgttattaatatttattgctgtcacgttaca

SEQ ID NO: 35421 - DNA, 508 bp, Zea Mays
cgcaccttgtgccgcggccgacgagaggagcaggaggcggcgggcaggcgggcggggacaggcaacgggtgctcagtccccacgacagagacgaatgctcggaccggcacgaggcgggtttttctggctcgacgcgggcgcctatttgtctgcgcgatcgccgtcgccggcggccgcggggctggcggcgggaggggagcgagaggggcggggcgcaacgcccgtgcgatttattcaaacagaaccgggcgaatttccgcgattttttgcggtattttccacgatttttcgtctaggattcggatcgaaggcggggacaggaggggggctagacggcggcgatcgccggagacgggctcccggcggggaggcgcggcggcggcggcggcggcgcgcaagggagaggggtggttatctaacacaagggggtaagggcgattaggaagggcagataagttttttcccctctctctgtatgtctctctctctccggctctcgccttttcgc

SEQ ID NO: 35422 - DNA, 3044 bp, Zea Mays
gaagcctggagaaacgtttgttgttcttccagaacacgccctcggaatcctatcgcctcccacagcacacgacgcgcctttgctgaactctctctgtcgccatgctgccggcggtcgccgctgcatcccccggcctctcacatctgccgcgctaccaccaccttggccgtcgctttcacctccgccgccaccgccttctacctgctattccggccaggctatcgtgtggggccacccacgcccgccgccttctccttgccggcgcgttcgcaaaaggggagggttcttcaggacaggatgttgatcactctgctggtgccacaaattctgggtctgcataccttggtctcttcgttcgattgcttggcttggataatgacacccgtgatagggagcatgctgtttgcacactctatcaatactcccttggtggaaggaagagcatcgatgagataatgcaattccctggttgtattgttctcatcattagcctcctgaaatcagagtccattcttgcctgcgaagcagccacaggtcttctgcgtaacattacgtcagttcacatatataggaagatggctggtgagagtggagcaatggaagaaatcattaatcttctctgtaaatctacaataacccccaagattctagagcagtgtttgtgtaccatttggaacttttctattgatgaaaaatggaggtacaaggttctgaagagcgatgtcctaatgaagattgttggttacctggatgaagaagacatacaagtcaaagaagccgctggtggtatcatatcaaatttagctttgagttcctctagtcatggagctttggttgaagtaggcgtcatcccaaaattggttcatcttttgcaaaccaaagaagatgactataagattattagaaaggaagctaaaagttcactaatacagctggccactgatgattgttactacagccttataatagaggagggtctagttcgggttcctttggttggctcagctgcatataaagcctttaaacctctccctcattcatggccctcttttcctgatggctctaagattcagcggagttctcatccctcaaagtacggtgctaccgaactgctccttggcttgagtgtcaatgagaacgatacaaaaccagatgaagctaaaattaatgctatgataggacgttctaatcagcaattccttgcacgtgttggagctattgagttggatgatcaaggacaagaggaatctggatctgaaaagaatgacatgtataccattttgccatgggtagatggtgttgcacggttagttttaatccttggacttgaagatgtctctgcaatcaaaaaggctgctagagcaatgggtgatgcatcaataaatgaacatatgcgtacctcattcaaggaagctggggctgttaaacctctacttcagctgctcaagcacaaagatgtacatgttagagaagctggtgcttatgcgttggaaaaattatgtgtaagtgccacagtctgccataatatcaaaacagaaggtggactagaattgcttgtaaatatagtcaaggatcgacatactccagtagaactactagagaagataatttatatactttctcgaatgtttgacatggggatttgcatggttgctgtgccggatactgaaggttataaggatagtgaaaacagtgcaaagacatctgttaaccaagagatgtccagcgagttgatctttgattttgatgctatctcacacttaacggaagttctaaaggaagcatcgccaaggttgcaagcaaaagtctgttgtgtacttgaccatatagcagcttcggagcaacatgccaccgcaatgactgctgcttgcactggttcagtaattgaagctattcttgaaataggggttattcatgcataaacggtgaaaaaatcacttctttgctaagaagaacgctcaaatcaaatttcccccttcagtcaaaggattgtcttgcggcatgcctcattaagctagaatccagagctggcttatcaggagatcatggtgttagtagtatagatatggagataactatctatgagactattccaaggctaattgagcaaatgatgatatcactttcgtttgaaaataaaagaagtgctgtaatagagctcaacaagataatatctggtggtgtgctggaatatacaagagcagtggcagattctggaggcatatttccactggtgaaaatgcttgaagaggcggatggagatgcactggaggctatcttatctatcttatataatctgagcatggatccagagaatcacccagcaataattgctgctggagcagtgcctctgttgaagcggattgttcgtacagaagccccacaatggagtagtgcaattcagctgttgagaacattgcctgtatgacattgatgaagaaaatggccattcatcgccaacaaacattataaactgcacttagggcctgtttggtttgatggctaacttgccacactttgcctaacttttgtgcctaaggttagttcttcaattcgaacgactaaccttaggcaaagtgtggcacatttagccacgaaccaaacagccccttagtgcatgcacagccaatttcttagattgaggttgcggttgaacctagctccagctccctatcatcatcaaaatttgaattttatgatctggaagaaagcatcagcaaggcatttcctccaaagtagcgatatatgctgcccttttggctagttgaaaagcacaccggggcctgatgtgtccttttgctcacatcacatgccacggcaatagctagtaccacgaactattttggataccggcagtttgctggttgtgagaggacccaagaaagttcaaattgtagcttgctaaatcgtcgtgtttcgacactaggtgactttactctttaaaaatgctatcctttttgtgtaacctgaaatcctgaataacctccacggtgccaatatcaaaagaatctctttttgactccagctggggtaatcgtgaggca

SEQ ID NO: 35423 - DNA, 4445 bp, Zea Mays
cgtgagcatgagcatgtccgcgtgtaacacctggcgtaccggacccgaaaattttcttcgaacgagctctgagcagtgtagccctcctgtccgctgttcggtgcccgctgcccacctccctctcctccttccgacctcgccgcctccctccctaaactctaaaccctccaccagccgaagctactgccgcggccgcaacagaggtcgcgacgacgaacgctgaagaagcgccggcgagggagagtcctttactttttcctatgctgtagcaaaacaagcctatatcatcttccaaatatactcgttccgtgccggcggcctcccctcctacgcccctgccgattcttcaatcttcaccaacgtctgcgcgtagcaggctagcagtcggcacgacttcctcagatctgccggacgacttgctgttcgtcaccgactcaccagcaaccaacgtcagccatcagccggcagcaggggaagctgggcggagggtcattgcggcacggcgtccaggcgtacagcaggcaccagcaacagcccatggcaaacgccgcagatgaccctatggcagatgaagccagagtagaagatgccttcacacaggagatcaccgattattcgtacgtccctagataccatgtgttgagttggatggaaactgtggaggggatggtggccggtgtggcggcgcttccgccggtgtatttgatactgaacagaggtgcgattttcttttatatttcttccagttcatgttctccttgtgtggctggtgctggattcaaccgatctagggaagagatgttagttgatttgctgtaaaaatcaatatgttaacagagatatatgatacatgctcctgcttgctcatgatgccggtttggtgccaaggctgtatgccccccttcctatctgtgttttttgttctataatttggaggtttcttagttttttactacagtatttgcctattacgtatcacgttgcatctaattagctcttcttcgttgcccatgccaagatcttcttgagacgggatggggatggaagaggctggtgccctacagacctggttatgttgagtggcatgtgttcaagaaataccttggggactatttcgaccataatcgtgaagcttttctttgtgccgagcagaagcctgatccatttggatggattattgctaaaaagagtgccctgattgctgcagccaaattgtgcctcaagatggagaaggcacttctcaggtactgtgctagctttctcactcctgacgacaaaaggttgatcctccggatcaaggaccaggcaaagcaaatgatccaatcagagggtgatcaatctttggttgtaactatatgcttggaggtatgcttgctacaaactacaccaaactgttgccaaactagcgccagggattcgagccctccccgcgtttccttgagcatgagcctgtccgcgtgtaacacctggcggaccggacccgaaaattttcttcgaatgagctctgagccgtgtagccctccagtccgctgttcggtgcccgctgcccacctccctctcctccttccgacctcgccgcctccctccctaaactctaaaccttccaccagccgaagctactgccgcggccgcagcagaggtcgcgacgacgaacgctgaagaagcgccggcgagggagagctccgacgagtcctctctgtcggccaggttgtcggtgccgagcgcgcggtcgtcgtgcagctcgtgggaccagtccgccgagcggctgctagaggcggacgcagccctcgtgcggaagaagtgcgccgagaagagcgcgccgaggccgaggacgccgccgggcagcaggtcctccagcgcggcgaggtcttggtcttggtcttggagcagggtcttggtcttggagcactgcacgaggagcacatcggcatggtgcttcaagcaatggttcaaatgggtgtccttgttcctactggagatatgactgttgtcagaagaaccgctcaatttttccttaatagctttcaagagtgcctaacagcacaaaggaaggagagagaaatggcaaccgcagaactgggtttcaaaaagcaattaactaaggaggagaagtttgaaaagaggaagcagagacttgctgcaatcggagaggatcttttggcgattgctgctgatcaaccatttcgcttccctgccacatttacatttgtggtcagagcattctcagttctagatggtactgggaaaggccttgatcctaggtttcatattacagagattgctaagccaaatgccaaggaattgctaagatttaatgacgctggtgttgaaatagttgtgaaggtgtgtggagagacatgtgtattcctcctatgacgaattccttaggctccatgaaggatattaacggtatacatcaacaattcattctattttaattgcttgcaaaacttttttggcccttcaaatgagttccacgcatcaagaagtcaagattccaggaggcctaaaataggtaaacttgctgttatatcttttgtgctctcagtagtcgcctattacttgttttaattcgctgatccatgtgcagtgtatcaatttgtcttagtatttttattcgtggggatgcctgactcaaatgaactcatgttcaacactgagcaacctacttataattttggagcctataaaatttctaagctaaaaaaggtaataaaaaggaatgatattatagtcacatcatctgaacaacagtgaagggaagggagggatagatggtctgaatgcctataaatgtcgttcccttggtctgcttcttaaatttgaaaccaagatactatagtcaaatacttctaaacttgaagcctgtaaattggaatcaccaagttaaataagaacaggggtaactattcatagctcagatggttgtcatccaatacgtgcgctaaggcacagacaggtgaggttgcatattcaatccccaagacagtaaaccattgaggcatattaaaacacattttccatgaggtttcctaagtgatcctttaggtaaacagaaccatacctagctccatatgaaactatttcccgatttgaagtacacctaagttaaggttcatacattggagctctggcagtaaaacaatagtccttaccttgagacagcttagattagaatgaggtggatggtaatatggcatgagcaacataccacagttcatgcatggaggaaatcatttttactttctttcctagccatggtagttgtgttgctccttaccaaggcactacatggagcatcatatggttcatgatgtaaacatggttttagatctgtctatactcacactcaagaaccagccaaaatgtgatattccacaacctgagagaaatcaaaatgaaatcatgtacaacatagtacatatgatgatgtgcggtgatgcgggtgcatgtgtgttgtgtgtgtaggagaggagggcgcagcttgattcaatccatgtcaagtcagaggctgctgcgaggtttgcacatgcaagtagaatttagatgatctctgttaggcatctaactgaataaatgatctccattatggactggttatattattttctgtgcgatcggatgggttaaagaaaagacgtgaaatggtattttccagtatggactgtataaatgtaattatattcctatgctggtcctgcttcgctttcatgtggatttatcttgcaaatggtatgtggatccgttccagaggcaatgagccttgcagccagtttgcagtataaaaaacccaattatgtccactgttggttcgacgcagcgtgtgccgaggatttctactgccaagcataagaaagagattgttcttgtcaccccaaaaatgttcccattctactttcgggcaggtgaattgcagataaatggtctgttcgcaactggtgctctcgggcgactccatcactgagcaacccttcgccccggtggctgcggtgtcgcactggctgacacctgctcgcagttgcattacaagttttactgactatgtattttcaggtttattcaatttcagttgtaatgcttctgacagcagttgtatcagtcctcttgttcagcttccatgtatccctcgcatccttccttggatccacataagtgttaatgataattttgttgcatctcctctgctgatcagagctttcaaactcatgacagaataatgtactaaacttcagtttggtgtctatctcagtgtacctacactcagttggaaaacttcaaccacactgcaacaaggtttataaaaggtttgctatgaggaaaaacaaatttatgggctcaaacaaagtgtgatagtgaaagtcattttgcttccagcttaaggttactgtagctgtctgcatcgagactgttttgtgtcttgaactaagaaaaaactctccatggtt

SEQ ID NO: 35424 - DNA, 2869 bp, Zea Mays
ttttagagctagaggaaaaaattagactttcaaaaagattttgaaacctagattacgatagtttagtacttcagtttatgaagtcaaaaaagtttttttccccaattatcaccagcagccggtttgggcttgggccggccagaggcaggccgagtcgcaagcgccgttgccatctctaacacgcggcactgtaggaatcggctacctccggctgctctgctttgtgagatgctcttcctcgtccggcggcaccgccgcctcgctctccccttctccagtctgcacgcacccgcgcccgcgcccgctcccacactgccctcctctctcgacgcctcggcggtgctcaagacgctgtccctctacgccaacgattggcgccgggcgctcgacttcttccactggtccgcctcccccgccggcgccaacttgcccccgaccgccgccaccctcgcccgagcggtcgacatactcggcaaacacttcgagttcccgctcgccacctccctcctcctttcccaccacgatcctggggaccccaccttcctccgccccgcgctccgcgccctcctcaaccgcctcgccgccgccaacctcatcgacgacgccctccacgcgttcgaatccaccgctgcctccatcggactctgcgatgaggtctccttccacatcctcgtcgacgcgctctgcgaccaccgccgcgtcgacgaggccgaccacctatgcttcggcaaggacccgccgccgttcccaccgggcacgaagacccacaacctgctcctccgtgggtgggctaaggcccacgcctgggcgcgtctccgccagctgtggttcgacatggaccgccgcggcgttgccaaggacctccattcctactcgatatacatggatgcccttgctaagtcaggcaagccgtggaaggctttcaaagttttcaaggagatgaagcagagaggcattcgaatcgatactgttgcttacaacactgcgatccatgctgttgggatggcacagggcgtcgactctgctgtaaggttgtacagacagatggttgatgccggttgcaaaccaaatattgccacttacaatgcgattatcaagttattctgcaaggagggtaggttcaaggaagggtatgcgtttgttcagcagatgcgcaagactggctgcaagcccgacgtgctcacataccattgctttttccagtatttgagccgtccacaagaggtcctcggactgtttgagaaaatgcttgagaggggttgccagccaaggatggacacatatgtcatgcttattaagaggtttggacgctgggggttccttcggccggtgttcattgtgtggaaggcaatggaagagcagggtcttagcccggatgcatttgcatacaatgcacttattgatgcattactgcaaaagggtatggtggatttggctaggaagtatgatgagaaaatgcttgcgaagggactctcacctaagcccaggaaagagctggggactaagttgccagaagcagaatctgatagtgataacacattagatggtgtgctttgatttctgtgagctagacagggatgtacattatcatgttctactacccattgttatcatcgaaacaattgtttgaatatgctcatgttcccaaatataggctgttttcattcaaggagatctaatatgatttcatggattttatatggaattcaaagcagacaatcatattgcattgccatcagttatcattaggttattatctgataaatctgtggaagaggtgggcctccagagcattatgtgttcctggaatcataggtggacatggtcacatgtgtaggaaaaagaattatcatatgctcatgggtctggtgccagttgacataagaagtggatgaaagaaccaagacgaatcagcaatgaagcaaaggccatgtagtttgtaaggtccctagtaagtcagcttcaacttgctaaacagctcatgacgagacctggagcaggaatactggtaagtcagcttcagcttgctaaacagtttcatggcgagacttggagcatgaatacttcaaatggaatgcagatcttctgatcttcatgtggttgctccttaagtgaagccatcacatcagacaaactacttggcaggggatagatggcaatcatggcattcaaactcaacttgttagctctcctgtgagcagcatgaactgggttctcctttgattatcaactggcttctgttcgtaacagatttggcatgcagtggcaacttggtcaggcatagattctcttgagtccaaacccagtaggaatcaaatcaagatgcttcacaaaatatgagaaactggtgacacaagcacgttgatggaagtaccatgcaggcccatgaggagaaaattcagaatagatatgtttgaatgccacgtactgagcagcttggaggacattgacaattggcatgccacatactgtgttgtcaaaagcgcaacaggacttctcgtaggaagtctgaatctatggcttcgcttagtcttgggggagaggctttctgacagaaagcctaaattgatgaaatgaacgttcaaatgattttcaggttaataatgccaatcaaggaaggcccctttttgaaaagcctcgaaacatatgaaccaagctaaagatgaatgaagccgaaggtacggaagccaaagctttagcgtcgtcggaaaatcttgtagatacagctctggatactctatatttatcaatttttgtgggttgtacatgccctatcaaagaaactgcatgatacaatcataagcttctgaatcataaatgaagttaaaatacaatacgtatggaaaatcttgtagagacggtctcttcg

SEQ ID NO: 35425 - DNA, 853 bp, Zea Mays
gaatattagctataacctatgtttgattgtgtatatttgtatacttttattgtgtttcaggaaggacaaaatcatgttgtacaggatcctcccacatatggtgcaccaaagtttgatagaacccccagttagtcatgtcgtgacatgttcttatctctactactaattatgtgcctatcgtaggcgttcacaattccttggttctgtcgtcgcgctcgcctgccatctccctccgcgctccatccgccaccatccgcgctcgcctcccttcgcgcatcctacaaccgcgtgctccttccttcgatggtgcggatcccccgtgactaccatctccctccgccctcccgcgctccatccgccaccatccgcgcttcctacagccgcgcgctccttcgacggcgcggatcccgcaccctcgaatcacgccagcagatcccacaatcaagcagcggcgacaggaataggggcgggctacgcgggcgctactacgacgagggtgagggcgagcgctccggcgccgcggcgccattcatcataatcggtcgagctcctggagggaacggctgcagagcggacgagatcgaggagcgggcgggcgggtgccgcccgtgacggcgcctaggctcaggctccgcgacggccgccacctcgccgcgcaaaggtctcaccggctcccgagaggacagcgcccgcgcctcccaggtttcaaaaaaccttctgagaaggcatgtataaaactttgggcaaaaggagatcttcctacctagcatatcttgcctcggaggagggttgttatattcaatactatgggtttgatggagcctacagttgttgtaattgaagcgggtcaaga

SEQ ID NO: 35426 - DNA, 945 bp, Zea Mays
catgtcctgtaaaagctcagcacgggatggggagagcgtagcagggaactagggacagagcaggccatcgacatggtgctcacggactactgcatgccagagatgaccggctacgacctgctcaaggccatcaaggcgctgaacccgctgaagccgatccctgtcatcgtcatgtcgtcagaagacgagccccagaggatcagccgatgcctgaacgccggcgccgaggacttcatcgtgaagcccctgcagagcaaggacgtgcagcgcctccggaactgctccacggtcgggaggcccagcaacaagggcggcgccacgttgccgtgcgaggagaacgccgtggccaagtggagtaacaacaagctgccgccctccgccggcgccggcgccggcgccagcgccacgtcgccgtcggggcggcgggcgaacctcgccggagtcgccatgcgccaggtgctgcactcgtcgagagtggagatctcgcagtacctgccgctcctgctcaagctcgtcgtgctggcgtacgccgcgctgtgcctgggcgagctcctgcacagatggtcgtcgggtggcagctgctcgctctccccgtggtgcgcctgatcaggaaggagcaagcagcgcaaaaggccagcaacggtgcaagagcccccctgggcaccgacgacaggagactgctgatgcaccaagcattatttcagaggctccaatagccctagtcttttaatttaggtagatgagattgtctgctctgagatcctaaccggggtttcgaccgatgatgagtccccccgtggcttttgttcgttgatttgaggggccggggccgtagacgtaggaaggagaggaacggaacgaaccccttgtatcctctgctctgtatagaatgaatgaatgaacgaatgaatcagaatgcaacgcgtcatccgagcacacgaacgt

SEQ ID NO: 35427 - DNA, 1233 bp, Zea Mays
tgttctaatcaacaagcagtttagtgcaaatcacaacttgttcttaatattcccctatcataggcttctagcgtggagtatgaaaatatgtgatatatattgtggtggtattgttttctgatgaaatgaatattattaccccataagtggacacaggccagttgaaccaatacgaacccgatcaactacatcgatgcatcaccaacccaagcatcccaatccaaacaacttgtaatttgaaactagaggtacattatagtaccccttttctttttagggaactagactattaaggaacaccttttctctagtggggtacaagactaatataatcagtttgtgtgacccgcctgaaaactatgttctgttatcagtattttgtgccgtcacaattcagttagcagcatgcatgttcaattgttggtgtctttgttaagtttgagtagaaaagctcaatctagcatgctcttcgctctgttttactttccatgattcgttgattatctatgcagtttctgcacgattactatgagtatgtgctttcatatattgtttactcgatgacttgaatagtttacaacgtatgattattgcttaggaccctgcactactaaatcaggggactcgcttgagtcagaaaaacttaggaaccaagttttctctctaagttactgacttcattttctactgtttatagattgcgaactgaatttaaatcaaatacttcagtattggtctctagagaggaagctctgccaaccattactaataactgagaaggatttggcaatcgcttatctttgactcaataccttatgacctcggaaaggtttgaacccgtcagggactaaagatgccaaaggttgaagaagggtcacgagcaaagagggcatttactatcctttgcaatcttcaccgttggaaggtgaagcaagctagaagctcatcttgtacccgcaacaagttgatacctgcagcacgtggacaaagctagatggcgtggacaaagctagatgggaagcctagtataattgcaaagtgaatcagttagattctagtagttactaaaatttttaagtgatatttgtatgatattgccactttggctttgcttctttgtgaacacaattggcagttactgaacatgtttgctatcgagttagttagcttcttgatattttgccaaggccaaaagcaatattattgagggtttataatttgattttttaacat

SEQ ID NO: 35428 - DNA, 1661 bp, Zea Mays
catgaatgctcgctcctgcatgctactattaaacaaggaagccatgggagagaacaggaagatcacccgcgggtcaaggctggtgacaaacaagctgctgcaccgctgccagcaactgcatggccacggatctgtatctggggtttctgaaaccttggggaagagacccttgaatgggaacaaggatacacttgtgtacagtgtgtttgccagcacctggaatgtcggcggcgttacaccatccgatggcttggacttggaggattggctggacacaagggctaacgcctacgacatctacgtcctagggttccaggagatagtgccactgaacgcgagaaatgtgctgggtcctaggaagagccgcgtgtctgccaagtggaactcgctgatcggggaggcgctcaacagaaggtgtcgagaagaaggcggggcgaacacgaacagcagcgccaaggacgacgaaggctctgtggagggatcacagggcttcagatgcatcaggagcaagcagatggtcggcatcttcacgtcggtgtgggcgagaagcagccttaggccgctcatccgtcacctggatgcgtcgtgcatcggctcgggcatcatgggctgcctagggaacaagggctctgtttcgatccggttcgtgctgcacgacacgagcttctgcttcgtctgctgtcacctggcttcaggcggcaagcaaggggacgtgctgctgaggaacttggacgtcgcggacatacttgcaaggacaaggttccctggccctgcagctcacgagttgccggagaagatccttgatcatgagatatccctggaggaggccgagacgaggtcgctggtgagagccaagagatggcccgtcttgttggaaaacgatcagctgctgttcgagttctcgagagggcggcattttgagggctggcaggaaggcctgatcaccttctcccccacctacaagtaccagcccaactccgaccagtaccactggtgcttcgacagtgcgggcagcgacaagaagcgtgctccagcatggtgcgatcgcattctgtggcgaggcaaggggctgaagcaagtgcaatacgagacgtgcagctacaggctgtcggaccaccggccggtgagagcggttttccacgccgaatgcgacgcgttatcggaggcggtgtcgcacaagtaaaaacattgccaggctgctaccccgccgcacagagcgcccagcagcaagcaaagcgactgatgtgatgagacgtctattcaaccagagagtgatggatatggacgacggcgcgcgagtgccgccaaatcgagagagaactggacgcaagattggaccaagcgagtagagccaagaagagatttcttctgagacgaacatgaagttgttgttgttttttttttctgtctctctgtctctccctctgaacgccgattgagttgtgtgcagaagaggtgcatggggatagagtaccgggatccaagaagaggtgctggttttttttggcattgttctgttggtggcggtgttcagattcttttttccctcgtttaaaagctagctccttctgggctttgggcttgtgtctgaaagaatatcagagcctaaaaacggcatctgcacattctgttgcttaatagattggagattaccgactaag

SEQ ID NO: 35429 - DNA, 1002 bp, Zea Mays
gtcgcgagcgcgcctgcgccttgtgtacggcttaccgtacatgacagtcagtctcaagcagttatttttgttgataactctggtgctgatattatcttgggtatattaccatttgcgagggagttgctccgacgtggcacaaaggtgatacttgctgctaatgatatgccttcgatcaacgatgtcacgtatccagagcttgttgagattataaacaagctcaaggatgcagatggaaagctatcaaatgtggacgcatctggcctccttgttgccaactctggcaacgatctgcctgtaattgatttgtctagtgtatcaccagagcttgcctttatggcaaatgatgctgacctggtggtgctcgaaggcatgggaagagcaattgaaactaacctatatgcgcagatgaaatgtgactcgatcaagattggaatggttaagcatcctgaggtcgcccaatttttaggaggaagactttatgattgcgtcttcaagttcaatgaggcctgaactacgagatacatttgataacacaataccggccgcactagtggtggcttagttctccccaagatcagcttgttaggtgttgcactgaacataattttgttagtatcagcaataatttcaatcaaaataagctacgtatatgtggtggtttatggaagtgtcaggaagggtggttatgaggctgttggattttgtacgaaatctgatgcaccagttcccatttaacgcatcggtagccaagccacgcccgtctgaacttgagctcatgtccgtttgtgcttatggtccgtaataattggttagctaccactggcttgtaaacatcacacttagacgctctggtggcccctttgtgatggtattcataaaagtgtttgtcccgaaactaaaggggtgcgggtgattatggggtgggaaatgtctatggcaatcgaaggaagaaaactctccaaactagaggaaaaaataatcattgatcttaccacatgt

SEQ ID NO: 35430 - DNA, 1038 bp, Zea Mays
aaaaatctcgacacaaggcgaaacgggatcgcccgcccagtccacgcaccaaatttccattccatcttacctgcttgagtactactctcccgttcaccacgttcactccgtatctctcgtgcctttttcctttcctggttgcgacgagccgacgactgggcggacgccgctgccgccctacgccaggtcttcgtcggccccttcgacgagcacacacaagattcagtcgggaatgttgaatgcatagtgtaatttctgcgcaaaaagatggcatcagacgagttcatcagccttgacgcaccttgtgaggctgatgcgaaagatgaagggggagacgttcaggttaaagctcctgatgtgagtgggatggagcctctggtatcggatctccaaccagaagggaaagctggtgctgtgggtagtaatcccaagacatctgctgggaacctggatcttgaagaggggcaagtggaagatatggacctcgcggatgatgacgtagtggttggaaaggatcagctattagatgcttccattcagcccgagatcagtgttgcagctgtgcagactgtgattggttttgaggtcaagctggacaagggggacgggactgaaaatgaaataatttatgagtcaaacagcatctctattgaagaaagtcgtatcctattgaatggaatattatgtatttcttctaatatacttgtgcaactgcaagtgtctatgttttctgaagattcatttgtttccattgaatccttggaactgtacttgcataagaagtgcagactcttgcttatactcctgggaccctaaacatgttattgtgatctggggggaatttatagttgttgttgttccttgatgtggcatttttagcctcaagaggagttaaaagagcccgtgtggaatcaaaggaaccttctgttcgtgtcatctacagtgacttgacaagggaaagcaaacgaaagcttatgcaattgatgcaacaatggtctgagtggcaggctagaaggatgcaccatttggaggtactgt

SEQ ID NO: 35431 - DNA, 4079 bp, Zea Mays
ctaggcctcgccggatgccggatcaccctaccccaccccaccaatgcgatgaagtgccactctgtggccgcgctctggtcgccgttgccgccgtcacaccacgtcaccgccgctgccacaaccccggtcgcgctcttcaccggcgccgccgacggcaccgtcctccactggccactggcgctcgcctcagcttccccatctccgcgcccgtcttccctcctctgcgcccacgctgctgccatcacctccctctgcccactcccctcaccggcctcccttcttgtcgcctgcaccgcgggagtgctctccctcttctccacctacgcacccctccgctgcctccgccgccgctccctcccgctctgggtcggctcaccctccctcatcgcctcgctcccgtccatcacctccgccgaccctcgagtcgcgatcctctgccacgctcccgacgacggccaccgtcacgtttcagcactcgtagtcgtcgacgcacgcaccctcgccgtcctctacaccgtcttccatgggattctctcggtcgggactccgaatgcgatcgcggttagtggcggcggtgatgatgcagtcagcgttgtgttggctgacgcgcagggtcgggtgcaggtgatgcccgttgccgagggcgcggctgtcgaagtggacccacccaggcgtctcatcgtgagctcggtggccagcgtcgcgtcggcggagttggcggacgagagggtggaagccgtggcgttgtctcatgatgggaagaacgtggcgttggtgctgaagactagatgtttgttgaaatgtgtcactgagggggttgtgctcggtgaggtatctctgctgggtacttctctttgcaaggacaaaaacacagtagacaaggtatgcactgctggagcttttttcctcagcagtgatgaatgggatgctcatgtttcagacgatggcgttgtggttaggaatttggtgttgtggagtaacaatggtgctgtcacaatgtacaggattgctcttggtagctcatactttgactctgagatagtgtgtgaaattcctagcaacttatctatgcaaggagagggactagaagttaaattttgctggtcaaatcagcatcttgttagggtggaatgttgctcctataaggtagctgggtcattgttgtggaaaccaacagtcgccatttggtgtatggatcagttcgaactgagtaaaacagtgaatacacaaaaaccacctatgaggaaaatgcttggagaaggtggtcttcagggagaagaatttagaccagagccttctcattctcaatacaatatcaaccgagggtcggaagtgatttcacagatgtgctcattagaaaggtatagagggacagtgtcttcgtcaatgttactttctgaggattcttatgctccatatgctgtagtttatggtttccataatggtgacatagaagttatccgatttctgaacttgtcacctgctgctgcaaaatttggtggtcgagggctttacccacatatttccgagaggttatttttggggcacaagggagcaattctttgtttggctgcacattacatgcatgcacaccctgactctagaaacttccaccgagcactcatatcagggagtttagattgtacagttcgtgtctgggatctagatgctggcactcttctttctgtgatgcatcatcatgttggctcagttaagcaaatcgtactaccacctccatggacataccacccttgggatgactgcttcctttctgttggagaagatggccttgtggcgcttgtttcacttcaaaccatgcgggttgagaggatgtttcctggccatccggattatgcatcattggtagcttgggatggagtaaaagggtacatagcttgtttatgcaagaatctccactcttgcaatgatgcaggtagtggattatatatttgggatctgaaaacgggtgctcgagaacgtgttatcaatggcactgcttctcagttagcgtttgagcacttctgcaggggtatatcgaaaaacacagttactggtagcatcttaggaggaacaacttcagcgtcttccttacttgttccaatttttgaagacatgagccacattcggtctcatgcagataaaaatggtcatgacatttcatccgtgtcaaccaaccttcacaatggatgtacagattctgtgactgtaaatgcccctacaacatatgattttaagggaaagacgccagctccagatgaagctcatgaattccatggagataattctgtatacaattcaggaaaggctgtttcttcccacagtatccataataaaaaaataaagtgccctataaagtgctcttgcccctatcctggcattgcaagtctgaggtttgacctcacggcaatcatgtccacacaaggcatgacaaacagcaatagtgataggcatttgaaagatcatctccatagtgagaatcctaaagaaatgttgcagcctggaactttagacagtccttctcgtgttcatgaaatggatagcccctctagagagtcattggaagggtgtttacttcgatttagcctctgttttttgcatttatgggatgttgattgcgagctagacaaattacttgtagatgagatgcaagtttgcaagccagaaggctgccatatagcaactggggtggtaggagacaaaggctcatttacattgatgttcccaggcaaagaagccactcttgagctttggaagtcttcagccgaattttgtgccatgaggtcactgtctataatatctcttgctcaactcatgattaaattatctcgttcttgtacaaattctagcagtgctttggcagcattttatacaaggcattttgctgaaaaggttccagatataaagcctccatccctacaggcaatcaactacattctacacactatggatccaagcaatctaataatgcgaaaagcttgtattatcagttcaatgatggctctaagagaaatggcacgtgtatttccgatggttgctctcaatgagtcaatgacaaagctagctgttggtgatgctattggagagatttatgatggtacaattcgagtctatgacatagaaagtgtcacaaagataagaattcttgatgcaagtggaccaccaggccttccaagcttacttgcaggatcatcgaatagaacaacaaccatactgatatcagttctgagtttctcaccggatggagagggtctggttgccttctctgagaacggattgatgataagatggtggtccttaggtagtgcctggtgggagaggctgagcagaagccttactcctattcaatgcacaaagcttatctatgttcctccatgggaaggattttcacctaactctgctcgcttgagtataatttctagcattttagatgataaacctggaaggtcagagaaggaactaggcgaggcggataatctgaagttattgcttcataatcttgacctttcataccgtcttcactggattggtggaaagactatcaaacttacgaggcatggccaggatttgggtacatttcagttgtgatgggcttacccatgaatattgagttgctttgtagtgttgaaagacagctaattcgatggctggcaagtctaacaagaatcaccagtacattcatatgtcatgtgaggtaccttgatgtttctttgactgttaaaagcattgtctggtacagttcataaattggatccctatgtatggtaaataaaaaaactgaatgcaatttgattccatgttacaagactgctattcacatgcagcccaggtaagtttcatctgtttccatgttacagttacagaactgcattcacatgcagcgcccaggatggggctcatctgtcacacctttgagctacagagttcaggatgcttttagtttagttgtggttcgcttgatatcatcacaatcatatacatattttgtggatgattggctatacttcatactttggagtttttgcacttgttctgaggttcatccttcaacttcaacactcctcaagtgcagtctaagtgtt

SEQ ID NO: 35432 - DNA, 1269 bp, Zea Mays
cgcggcctttcaggcactccctggcggcggcccctagccagcctctcgcgcgtgcgcagccggcaccctgtggctcactcagcagctgcgcgcggcaggccagcagtggtagtggacagcggcagcggctgtgctcggcggcccctgtgttgatgtgcgctgctcagctgctgtgcccagcggccgacacctctgcggctctcctttgctcgacgtcgagttcgtccctgatctggctcaacgatttactggtttttttgccgatgcttcatagttggcgagggagaaattccagcaatgcttgtcgtgcaactgccgccacctgaggtagcgggtgaggatgagagcaatagccgtggtgtcttcgtggagttcatgaccaaggtcgctcagttcaatgagcttgttgaatctggggagcgattgcttgggagatttcgtgaggagcttgagtattttcgtaggccgcagatttctaaggaagcagatgtaatgaatcagatacttaaatcaaactgcactgtcagaatgaggtcctatattgaaactggctgcagggtccactgccaaaacatctcaaacattaatcagctgagctcatgcgaaaatggacttaaagatcatataaagaaagaccttgcttgaagagcttgaatgtctggttgagaatgtctatggcatcacactaacagccagtttaagtgctctggaagtttcagacagtcagtgccttgacagcatgctaagtaccgatcgctgctccgtggagggtgtttgtacacagcaggaggacagaagtgcagatcggttggacagggatgtgtcgtttgctacagtaatggtcatggttcgcaacgcgctgaaggctgactacacgatgcaggaaaagattgtctgtgcattgtccttgaaaacaccatcatcagagctcgagggatactgcctcatgtggaatttacgcccgtacatcgatgacgatgtgatgcgtcttgcgtggaaaatgtgtccttagtaggcgcaaggttcgtcattctagcaacaagtaccagaagccggtacggattaaagccaagcttgtttaagctgtttgtcttcaaaaactcacagcagttcacgattacccaaaacattgtttgtattgtacatttcactgtttgcatatgtatacactatattaaagccccctcaaattttcttagatcaaaccaccgtcctctcttccctcgtacccatgtgtcagggatcaaaagagataatggagccagtcag

SEQ ID NO: 35433 - DNA, 298 bp, Zea Mays
ggaaacatgaagttgaatggtatgcaggtggggcacatgatgcacgacctctggtggttgaacgacatgggttcgcatgcaactgcatgtgggtaggtggtttcgtttctctcttccctcccaagatcacgcacgcatccttgagtcacggccggtggttttccttgcgaacgacggcaacagaagaatcgagatcgcgcctaggtttggggctatgactaggacagcacggcatcccgccggtggcgacgcggcagcagggctccccggccggagatggcttgccggagccggagcc

SEQ ID NO: 35434 - DNA, 2688 bp, Zea Mays
ctctctcacatgtctcattcctgcccacacgcttctctctctcaccagcgccaggctgcgccgcctccgccccaccgcctacaggccgcgccgcctccgccccaccgcctgcaggccgcgccgcctccgccccaccgcctgcaggccgcgccgccgccccggctcggcaccgacagcaggccacgccgccgccgtgccaccgccccggctcgcgccaccgccctggctcggcaccaccgccccggctcggcaccgacagcgggtcgcgccgccgcccctgctcgccaaccccagcgggtgcaagaactgtgctaacgtgtgttctaaggtcttccaaatcgaggatgatttcggacgggcaagagtttacgaccaatcaggcagcacagaactgattcaagaagctattgacagttgtatgtggtgcttctctgatgatagcatcgaaatattgatgaggcaatcacttcctgaagttgatatgttatatcatcaacacttcttccaaagtcaaactagccacggctttctaacctcttgtaatatgttttctgccttctcaggcaagttcacgctgggagaaaagacaagccaaagtcctggagaaggtaagaaggcggatgagccaagatgattccagaaagggtggctcatggagtgacatctggggagcaccaacaagatacgagaagaacggtacatcccattactaaaggagacatttatgttcccacaaagcttgggcattttaggtggaaaacctggtacatcaacacacattgctggggtacaggatgatagggctctctacctagatccccatgaagtttagatggtaatagaataaacatagaaggcgctttcagtttgccgtgttccgcaaggaagagagctagttatagatctttctgagtgtacagtttatttggaggggagaaggataaagatgagaatggcgatgaagcgccatcgaaagtattggcaaatattaagtggcctgaaacactcgagactgattttatctacattcattgcaagctttgcttctgctgctggtaaacgtcctcatcaagatttcgactctcaagaatctgatccagaggcaattcttaactgtttgctgaagcttactgtattctagaaaatcactggaatatgtatatcttttcttgatggacataaccacttaagtgttccttaattttcgtagtggggttggtggatagcaaaccatgagctgaagaagccatcaattagtctgttgtttccaacaatcatcctcctcagtcgccgccatcaacagcagcagcagcgatgctaaatagtagtggtggatctggttctaactactctggtggcgagatcctacctccaccatttttttatctttattatctgtgattctgcaatccacatgtttgattttttacttagtttctctttgagaccggtcgccatgtttggttagcacatctagaatgcattacaattggaggcaatagctgttcactatccactataacctgaaagcttagctgttcaactgagctttctgattcttccatttttttccattcaagtatatgatattcttgtgtgctattcaatattacaaataacaaatttgcatatgagaataattaagtaaatttggccacctaatcagtaggattgtttggttggaggaatttttgtagcatgtgaaacttgagctaattagaaagcaaccactaccttctcttcagcatgaaaaaatagcttagccatttcttagagttaagcccttagccacttgctggccttatcgtctggaagaagaaatggtactcaactgctggtctctttggcaaatttttctttgcacttttcttgttcgaactggcaatccacaaccaagtaccttgcttgcaccaacaaaagtcccttctactgtagggcaatccatggatttattgcttgtcctgaaatttgatagaggcattcatgatatcagttgctcgttaattccatttgtttcttgttctcttgtgcattgttatgacatatttgcaccttttgcggggaacgatcgaccaacaatggagtggcccactagattaaagatcgctctgtgtgctgccaagggtttagctcatcttcatgaagactgtcatccaaagatcatccaccgcgacattaaggcatctaacattcttcttgacttcaaatttgaatataaggttgctgactttggacttgcaaagttcactactaataataacacccatgtttcaacaagagtaatgggcacctttgggtatttggcacctgagtatgcagcgtctggcaagctcacagaaaaatttgatgtattttctttcggagtcatgcttcttgagcttattactgggcggcgaccaattgacacaacccaattggcactgcttgctataagcacatatgtacttccatttgcatgttgtataatactaataccaattgcaaaattatagttattttttctacccttgttagttaataagcatatttctggtcaataggttgtattcttattcttgtaaccgtgttaattaatgttatggacttgtagtcttgtattaccttgtgaatatatctgtccctgcctgccatgtgaacgtgcttagcctggaatttgtgatatgtacatatatcaatgtgtttgaaatc

SEQ ID NO: 35435 - DNA, 3751 bp, Zea Mays
cgcgattggtctggttcgtccaccctgacggcaaattgcccgcccgcccctttctttaaacctcccgcagcgaggcagcgtgcagcgaagaaagagaggggctctcatgcgatccgccagcgcccgtggagcgtggaccggagcgaagagagtacgagcagaggagaccgaggaaatctcgggacgtgcccgctgccgaccgatcgggggctcgaacccggcgcgtccgagatccacgagcggaatctatccaggctcacactcactgcctcaggtgtgtcacgggcggcacccgggggcgcgtccccggccgccgtccatccactcgacaaaaagcaaccgagacgagggcggtcctttctccgggctctggtaggggaggggaaggggaggagcagagccgggagccatggcggagccgggcgacgggagtaggcggcggcgggaggcggaggcgccggtggtggcgctggagtgcgtggcggggagctccaaggcggaggagtggggaggcggcgcgggcgtcgtgcaggagggggacgtggtggaggccgtccgcgtcggccgcggctccggcggcgggggcgccgcggccgcgctggagctcgaggcgccattcaagggcgggcgcgccgggctgcacaaggcgctgcacgcggcgttcaagcgcggggacacctccgtggaggtgcgcgtgcggggcggcaggcagctgcaggcctgcatcgtgccgcaccacgccagtcccggcgccggcggcggaggggtcaggaagcagtacgtcctgcggtcgctgcacgaccccaactacttgctcggattcgtcgaccgcctcgagagcgagtgcctcgtcttacaaggtagaacgaacgctgggtgggatcgtgctcttctcctaatgctgctagcaatcaactagcccaggcggtggcgccgtggctgctctgcttgactgcttcaacgaagcacacgtctgatgctccgcaccgacaaacttcttgttagatctaaaatttaaattggactgagaatattctcataaactgatctttcagtgcattgttccaggcgttgttttcctttatttataaatactgaatatgcgctgtttttttgtctccttgtgcctcaccgagagaaatgtgagcaggtcattgccatcagtgtcagattcgcagctacataacaaaagctaaaacgtagcaaaaggatacaggtatacgtgaactacggagaacaaaagctaaagacgtttccgaaacagtgccaagtgcgttgctgtcattggaaataggaacgaggagcacaagagtcgcgtcagccttgagcaaggcgcagctccaggatggctatgtcgcgtacccatgggacaagaagatgcgcgacacgctgcacacgcccaactccagctgctacctctcgatgcttgtcctgcccaaggctctggacagcaatgcctgtcactacgagtccttcgacgacaccgtggcgcgtgccaatgcatggttctactcttcgcaggccgccgggatacccatcgacttcatgaatgtgcagagcgaagctcttctcaccaagatatctggagagacagcgtccgcgtctgtgaattcgagctcattatctgatctgtcgaacgtcactaatgcgacgctctacggttttgaagattaccatggagtggatattggtgtggtaaaggcagcacggctttggtacagctgcgtaggaggagaattgctgctggaaatcccacttgaagaaggtgacacaaggcttggctttgctatcagccgaactgaagagggctttatctacatatcatctgtagtggaagatgacaaggaaagcgaggcaccatctacgcggtctgggctctgtgatctgttcaaccgggccaaggaggcgtcgaaactgctgatcatctcgagggtgtccaatgagaaggtcctaccttggatgatctccagttcaggggcagtccgctgcttcgacaccatctccctcagccagaaactctccttgcaccgcctcgcagtgcgccccatccagctgcatctacttgcctgggagaagccttctgctcccaacccagcagagagggccgtgcgttccccaaagctcaccatgccttcaacgctgctccctcacctacagcaaaaccttgtggagaccatagaaggcggagtagatgctgaagaggagtacgtggggaatttgtcgtttcggatcgatgatatctcatttgagagcagctgggtgtgattccaggtttcaattttgtcatacaggcggctgatgtgcatacatatgttttcatcttgtctagttctctagggcggtaatgctcagttctgtgcttcagaaaatgcagatgctggcttcaaaatgttcagaatatttcttgttttctagccgaatcagggatggataacatctgaaaagtatcttgtaatggaacatttttgttgatcataacataacaaaggagtgatccaaacatgttggtcaaagaaagctcaggcttcacttcgttagttgtttactccaaatctacagcaaacatgcggttcagcacctcaagtttcttgacctttggctcaaaacaaaaaaagaaaaatgttacacgagtgagttgacaccacactagctgttggtcaaagagacacaattatgctgccgatcttgttttgaggaccctgcacttgagcactctatcttgcacgtaaaaccccggcgtcaccattatcttcacttgacaaggactctgcaccggctgcctgtcatgcaggatgtcttccatgtacagctcatcaaatgcgcggccgtcttggacgcgcaggatcgtcagcggcgggccgaaggagaaggccagcaggtggagcagccagacgcacttggcggcgacgaagaagcactgaagcaactgctcgggccacggccgggaccaggcaagcgtcgccacgacgacgctcatcttccggtcgcagaaacggctgaagtcctcgctgtagtacttggtgcccttccgcagaacctcgttccagctaaggttgcgcagcgccacgaaggctgcgaagctctgccggctgtcttccgccgggtcgaggcacctcggcgagccgttccgctggaacgcggggttctcgaagtcctggaacatgacctggttcatgatcgcctcaagatggtacagcacggccttcgagcagtgtttgctgacgctgccgctgctgagcgcgagctggtacgggcgaaggagcaggttcagcttgtcggacaggccgtcactggactcttcgttcacctgctggatcagcgccttgcagagctgcttcacagagagccgcgcctccgacgcgatctgcaagaagccttccaccatcacctcgtggctcaccggcatcgagagctctcggctgggttcgatcgatttcgtcggtctccgggagacggacggcgagttggtggcctgccgcagtgccttcttgagctccgagcagtacgcttccacgctcaccagcttggtggccagctcccccagcgacgacctcacctcggcagcttcgtgcagggcggcgtcccggtgcgcgttggcctccgcgagctctttcttgagggactccatagatagcgccccccactcggtcagcagctgcggcatgttgccgcgctcgatggccgtcggcgacgtcatctccggtggcttggctttctttctcgacttggggaagagccacgagaggatctg

SEQ ID NO: 35436 - DNA, 1941 bp, Zea Mays
cagccgtggggggcgcaccgcacgggacctcgcagtctcgctctcgcacaacggaaagtgaggagggggagagcgagagcgagagagagagagagagagaggagagagagagagagagaggagggagggagctcgagaggtcaacgagggggagctggcacgaaagctcagggctccttgctcctcctataaacccagcgcacccgccttccaggctcccattttctcgcccgggagccgcaattccatcctgctgctcgaagatcatactgaagcagaactcgagcggtgttgaatcgaaatggaaggcaggatgacaagtttggaagccaccatgaaagtttcctcatcgatggcaagcagcatatcaaggaatgctgaccctgaccaacagactctacgccccaattcggtggagcagttttattttccaagacctggtcaatctttgccaggcattcctccattctttgggcctccctcctccagtttgtatcttcctaatgacaatgaagctaaatttggcaatcagtttgaatcaaatccttcacagaatacagattgggatccgcaggctatagtgagcaacctaaccttccttgagcagaagatcaagcagctcatatctactgctggttccctgctcccttcaatgaagaatccacttcttagcagcaatccagcagttaggcagcttggcaacactcttggttctcctatgggccttggcatgaatgctaatcagagaccaagtgtagacagcaagactgatattcctgacacaggaaaaacttctgattatgatgaactgatgaatagccttaatcctgcccaagatgaaagagatgagatgatcaaatgtccaaatccctgtggtggggaagggtctgaaccgactcccatggaggaccatgatgtgaaggaaagtgatgatggtggtgagggagagaatctcccccctggttcatatgtagtcttgcaattggaaaaggaggagattttagcaccacatactcatttctgcttgatctgtggtaagggtttcaagagagatgctaaccttaggatgcacatgaggggccatggagatgagtacaaaactccagctgctcttgccaaacccacaaaggattcaggtgcagatcatgcacctgttacaaggtactcatgcccatttgtgggttgcaaacggaacaaagagcacaagaagttccaacctctcaaaacaatcttgtgcgtgaagaaccactacaagcgaagccactgtgacaagagttacacctgcagccgttgcaacaccaagaagttctctgtcatcgcggacttgaagactcatgagaagcactgtggtcgtgataaatggctctgttcttgtggaacaaccttctccaggaaggacaagctttttgggcacgttgcccttttccaaggccacacacctgcgcttcccatggaagatgtgaaggtatcagaagcatcagagcaacctcaggacagtgagccgatgaatgaaatggcgaggagtaatatgtatagcttcccctgtagttcgtctgatggtatatcgaacctcgacatgaaaatggctgatgatgatcttgcagttatgggcagcagaacggagatagctgatggatgccgccatcgatgatgacgacaacagcactgccaacctttatttatgttgttgcatgatgctagcttggttcttcctctgttcaagagccatttgagattatgcctttatattttccctaaatgtacttacgtttgtggtcattaataatgatcaaggacttctagcatttcttagacccagatagccccaattttcagtatacatacgcaagtattgcttgttcattttgtctgaatcggcgtgatgcttgtagcactgacaatttatcataacaagctgctcagctattaatctggttctcc

SEQ ID NO: 35437 - DNA, 3147 bp, Zea Mays
ttcacaaacccaccggaggcacagaaatttcccagcgaaggaaaaatccagtccgaaatccagcgctccaaatccgttcgtccccaaggcgctcccccgaacccgtcccgaatcccgcaaatccccgctgaaattccccaatcctccgtgctcgccgccgccctgcgaccggtcccgcccgcctcgtgtcggagccgctgccgcggatttccgcccgagggtttcgtctcgctctcgctctctccgccctactgccgccacagattggcgcgaccgacccttcatcgagggccttcttccgcccgcgaggccggggctcctcccgcggaaattcactctcgtccagaagcggcggcgctctcctcttcatcgccgcccccgcgctcttctggtactcgagtggcgtggggtggagatccaccagggcgtggatccattcctcttcgttcggtggtttttatccttcaggcgcggaatatcaatctatagaggtgcacgaggactttatatatccccatattttcgggggttcaactgaacccccatgccccacgctaagtccgcccctggtggtggtggactggattggtggacagtgctgattttgtcgcgggcatggagcgaagtgagccctcgctgaagccagaatggctgctgcggcccacagtacctgccacaacctataagccggcgactttgccccacacagatgatcacggcagaggtgcttcgtcaagaaaccgttcatcaggacgagatcgtgatcggagctcccaacattcctcatctcggagaggttcaagctctagtggtccaaggcggaatgatcgagatggtatagggaaatcaagaggctatggtaattttggaaagcacaacaaggaaaggatacaagagaaggacctggatttccgtgaccgggagagtaggttggttcagtcagacgatcctttacgtgatggctttgagtcatttagctcatgcagatccgaaaaggacaggcttaaccgtactcgttcaaaggtggccatatcaaatcgggcagtaggagtaagtttagacaatggtaatgtatctaaaaaagataatggtgtcatctcttttgagcgggaattcccacaccttgattctgaggacaaaaatggaaagcaagacataggtcgagttccatctcctggaattagcaccccaattcagaacataccactgtaaacagactgaagtttccaactctgggagtgcgttaagcatggctgaaacagtgatgcagtcgccattaaagatttctaccacacctcagttatcgattgatgcccagaagattgaagaaagaactatgaggcagtgcattctaagacctcttacaccatcatcaaacaaaatacctgcatctagttctttggataagttattaaaatccaaaggtgcaagagctggagagtctaatggtcctatcaaggttgctccacaactgtcaacacagccatctagcaactctgttcgcactccagtcaaaactgagctcgtaaagcaatctcaatcaggcagccttcaagtccttagtcgcgagcagaatggtgctgtaaatactgctgccaaagacagcaccagcaatcctgtgagccctgttctgggtcgatcttcttcaatggaaccgatgagaaagtctattgtcagcccaaagcttaaggttggcactaatggtcgttctttgcatccgctgcaaggttcatttgctgacagaaaagcaagtgcaaaagacaagtacaagttttttgagatgttgcggagtaagtctgtaaatggttcgagcgctgctattgagtctccatcaagcctgactgatgatcagcagaactctaatcttgatttgcctttcaagtttattgaaaatgggagcagttcctgtgaagaagcaaattcttgtgagggatcacagcgacacttgtcggacaatgagaccattccaccttcagaatctcatgatgttttagatgaaggatctctgggtattcaagttgaggacaaggatgtcagctcttcacaagtacttggtggcacacaagatttatcttctaagaagccccaggaagacaatgttaatattgtgcccatcgtacctgtctatgtaaatgatggtttaatgatgcccaattctgttgatgatgaagcaagtttgccgttagaggaaaccaatcctgccgaagtgttacagcacattggagcaggggaggagaatccctgtcctgctcaagagttcgagtccattggagcaggtggggaggaagagttgaacctcctaagatctatgggctgggatgagaacgaagatgttcagcctcttcagcaggaggagattgctgattgtctaaagcagaacgtcaggctgcagcagaagcttcaagaatgcaagggctgatcgcagaatcaatggagcaacgtcactgtgcctcaccacactgagggggtgtttgatacctgggctaaagtttagtccaggttttggatgccaaatgggaggactaaacatgagctgattataaaactaattacataaacagtggctaattcgcgaaacaaatctatttggcctaattagtctactattagcacttgtttactgtagcaaaacatgagctaattatagattaattatgcttgataaattgtctcgtgaattagcaaaaacctgtacaattagctctataattagatcatgttcagttctcctaattggcatccaaaacccagaccaaaccttagtcccggggatgatccaaacacatgtggagctgggttttgggaccttccggtcaaccgatcagagaatgattgtctagcttagcaaatggagagttttgtttttgttaatgcttgttcagcattgtggggggaggttccatggtagagctgataattttcccccattgataagaggttttagggtttttcttcctcattttcccagaaggaatacaccaaatagaagccttgtctggtgtcggaggcacgtagtgtgtgttgctctgaaagaagaataggttgcctttcttttggtcgccatctttttttcttttgaaaaggaagggaaaaataacgatcgagcttaacatggaaaaggtgcacaggaaataccttggtcttcaa

SEQ ID NO: 35438 - DNA, 2074 bp, Zea Mays
cacacacatagagaaatctcaatccaaagagagccttctccaccgctcttgctcgtccaaccttctccatcgtctcaccttaggtttcgctccccgccgccgccgccatgatgccgcagcagcagcagcccggcatggcccctcctcctccacaggccgcccccggagcgccgccacactggggcggcatcccgccgcctatggcccctcagcatcagtacgcgccgcagatgtggggccaggcgcccccgcccccgcccccgcctcaggccgcgtacggtcaggcgcccccgccgccccaggccgcgtatggccaggcgctcccaccaccccaggccgcgtacggccaggcgcctcccccgccacaggccgcctactacggggcggtacccgcgcccgcggcggtggccgcggcacctgtcgggcccagcgaggtcaggacgctctggatcggggatctgcagtactggatggacgataactacatctacgggtgcttcgcatccacgggggaggtgcaaaatgtgaagctaattcgtgacaagcatactggacaacttcagggctatggttttattgaattcataagccgcgctgctgctgaaagagttcttcagacttacaacgggacaatgatgccaaatgttgagttgccattccggttgaattgggctagtgctggtgaaaaacgtgatgacacccccgactatacaatatttgttggtgatttggctgctgatgttacagactatgtattacaagagacatttagggcacattacccttctgtgaagggtgcaaaagttgtaacagacaagctgacaatgcgcacaaagggttatggttttgtgaagtttggtgatcctaatgagcaagctcgtgcaatgactgagatgaatggcatgctatgttcttctaggcctatgcgtattgggcctgctgcaaacaagaaagctactgttgttcaggagaaagtaccaagtgctcagggagttcagtctgacaatgatcctaacaatacaaccatttttgttggtggtcttgaccccaatgtcactgaagatatgttgaaacaagttttcaccccttatggggacgtagtccatgttaagattcctgttggcaaaagatgtggttttgttcaatatgctaacagatcttcggcagaggaggcattggtaattctgcaaggcaccttggttggagggcagaatgtgaggctttcatggggtcgcagcccttcaaacaaacaagttcagcctcaacaggactccaaccagtgggccggggctaatgctggatattatggctacggtcaaggctatgaggcctatgggtacccccagtctcaggaccctaatatgtataattatggagctggagcttatgctggctatccaaattaccaacaacaaccagtagcacagcaaccgccgcagcaacagtgagaggtccagtgacgctactgtcatttgggtgattgacgtggaaatatttatgagttgtaagatgagcttcggatgcaagctggattaggtatacagacatgattttcgtagtactcagattctgagttgccctcgtatcagagcttgtggtcccaatagcctgcagctgcagctaaaacgatctattttggtagcggaatgttttatctgcttattttgtaccgtgtcttccgctactgcggcggagccttgataacttgctatgttggatttttcccgagtgttatcgcatgaatgttgtcatttgccttggtgccatgttggtgttggcaaacgagcgagcagaacctgcagatcgagcagtacctgagcaccattttaacatggtttaacctttttagctggctcttgttaggattggtacattttcactgagtagggcacctagccgaaccgctcggttttcggtgttggcattttgagaagttcggtcatccgtgtcggctttctgttttgttaggtttgtatcgtagatagtactatacgtagaggtgtttgaaatagtgatgagataagaaatgagataaaagagttgttggatacagtcttacatcgtacatcgaatc

SEQ ID NO: 35439 - DNA, 2370 bp, Zea Mays
atgttctgcctccgcaccctccgatcgcccgccgcgtccgattcccctgaccccgcctcgcccgcaatctccgccgccgcgcccgcgacatccatcacccccacccgcgacatcccgcctcgcacgccatcaactcgcagcggcccttctccgaacgtgatttgggcaagaaaggcccgggcgcgatgtccatggccgaggaggggagtgaggccgaggaggggagtgaggccgaggcgctcgagaaagacggcagcaaggcttcttcaccttcggggccagataccacacatatgcattctatgcctgccgcgcgctttacgtagctaacaagttgaattcatcatcaacatatccattgctcgagcttttcttcaagaaccagattaaagagtttggagtattcaaagcttgtatctcagtgcctaaacactgaatggacagctaccatagggcaaagtgaagaaacggaagagttgagcaagatcacattagagaataaggatattcagcttgatatcaatataagagaagaatctcggagttcttcacaacaagggaactttgacacagaaggtaccagctccagtgaggctttcttgcttggaacggtaaggaatgaacatatttatttcattcttctcagccactaaccaaatcagctccagtgaggttagtttacagcaatgttcttgtatggttctcaggttgagttttccattttatttatgtagccaaagtagatgtattatgcatgtcgtcgtttggaaacttgacaaaccgattatacttgtttaggttgcttcagaaaagatgcttgagaaactgaaacataaatctggaagatgtgagcctgctttagaaaaggctattgtggaactggagcatggtataaacggtttgaagtactttgtttgccttgatccacggttgcaggtttgttccgccactgataccaggtgaagcttcacccttcagatccctgtcgtgacgaatggttcgtgggtgctggggagggattggatccgttggattcatgagatgtgtggattgttcctgccggatatcgtgacatgtttttagatctagcagacaaaaccatgaactgtctagggctcctccgttgcctagatctactagagtgagtgagcctacagagttgacctcatccaggctccagttccaccccacggtcatcgtcctctgttgctctacgtttcatgcttctcacctcctctcctcaatctcatcactagaggcggaaagcagatcagatgagatttttggtcttgcgtggttcttttaatctgctcacatgatacttcttattcattgccgtccagtgaaattaattgccctcggttgaattggttcctttgccattttacttaggaggataaaggagacactaccttggtacatgcctgttgccacaatggacaaaagaagattagtgttgtgtgagattttttcattcctttgatctattgcatgctatttgtaccctaatcgacaaaatagatgagactcaattcaggagcaaatcactagtcctgttcacaatccaattcactatggttaaaatatcaaacttatgctccttgaggtttgttttttcctgatcttcctttaatatctgatgactgatggactgataattttatgtctgggctgaaggtcgtgtttgatcgagagaggaaggtcttgggctggaaaaactttgattgttacagcgtgggcaactcaagaagcaaccttccagtgaacccaaatccttctggtgttccccctgcccctggcttgggaccgaacagctacactcactcctgaagctaccaagggtgcctcaccgaatggcacccaagtcaatgtcttgcaaccttctgcaagtttttcgccgaagctgcattgcaacagaaacgtcctcgtcatcgctgctctgctgttcctcatatatatacttcacatatgctcacgtgtaccaccatcgtcatctgtcatgtttttaatacagtcaagaggcatggaccttcggcgaaaatttccagatacccgtactcttttcatatggcataacacactagcattaagtcttatgagagaccttgctaaagaattagtgcttggaggggaagaatgacctagaactgaagatggatgagctgatgtgaaaaatgaggggaagaatgacctagaactgaagatggaggagctcaggtgaaaaatgaacttgttcattgtgtgttttctgaccttttttggaattgtattaaaatatactgtaatgaattggtgtaagaatgtgttggaagtagcaaagaacctgatgccttttgcaatgagaatgtctttctggcaatttatcctgat

SEQ ID NO: 35440 - DNA, 2213 bp, Zea Mays
acaaatcgggtttgccgtgcggcacttgcgttttgggtcgggtacggacccgcaaaaagagctccgtcagttcctctacctcctctgtaggagcacacttgtttcggaaaggaacgcagattcacgccacgccgccgcctcaattatatggcgccggcgttctcggcacaggtccccgcgctccgacggggagcactgcgcgtgcggtgggtcacggctgcgctgttctcatcggggattctcgccggcaacaagccgattctggtgcgtgacttcgtgaggtcagcgttgtacgaccccaaccatggctacttctccaagcgggcgggaccggtgggcgttcttgacgccagcatccgcttcaaccagctcgaggggaggagtgcatatatacagcaccttgataagctgtataagaagcatgatatcgcttggtttactcccgtggagctctttaagccatggtatgcctacacaatagcagcatcgattctgcgtacagcaaatctttcagtcccattgaagatatacgagattggtggtggctctggaacatgcgcaaagtgcatacttgattacatgatgctgaatgcgccaccaaaagtctacaatgatatgaaatacattagagattagctcctctcttgctgagaagcaattggaaactgttggtgaagtgcaaagccatttgtcaaagttcacggtggagcaccgggatgcaattaacagacctggatggggccgcacggatcctcatccatgttgggtgcttatgcttgaggtatgttctgctgggacttctcagtttgttcttgtgttttatgtgtaaaccaaagaagcacaatgacatcatcatgcaccttcacccattatgaactgaggtatatgtgtccagtttaatcattgtatctagaagcattaaagtcttgcatgctgcggcatacaaaatactatgctgcaaaagaacacatgtacttgcttcaaaatttatctgctctgcgaagtgtaagtgtgccatttcactccatgtatgaatttcgtaaaattaatttcgttctgtagtaatattctgatcacaaaacaatacgaaactagtagctgtaaaaatcatagcaaacaaaacctccttggcatccattttttgctcattatgttacgaagtaagcaatgcatctaaaggaagatccacagtgatgcctacaacagtaactatctttccatggaatatcaggtacttgacaatctaccacatgaccttgtctattcaccagatcaggtctctccatggatggaagtgtggattgaaaaagtaaaaggcagaaactaatggatactctacatcaagctttaccgagcatgtcccttattgcttcagacttcagctatcttccagacgttagcatacctggtgacagggctccattggtttcatcaaagaaggatgggaagacatcagatcatcgcaactactttgatgctcagggtgacgcggacatcttcttcccaaccgacttccggctcctggagcagatcgaccataactgcgctggcttctcaaaggagcagaagaatcccggcgcattcaaacccgtgaagaagaggagaacgatcatacttgatactgcagccttcatggaggagtttggcatgccgctgaagacgaggaccaaagacgggtataatccgcttctcgacgatttcaagaacacaaagttctatctcagcgtccctacacacaacgttcctacccatagcaggaggaactagtcttctttccttttgctgatgtgtcacgagtcaggaaaagacgtctgacaggctagaatcggtctgtcattttgagtagtctgaatttgcaagttttcttaccttaaggtgctgaaaattttatagtttctcttttctgtagaacaaagtttttattatcatttttgacattgatgcatgggtaataaaaggtggaagaagactgactaacaaggagtcaaaccaaatgaatggtaaaagcaattacaggctgcattccacacgtataacgaaagaaaatgttcagtggatacaaaagggtatattctttgcgattaatcttttcgttgccaatacagctgccgccccatactccagggaattacattatcttctaacaaaaaaaagaatggttacatcgaatggctccaatatacagcttctcaccatgctatcagcaaaaccgg

SEQ ID NO: 35441 - DNA, 3177 bp, Zea Mays
cgcagaagaaggaagcaaaaccaacccttccattcaaagccccgagaatttcaaaaaacactaacagcttccgcgatacaagcatcggcttcgtccctctgcggttctgcctcctccatttcgtctcctctcctctcctctcctccccactcctctctctctctttctctcttccccagctccggccgccccgtcgccgcagccgtcgcgtctgctgctagcgctgtgctctccggcgccaccgtggccgcgggcgagctcgagagcgcttcggcctcctcgccaaccccatcgacacctgtaacgcggagtggacatgggccacggcggcggcggcggcggcggcaggaggaggcgctcgaggcgatgatgcgcgatcgagcgcgcgggctctgggcgctgctgctcgtcgccctggcggcggcgccctgggcggtgctggcgcaggggaacctgacgtcgcggtcggatctcgctgggctgtacgcgctgcggggctcgctcggcctgagggcgcgggactggccgcggcgtgcggacccgtgcacggcgtgggcgggcgtgggctgccgcgccggccgcgtcgtctcgctcaacctcgccgggctgcggcgcacgcggctgggccgcctgtccccgcgcttcgacgtcgacggcctgcgcaacctcacgcggctcgaggccttcaacgcctcggggttcgggctccccggctccatcccggcgtggctaggcgacgggctcgctcccactttccagtccctcgacatctccgcctgcgccgtctccggggagatcccggcctccgcgctcgtgggcctcggcaacctcaccaccctcaacttcgcaggcaaccaactgtccggtcaactccccggccaccgcgctctcgaggctaacgcggctcaggaccctcaacctctcgtccaatgcgttttcgggcgccctgcctgacgcggtctggtcgctcccggggctcagcgttctggacgtctctcgtaacaacctcaccggcgcattgcccacggcagggttcgcgctgccagccaatgcacaggtggtggatctgtcgtcgaacttgttctatagcggcgtgccagagacctttcgccggctgttcgcccagttgctgctggccaatatttctgggaactacttcgacggcaagctaggagtgtccgatggtggtggtgggcctggtggcaatgtttcgtttcaatcgaattgcttccttgacgttctgggacagcgtacccaggctgattgtcagcagttctatgccaagcgtggcttgccatatgatggtccagttatcccacccgcaccacagcctgcaccttcaccggcaaggaagaagaacaggaatctgaaatacatactgatcggggccattggtggaagcctcctgctgatagccggggttgcagccattgtgttctgctttgtgtgttctgtgagaacagggaggacggatggtcagagggaaagtggggcatcaccaagtgcaccagcaccatcggtagtgtcagctaccggcacagctgcagctactggtggcacacacccttctgcattgtccacaaacatggcgaaagtcggcgattcatttgcttacgaccaaattgccaatgccacatcgggatttggggaagagaggctcatcaagcatggtcactcaggtgatctataccatggtgtgctccaagacgggactgccgtggtggtgaagaggatcactttgcgcgtggctcggaaggatgcctatatggcagagttagatttgtttgctaaaggattgcatgaaaggctggttcctttcctgggtcactgccttgataaagaagaagaaaaggttcttgtgtataggtttgtccgaaatggtgacttgtcaagtgcactgcacaaaaagtcaagggaggaagatgaaggcttgcaatctttggactggataaagaggttgaagattgcaacgggagtagctgaggctctttgctatctgcatcatgagtgttctccaccgatggttcatagggatgtgcaagccagcagcatccttcttgatgataaatttgatgtacgccttggtagcttgagcgaggtgtgtcctcaagagggggaaggtcaccaaaatgttatcacaaagctgttaagattttcttcgacagcagatcaaggttcttctggttccccatctgcaacttgcccatatgatgtctattgttttggaaaagttttactggagctggtgacagggagacttggaatcagtgcatcaaatgatgcttccacaagcgagtggcttgatgccaccctgcggtacgtcaacatttacgagaaggagcttatgagcaagatcattgatccaacgcttatcattgacgaggaccatctggaggaagtctgggcaatggcgattgttgccaagtcctgcttgaatcctcggtcctctaaacgcccgccaatgaagtacatcctaaaagcactagagaaccctttgaaggtggtgagagaagacaatggcaatggctcgggcaggttaagagcaacatcgtcacggggttcatggaacgctgcactctttgggagttggcggcatagctcgtctgatatagggccttctagggaggacaacattctgaagcgctcagagacaatcaaatcgtctggcgggagcaacggggaccattcatcctcccgcaggaggcaatccaaggagatcttccccgagccgtccggctctcgtgacaccgaggattaagcatgaaggagaatctttttacgaatcatttttcggtaaggcgggagtccttatgaaggagggctctgttagaagctccgcttgctgcttctatagaattctttcgtccaaaaaagtcacaatggcttcacaccagcacaccggcgccatggtaatcatttttgggttaagtagcaatggtggcatgtacgttggtgtaccaatggcatgcagttggcgccagtgtaaaaatcttcacagttggaagtctggtgtctcttctgtccattttctcgtttctgctcctctcggttaaagaaagaatggcgagctgattctttttcttctcccttctgtaattgattgtttcattgttcatcatagaggaaatgttctttttattcatgcttgccatattttttttcaagctttgcatttct

SEQ ID NO: 35442 - DNA, 1339 bp, Zea Mays
atagttcgcacacaccactggcgatcgactgtcctcgtgcatctccattctccgccagctactcgcgacctctccacgtcaagcactgcgcatgaggatcggtcttctccacgtgaccatgttgagcactacgttagacattgccagctcgcccaacaggtatacgaaatcttgagtgagctgtacgtccatttggaagtagcaaagaagcaactcctgatgatgcaactgtaaggacaatctttcttatagctctaagcagttcgaatatattggttcctgattattgtgtctcgtcatggatttattgcgttcattgaaccagaaaattgcatcgcagtgtctacatttgtattctagtttaccaaggtatgatctgtcagtgtatgattctttcagttgctggatatactcggatgggaaatcaaccattccattatgggagttcaaaaatctttgtatgcagatctttttgttggagggttcacagtttttagacatcttcctctttctaatcctttcaccgcgtcttattttactctcttctccaaaaaagttactgctctaagagaggtgttttgaaatagaagagagggtacatatttgagcatatgtagagcccaggtacctcgctctacaacatcaaggattatcttgtcattcataagagttaaaggccctttcttcagtctttcactattaagacacaatttcatgttgcaaagatcttcaatggatgatattgatgacgatatataagggatatcactcttgagccacataagcttgatgaagagattgttgaatctaatcttgagcttgaagcagactttgtacaatttaaatatgatgatcgatcacaaaaggtacttcattctgttgccacaaacatgtttagcgacaaggagatgtgctgctaagtctgtttttacatggaagatgggaaatggacataaacagtgaacatgaagaagggtgtgctagatggaaaggaaaccggtcaagctgattgaataagaagaagtctcttaactactataaatccatccatgaaatggagaagattaatgctaagccacttcaagaaaaaaggttgggtctagtcgttgttgtctctatactggcaaagggaatgcggagatacatttcgagaagaaaaaggcaatgatatggaggtgttttgtctttcattgataaaaaattagaaatgagcaggtgatgaatgtcacatgaatatatttagctatttcaaatggaaaccaactttgttattgtactggcttttgttcataataaaaacacagaaggcaatggaaaatctacatgcaaatgttttgct

SEQ ID NO: 35443 - DNA, 811 bp, Zea Mays
agaaagcaatgcttattacagacataggcgtagaaagcccaaacccgcatctacgttctactcccactcgcggtcgcggtagccggcggcggcggcggaggaaagcaggcaggccatggcgtcgtcgtcgtcgtcgaccccggcggccgtccgcgagatgcagaaggatctcgaggtccaggccaacgccctcagcaagatccagaaagacatcgccaagaaccaccaggtccgcaagcagtacaccatccaggagctggagctgctcagcgatggggccaacgtgtacaagctcatcggaccggtgctggtcaagcaggacctcgctgaggccaaggccaacgtcaagaagcgcatcgagaagcggatggatcgggcgctcaaagacttggaggaaaagcaaaacagcaagaaggaatcgatattcaagttgcagcagaggatgcaggctgtacaagctaaggcttagacaactgtttgttggttgcaactagtccaaggccatgcttcatttcatcccaattccctccaggtttttttttgtggggaggaatcaggtgtctgatgttctcgtctccacaacgaaaaagaaagaaaaacggttcctagtgaaatactaggctattctgtatgccctagtataaaagtgtgcctctagtagaactgtagaagatgtagttatcagtatctcttttgtattattggcccatgtttacttctcaatcgaatatttatgcgagggatgtttgtcaacgccttaggcttcatcttgaatttatgactttcattgcttgagtgggcccatgccaat

SEQ ID NO: 35444 - DNA, 1080 bp, Zea Mays
ccggcggataccaagtgccatgtctacttgttggctacatcggctcacacaagccctgcatctcctttctcccgtgcgcttcccagcctcgctccctctggcgctgtgggcccgacatgcaggcgtggttctcctccggctccgggccctcctcctcgtctgcggcgtcctcatcgcagccgtcgctgctcgcagagtggaactcctacgctgccgcccgctccgctgaggacgcgggcgatggcttcgggatcgacatcgaggcggccgtccgctccgccaacgaccgcgtcgccggcaccttcggcgtggtctcaaaaggtgttaaagggtttccaggcagctttaagtccacaacaagcagtgttccatctggcagatctctcatgtatttcggtctgtttcttggtagtggtgtattcctagttttcatcgcattcacgatatttctgccagtcatggtgataatgccacaaaagtttgcaatatgtttcacggtgggatgtgctttcataattggatcattctttgcgctgaaagggcctaagaatcagctctatcatatgatttccaaagagagattacctttcaccatgggatttgtcgggagcatggttgctacgatctacgtgtcaatggtgcttcatagctacatactttctgttttcttctctgtgcttcaggactgctgctttcctgtgctgattgcagtatttctagtggatgatctagcacctttgtggctttgtcgtttagcctgtgcggcttcattaatttcagaagtttgatgccagttgaagcaccgaggtgaactgtgaggaaaggatgttgtggacccagccaacgcttgttaggggcaaaaaaattgtaatgtagtacattgggaacaacagcttagtctaaaaagtacattgtacaaaacatctcactgaacactgggccacaatctaacgcccatggcgctcatttctttcatcttttctgtcgtaaaagggaaaaagaaattgcgagcacggtttcgtaagcgtttgaatttgggtggcgcagagtgcggctcccctatccggaaacgggtgatgg

SEQ ID NO: 35445 - DNA, 1909 bp, Zea Mays
gattgaatgccgcttgaggctatgtcgctgaactgggtctgaacccaggatattcacatgttgacgccatcatggctatcaaaaccgagtatggagtcaggaaaaactggatgggcgatccatgttttccaatcaaatatgcttgggatggtgtgaaatgcagcaatgcaagtggtaacacatcgaggataacatcactagacctctccaacagctctttgcatggcacaatatctaatgattttacactgctcacagcactcgagaatttggatttatcttacaacaagttgagcggatcaatacctgattccctgccaactttgccttccctacgagttctaaatgtatctggcaaccagctgagtgacgaatccctatgtaaaaattatactggaccacttattttcagacgtgattttgatggctcagtatgcaacaaaccttcacccagcccgtcaagaaataaagtagctatcatagctatttcagtagtggttcctgtgttagtactaattgtactacttcttacatatttcatctggtggcagaaaagaaagcctattgtgcaaccagtacccacacatggctcaacaagagatccagaacctgataatgcttcaggaatcaaaaaaagttatggctacaacctgaatataactgagaatcgtcagttcacatacaaagagctggagaagttcactaataatttcaagaagttcataggacaaggaggttttgggcccgtctactatggccgtttggaagatgacactgaggttgctgtcaagatgcgttctgaatcatcgtcacatgggcttgatgaatttttagctgaggttcagagcttgacaaaggtgcatcacaggaatctagtgtctttgattggttactgctgggaggaagatcatttggcgctggtttatgagtacatgcctcagggcagtctttttgatcatctgagaggtaaaaatggtgtttctgaagccttgaattggaggaaacgtgtacaggtagtgcttgaagctgcacaaggtctggattatctgcacaagggttgcagtttgccaatagtccaccgtgatgtgaagaccaacaacattctcttgggtcaaaatctgcaagctaaaatagcagattttggactttccaagacatatctgagcgacacacaaactcacatatcagtcactccagctggcacagctggttacatggaccctgagtactaccagaccggaaggctcagtgagagcagcgacgtgttcagcttcggagttgttctgcttgaggtagccacaggcgagtccccgacattgccaggccaaggtcacatcaatcagcgcgttaaacagaagattgccactggcaacgttggctcgatcgctgattcgcgacttggaagcgcctacgacatcagctccatgtggaaggtaatcgacaccgctgtgatgtgcacggcggactctactgctcagaggccaacgatggccacagttgtgatacagctgaaggagagcctggcgttggaggaaactcgtgaaaagggaagtagcaacagggtgagccgagggagtgatgtagaagctatggcgtccacacttggtccattcgcaagatgaagctgtgcctgtacctggattcagttcatggttgacgctcgtgaactccttgtcatgtgaagacaactagtagcgtataattgtgggctgttttgaaccagcaattgcttgtgtgtgtatggactttgacaaaggtttggtgtgagcttgcagcttctccagaatccagatgtcatgctctgtatgtatctttgacaaagatttcccgtgtctatatataactgcatggtactaataacataaaggattgactttgtttgaagcgagggatcgagaaattgagcgtg

SEQ ID NO: 35446 - DNA, 2164 bp, Zea Mays
gtggctcccgagtcccggacagcttcccgctaggtggtgagattggagagcgtggggattagtctctgacgaggtacaatcagggcgaccagtacgtgccctgaattttcaggcttctctagctgctaaggatctccagatttccaccgcgtcaagtccaaggctgcattcctcttcaagtaccataagccatcacctcagattcaatcacctcaattgccatgaaaacaaggaagatggcctggggactgaaaatgctgaaacaagtggccttgaaagctcatctaggaaggctgtcatggttaggggaagtttcagtaatgaagctgttaatagtgatatgtcaggagaagggataagttttataggatcagagctggaaaatattcctagcacagtctccactaatgaaactggtggctcagccgctgaatctggtttgggcccctcattgatggcatctgaaaggatcatgtctgacttagaaggagaggtatctccgcaagggacctcatccacaactgccatgacaagtgaaagatcagatgtatctcaagctagcttaacatctatgtttcctaactcttcaattgcatcatctgtgattgtggaaccaatgccagatccaatctctaccagggcagatgtccccatattcagtgggccacatggtgagcctggagggagtatattacatgatgacatgatgagcattttctcaaatgacggtctaggacgctctagggattctagcagcagtgaaacaaggaggagtcacagaaggattctatgggacacgttttccaggcgtggctcaagaggttatccagaatttgatgctgatgacctcggattttacagcacatggctagaccttggtgatgacatttttgaagagttgggggaatcaagatattttcatcgcaggcgacatggttcgatcagaattagggagcatcgccgtgctgtttttgatagtggtaatgaacaaggcactgctgcatgtcctttggggattcatcaaactggccgatgcacatgtgattctttcttggttgctgaagaatctagtgcccgagcaagtatatcaagaattgtcatgttaactgaagcgttatttgaggtgttggatgaaattcaccgtcaacctgcatcactttcactttccatggtctctgttcaggctcctgaatctgtagtcaattcgttgccgtgcaagagctacaaaaagctagaggcaccccaacgcagtgatgatatggaacagtgccatatctgcctaactgaatatgaggatggagaccagatacgaattcttccttgcaagcacgagttccacctgcaatgtgttgacaaatggctgaaagaaatacacagggtgtgccctctgtgccgcggagacgtctgcgaagtcgcctcgtgaagaccttggcgctgccatcccttcctcacggcaccggcagatagcgcatcccccgcctgctccgttgttgaagctggtttggtcaggcaacggcgatcacgtcccgtcaatctgggcgtccctgccgaagagcgtggccagatcctgcgaccaatgcgtcgctgttcctgccatcaactttttaagataccgagactgtatatagctcttgtagcctctccgtgtatgacaacctgtacatatatatgtaaattctagattccaatgtccattattttgtcctacattcagatcttattctcgcagccctgatgctcaaactagctttaccagaatctgtcaacacctcttcaactataaaaaggtataattattgcagaatgaccccaaatatcagacgcttccgattaagagaattcgattcaaatctagaaaggcaacagctgaatcttttccaaataacagaattttatccaaatctagaaaggaacaaactgaaacatttgggtcacaaaaatactgatttattttggcaggggccgcgcggacgcgtaccccctcaatcacaaattatgacatccactctcccagttggggagatggtagatcagcgcatccaccaagtgcaatgtggaccactaatctagaccatgggtcttcttgaacacccatcgatcctgtccaggtaagtatgaaactctgttgtccctgggcgtccttatatagccaccccaaccttgc

SEQ ID NO: 35447 - DNA, 7110 bp, Zea Mays
ggtatagtgttgggttccttctcagtgtagcgttccttcaaggtgttgagttttagggtcccatgttgatttttgggaggacccacggtccgaagcccgtgtcactttccggagtccacagtgttgcgctctgaatgctagtgttaggttccatgtcccgtgtcactttctggagtctactgtggggctactgctaagtgttgagtcagattggcggatgttgattttgggaggacccactggcgaaccccgtgtcactttcataagttcatagtgttgagttctggaaggtagtgttacgttccatgtcccgtgtcacttctaggagtctacagtgttgcgttcctgatcagtgttgagctctaaacgatggtgttgcgttgctgatcagtattgagttgggcgcatgttgattttgggaggacccacgggccaacgacgtgtcactttcatgagttataagtgtcgggttccaggtcagtgttgggttctgaacgatggtgttgcgttcctccaaggtgttgagtttcaggggcccatgttgatttttgaaggacccacgggccgaaccccgtgtcactttcatgaggtatagtgttgggttccttatcagagttgcgttcggatatatagagttgtgttcctccaatctgtgctgggtttcagggttccatgttgatttttgggaggacccgcggtcggaagcccgtgtcactttccggagtctacagcgttgcgttctgaatgctagtgttatgttccatgtcccgtgtcactttctggagtctaccgtggcgctcctgctaagtgttgagtcggatgggcggatgttgattttgggaggacccacgggtgaagggtgtgtccctttcatgcggtatagtgttgggttccttatcagtgttgcgttccttcaaggcgttgagtttcagggtcccatgttgatttttgggaggacccacgtgttggagtctaccatggggctcctgctaagtgttgagtcagatgggcagatgttggttttgggaggacccacgggcgaagggcgtgtcactttcatgcggtatagtgttgcgttcctccaatctgttgggtttcagggtcccatgttgatttttgggaggacccgcgggttccatgttgattttttggaggacccgtggtccgtagtccgtgtcactttccggagtctacagtgttgcgttctgaatgctagtgttatgttccataacccgtgtcactttctggagtctaccgtggggctccttctaagtgttgagtcggatgggcggatgttggttttgggaggacccacgggcgaacgacggtcccatgttgatttttggcaggacccgcagtctgaagcccgtgtcactttccggagtctacagtgttgcgttctgaatactagtgttatgttccatgtcccgtgtcactttctggagtctaccgtggcgctcctgctaagtgttgagtcagatttgcggatgttgattttgggaggacccacgggtgaagggcgtgtcactttcatgaggtatagtgttgggctccttctcagtgttgtgttcggaactatgctgttgcgttccttcaaggtgttgagtttcagggtcccatgttgatttttgggagttatagtgttgagtttcagggtcccttttagactggaaaagtcttctgccataatcgtcagatttacctaaatgatgtaaaaaatggtttggaaaactctaaaacattaaataaagatcacataacattaattaataaaaaatgatataatacacaaacattaagtaagaattatagaaagttgaggcaccagtttgtatgcaggattcttcctcctaagatgtggaaagctaattagttttaaaccataatccacctcaatatatatgaattaaagtgcatagatgtggcaacaacgttgaagataaacatctatttgtacagcaaacgcaggcttcccaaagcggcatggtcagttcgagctcgccctggggatgccgccgctctgcccatcgcagacgccgtggagcatcgacggcgacgtcgcaggacatgaggtcgcctaccagctggtgacccgaaacacccaggcggcccgccgccacgtcgagataacggccctgacggtgccgacattttggggcagcgggcattgcccggagccgctcgtcatcctaagaaagggcagcacggtggcctgctacggctacccccggagccactcgtcgtccatgaaaagggcgacgaactggcctggcaagatctggcggcgcggggatcgaatggacggacgacaagagcgagcgaagaagtcctggcggcttggtgagaaaatggtggcgctgggggcgatgggaacggaggtgcggatggtggcagcagtggagtgagcgagcgtggcctggtttcttcttgaggaaatggcattgcagaggcgatgggaatggagatgcgaatggggggaggagttgccgtgccgacggccgaccgcgatttttttgggaagaatcgtgagaagggataacacacagagagaaaaatgagtgttaccttcgcgttacaggaatgaagcgacggcgacgtcgagactgattgtcgtcgtccgcggccatggggcggagcaccttccggagaagtcgagacttatacgattaaaaaaggtaggcgaagagtcggcgcagcatttcacacgcagtagtgactgacacctggatggttggattagtggcacggacaaacgatcttacggctacggaaatttggacgatgtgtccaccttcgtttgcgagcagcggaccctggtttgatatattaaaaaaaggcagccgaagagtcggcgcagcatttcacacgcagtagtgagtgacacctggatggttggattagtggcacggacaaacgatcttacggctacggaaatttggacgacgtgtccaccctcgtttgcgagtagcggaccctggtttaatatatagaaatagtgttgagttctcaacactgtatactcctgaaagtgacacgggcccatggaatgtgacactatcgttcagaactcatgaaagtgacacgttgttcggtgtgaaagtgttgatttagggtttagtgtaaccgcccgttcggtgtggaagtgttcaaatttctctacgcgcgttcggtagcctcaccgacggcgacggcgacctcacctcaccgacggcgacggcctcggcgacggcgacaacgatccccaattctcttcgcgacctgaccgtctccacttcggtaaacccaccttcccttctctcctcgttccttgtcagggaaccgcctcaccgattctgatgtcgaaggtaacctggtgccgatccgcaggggtgaagaagaaagccaacatgccacaggggaagagtaagaagaacgtggtgaaggagaaagccaaaaagattaagaagaacgcggaatcgagagccaaagttcatgaaaatacagatcaaattgagatcaacattagagaaggtgtttcaatttggataacaaaggctgcagtgcaaaaatgttttgagtttccccctggtacagataagaagctgccaatagatccaactacaaaaacatttgattcactctacagagtattgagtgtttcagaaaaaaaaatcaatgtaaagaagaagaagatgaaggagaatatgaaggagaagcaggttgaggaggagaagattgagatgaacatggaggagaagaagcagaatctggttgaggatgaaggtagtcaacaggaggaaagtgaagaggaggacggtgaagatggggaaattggagaggaggaaggtgaagatggggcaattggagatgctaaagtggggggagatggagacaaggaaagtgctaaaaggggggggataaaggttgctgtcagaagaaatgttttgactcctttgaacatcaatttgatgttacagaacatcaacaacgatgagattctcaaacttcttgttaaaagaaatgaagacactgatggtacagaaccgaatcttgacattgacctgattgtcagatgtttctttgcggtgagcagtgttgctgagtttggcaaggataagaagaaactgatatcagggtgtacaactgtgctaatggttgttttcttggaccatctcgtggaaaaccctttggatcctttgaccatccctaggatcaacttgtatacttcagattttatcgcagacctgataatggtacccaaggatagccctggccctgaaaaaaagcgtcgtaagtttaagaattcggaggatacatgctatcatgaagattcagaaatggtgccaagtccagggagagcatcgccggttgttgcttctgtacaatctcataagaactttgttgatcatgcagatttagaaattgtgccatctcatgagaactctgttgatctacatagtgtttacatggcacatgtattggaaagaagcagacaaagcatagtagtggacatattggactacaatatacctgaatctacttttgcagattgtttgctacctacaggtcatatgcacacagatgtattttatttacaatgccaactgttgtcaaaggattggaaggataaagtaattcttagctggaaagctactcaagaactgattcatcaagatattggagttaaggagctggacaaggaacttactgcagaggttatgaacaaagtggatctggtttgtgctttgttttatattacagtagagttttttcagattgacagtagagtttgtgctttttttagatatttattcctatcattcatgccggtcactggtcccttgttattctttccactgccaaacaagagacatatatccttgactcctacccaaggcacagtggggtggccaaggatgttttaactcaactgcagaagtatttggataataaacacaactttgacatgtctaactacactgaccatgtgccacctgttcagcatcaaaaaaacaattacgattgtggctttcatgttttattgtatattgaagaattcatgaaggagaagatgtataaaatcaacaaaaaaatggtgttgaaattcagaaagcagctttgcatgaatctcttgtaccatcctttgaacagaataaatcttgtggaattcagaaagaagctgggtattacattgaaaagaaaacttcctggtatacttgatcttactattgaaggtgagaggagtgaatctgaggctgcagtgataattgaaatagagaacagagatgataagactctagaggatgaacatatttcagttgagaaagagtaaggtaaaaaagaagagcatgtactatcaactgacacaaagaatgacgaagcttcatccccatctgacgaagagcctgagcagagtgagtcatctgagcagactgtgtatgaaagatggatgattccaaaggatcattatcacctgagaaagagcaagctggagaaaaatatcctcaaacgaaaaaagaggttgggcaaagacaacatgtcctctcaggatatgatttctccagtgtttggcaagaggcttgtgcctgcaaacacacattttacctctcttaggaagttgcgaaaacacaagtttacgtctgataagatcaacgatgagatctgcaaacatatcttgaactacaatgaacgggagttgttaagtgtggggcagactaccatgactgggggtcagctggaaaagtacgtaaatgaaggtgacaatggtgataaaatactcagagcattcatcacatgcttcacttgtgatgaaaagttcaatcaagggaacatcacaaccgtcatcccgccacatgaagtatccgaagagggtgaactctccaaagttgatgctgcacaacttgtagaagaaatcaaagctgtactcaaaggcaccaatgttgcacgtgtacgcaaagacaccgaatccaccaaagatcccaaagtgaaagtctttcgaaacatgaggaggacatttatattttttcctttctacaagaatgaagaattgtttgtatttcatgtcgatacgaaaagactacccatcattgatgctctgttttgcaagatgtcatcattgtcgtttgaagatagatcctgactaggaaagtctatcatgggctgtctactcaaagccatgaaggattccggcttcatggtgaaaaaatatggtgattgtaggttcacagttactgtaactgaactcgaattcaaagatagtgcctcagcgctcataagttttattgagaacttcacttctaagttggacgacaatgccaagaaactgaaaaagggtgacaaggactggctggaaccttacaagaagtcgacagtggcataccttgtttgtcacactgaaaataaggtggtgttgcctgacgatattgtgaagtacaagcaaaacaagtgaggtggttgagtcgttaatgggtccagtggctgtgttttaagacttgtatcacactacttgtatggctttattctctgaagctgttccattgttgccgttagtaacaggtgttgcttttgtctctgctcagtgggtgattcatttcatccagagttgctgcaactttaatcagtctatagtgttgggttcctagctcagtgttgagttctaaatgatcgtgttgtgttcctaccaagtgttgagctgcacgacggcgtgcgcagccgcagccgcaccggcgaggagcgtttagaactctgttgatctacatagtgtttacaccggctcaacagagttctcatgttgatttttgaaggacccacgtgttgggttcctgctcagtgttgagttctgaacgatagtgttatgttccatgggcccttgttgatttcgagaggacccacgggccgaacggcgtgtcactttcatgcgtctatagtgttgggttcctgtctagtgttgagttctcaactatggtgttgtgttcctccaagaagttgagtttcaggggcctattatattgtctcagttaatgggtaactcagttaatcctatatattgtgtcagttaatgggaactcagttaatggtatatgttgtctcagttaatgggtaactcagttaatccagcatatcattgatgag

SEQ ID NO: 35448 - DNA, 2206 bp, Zea Mays
gttatttctaactattaagtgttaattatctaatgtatttaatgaagtaacacagttagacttgcctaaagaggccagtgaagcttcactggctgcatagagaagtacttttttattatcatgtaaatgcatggttctttggaaccatttggcctatctgattaattattactataaccgggaatgggggcccgaggctataacccggactcctcgccctcgtacctcgttgctggcgaagagcgtcatcaatggcgagtggaggttcactacacagccgccggatcttggagcatcattcgcggtcttggcgcgtctacgcaactgtatcctaagggcgtcgaagaggagagacggtacgccggtggcgacaagatgacgatggtggtagggatcgacgatagcgagcacaacttctacacgctgaagtgggcgcactgcagcacttcttcccgccgaccaagctgcaacactactgccttgttgtcgtcaccgccaagccctctgtcgcctccattgttcgccctgccaacctaggtatgcgaatctccaatccatgtgaggattcagagctagactagatgtagcttctgacctatatgattagttatatatgtattgtaattgatcagtgcaggcaccgcgaatgtgttgtcgtatgtggggagcagacagtcaacttgcatctaggtctaaataaaatagtagtgattaaatctttgaatctgtagatcaaaccatctcaagtaattttagttttgttatgaaaatttttagctcagatgaaataattgcattttgattattaagatttaacatacatctggttctatgaggaaggaaatcataagtggagattgaagttgatcaacttgacactcgaataaaagaatcaacaaatattgcaagtgctgaaagttgtgactgctcaagtccaattgctttatcacacaagttctggtggagatacttattctagaatcttcaaaagcatcaacgttagtgttcaagggactgattctggactttcaacttaatgcttctctacctgttgtcatactgaagctactgctcctggaagagcatcaccaacatatccctgatggccctctctgcttcatgctccaagcacttggatgttcaccttgaaatataattattaatagggactgtccaaatacttcagctaagcaaaatagcgacctccataaaaaagcaacctgtaactatctctgaaaattttgaaaaaaactgatggtaactgataagctgctgctagcaactaccgtcgcctatttgttttgtttcagaaagttaaggtgcatgaacctctgatatagcatttgacacactgtactttacacatcacccaggaggaactcttgtgtgggtgtgggtgtgggcagggctagaaggaagaaccatgcatgctactacattcatataatctttttcagaggtttaagatatcaacactaatctgactttgattgtctgaaagaatttatcatgctgctgcttactgttttcggtagggggtcaatgcttactttagctgtgcaataattcctcaatattaaaccgagtttgatcaagtaccttgaagctacaagtagcagtgatttgacaggtttactactgcctgaaacatgattgtaagtgttcttagtatatagctcttctccatttcctctccaactgtcacatgtgctcatacgcttttgccttagtttattacatgtccagaacaccaacataaagaaaacctgccctcgattagcattattcagtagagagagttgtggagaaataaagttaatttgtttgttggcgcaactaattagaccacgttttcattaacaataatactaacatgtttttgttgtagggagggcacattgtggcggctacgagagaccgattttcctgtgtggtggtgacaacgacaccgtggagccaagtcaatgtcggcaagctgatttttcagattggaacctatggttctttttaaagatcgaatatgttctagcatctttaaaagatttgtcagaatgtaaacatttgttttgaggtcatttaagcctcaaacaaaatttcttggacttatttcgttggagggaacgagacatctcgagatctaaatgtgtatagaacatatattttttatgggtatcaaatataattgtgtgtaaagcacgtacatagt

SEQ ID NO: 35449 - DNA, 1731 bp, Zea Mays
gtggagctcctgcactgctgtcaacatgggaaaacacctccccactgcatggttgccaaatctagtgacatctgcccatttcagcagccataaagggctgtgttcagtgaagattttcgcttgccctcagattttagccatagctcactacttgagtgtgcaacccttgtgttcctgctagtattcaccctctccccggacccaagatcgagcttctccagtgtctggcacaccacacctgtgcctggtgaccaaagacaaccgagggctcacctcaccgtggccgagacacttggagcaattgcaccctcggttaaggtgtgttctgcgctctccataatatcgtgaagctcactgaagaagaactgtgaactctactagggtgtgtgatctagaatggagtcgcgccatcgtggaattggcgccgcagacagcttcatcggcaacccttcgaactacgtcgtctccagccaatctcatgcgcgcaccgagagcttgaaagaacacatctaagaagtggtgtttgaagtgggagcctactccagtgtttactgatcaagtggaggagccatctaactggatatttgatagagggatctagaacctcttcactgcaataaagacaagcccggtggtggggctctggattgtacctagtgccattccgaatcccgacgaaggcaaataaaatgcagtggtggtttgctatcgcttagggatgaaaacgagccggatacagggtcatcccgtatcctaccctaatgtatttctcttggatacaagaccggatacaggtagttaagattcgggacggatacaggacgggaccaggtaataatccggatgggtaagaaacggataacagatactactcaggtaggtatcggataattgtcgggtagttcgtccgatgatattaattgtccaaccatcaaacaaacacataaattaagcaatacataatcatgtatataatagatcaaatgtaagaaaaaaaatcaataaaattgacatcatgtagttcaaagttactaatcacaatgacattgtaaaaaccaacaccacaatatttaaaattcataaaatattctagtttcactcaaaaattgcaaataagttacaaaaactaataaacattttatgcgaagataaatcaagtcctcatatgaaaatgataaagtaaagtattgattatgttgaaacttggatacttacaatggtttcacatgtaactcatacaaataagtgaaagtgaaatggaagaaacatgagcatcttatagatcttataatccaaacattttttatggttattgttgggtgtcttcttctctaccgaaggtcctcaagacaaaaacaccttcggcaagataatacaaaggctcgccgaagctatcatcaacctcggctttgcttctcaagatgaagactgtgtacaagcaacgttgcagaatgtcgaagctcaatagcttcaagtcggaccaagcaaagaaataaaaagactaaatggaccttattaactttagttgcctgtaaataagcgtttaagggtacagatgtaattttatctgggttgcgtcccgtgcctataaatagatgaacggtaatcccgtactgttcatgctggattgtattcactttatgcatccacaccttcgaacaagccgaatgtatcaatgtaatattaatattgttgatattcatttctgttttatgaaatataagaataaat

SEQ ID NO: 35450 - DNA, 1652 bp, Zea Mays
tttaacaccatcagtagtaggcttacatacaaagttaacaagttcagttgctatagcaacacgtggggaatgtgctttcacggaaaaagcaaatattgctcaggccagtggttcgaccggtttactagttatcaatgataatgaagagctttacaagatggtttgcggtgagaatgacacctccattaatgtgacaatacctgttgtcatgataccacagtcagcaggaaagaagctgaagaacttattgcatcatggagcaagtgtggaagtgcagctatattcaccaaatcgaccaactgtggacctttcagcatgcttcttatggataatggctgtaggcaccatagtctgtgcttcactctggactgaatttgttacatgtgaacaggttgatgagcgttataatcagctgaccagaaaggatggacctgacacgggaacaaaatacagagaagataaagaggtcttcgagatcagcgcgaagggtgcttttatttttattatagtagcttcagttttcctcctcctcctgttctacttcatgtcatcttggttcgtttgggtgctaattgtactattctgcattggtggtattgagttctataccatcatcctatatacttcatataacaggatttttaaggactgtggacaaaagactgtacaactccctgttttgggggaggtcttgatcttatctgttggaattgtaccattttgtgcggtgtttgcaattctctgggctgtgtatcgccatgcttcatttgcttggataggccaagacgttctgggtatctgtttgatgataactgtgcttcagatggcacgtttaccaaatatcaaggttgcatcggcacttcttagtgctgcatttgtgtatgacatcttttgggtgttcatttcacctcttatattccatgaaagcgtcatgattgcagttgctcgtggtgataacactggggaatcaattcctatgctcctaaggataccccgcttctttgatccatggggtggttatgatatgataggctttggtgacattatcttccctggattgcttgttggattcagctatagatttgacagagcaaacagaaagggtgtcttgagtggatattttctctggctaattgtgggatatgcagttggccttttcattacgtatcttgcgctgttcttgatggacgggcatggtcaacctgcgttgttgtaccttgtgccatgtacattgggggttattgttattcttggttggttaagaggtgagctttatgaattatggaacttcggaaaaagtccaggagaaaattttgtcaatgaaccatgacaacaaaatccagggaagatgtattcttcagcgtagtagatagcttgaggatgtttattaggaggcaccgtgtattgcaagatgttatgtttagcattatttcaaagaaggatgctattgtgtttgaaaaaaatgatatacatgtaagatgcaagcatgtactcccacagtcgtaaaataatccaatataagtgccgctatatagttccaaaataagtgtcactagggttggaaacgagttgagcctgacttggctcggtcaatttggatatgtttggttgcctggtctagtgcacgaccaggcccatttgaaaaggtcgac

SEQ ID NO: 35451 - DNA, 2174 bp, Zea Mays
tgcaggtatttgattctcagtagcagcggcatctccatccagaccccggtcggctagccccaacgccgccgccgccgccgccgcccgccgctcggggattgcctgctttcctctgccgaccacatctacaccgcacaactggtccttccaagtgagcttcaatcccctgcgtgtagatggagagggttctcaaggatgacgccgtcgaggagaagggcgaccgcgccagaatggcatcgtttgttggggccatggcaatctcggatttggcgaagaccacattgggtccaaaaggaatggacaagatcctgcaatcaactggtagagggcgtaatgttactgttacaaatgatggggctaccattttgaagtcacttcacattgacaatcctgctgcaaaggtccttgttgacatctcaaaagttcaagatgatgaagttggtgatgggacaacttctgttgttgttctagctggagaacttttgaaggaggctgagaagttaattaacatgaaaattcatccgatgactattattgcaggtcttgcttgcatcaatctcatagtaacaaatcaaatagatcaagcatacaatacaaggttacagaatggctctcgagtgtgccagaaatgctttgctacaaaataccatggacaacaaagaaaatacagataagttcagagctgatctcatgaatattgctatgactactcttagttcaaaaatactttcccaagacaaggagtactttgctgaacttgcggttgatgctgtcttgaggcttaagggtagcaccaacttggaatctattcaaattctgaagaaacctggaggatctctcaaggattcatttttggacgaaggattcattcttgacaagaaaattggcatcgggcagccaaagcggattgagaatgccaaaattttggttgcaaacactgctatggacacagataaagttaagatatatggagcacaggtccgggtggattcaatgtctaaggttgcagacattgaagctgctgagaagcagaaaatgagagagaaagtccaaaagatcatagctcacggaatcaactgtttcatcaacaggcagttaatctataacttccctgaggaactctttgctgacgctggcatacttgcaattgagcatgctgactttgagggcattgaacgtctggctcttgttactggtggtgagatcgcatcaacttttgataatccagattctgttaagcttggtcactgcaaggtaattgaagagatcatgattggggaggacaggttaattcatttctctggggtcgcgatggggcaggcttgcaccattgtcttaaggggggctagtgagcatgtgcttgatgaggcagagaggtccttgcatgatgccttgtgtgtgctgtcccagacagtaaatgatacccgtgtcttgtttggaggcggttggcctgagatgctgatggctaaagaagtggatgaacttgcaaggaagacccctgggaagagatctcatgctatcgatgctttctcccacgctctgcaagccatcccaacaatcatagctgacaatgctggtttggacagcgctgagttgatctctcagctccgagctgagcaccacaaagagaactgcactgctggaatcgatgtcatcactggcaccgttggggacatgcaaaggctggggattcaagagtcgttcaaggtgaagcaggccatactcctgtctgcgacggaggccgcggagatgatcctcagggtcgatgagatcataagctgtgccccacgcagaagagaggataggatgtgattagacacgctgtttctcggtgtagtggggatgcttgttaccctagttttgatggtggttctggggcgttcaagttggtcacatttcaagtgtttttggctcctaagaacctagtaattgttatttcgttgaaacaaccaaccgtaggcttttttttttctagattctcatgatgtaccatttggtagcgaagttcttcctctgttcttttttatgtgtcgagttttagtttaaaactagacaacaaatattcgataatggaggtagtacattgtttacgatatgcttgtgccatgtgcctctacatgttctcctattccttttgacgtaggaatgactagcttgtctttgtttatgtgacg

SEQ ID NO: 35452 - DNA, 3342 bp, Zea Mays
attggagtcggttgatgcgagatgctttgtgaaggtgaaggaccaaagctaaaccccacgtccccctcacgcgctcccatctcccaccccccggcacgcgccgaaacccaagctcgcgcgaaatccaaggtaagaatccagggggggcggcggcgccctcaccccccacccagcaccccctcctcaccgtcgagcccgtcggagtcctttcctcccgagttcgtcgagtgcgtagccgtctcgccggtctccgatgacgacgaatcagatgattgctgcgtttgcgacggcgacgatgtggactccatccgctacttcaaccgccaactgcgtgaggcgaaagagttcatcaggaggtataagcctggggactggattgagggagtcggaagtgcaaaggctggacattttgtcttgcctgaggtcaccacattgctcttggtgggccctagaggttctggcaagagcacacttgtaaaccgaattactagggtctttgacaaggatgatgatccttttgcaccagatcgagcacaggcaattcaaaatcaaatggtacaatgtttcttcgcgagtatccaattccaaggaattcaagtgccgtatgtatttacgatacacgtggctggtcaaacgacctagagaaaaatttcaaaatgctgcatcagtggatgacaaaaggaataagccatggggagacaacaatgtgggatgatgatgaaggcaataagatagggaacatgaaaccattggggaggcaatacagttttcttcgttacaaaatccggaaggtcaatttcgtgttatttgttgttgatggtgttgctgtcctcgagtcaatggatgacagcaataaaggatacactgagatacttcgtcaaacttttatgtatccgttcttgtcgattggagatgataaacctgttgttgttgtcacacatggtgatagactgtcgatacagcaacgtgttcacgttcaagctgagttagcagagctactagatattcctgcccagcaaatttatgatataccaggatccgatgatgaccaaactgatatggttgtactggatatgctacattactgtgtccgacatgcagagcagaacctccctgttaagttaaactaccatttggaggtgcttgggcatgaaactctcaataaaatggcagagcaattgatgggcttagatgcagtcattgaagtcgccattattttcctatgcatcctggtcctgctgcttcgattttccgataaattggtgcagccgtagctacgttctgcacttggggttgtaactaagaaaacatcatggtgactacttgtcctcctcagctagtagagtaccctaactacttttatgtgtgcattgtatatattgacagaacgcgctgtgctggaaatctgtatatatttacaataatactaaatccgatctcgaatatttgtcgcaactaaaacacgacaaataaaaaagaacggacaggacagggtataatacaatacaactagtttctcacgaactgcccgaggaagaattctcagtacaggcaactgaaaactaagcaagaacgccgccatcatcacatcttaacattgtcccaagtccaccggagccatgcaactcggttcttcggagtggtgatgcacctaaatgccgcgcgtcggatcggcgacctaaacagctcagtagctatgaagaacagctcagatccctgagacacgccgtccttttctacgagctgcagcaactctaccacctcttcttgctcacgcctgatggcactgctgctctcgttcctgcttccgagcatgctctcggacacgccttcggcatagtaccccgtgttcttaggcttcttggctgggcggctgccgaccatgtggatgtggtggtcctggcttgaccatggggacgcacggccagacctgtaacaccccaggctctcctccggacaagcggcattgtcccctgacgctcgagcatggttctcttcctcgcctcctccgcccccgcctggtgttctgtcaccggcgccaccacctacggacggcgaatttgtgccgtctttggggccgaaaagaacggcgagcgcgtcctcgtgcgcgagcgccttgccacggaagtcttctgctgcactggtctcctgctagccagcaacggcgaatacgtaaggtaagaggaccgaccattcagaataaaccattctgcaatttaataaccacagatgtccagctaacggtggcactgttaaactcacagaaagcaagaactggcattaagcacaacgggctgtacttaccgtgatctggttgtcccatccgtcagcatcctgtgtaacagtgctcgaactcttgtcccacccgcctcctcctccaggtccagccttgtcgttctgcagtctccacaggctgtacatcctcttcaggccgttgaacttgttctgcagctgcttggtatcataagacctgcgtgtctcttccttgaagttgcggtacagattgtgccaccctatcttggtcaaccccttgctgttgtagttctgcttttccttctcggcgatgcagaggtccaggaatattcttgtggtggtgtcgtcccagtgagcacggcatcgatccatctgcgcgtcacttttcctttttacatgtctttctgattacaagatctatacgccacacgtgcatcaccaacaacaggatacaaggaaagttagctaacacttgcctcgacggggttgtgcctcgctggagttgtatgcagatcgtagccacaaacttcaggtgcagagcatgatgacgtcgaggagtaagccagagttgtcaccctccagtggcgtatctgaaaattcactaaccagtcagaattatcaggatatttgtttatcgcctgaatttctaactaataattgtatcatgtgcatgcctagaaaactatgtgcatgatagaacaggtcatgcgcaaacacaaatttccaatcagtaggtgcctgcactattccatagttgtactcgggctggaactgcacttacatttgagttggcctaaaattgaactctaggagcaaaaaaaatgttgcaaacaaaatgttctgcaggagtgccatttagtttgaaaggaagctgcaatacatggatccaaaacttaccttgcaacagctatcttctagagctgaatgccggttatcgaaattaacagaagctgttttttcagggaccaaccaaaagatagaagtagaattagtacatgcagcaacatgaatacatatgttcaagggagctgtttgcagctattgcttggattaggttgacaacataggacccactttgggagagctcca

SEQ ID NO: 35453 - DNA, 5770 bp, Zea Mays
tgaacctccaaggatacaagccaccagtctccctcgcatcgcgtcgtcaccagcctatgctcgatgctcccatagtcccatctcgtgatccttccgctcctatcaaagttcgaggtttctcagaacttgcactcccgattccgcgccggcgtccaaagccccaccgaatggtccaccacaccgtctgaatcatcacatatggggaggaagaaatcgagaccggttcgagctgcgggcgccgcctttgcggcggctgaggccgacccctgtgcgccgagccctagcggcagcacgaagcgtaggaccaagggcgaggcgaggagagacgtctgcgtggaggtggataggagcacgtggggtcacgccgacatcgagcaccgcgacgtcgccgaggtggtcctccgcgacgtgagcgtctacggcgacggggatggggaaggtgcgttggaggaggcattcggggcgtcgacgttctcgttgcgtctgcgggtgcgcgacgcgccggaggaggggttcaggatgggccagtggcccgttgtagagtcggattgcgtgctcctggagtatgtcgtccacgggggccgtgaagggaagcacgcagaatatgtggtctcaggatgttttgatggtcctgatgaaggtgtatcgggtctcgtccatttggtgagcttgagattcatcacgctccgggtccaatcgttcagagcatttcagcatatgggtgaggtgagagttgagtcgtttagggttagagtggaggtgatggaacaggctttcagtgcgtgcggttcgctgctggaggtggctagacatccatggaggaagagtttgatgaatgtgattgcttggctgcgtcctgaggtcacgacatcagctgcgatatatgggttggataaccttggtgtgccaatggatgatggtggtaatgctgatttggtacctaagagtgattcacagtttgatcttgctgctttttatgaggccattaagccttcggctaatgcaggacagttggaaagggaccttcctgatttaattcctcagctcagaccatatcaacttcgcgcagcgcattggatggttcaacgtgaaaacggaaatacgctccatcaagaatacgctaattctgcaccatattgtgttccttttgattttgttcacaagaattccaggatgttctacaatccgttcaacggaaatatttcatcgcaaccagagccttctccaccttacatctctgggggcattttggctgatgaaatgggcttggggaaaactgtcgagcttttagcgtgcatttttgctcatcgtagaccaatttcattagacttttctgtcttccagaacaaaaccgaaatggatcaaattaagaggcagaaagtagaaagggttgagtgcatctgtggtgctgcgagtgaaagttctgcatacacgggtctatgggtccaatgtgacatttgtgatgcttggcaacatgctgattgtgttggttactcacccaagaggaatatactttttgctgataccactgaagatgtagtatcaacaaacaaaaaaagcaccatgaagtctggatttagaaggaaaaagaaacccaggtgttctattgttgagacagaagacaaatacatttgtgcactgtgcttggagcttattgaagcaactcaaactaatatactcagccatgctacattgatagtatgtcccgcaccaatattggcacaatggcactctgaaattacccgacacacaaggccaggatctctgaaagtttgcatttatgaaggtgcaaggaacttggatccttctaccatccaaaaaaatgatatgactgaaataattactgctgatgttgtcttgacaacatatgatgtcttgaaagaagatctatcacatgattttgatcgtcatgatggcgatcgccgtttcttgagatttcaaaagagatatcccgtcattccaactgtcctgacaaggatccactggtggcgactttgtttggatgaagctcagatggtagagtcaggcaggacttctgtgactgagatggcattgaggctaaatgctcaacaccgttggtgtatcacaggaaccccgatacaacgcaagcttgatgatctctttgggcttctacgttttcttaggacaaacccatttgacacatatagatggtgggtggacattattagagatccatatgagagggggaacaaagtagcaatgaattatgcacacaatttctttagggaaatcatgtggcgttcctccaaaattcatgtctcggctgaactgcagctgcctccacaagaagagtgtttttcatggctcatcttttcttccattgaagagtatttctataagaagcaacatgccacctgcatggaccatgcacatcaaattattagaagtttgagaaatgacaccaatagaagagaatcaatttctgattcaaatgctttgctaaatgtttacctctccaatgacgacattgccaagctcctagtcccactgctgaaacttcggcaggcatgttgccacccacaagtggggagttctggtctctgctccctgcagcataaccctttgtcaatggatgaaattttacaggttcttattggtaaagcaaaaattgaaggagaggaagagctcaggaaaattgtagttgccctgaatggtcttgctggattagctgttattgaacaaaggaaccaagaagccatttctttatacaaagaagcactagcattggctcatgaaaatattaatgatttccgtgttgaccctctgttgaatcttcatatcaactacaatcttgcagaactgcttagaattagttctgagtatttacaagaatgcccattaaaaaatccggcttttgaagttgcaatcagccgaaaaagaaaggaaatagatactgttgagacaaatgtacttagtgtaaaacgaaataaaatatgtgaaaacagtgttttgagtttgacagctaatgggctagaaatatctgaagataaaaacactattggacaaacatgcatgactagagatgtggatgtggagaatgtcactgggtgccactcatcatttgaatgttttgctgatgactgcttgaggaagacttgcaatacaatcacagaaaaatacctgtcaacttttacttcaaggctggtagtagcgcagaaggattttaatgcatcattcacagaggtcttgaatatcactaaagagctacagagtgagtatatgaattggtggctgtatgctttggactgcattgaagagaacaacatttctgctgacgatctgatcaagaagattgataattcttctagtaagagcaccactggtttgggttcatggggaatatcttccagggttaaaagtattgctggcttaaaatatgcaattcaagctgatattgattctctacaaagttcgaggcaacatcttatggatagacttctggaagttgacaaaacaatggctaacccaagggatgaggacattgagggccagcgatattgtccaaactgctatgatggcactggttctctatgtatccagtgtgagctagatgaactctttcagaggtatgaatcacgcctgtttcttgttaagaaatcgaacaatggttctgtcattgattcagtagaagaagcacatgatctactgaggcgaaaatatgagctcaatcacttcttccgtaatagaaaatccaaggagggacctgaacctgactatgacaataacaaccctaggtcagctcgagaaaacatacaggtctataggcatccttctagaaccgagactgcattaagggttatctggaatcactcaaagacagtattgggaaagcaatattccacaatggctaaaaaacatttacttctttttgaggctatgcgcaaggaatttcctcaagcaaggtttctgtcaattgctcaaacacaattattgcgtgctcatgatgagatcaagatgtccatctcaagacttcagctcaaagagaaagaggatgatcctagcgctgccaatattgtaactagagaggaactcataccatataatgttcagtttacaagtgaaaaattcatgtcactctcatctttagcccgtgtaagaggtcaactccggtacttaaagggattggcggtatgtaacaagaaaacacataaccagcatgatgaatcactggctaaagcaggcgatgctgttgatacagctacttcatgttcagccacagggcaaactgtttctgattttcgtaatgaaccatgcccgatatgccaggagaaggtttttgaccagaaaatggttttccagtgtggtcattttgtatgctgcaagtgttgtctttacatgacagaacaaactgcagcacaattcggaaagcgtaaacaatggattatgtgccccacatgccgccagcgaacagatattgagaacattgcttttgtagttgagaaaccttgggacaaacatgaaaagagcattgaagatttggctgaaagcactatttctgtccaaggttcatatggaacaaagtttgaagctgtcacaagaagaatcttgagaatcacttcaactgatggaacagctaaagttcttgttttctcaagttggaatgatgtactggacgtactagagcactcccttgctgctaacaacatttcatatgttcggatgaaaggaggaagaaaatcacaggcagcactctcccaattcaagggtcaggagagcaatataaatgtagataaagtgaacagggcagcctgcaaaatgcagcctgttcaagtacttctgatgcttatacagcatggagcaaacggtcttaatctactagaggcacagcatgttattctagtggagccattactaaatcctgctgctgaggcacaagctatcagcaggatccatagagttggacaagacaaaagcacatttgttcaccgttttatagtgaagaaaacaatagaagagagcatctacaaattgaacaggagcagagctgtctgctctactataaaccgtaaatccaaaaacttcaaagatgagcctgttttgacgctgaaggatgtggagtcgctattcccgatggcaggacctgatgaacccctagaacaggcagatcaaaattacggcgatagcttgaggagtttgcctccatctgttgccgctgggttagctgctgaaagaaggcgactaatggagcaataagttaatggagtttgcctccatctgttgccgctgggttagctgctgaaagaaggcgactaatcaagggacctccatccatcgttgtggcagttgtgctaattttacttgatcagaatttctcttcgcagcacagtaacgacagtaggagaatgatgctccttagttatgaagcacccccatcatgagaatcaggctatttacgttgtaactttaggattttttttttatgtacctgtaggccttttagactcttgtacataagcttctagttttagttcgtttatacggcccatcctgtagttttgatgtagcagctctcagctctgccactgctacaccaacttatggcatgtataagtgtactaatacatggtcatcagcatgatacattctttagatgcttggtcaattttttagatgcttggtggtggcagagccagtagtcattatggaagaaaattgtcggttgtcctatgctgtctgcagatgtgccggatggtcagtcaggaagatgcagcaaggctttctgatagcttctgcatccgggcccctgctg

SEQ ID NO: 35454 - DNA, 1866 bp, Zea Mays
cttgtcaatcggggtttcagcttagtttggagggtgtggagttgattcagctcggtttggatggactaagattgaaggagcgagaagggagggaggcaaaggagacagcatatgggatgtatttacagatgacaaagaacatgtcttagacagaagcaatggagaaattgcagttgatcactaccatcgatacaaggaagacattgagctcatggcaagtctaggttttagcgcatacagattttctatatcttgggcgcgtatatttcctgatggcttggggggaaatgtcaatgatcaaggagtcgccttctataatgacctcatcaattttatgatttcgaaaggtattgagccttacgcaactctatatcattgggatcttccaaacaatcttcagaagactctggggggctggatttctgacaagattgtggagtactttgcattgtatgcagaagcttgctttgcaaattttggagacagggtaaagcattggataacgatcaatgaacctctccaaactgcaatcaatggttatgggattggaatttttgcacctggaggatgccaaggtgaaactgctagatgttacttggctgcccatcaccaaatcttggctcatgctgctgctgttgatgtttatagaagaaaattcaaggttgcacaaggtggtgaagtagggttggttgttgattgtgaatgggcagagccattttctgaaaatgtggaagaccaaattgctgcacagcggaggcttgactttcaacttggatggtacctagatccaatatattttggtgattacccagaaagcatgcgtcagcgactgggcagtgatcttccaaccttttcagagaaagataaagagttcatgaggaacaaaattgattttgttggagtaaatcattatacttcaagactcattgctcatctccaaaatccaaatgatgtttatttctaccaagtgcaacaaatggagcgaatagaaaaatggaatagtggtgaaaaaattggtgaaagggctgcatctgaatggcttttcatagttccttggggccttcataagtcacttaattatatagcgaagaagtacaataatccagcaatttatgttactgagaatggcatggatgaagaggacgatcaatccgcaacgcttgaccaggtcctaaacgacacgacgagggtcggttacttcaaagggtacctcaattcagttgcgcaagcgatcaaggacggagctgatgtccgcgggtactttgcgtggtcgttcctggacaacttcgagtgggcaatgggctacaccaagaggttcggcatagtctacgtggactacaagaacgggctgtccaggcacccgaaagcatcggcgctgtggttctcgcgcttgctcaggggcgaggctggcactggcacaagctgagcgaactgcacgcaggaagcaagcacagaacgtcgttattacaatataaatattccacacaactagacgtttttctcctgttgttgtatcgtactactgtacagtaagcgccaataagctagcctcagatgtgtgctgcctgcctatacctctagtgactgccattgatccagcactagctgaaatgtacccggcctccaagaatcagcaccagaatatatgctttgaattgaactcatgcatgctatgctaggcgggggcggcacggcactctggttacagatagcaccaataactgttgtactattcacctgcaggtaggtaaggttgtgctgtcattactgatgcagatgttcgtctgtattgcgctggagctctggatcattagggccagggcactttttaacagttttagggttcaggtcccttttatcttttgg

SEQ ID NO: 35455 - DNA, 2165 bp, Zea Mays
taaagctctgctcgcctcagctcggggggcggctcagtgcgtgagagagacgcctgctgggagtactgcgacaagctggatgggaacaaggtccggtgcaggttctgccacaaggtcctcaacggcggcatcagcaggctcaagttccacctgtcccagatccccagcaaaggggtgaacccctgcaccaaggtgaaggaagacgtcgtcgacagggtgaaggccgtcatctcggccaaggaagagtacaaggagttccagctcctcaagaggcagcgcgtcgccgacctgtcgtcggctgctgccccggcgaagtgggcgccggaggctcctccgtccctgtctacctctccggggcgagtggcctctcctgctgctgttattactcgtgccgctgaacagagtcggcttctcgccccggaagcgtccgctccggtgcccagaccatctgctgctgcggcaaacaacaagccacgcgccgccgccgcttcggaatgggagacagaacgatgtatagctgagttctttttcgagaacaagttggactacagcatagccgactcggtctcataccagcagatgctcgaggcgctcggcggtccgggattccgagggccgccagcagatgttctgcgggacaagtggctgcagaggctcaagtccgagatcctgcagaagacgaaggagatcgagaaggactgggcgacgaccggctgcacgatactggccgattcgtggaccgacaacaagctgaaagccctgatcaacttctccgtggcgtctcccatgggcacgttcttcctcaagacggtggacgcctcctcgcacttcaagacgcacaggggcctgtacgacctcttcgacgaggtgatccaggaggtgggcccggagaacgtggtccagatcatcgccgacaggaacatcaactacggcagcacggacaagctggtcgcgcagaactacggcggcgccatcttctggtccccctgcgcgtcgttctgcgtcaacgccatgctggacgacttctccaagatcgactgggtgaaccagtgcatctgccaggcgcagaccgtgacgcggttcatctacaacagcaggtgggtcctcgatctcgcgaggaagtgcgtggcggggcaggagctcgtctgctcggggatcaccaagtccgtgtcggacttcctcacgctgaagtccctgctgaggcacaggccgaagctgaagcagatgttccacagcgccgagttttcgtcctcgtcgtacgcgagcaggtcgataccgtgcgtcgagatcctggacgacgacgagctctggagggcggtcgaagagatagccgccgtctccgaacctctgctcagggtcatgagggacgtctcaggaggcaggcaggccatcggctacatatacgagtcgatgacgaaggtcacggactctatcagaacgtactacataatggacgaagggaagtgcaagtcgtttctggacatagtggagcagagatggcagacggagctgcactcgcctcttcactcggctgccgcctttctgagcccgggcatccagtacaacccggaagttaagttcttccgcactatcaaggaggagttctaccaggtcctggataaggttcttacgacccctgaccagaggcatgatatcaccgcacagttgcacgctttccgcaaggcacaagggctgtttggttcgaacattgctaaagaggcccgcaacaatacccctccaggcatgtggtgggagcagtacggcgactcagcaccgtcgctgcaacgcgccgccgtcagaataaccagccaggtgtgcagcacgctgacgttccagagggactggggcgtgatcctgcagaaccactacgagaagcgcaacaagctggacaaggaggccctggccgaccaggcctacgtgcactacaacctcacgctgcactccgagccgaaggcgaggaggaggccggacgcggacccgatcgcgctggacgcggtcgacatgacgtcggcgtgggtggaggactccgacggccccatcctcacccagtggctcgacaggttcccgtcggcgctggatggcggggacctgaacacgagacagttcggtggatccatcttcggcaccaacgacaacctgttcggcctctgatggcttccggctcc

SEQ ID NO: 35456 - DNA, 205 bp, Zea Mays
gtacattttctgtatatgacttctgtgagagtcctaatactaccttttgtctgtctctgtgaatttttattccaagaacataaaaggcttctcccatgtctttcatatcaaaattcgaggaaagaaactttttgtttcctaactggaaaaggactacatatatctgtacgaataatttctaacactctcgtactatgcttagcat

SEQ ID NO: 35457 - DNA, 1159 bp, Zea Mays
gcggcaattggcctggctacccagacaagagcacgcaacgcaagcaactgcgacgtctcccgcccccgccgcgccccggaccttttccgcagatattttttttatccccccacgcccccggctcgttcccttccattccaccacctctcgccagacaacgagatgtgcgaggcaccgcggctcggcaaccgcgccggaggatccccgcgcattcctctgtcctggcctcggcgtcgccggtgctcggcagcatcctggagcgtcgcctgcggaaggacagggagagcggcaagcccgggcggtccgtcgtccggatccgcggcgtcaccgacgacgccgccgcggccttcgtccgcctcctctacgccggcaggtgcggcgaggatgaggatgacgacatggaggagcacgcggtgcaggtgctggtgctggcgcacgcgtaccaggtgccgtggctgaagcgggcgtgcgagggcgccatcggcgcgcgcctcaccgcggactcggtggtggacgtgctgcagctggccggcctctgcgacgcgccgcgcctgcacctgcgctgcgccaggctgctggccaaggagttcgcggccgtggagcgcaccgaggcctggcgcttcctgcaggagaacgacccctggcaggagctccacgtcctgcagcgcctgcacgaggccgacatggaggtttaagcagcaggagcaggataaggcggctgccaagggcggcgatgatggcgacaaatgggggcttctggtgaagaaggtgaagactgccagggtcttctcttctctggccaacaggaagcagatgagcaccaccaccacccagtgctgaggagcagcctgggatgcttaggggtcaaagttagattagtgagagagaatgaagcgagcagtttttttttgggtctgttttgagatgtcagatctcttttgagatatgtacatgtacatgcctactttgtcaccctacgttggtatagctcttttatcgaggtgggagttggtcagccggaagtctatgtaaaaagtgcgcatgtatcattatataataatagggaaatatgagaagtattttagtcttatgatacctttcagtattatggtaccctgacaaaaatgatcaatccaaaacgacacgacgcagaatggac

SEQ ID NO: 35458 - DNA, 2864 bp, Zea Mays
aaatagaaagttaaaaataaatagtttctcgtagaaattctaagtcggacaacaaacaagcaggagagaagaatcagtgatctgtgctgtgagtacctgacctcttccagacagcctctgaaatccccttcggcccttcctgctccagcgggagcgcaccagcaatgtcgtcggcggggccaccgccgccgctgccgccgtggagcaggctggaggggcaggtggtgctggtgacgggcgcttcctccggcatcggacgcgacttctgcctcgacctggcgcgcgccggctgccgcgtcgtcgccgccgcccgccgcgccgatcgtctccgctcgctctgcgacgagatcaacgcctccgctgcctcccgagccccccgcgcggtggctgtggaggtcgacgtcgccgccggtggttcggccctggaggcggcggtgcagaaggcctgggacgcctttggccgtatcgacgccttggtcaacaacgccggcatacgaggtgcagtgcattctccattagattggcccgaggatgagtgggacagaatcatcaagacgaaccttaccggatcatggctcgtggccaaacatgtctgtcgacgcatgcgtgatgccaagctgaagggttcagtggttaacatcacctctattgctggccttaaccgtgggcatctgcctggctccacgggatacgcatcctcaaaggctgctgtgcattatgccaccaagattatggctttggaattgggcgcggatcgcatcagagtgaactcgattgcacctggactcttcaaatcagagataactgctcctctgtttcaaaagaggtggttgagcaccgttgcttcaaagatagtgccgcttaaggagcatggcgctactgatcctgcattgacgtcgctggtccgttttctgatccatgaagcatcgtcgtatgtgactggcaacatcttcattgtagactcagatctgctacgttgcaggcctggcggagacgcacaggtcctcaacccgtcctgtctgtctcttctgcagctattcgaggctgacgtttacagtgtgctagatggatctacaaacaagactcataaaagtgttaccggaaaaaggttgccaagaaactttttagagatgaagacaaaggagacgatgatgttgttggttccgcagacgctgatgctgagtaacgtgctactggacacgagcactaccagctgtgaaggttcgcttttgggaactgtaccagtccgtctaggttactcttagaatttgtccccctgctgtgtaggatctatggtttcatgcttgtaagatatgggcagcgctatgctgcgtggttggctgcaggatgtctttttgtgtttttagggtagtaatgaactatgctatgcgtgcaatcctgcaaggaccatactcatgtacatcgcgagtatgtagtctagggctgaacaaatcagagaggcagagacactgctccccttggtatttctactatttgctgctactaccacccttctctttgtcgcagtacaccaaaatagtgaacttcttagagcctaaaccctaggaagttagccctaaactctaggaagttagctaaactctcaaaagtgaagccatcccgtcggaagtttggctctcggaaattttttgtcggaagttagcttaacttcctagagccctctaggaaattagctaacttactacaaccaaaggagcctctcggaagttctgtgcattcgtgggatttcgtttggtcaactgtgtcatgttcggcgatttagcgtgatccagcagctaacatgtttaattatgaattgtatcgagggatgtctgatttgtatttgttcacaagatagctacttttgataaagcagctggtttccaggtaacgtgttctcctgccaatttgcttacacactattctattctacattgagcttaacagtcagacttttgacaggcacttatccaccccagctgctcttgaaggtaaaaactcattgaatggaaaaggcatccccgttttttcttcttaagccagtgatactaagcacattatgttggttttgtttgcttgacatgttgatctgggggattgaaggttgaaaactctacacggtattcttagattggaaaccatgtttttaatccatcataaagttattagtcttacagattcagttttatgactgatccgcaagtcatgaacatcctatgcatcttacagtgcttattgatttgcagcagcacaattttagttttctcacgcagcataattggttctatctcgtgttgcttctttgggctgctattacgagtcattttgctgattctctttcgccttatattacaggttaccacagctcttagtctgaggttttatattcaaccgttgcttagctaagactccacaaagctctgctgaaaagataaaagccttcaccttgtcatcgagtcaaagctaacctaagccaatcgaggtcgaaggaggtagcttcggggtgatgcgctgtggcttactatgcaagagacatggatacatgcaggagacgaagataaaggttacggaagacttgatctgcaagatgtatagatgggaaagtacaatattactgtcgtaatgtatgtagcggtcatgtatatggtttgtggacatgtttgtaatttcatacaaagttatatcccacgattctaaatagaggaataatgccatgcatagacacacactttcgagcctagatcacagaaccactcagtcttcgaagataccttcgagctcccgcttgtgaagttgaatgtatacttgtaatcatttggtatcttgtaaggagtaaaataaatatgagtttgcacattcagatg

SEQ ID NO: 35459 - DNA, 1473 bp, Zea Mays
gatgcaccaaagccctagctcggctcacttgctttcctggccgccgtctcctccgcggctcttaacgccgcatccactcgccggttcttaacgccgcccgccgcctcctccgcggctctgccctcccgccgctgccgccgcctacccaggaatcaggatgcgggtgaagaagcggtcgaagcaccgcaaagcggtcaagttctacgccacatgcttcggcttccgcgagccctataaagtcctcatcgacggcaccttcgtccaccacctcctcacccagcgcctcctcccggccgacgaggctctccgagacctcctctcggcctccaggacgccagccctcttcacctccaagtgcatcctcgcagagctcagacgtctcggcaagtcacatgccgaatcatttgacgccgcgcagcttctcaccacaaccaagtgtgagcatgacaaggtggtcggtgcagttaactgtgtccagtcactgataggtgataaaaatcctgaacatttcttcgttgccacccaggatcctggtctccgagaaaacttacgagaattcctggggttcctgtgatatatggtctgaagaactctttatgcatagaacggccctctatgcagcaacgcaagtttgctcaattggatgaggagaagcgtctcaatatggatatctctgaatacaagaagttactgaaggctgcatcagaaggaaagacaattgccagtgaaaatggaagtggcgaagaacaacatgagatgcctattagttctcttgtaaaaaatgcacttcatgttactgataaaaccaagtttaagaggaacaaagcaaagggtccaaacccactctcctgtaagaagaagaaaccaaagctccccacggctattcaaaagcaggcaggtacggctgatggcgaggcaaagaggaagagggttcggaagcggaagagaggccaaaaagataacaagcaattggaggctgcgaactagaaggatgggcttgcgtaggaagtttcagtgctcttgctagacatccatcctgactccggagcaagtcaactatggaggagttcctttctcccacacaggattcagtatgccatgccataccatgctcattatatgttgaagatgcttcttgcaacgtaacacttgattggttatggtgatcgtgaatccttctctagaggatgttattggatgtttcttttgtcgcaagatgcaactttaaatgttttttgaagcaaaagtttgatgccagtagctctaccaggttcttgcttgccctgctacatgtgtgatcccattcttcaattgtaagatgtgtttgttgagaatatgtataatagataatacttctattattttagattttagacagtagtaaccttagtttatttggacctcgagacaaatgtttaaagtacctaccattagatagggatgaaagtggtaattcgaactgttagaacaaat

SEQ ID NO: 35460 - DNA, 283 bp, Zea Mays
gagttgctggcttgctgctcggtgctccatcctcttcttctcaaagtttgctccctgtaaattgaagataatgctcaggatgtaaacaaaaaaaaagaagggctaaatctccatttccctctgtccagagagctggaacactgttgcgttatccgcggcagccacaaccggatccgcggctgacgccatgggacgcgtgcttttgcaaaagcagggacgcggaaacatttaaccccacggcgcgcagcgacaggttcgggttggcgattgagacgggtgcttg

SEQ ID NO: 35461 - DNA, 1257 bp, Zea Mays
agaacacacaactgtcctggcctgtccacggtccacacacgccttccttatatcggcgctcacggttctataaaaaaaacacagtacgagcagagcaaggcggccgtgagctgagctgagggaaggacgacgtacggcacagttgctagcccggccgccggagctctccgtgatctgggccgccagcaacagcatgggtgccgcgctcttggcttcttggccatgggacaacctcggcttctacaagtacgtcctgtacgggccgctggtgggcaaggcggtggcgtcacgggcgtgggaggcggcgagccccgaccgctggatcctcctcctgctcctcctcttcggcctccgcgcgctcacctaccagctctggagctccttcagcaacatgctcttcgccacacgccggcgccgcgtcgtccgcgacggcgtcgacttcgaccagatcgacaaggagtgggactgggacaacttcctgatcctgcacgccctgatggcggccgcggcgctgtgcgcgttcccgtcgctgcggcatctcccggcgtgggacggccgggggttcgccgtcgcgctcgtcgcccacgcggcggccaccgagcccctctcctacctggcgcacagggcgctccacggcagcagcggccgcctctacgcgcgctaccactcgctgcaccactccagcagggtgccgcagccgttcacggcggggctggccacgccgctggagcacgtggcgctgggcgcgctcatgtcgctgcccctcgcggccgcgcgcgccgccgggtgcgcctccgtcgcgctcgccttcgcctacgtgctcgccttcgactccctccgcgccatgggccactgcaacgtcgaggtcgtcccggcctcgctcttccgggccatcccggccctcagatacgttctctacaccccgacgtaccacgcgattcaccacaccaagaaggaggccaacttctgtctcttcatgccgctgttcgatctgctgggtggcacaatcgaccgacgctcgtgggacatgcagaggaagatgagcgcaggtgtggacgaggtgccggacttcgtgttcctggcgcacgtggtggacgtgatgcagtcgctgcacgtgcccttcgtcatgcggaccttcgcctccacgcccttctccgtgcagctcttcctgctgcccatgtggcccttcgccttcctcgtcatgctcgccatgtgggtctggtccaagaccttcgttgttgtttttttttttttttt

SEQ ID NO: 35462 - DNA, 4195 bp, Zea Mays
ctctaggctccagcgccgcaccacgccaccagggcgggcagcccactcctctcgctgctccactccacctctatcctacgcgctctttctgccgccgaatcagcactactcatcacccggccagggaagagagatattttctgctctggccctatttctggagggcgggagggggaggcggcgaggtgacgtgacggttgcgactggcgccgaagacttgcgtgagtggtaactggaacggaatctttctcctcgactgctcggtgctggcctcgcccctgttgcggcgccgctcgtgtccccctgttgctgcgggcgctggtcggctcgtttgacctcgtctgcgtagattcgtcgaagaggtgggccgtggctgtggctgaggctgagtggggcgagcccggaggacttgagaagcgatgcagagggaggtgggcccgcaggtggcccctccgctcttcatccaccaccagatccagccgatgcctccccacgccgcggccgccgtgaagaagcgcggccagccgtgtccggccgccgcggcggcgcccgcggaggccgctgcggggaactggaaccccaggctgtgggactgggacagccgcgcgctcaccgccaggccgtcggccgatgcactccgcctcgccggtggccagccccagccccagccccagcaggcggccgaggtgcaccgtcagggggccggaggaagcggcgcgctgaagctccagctcggcccgcgggaaggctccacggccccgacggacgccagcccgacggctcccgcggcgtcgctgtcgccgtccccgcctgcttcggggcaggacctggtggtcaggccgagcaagcgggtgcggtcaggatcgccaggcagcgcgggcggtggcggtggcggggctgccaacggaggcgcgggctacccgatgtgccaggtggatgagtgccgagcggatctgaccggcgccaaggactaccacaggaggcacaaggtctgcgagacccacagcaagaccatcagggccgtcgtcgccaaccaggcgcagcgcttctgccagcagtgtagtaggttctagcgtcggtaaagtgcctagcattcctcccataccagataagcagaatctggttgaaattatcagcaaaataaattcattcaacaatatgacctctgcggacaaatctcctccatctgaagtcgttgatttggatgctttgcaagagcaacaagtgcaacggcaggattctgtggggaagacgaccaacggaatcgacaagcaaactgtgccatcaaccatggatttgctaggagtttttccaactggccttgcaacttcaacacctgagaccaatacatctcagtcccaagggagcagtgacagcagtggtaataacaagagcaagagccattcaacagagccagtaactgttgtaaattcacatgataaatcaacccgagatttctctgctgctggtttcatgagaagcaacagcacacacgaaagccaacctcatatatacaagcagacagaacaagaaaccagaccatacttgtcactgcagctgtttggcagcactgaggaggattttccacctaagatggactcagtgaataagtacttatcttctgagagtagcaatcctctggatgagagatctccttcatcctctccgcctataacccgcaagtttttccccatacactcggttgatgaagaggttcggcaccctcatattacagattatggggaagatgctacgatgggtgaagttagcacaaatcaggcatggttggcaccaccacttgatctcttcaaggattcagagcgtcccatcgagaacggatcgccaccaaatcctggttaccagtcctgctatgcctcaacatcttgttcagatcattcaccttcaacctcaaactcagatggacaggatcggactggtaggattatttttaagctgtttggcaaggaacctagcacaatacctgggaaccttcgtgatgatatagtaaattggctcaaacacagccctactgaaatggagggttacattcgccccggttgccttgtactatccatgtacctattaatgccgggtattgcatgggatgagcttgaagaaaatctcctccagagagtaaactcattagttcaaagttctgatttggatttctggagaaaaggaaggtttttagttcgaaccaactcccagttggtatcatataaagcaggaatgacccgtttatcgaaatcgtggagaacatggaatacccctgaattgacccttgtgtcaccaattgctgttgttggtgggcagaagacctccctcattcttaaaggccgcaatctatctattcctggcacacagatccactgtacaagcatagggaagtacatatccaaagaagttctgtgctcagcatatccaggtaccatatatgatgattcaggtgttgagacatttgacttgccaggacaaccagatcttattcttgggcgctgctttgttgaggtagaaaacaggttcaggggtaacagcttccctgttattgttgctagttcaagcgtttgccaggagttgcgaaatctagaagttgagttcgaggattcgcaggttcttgatgtttcttcggatggtcagattcatgattctcggcagccaaagacatcggttcaagttctgcacttccttaatgaactcggctggctctttcagagggcttctgcctgtacatcgtccaccagatctgatgtgtctgatttggatttgattcggttttcaaccgcacggttcagataccttttactgttctgtagtgagcgcgactggtgctctcttactaaaacacttctggacattcttgccaagagaagcctggccagcgaggaactatcaaaggagactatggagatgctggctgagattcacctcctgaacagagcagtaaaaagaaagagtaggaacatggtgcacctacttgtgaagttcgttgtaatttgccccgacaattccaaggtttaccccttccttccgaacttgcctggccctggtggtttaactccgctgcatcttgctgcgtccatcgagaatgcagaggatatagttgacgccttgacagacgaccctcaacagactggtgtaacctgttggcagacagttctagacgacgacggccaatctcccgaaacatatgccaagttgaggaaccataattcctataatgagctcgtagcgcaaaagctggtggacatgaagaacaaccaggtcacagtaagggttaacggcgatgggattcgtgcggatcggttaggaaatgatgttggtgaccgcaaaagatctggggttcaggcgctgcaaataagatcctgctcccagtgtgccattctggagtctggtgtgctaatgcagcccgtgcggtcaagggggttccttgctcggccctatatccattcgatgcttgctatagcggcagtatgcgtctgcgtctgtgtattcatgcgagcgttgctgcggatcaattctggtaaatccttcaagtgggagaggctggattatggtacgatataaactgcccgcccgccggggaagacctgagcctcgtggtaattattgagttagcaagcagttggtggccttggacggtatggagattgttctatgcagggttcggtggcataaggtagtatcgtcgttggacagttccttttacctcatgtgaaatggaagtgttaacatgtgaggagccggagatgtcagatgttaaatactggtaccgaaggtggatgagcttgagcagagctggcacatctgatggagatgttttagacgtaatcacagcccggggggataagaggagtaagtaaaccttgatttccttttttttttcgctggtgcaagctcgtcgagtcttttaatttaccttgctcactattccgtatttcttttattttttgtgaattaaatacagtgctctagcatgaccgtatcttgtatctactttagatatatatatagtagtagaatggggtaaatgaaaaggaggcttgcgtatgggtctgtatcgaccattttgacttgtagctacaaagaaatgaagcggatctgaagtgtacctggatctttttgttttgttttgttttgttttgtttttgctggactggacgtccagcataggttcccgttctgaagaacctttttg

SEQ ID NO: 35463 - DNA, 1864 bp, Zea Mays
cttgaatcctgtgccatattcacctgggcgtaggtagctgtaatagccccaaacatccccgcgatctatgaagctcattttggagtgcccatggctggggcagtggtcaactgtgtcaacattcgactaaatgctgccactgtagcatttctcttggagcactcctcagcagaagttgtcatggttgaccaagaatttttcaccctggcagaggattctttgaggattatcgcagataaaaagaaaggcacttttgaacagccacttctaatagttattggtgacgcaacttgcgatccaacaaccctccaagacgctttgagaaaaggagccatcgattatgaggcattcttggaaagtggagatcctgaatttgcttggagaccaccacaggatgaatggaagagtatcgcgctaggttatacttctgggacaacttctaacccaaagggtgtggtattgcatcacaggggggcttacctaatgtcactgagtggtgctttgatatggggaatgaacgaaggcgctgtttacttgtggactttgccaatgttccattgcaacggttggtgctatacatggacacttgctgctctctgcgggacaagcatatgtcttcgtcagaaggtgatttgcacaacttcaagaacaagagcacaagtcaagtcaggtcatcagaaaagacactctggtttcagcgaaggccatcttctcagctatagccaacgagggcgtgactcacttctgtggggcaccggtcgtcctgaacaccatcatcaacgcccctccagccgacacgattctccccctacctcgtgtcgtcaacgtcatgaccgctggcgctgctccgccaccctctgtcctggcggcaatgtcgaagcttgggttccgcatcactcacacctacggcctgtcggagacctatggaccatccacggtgtgcgcctggaagccggaatgggacaggctgccagccgacgagcgcgcccggctccacgcgcgtcagggcgtccgttacgtgggcctggagggcctggacgtggtggacccgaagacgatgacgccggtcccggccgacggcaccacgatgggggagatcgtgatgcgcgggaacggcgtcatgaaggggtacctgaagaacccggaggcgaacgcggaggcgttcgagaacgggtggttccactcgggcgacctgggcgtgcggcacggcgacgggtacgtcgaggtgagggaccgcgccaaggacatcatcatctccggcggggagaacatcagcagcctggaggtggagaaggcggtgtacctgcacccggcggtgctggaggcgtcggtcgtggcccgcgccgacgagcggtggggggagtcgccgtgcgcgttcgtgacgctcaaggacgccgtggaccgctccgacgaggcggcgctggcgcgggacatcatgcggttctgccgcgagaagctgcccggttactgggtgcccaagtccgtggtgttcgggccgctgcccaagacagcgaccggcaagatcaagaagcatgagctcagggccaaggccaaggaactgggcccggtcgggaagagcaggatgtgatcgagcctcgagctcgtcttgctttgctacactgtactattcgtaggatggatggaagttgtatactacagactacagtgcaaactgcgtttcttctgtataacaccactactgtacgaacaatacagtcgtgtctgagcttttcttttgccagtgaggactgaactttgtatgaagtatgaactcgcgaagggcgctgcaacactgctcccacttgtatattccaaatttccaagggtacagtaatggcaagacagttaagaagttgcccaaata

SEQ ID NO: 35464 - DNA, 4366 bp, Zea Mays
aaagcgggcactacatgcacgagcacgacgcacctacatgtggaagcctagctttcccgagtctactgtacatgtcactaccgcagactaaagattgaattcttgcttctgccgttttctgaaacacgaatcaaggacagcttcctcttcctcagagaaaaaaaacccatgatcgctgcggggctcagagccctttgttttccagcatctattcagattgaagggactagtcacaagcatatagaggatcgacgaagttcaggcacaactttttttcgaccaaattgaagaagaaaaaaaaacgtagaactaacaacagtgtctgctaaagtatcatttctaagttaaatgtgaatggaatggaagcagacaaccgacttgcatgccatgtttttgaagttcccaaaagggaggttcacttttgtgcaacagcatttggctaccaagtgtggatgtggtcgatcttctgcatacatgcctcctcctctcaagaactgtcttcgcattgactctaccaaaactccagcctacaagaatatattaacaagcagcggatgaaaaattcagtaaatggtcggtgcagatagttcaggttagaataatgagacgatatcgctttgtcgagcaatgtaaaaatgagacaacgtgctctttagtttaggcagtaccgggcagttctccacattttactcagcagagccccagacaccgatcaacagtcgagacggggtcggcgtcggcgacgcgccgttccacggtcgccatccctcgtcgtccgtcgcgggctcgtgccgtgccgctatccattctccgagtgggctatgtacctcattgtcgacgcgccatggacgccaagctgcttctataggaagcccaagattgtccagcacatattgtgttgaaatgaatgagcacactgcatccatatcaccactggtacacaaaggcatagtttaagtcatgttatgatgtagcgcaccgagcaaggtattttgacacacataaatctgaacatatgtacctgtacagccatattctcgtgccacttgaaatgagtttcttgattgatggcagcattgtctctggtgaatctttccaattatcaaatatctgctgactgcttgaaggaaacatataaattaatcatatacatgttgtactgttgacttccccctagtgccaattgctaatctagtaagagatttacttgaggctgaacgaattctcaacagttaaacttgtttatacatgactgagtatgcagcatgtgatagccatattgacactctatagaaacaatcaaggatgagtcgggatacatgcatcttggtgcatactcaatcttatagatatgcagcatgtgacctaagcccctaggggcacctttggttaaatatcttatggtttcaaatagttgactgctggacaggcagaatataggtttgagaatacaggatttgtggctttgtgttgtaagggttattggcctcttttctttttaatacaaactacaaagatacacagccgtctaccctccagtgtgtttgagaaaacaaaagaatattagcttgagtggcattgcgccttttttagtgttgacttaaatatacctttttgcatacagcatgttgtgctaatggaataattcttggcaatcgtggttcacatactctttgatggttaactggaagaggttgttgctacctttttagaattaatgttattgagaagtgagtgatgaaaagatatataagtattctgttccttcagattatataagtaattgtttgtacataaagcacctaccttttcatatggctttaggaaaccaacagattgctaatagggtcacacaagagatatggtctgacgttgcacataaatttgagggaaatatgatattcagatattcaatatacatacctacagtccatccatgggtagcctaaccctgttgtgtttgcatggagtgccctttggacctcaggacgatttaggtaagaggagacgtagtggtttgtgcatggatcaccaaacactaactgaaatagtaaacaaaaagttccagtataccaaaatttcatatagaaatggaagttaaaacatctgtcaatctgtgaaatttatgtacgatgttgtataccgagtcacttgatttagaagggtttgaggcatcttggcatattggtgcatagatgtcatagtcatcaatatttcctttttcttgggtggctaagtccatggcattttggcagtcttcagtgtatgtcccattaaagccgcacttatccttgacggctttataagcttttcccgaaatcatagcatgcatccaatagtagtcatatgatgctcttagagtcaaattatcatccaagtctgcatttccaatctgatgaagtttacagtgttaccattgatgagaaatttaccaaattacaagtttcaatttagttgactgaaaactcaccgcaacacctttaagcttgatactagttacattggtggctctattcttagagagaatcagatttgcaagttctggtatatagtgacctgcatagctctcaccagttatgaagaaatcacggtcctgatattcaggaaatttctctagccaagtaataagaaaggtatatgcatcatctgttgttctttggtcaccagtgttatagtaatctgatgtagtgtttgaatatgagtatccaacaccagctgggatctcaatgaacaacatgttggccactgcattcatgaatggaaaatggaatatcagttgactccattctttgaaaatatagtttactttagttgtcctaagctttatttttttaccaaatttatagaaaaaatgtattgacatttatagtattaaattagttccattaaattctctatgaaaatgttttggtagtgcatttatttgaacttgtagatgttattatattttttctaaaaacatgatcaaagttcgaacaaactattatttgcagcggaggaagtaactattaatccagtaaagattaaagcggattttacttctgttccatgcatgccttttcttgtacagtgtcttgttgtcactatgaacagagaaaggtccaagttcaaccatggccccagatccaaaggatgaacagccaggccctgcagatacagacatacagagtggactcactcttttggacttagagttgaaaaacgaagtgatgggacaggaagaatcaactttagaagggaatcccactttctagcagcgcacatatgcaaaataccttctcagaccacatattgtcaaagagaagtgaacgaggaaaaaagatgtaaatagagcaaggctacaaaggcagcaaggaatatttccccctaaacaacaaaagagtagaggcttgtgaagtttcaatcactcaggtggcaactttataccgaggcatgctgcttttgggttcagaagcatcccagcagaacgacacatagatattggattcatcgatgaggcccttctcactgatagctgcttctactgcagttctaccgaatcttgtgtatgttccattaaagccttaattttcatggactgtatgagtttctttggagatcatagcatgtgtccagtagtaatcgatgattgctcttgtgtttgtgtctcatccacgttaaggttttacatactaaaccaattaaggttttactggttaggagtgggagtcttaaaattaaagcctgttgtgctcaacaaagtatctactttgggcattgtacttaggtcagttggcctaacaatctgtagaattgtgccctgtttatataagaaaataatagccagcttcttttccatttcaacatgctaaggttgatactaggtatgatagaccgtcagtttccgttgtcctttctgtccccctttgggcaagcaactacaatcaacaatggattcttccaataaatggctgtggatgttttgtagtatttgctaggccactagcaggaaagaaaaaaactgctgtatggcgctgatctgtagtaagttccaactgtttttcaattttgaaccttgaaaccatgcttgtatcaaatggatggtcagggaaactacttttttgtggattaaacaagatcaaataaaacggcaggcaagcagagtataaaagcacatattaaagtgtataagtggatcggctaccttctcccatcagtttaagcttttgagttgaactgattagtacattccctctaacatggtatcaaggctggacgtctcgagtttgaattctgacaaaggttttatttgtgtctccatccatttattttcacgtttgcgcttttctctctagctgcacatgagtgagggtgttgaagtgtataa

SEQ ID NO: 35465 - DNA, 2152 bp, Zea Mays
tttcccgctgccgcgtgatgctattttgagccggtcaatgtatgcgtaatacagggcgtaattatggattcttttgagggctctgatcatataactcaaagaaaggttgttcctgcaaaacatattgcattggttgatggaaagaatgagcctgctgtagaggggttgcctaatggttggctgaaagaatgcaggcctagaaagaaccgatatggatccagagtcaagagtgacacgttctatattgatccaatcaatggatacgaatttcactctctcaaggatgtacaccgctatcttgaatctggagacatcagtaaatgtattagattgccaaacaagagaaaaattgaggacctgcatactaaagaggaccaatctcatcatgtaagtttcatcttcaagttttggcccacatctgaatttgccctcgatcttgtgttagctgctacattggattgacaattggattcaaatcaacaaggagttaattcttaagacaggaaaactatcagatcatacccagctggatactgctgatgagtctaatcgatatgatctaccggaaggtaccaatgcactgggatatgctctgcaaaatccagaaagcggagagaataatgaaaacattgcactgtccaagcctgacaatataagctcaatccaaattgaagctggtcaggttgaagctacagaagataagagcatccaatcaggctctatagaatacactccaggggaagctaaatctgtcactaggaaaggaatagatgtgaaggagaaaccgaaggggaaaaagtacaaaactaaacatgccaaagggattgctatacctcttagatcgtcacctcgtttagctgcactgaagattagccaggaagcaaataatgcaaccagagatggacatattggcacacagacagacaccaataacgtgccagaaccaaagcaagtcgaaaaacccaggcgaaagacgaattcttctgtaattcctgagaggaaagatggggaacctaccaggagttgtgcagaaacccttccttcacttcccaatcagatacagggagcatcattcccacagtcttcaggagatgctggatgccaggatgcaccagccgaggcacctgttctgcgacaacaagcaggagcaggacaaggcgaaacatctgatggtttgcctggatctgccctgacgtcgctgtttcaacatgtctggtcagacccgtgccttgtgttcgcgttcaggactctcctgggtgatatccctgttcttgatgacgctcgagcatatcggtcttcggcttatgatggtaacagagactactaccttccaccacagaacatgaataaaaatgctgcagccaactggtccgctctggcttatgatagtaacagaaaccacgcgcaagtcgaccatgttatgccgaggacatcagatacgttctacagcagtggttggttccctccccagtgaattcaatctaggaaatatgaaagcaatttcttacctggcaaaggacaaatcagaagcaaggatgcatgttgcaagcaagactgcagctcgttgtaattgtgtagacgatccataactaatagtctaatgtagctatcacatgctaccgtgcgccatcagcatcagtctaattcacaggaagctgtctggtggtagacttggcaatactttctgttgtttgtgtttttgtagtaccaacttgatcatgcattcacttgttgcattgttacgtgttagagcagcctcaatagtcaatatcccaggaagtgatctgggctgtactttgtctatgagcatccacttgtgtattactacttgtaacttggtagactttcaacgtgcatcgtggcatcggactaagttgtaccaatgtgtttgtttcgaaataaggtagtccatcatctttctactcctcacttttttatttggtttataaaataaaataagtcgatcatgttagagccccgtttagggttttagtgctagccctttgtaattaccgttatacccttgtgtaatggtgcatccccagtcagtcgcagatcccctttctgagattaattagtgtaagttatcctatagatactgtattcatgcctgttcgaaatgtgaattatagtattttttgtgagaatggaa

SEQ ID NO: 35466 - DNA, 249 bp, Zea Mays
cgagaaggagctgcgaccgagctgaccacggggcacggtggccacacgacaattcccaataccggcgaggaattcatgtgtgtaccgcgatcctttcaagccgatttccttgccaacacctcccccggcctccagagacgagaccaatcacgcacgcaggcgagagcagcgatggaattgcaaattccacagaggtctgcgaaggcgtagattctagcctatgcccctggttcagcgaccacggatttg

SEQ ID NO: 35467 - DNA, 1471 bp, Zea Mays
ctcgtcgcgagagccacctccccgcacaagccgcgcaatgcgtcctacccgacactgtcgttccgcaaacaacctccgcgcagtcgtcgtccacacttgcccgcctggataaggatacgaagtccaaatcctcatccgaccggttccctacttccctcaaaccacgtcctctgcaacgagcgcgccctacgcgacggcgttccctcggctacctctacctcctggacatgccaccctcctcccggcctccttcgcctcaaccctaaccccgcaccttcgaacccattgctgctcccctctctccccggctctaatccgctcctaacttccgccttgtttgctgcaaggaggcgtgcgcgacctccagttccaatctgagcgactttggtggcatggacttcctgttcaccatcgccggcttcctcaccatcatcagctttggtggcggacatgagaggagagaagaatccttcgaggtggatcttgatttaactcttaatgagcttggagatggggaggacactcaagaacaccaggcgatccatgcacaaattatcaggaagggtggtgggaagtgttccacttgccaccaattctcatctctcacctctctatcacatgaaccaacatatttctacaatgtggacattcctctcgagtcatcaaaggatctgaagaaaaggagaaagaactccatgctctgaagtgcctcgcggttgagtcagaacaaggcacagatgggtgcgacagagctgtgggatctcttggcctccggctcagagcaattcgtggagatgtacagggtgtatcaacacctcaggctgaagaactggtttgtaaggtcaggactgcagtacaggcagactttgttgctcactgtcatcgtccgacactagtgcactcgtagttcgtggaggttgtggctccaaaagggaaagcattcggcaccaggtgtgcccgcatgaaggtttggtctgaactattatgtgcgctttgggactcttcaagtgtggccaagatgttacttcttaccattagcaccaagagctacgagctagaatccttggattgtttggagcagatgattgttcatgagaggacgatcacaagatggataccacaaccgtgtcgtgagcaacaagacaaaccatgcagagaagaaaccaaaagggacatgcaaagacaaaaatcctgcagagaagtattaagcaacgaacagagcatacaagtgtgggggtggtgtagtgtttatctattggacgtagtgcagagctttacagttatttctagcttacttatctacaaactgaaatcttaactaaagagcttcctatttctgtatagtcatgttgatgaacgtgaataatgcaattctatggtaccaatttgttgtgattctcattgacttttctacatatctttgataacatcatcttatgtaatgcctacttgaaagggaaatggacttaat

SEQ ID NO: 35468 - DNA, 4355 bp, Zea Mays
atggcgagcgggggaggggggattcgggcgacgacttcggggaggatgaagtcgcgagggtggggagattcaagcgacgactttgggacaccggctattgcgctgaggcgtgggggcgactgtagtggcacggcgagttcagactccagcgccgtcttcttcgcggtcgccttttgcgctccatcccctgggctttccgtcacggcggccgcagccatggtggagatgcggcagcggaggaagccgctggtgctcgcctccacgcaggcgctcctcgactcgcttccgggggatcgcccgccgccaccgccgcagaagccggtgcgccttaaggccggcgtcctccgattcccctccggaggtggtggcgccgagttcggggagctcgcgtctttcgtcggcatccctgcccctgctctccgacggctcgcggtcgtcacgggtactcctgtgcttgtcaagaatactgacaataatgttgggaggattgtcaaagcagtattgtttggtaacccgtcccttgacaagtcctgctcagaacatactgaccaagtggtctctgcctctctctctggtcatgcaatgggcttcttaccttgtcgcacgttccctgctattggttttacatccatggatgaagatgttggttatgttagcccacttttggcattcaacttgggattgcatgtttcttgccttaaacttcttattcaaagagaagggcagcctttcaagttctgttctcgagctgaagagattgatgcaactgccagttctggaagtgatctttctcttcacttagaccttcttccatgccctcaagtgcctaaatatgcattgcatttacgagtttctgttgtgaggattcctgattgtggtgtgcttgcttctttaaagatatattcatcctttggaggaagtgagtaccaagacatggtagatcaagctttgaacgagtactttaagtttgataggttcctagcaagaggagatgtttttggtatacaaaacagttggaagtgtggctcaagctgctgcctggcatgcaataagcaggataataaactgaatccccgtaatatgatctactttaaggtgactggcatggaaccatcagatgaacctatacttcgtgttaattgcaatgaaacagcccttgtacttggtggagctgcttctgctgcaatccccccttattccttttttgcttcttctggtaattcagtaccattgcacagtgaagtagtggagcatttagcatctgtcattgcaccagcattgtgcccttcggatattttaccaaaaataaagttttccacttttttatatggcccgccaggatgtggaaagcgcacagtggttaggcatgttgctaaccatcttggtctgcatgtggtcgagtgtagctgtcatgatctgatgacatcatcagaaagtggggcacctgctgcacttgcaactgcctttaaagaagctcagaagtattctccttgtataatacttcttcgccactttgatgcaattgggaatgcatcctcaaacgaaggtccacagtctgagcaatctgggattgcatcgaacattgaatctgtcattaagcagtacattggacaacgttgggttgctaaggattcactgccaggaaaagatgtaaatgggagctcatacctcgtggagcctgaatgtgtaagctctcttcaaatcatactagttgcaactgcggacagttctgaaggaatgcaacagtcaattagaagatgcttccgctatgagatcgacatgaagactatgaatgaagaacagagaaacgaactgatatctgagacacttcaaggcattcctaaagttgctgatgagagtatttgtgacaagttcataaaagatttagcagcgcaaacgtcaggtttcatgcccagggacatacttgcattggtcgcagatgctggtgtgtcttttgcgcataaaattgcagcagggaaagatagcaaagcaatcagtaagcatacggaggtccttccagaaagctcttctgccactcaaaatgaggaacaccatttcagcaaagaagatattatgtcttccttggaacgagccaagaaacggaatcgtgctgcactgggcacacccaaagttcctaatgtcaaatgggaagatgttggtgggctagaggatgtgaaaaaggttattctagatactattcagttgcctctgatgtacaagcacctgttttcttctaaattgcgcaagcgatcaggtgtcctgctatatggacctccaggaacagggaagactttactcgcgaaagcagtagcaactgaatgctcattgaactttcttagcgtcaaaggtccagaactgataaacatgtatgttggagaatcagagaaaaatgttcgggatatttttgagaaggctaggtctgcacgcccatgtgtcattttctttgatgagcttgattcccttgctcctgcacgaggatcctcagcagattctggcggtgtcatggacagggttgtttcccagttacttgtggagatcgatgggttgagtgacaacagccaggaccttttcattattggggctaccaataggcctgaccttcttgattctgcccttcttcgccctggtcggttcgacaagcttctttatgtcggtgtaaatactgaggcatcatacagggaaaggatccttaaagcacagacacgcaagtataagctgcacaagaacgtttctctcttgtcagttgcgcagcgttgtccaccaaacttcactggtgctgatatttacgcgctgtgtgcggatgcatggtttcatgcagcaaagcgatcagttgaaacattcgaaatcgatccttcaagaagtaatgaagccagtgccgaagaagtcatcgtcgagatcgacgattttatcacggtgttaggagatatcgcaccgtcgctctctctggacgagctacaaaactacgaacagttgaggcagaagatcgaaggaccttctagatgaagttgggtttccactccctgctgacattcttaaactgctaacacaccaaaacattccctgtcttacattttcgttcgtacacaagttttcctccctgaaaacttgggcacttctatatccattcctgatttatacaatcacatccttgtagcagcatctgtattgacatcagaatgacattttctctgaagagaaacatcctgtcattctttgttagcagctccgcaactattctgaatgagcccgtgaagtcaagcactcaaagccttacctgggaaacaaaatgctattcctgacctgaaggaagcatccaccaatacagctagtttgggtacacacgctgaaccagctagttcgcctgggagaggcctctgtctcgtttagatgccatcgtctagaagttgtatcggaaaaattataagcgaatgttgcaatgaacagagttccttgtactgctgtgatttgtcattggtcaaagagaactaactgcagcgtttgtctacctacaatacttgtttttttgttgttgctatcttgtagtgccagcagcgatgcctccttgttggtgctcggcaagtcggctggtgtgagcaaaatccgtacgtcgtcgtctccagtggtgtcattctaaactggatctgctgctctcgagaccgaacaactgcaacaaactcaggcagggactcagcatctacacatcctgttctacggtgattgtgacacaaatcggctgcatgggaaccatactagctgccaagaaagatgaaagtgttttctccgacccaacctacaatgtgtctgttctttttgggaagagagatgagccactcctactagcttgcgcacgtcaacttattgagcacataagtggctcagcccggtcattggtgatttctctgggtctgaaagatcattctcagggaacgctgaaggatattactgtagctgtgatgattgaatagctgatgagctgggcatggggttggctcgatggttggcatattcagccccatcgataaagatactgtttagcattgcgcaagaggagccatcgtttataccatgcactaaattctggtagttttgtagttggaccttctatctacttggattaacaaaaggtggttttaagctggtgtcaaaatttgagtgtcaactttcacgctaaacaaaaggcactgtacactggtaaagcacttctgaggcgaatcatgcttttcgaggacaatttcggctatccgtgctggggctgccactgtggagctctgtgcgtactcctttgccgtctaggactagctaggagagctactgtactcgccactcacatcacggctttagaccaactccagcaa

SEQ ID NO: 35469 - DNA, 1489 bp, Zea Mays
ccataggtgttcaaatccgctagctttctgccaggtggcactgaggaagtttaatctgactacccacaagggtttgataacagctactgatagggatatcatcttagaggggcttgatcagatagagaggctgatccaagaaggcaaatttgagtggaggaaggaccgggaggatgtgcatatgaacattgaagcggctctaattgaaagggttggtgagccagccaagaagttgcatactgctaggagccgcaatgaccaaattgtgacggatctaaggctatggtgccgtgatgctattgacaggattttgattcgtatcaagcagcttcaggtgtctctggttattttggcttcaaaatatgttgatttaatagtcccaggttatacccatctgcaaagggcgcagcctgttctgctgccacatcttctcttatcatatgttgaacagttggagcgtgatgctggtcggctggtcaactgcagggagcgaatgaatttctgtcctcttggtgcttgtgctttggctggaactggacttcccattgataggtttcaaactgctaaagatttgaaatttacagctccaatgaagaatagcattgatgcagtatcagaccgtgattttgtacttgagtttcttgctgccaattcgattgctgctgtccatctttcgcgaattggtgaagaatgggttctttgggcatcagaggaatttgggtttctgataccaagtgacaaagtttcaactggaagcagcattatgccccagaagaaaaatccagacccaatggagcttgttcgtgggaaatctgctagggttgttggagacctcatgactgttctaaccctctgtaaaggccttccacaggcctacaaccgtgaccttcaggaagacaaggaacccttgtttgatagtgtgaaagctgtattaggaatgcttgaagtatgcacagagtttgctcaaaatatctcttttaattcaaaaagaatacaaagttcacttccagctggttatctggatgcaacgacgctggcggattatctcgtgaagaagggagtccctttcagaacttctcacgagatagttggaaggtctgttgctctatgcgtctccaagaactgtcagctagctgagcttgaattggctgacctaaaatctgtccatcctgtatttgaggatgacgtctatgaatacctgggggttgaaaacgctgtaaacaagttcatatcctatggctctactggttcagaacaagtgaaaaagcagcttgaggattggcgcatccagctcggggtgagctcataagggttggcatggttcaagaaataagctcgcaaattagtgcttgcgatttttgaaggtgtatgttgacgtcgtgaactttttctgtgtgtttgttcatacatttcgaaaactggaatgaatgatgtaaacatgttggacaccttgagcctcttttatatattattattgcactgtgtttta

SEQ ID NO: 35470 - DNA, 956 bp, Zea Mays
atcggatcatagggaagcctcagactgcaagaaattcctcaccggaatcaggactccgccgctgagccgcgtcacatcgtgggcaccccaaatcccaacacctccgtcggtaaatccaccatccccaagtttggcctgacctccacattgcgtagcacgtttctgggggaagaaatagtcacctttgggaccatggcgcgttagccggtgggtcccccgacgtgtgagcaggcagcgccgcccctgaccgtcccgtcttgggggggttggttcgggtgccgtcgatgtggtgatgggtggcgtggattaacggctggcataccggttggcaagagttgatcgggatcgtcgatctcggtctgaacgactgtgatcagacctcagtcctggtggctcgatctaggatctgtgccgtcgatctggcggttgacggttgtgatcagatcaagcacgtaccggttcaggatttttgaatctggtacatagtttcacagacgagcgcgctagatgagatcgtggcgtggcgagttctcagctattgacctcggttccagaggctaggaagacctaccagctcggtataagtaaaatgtaatcgtggcccttggcttttgatcggacggttgtggtcgtcccgtaccccttcacctagacgttttagcatatgagcccctcggtaatttcaaaatgaacccgtcatccacagacattataaaatcattacaacagagtcctttttctgcgtaaagaaccttgggttccgaagaatttatggccgcaatccactaattcggtgtaaatatagatttaatccgaaaattgattattatgtataaaaataagcctaagaataaaaggaagtcataactttctcatactaacttcaatttgacccattcaaattttgttatcttcatattaaagttgtctcgatgataataatttctattttagtg

SEQ ID NO: 35471 - DNA, 1398 bp, Zea Mays
aggttattcaaaaagcgatcctgaccttccacttccgcagtcccgcaagaaagaaagagaaaggagaaggaacagggaagcaaagcacaagaggtggccgccgcagtccgcaccccctccccaatcacgccacccgacaccgcgctccgcagattcgtagtcgctgctaggcttccggcgagatggacgtggtgaaggcggcgcagttgtcggggcggacgctggaacgggtagtggtgcatcccttggtgctgctcagcatcgtcgaccactacaaccgcgtcgcccgcgacacccgcaagcgcgtcgtcggcgtcctcctcggcacctcatcccgcgggtccgtcgatgtcaccaactcctacgccgtgccgtttgaggaggatgacaaggatcctaggatctggttccttgaccacaattaccacgagtcaatgttctccatgttcaagaggattaatgccaaggagcatgttgttggctggtacagcactggcccaaaactaagggagaacgacttggatgtccatgcattattcaacagttatgttcctaatccagtcttggtgattattgatgtccaacccaaggagctgggtataccgaccaaagcgtactacgctgtggaggaggttaaagagaatgcaactcagaaaagtcagaaggtatttgtccatgttccttcagaaattgcagctcatgaagttgaggaaattggagttgaacaccttctaagggatgtcaaggacacaacaataagcacacttgctacagaggtcactagcaagcttgcagccttaaagggactcgatgcaaggcttagggagatccgaagctatttggatcttgtaattgacgggaagctcccactgaatcacgaaattttgtaccatttgcagtgaaaacaaacgacatgatgttggtgatatacctgtcttctctgatccggagcgtcattgcgcttcacaatttaatcaacaataagatgctaaacaaggagcacgagaaggccgaggattcgaaaccaaccgccattcctactgctgccggaagctaaacgtgcttttgatcactgattggtggctaagaaaagggaagaaacttgtgatgacatgttagcacggttgtgctcgaaccaactgtcttgaccttgaatggacattttttatgtttattttatgtatgatcaggtcaacggcaagagaaaccaattacactgtatgagctttaggtcacacctcaagttttctgtagatcttggtgctatttcatctgatgggttttcatgatgttgactccgtttcctgtgattgatttatagcgagcctgtacgttgtatgtcatgcaattcatctatctaaagtcttaaaaggcgctcggttttgaggccctctccgc

SEQ ID NO: 35472 - DNA, 1309 bp, Zea Mays
gtgaacttatcgtgggttctaaatgccaaatatacttttaatcttgctgcttctaatagaccgaaggagtggaggtcaaatagcgaaaggacgcacgaaccccaggaggcaccgtctccaaagtccaaaccctaaccctagcgcccccaactcgtcgccgggagatggccatggacgcggagcggcggcaagcggagctgatcgcgcagttctcctctcaggcggtggctctttcgtccgcgcagcagctcgccgctctggtgctcgaggccacctcccacccggccctcttcgccttctccgagctcctcgccctcccggccctctccatgctcgctggcactcagtactcgtcttcactggacttgctccggctcttcgcctatggcaccttgaaggactataagaataattcgggatcccttccagcattgttgcctgatcaggtccgaaagctaaagcaactcagtgtgctaactctggcagagtcaactaagatactaccatatgatcagctcatgcaagagttggatgtttccaacggtatcgtcagaggcaaactggatcagctgagaagatgctttgaagttgggaacatcagatagcctgttgcatcaaattcaggagaaaatcaaatgggctgacacaatgagtgatgtgaacaagaagcaccagaaagaatttgaagacagagtggaagaggccaaaaaatcaattaagaagttgaacaatttaagcaggcagacatcgacatacgagggcatgacgactacctctctgaatctgtaggaataatggattttgaagaggaccgtgtccgaccaaagaggaggcgacaaccactggcgtagtttcaattaagcccttacaaatctctcctacaatgggaactgctgataccttgattgagacattttgacgccagagcgaggaagcattgtacatttgtcatataatgcctccagtagtccagtgtagcgagtcagatattttgccttctggtcaaactgctcgcgtgtgtgtgttttggtagggaatgtacaggttcaaaccttgacgttatgttgtattttttggtagatgacccatggtagaaatagcgctgttatggttatggcactgggtttttctccaagtttcatttcgttctgtcatgttttgatgttttgtgtggtggggtgctcgcagggtcgtggccatgggcgctgcaggtgccctatttgccattgatgtgacgtgaatcttcgccgtttttaattttaagatgatatagatccgttccaatttttggctgtgattttataccaac

SEQ ID NO: 35473 - DNA, 1904 bp, Zea Mays
ggaaccctataggcggagcagaagtgagcctccacctccacccgccgccgccatggctctccgtcgtgtcaccccgcagaggagacccgttctccccctcccccgtgccttcttctcctcgtgccccccgttcactccgcccccgtccccggcgaacgaccccgacgacgaccattccccgtcctcctctccgccccccaaccccggcgcgccgcggaatccgtcatcctcgcttttccaggacatcaaggatcgcctccgcttgtctcccacgtcgtcccctccgcgccggaatccatcgaacttgctccgtcccaaccccgcgcgtggtcctccttcgaaaccgtcccttgaagaggttcgccggatgctcgatgacttccgcccaaccgtcggcgcgccctccccctccgcacccggagtcgccccctcctttttggacataatcaagaggagcagcgtcgcccagggtgccaacgctgggcagggggtgaccggcttcgattccgtccgagagagtctcaagcgctccccgctgcggacaccgcatcctccgtcgacgccgtttctgactctttcgcagagcaacatcttcagcccggagttacagaggaagtttaaggctgtagatgcgcggaaggatgggaaggaatctaacgtggcgctttcgaggctctacagctacgaagagcttgggaagaagctaggcgagctccggccagcggttggggccaaagacggtaaggagtggttctctcttaaggagctgcaggggcggatcgccaagctggcggagttggagaagcaggaaaaccagttgtcagggtctctctgggaaatcaagaattgcattgggaacctgaatcataaaccagaaaacgccactcagcgggtaaacattcatgcactgctgaaccttcgcggtcagccgacgccagactacatgagtcagcctccgcaggaggagttgttagagaagtacttccatccagatcatatgtcatccgaagagacgatgaaattggagctccaaagggtgagggatgagttcaagatgtccgagaatgactgtgggtctgcacgagttcaaactttgtcaatcccttgctctcagaccttgttcactggggaaaaagcttcacctaagcatgaaaagttatctctcttattgatctagacgaggactcatagcagttctgaagtatcaattgcacaactgactctgaaaatcaagcatctgtcagctgttctacacaagaaggataaacattctagaaaggggcttcaggagatggtccaaaagagaaagaaatacatgaaatacttgcgaagaaccgactgggactcgtactgttttgttctatcaaagctggggctacgcgatgtgcccgagtacaaagctcctgattacaagagcaaagcaaccactaaggccaaatctaagaagagcaagagcaagaggagaaagatgaaggcataggagcggtgaacaaacacaccctttttggtcttgaattgcatggctaggaaatgattcgagaagatggatccatccaatcttacagttttttttttgactcgaagctgtttgtaataaccatctctttggaggccacggtttttccttgttctgcttggagcggcaaccttcctgtaagttttgtaacaactgatttattatattatttgcttttgagttctcccgctcgatatgccttattatgagggaagggaggaacagatacgacgatatgataccattacgtcatcatcagtttgtagctttgccagttttttttgtttgacgtaattttccagaattcttgtataagaatgcttgaacaatcttgctagctagcctagcgaaacaatcaagtagaaattcttctattttctattaggcc

SEQ ID NO: 35474 - DNA, 718 bp, Zea Mays
atggccttggccatctggaggggtgcaacaagagtggactgggccacaacgtcagatggggggcagctgacggagcaacgaagtagcgagtccgacaagagtagaggtgaattcgacagtcggccaacgagggaaagatcgccggctcctgtggcctgcaaggggagcaccgctgctggccacgccggtgggagcgagtgtgcccatgtctatagaaggctaggcatctgcgcctgtggtggggcaagccttgtgcatgaggtcgcgccaacggtggagcaggcccatgctggcatcaatgctctagcattatctcagataacaataaacaaactacgtgagaacttcattgatatagacaagttgtgtcaggagtgtcaaactttaattgagaaccatgacaagatcaagcttcttagcaatacaagaaacaatttgaacacaactctaaaggatgtgggaggtatgatgtccatttctgttgaggctgctgctgcacatgactcattaagcaatgaccaggagttaattcacacttacgagcgactaatagctcttgatggtaagaggcgttttgctctagctgctgctgcatctcataaggaagaagttggaagattaagagaatactttgaggatgttgatcaaacatgggaaacatttgagaaaacattatggggccatatcactaactttttcaaactttcaaaagagaggt

SEQ ID NO: 35475 - DNA, 1839 bp, Zea Mays
ggaaaaggctgtataaaagccacctgcctccctctcacagctcctccctcccaagaactcggaagtcggaagcagggcaagggatggatagcaagtcggtgggaatcgtcggcgcaggcgtgagcggcctagcagcctgcaagcacgccctcgacaaggggttcaggccggtggtgttcgaggccgacggaagcgttggcggagtgtgggcacacaccctggagtccacgaggctccaggcgccgacgacggcgttccggttctcggacctggcgtggccgccggagagcgcgagggaggcgtacccaggccaccgcagggtcatggagtacataaggtcgtacgcgcgtgcgttcgacctcctcaagcacatcaggttcaacagccaggtgctgggcgtcgagtacctcggtgcgaccgaggaagaggtcatgggctgggatcagtggtccggcgatgggacggcgttcggagccgtgaagggtggcggatggcgcctcaccgtccaggacttgaaagtcggtagcactgaggcacagtggaaccccaaacatcccagagttcccagcgaatgggcctgagctgttcaaggggaagatactgcactcgctggactactcctacatggacgacggcgacgctgctgagttcgtgagggggaagcgcgtgacggtgatcggctccggtaaatcggcgttcgacatcgccgcggaggtcgccaaggtgaacggtgccgcgcagccatgcaccatcgtgtacagaacaaggcactggctggtccacaagtccagcgtgtggggagtcgacctcagctacttctacctgaaccgcatctcgcagctcctggttcacaaacctggtgaaggattcttgcgctgcatgctggccgccgcactctctcccttgagatgggcgatctctaaagcgatcgaaacgtactacaagtggagcgttcctctgcggaagcacgggatggtcccggactacagcttctccttcgccatgtcctcgtgcctgatcgcgatgctgccggaaggtttctacgacagggtcgacgaaggcagcatcgttctcaggaaatccaaggcggtcggcttctctagcgacggagtcgtcctgcgagacagaaacgaaagcgtgagaagcgatatcgtgatcctggcgacggggttcagaggagaccagaagcttagggacatcttcactgcgaactggtgcagggagatagtggcagggtcaccggatacagcagctcctctgtacagagaatgcatccatccccggattcctcagctggctatagtgggttactccgagagcctcaccaacatatacgcctcggagaggatgagcaactgggtagctcaatttctggccggcggcttccagttgccaagcgtgagatgcatggaggagagcgtggcggagtgggcagagtacaagaaccgatacaacgggaggtatttccgcaggtcctgcgtaagcaccgctaacatctggcttaatgatctgctgtgccgagatatggggtgcaaccctagaaggaagaaagggttcctggccgaatggttccagccatatggacctgcggactatgcaggtctttgctgaagatggttgcattgcatgcctgtcagtgcatactcctaggaagagatgacagagttgctacctccatgggtgtaatactgcaatgtgaaacgtacaagcaaaatatgtctgatgtttgaactgtaaggtgtgaacctatgagacctgtctaaacaattttgcaacaatctacagttttgaactcgaacagggagaagatagaaatagtgaacagtcatcgcctatctg

SEQ ID NO: 35476 - DNA, 6207 bp, Zea Mays
cctctttcgattcttctccagttctccctgtcacgtgactagggctaggctaggctagccaagcagaggagaggggagggcagaattccttgcttgctcggcgggtggtcgaatacgaatactgcggttgccccgccgccccggcaaccgcagcacatctcaccccattcctccgtcagtctccattctctccaatggcgtataaatcgccgctgccgccgaccgccctgcccccatcatcatcatcagtagcagcatcacgttcacgcgcgcggcgatggaggcggggccgtcgagttcggcggcgatgagcgcggcgaggcggaggcgggacgcgctggcgcagacgctggcatcgcggaggctgccggagggtatggcggaagctggggagctggtgcccggagccctcgcccccgaggtcatgcccttcctgcgcgccgccgacgagatcgagccgtacaacccgcgcgtcgcattcctatgtcgcaaatatgctttcaagaaagttcaaacactggacccatcatcaactcaacgaggtgttcgacagttcaaaacttacatgtcaattaagctggaccaggatgacacacaagttctaggcaatgatgcaaatgagattcaacagttttataagaagtactgtgctagtatgagtcatatttcaaaaaagagaaactttgaggagatggctagatattaccaagtggtgtatgctctttatgaagtgctacaggatgtaacaaataaaaacattgatgatcaggtgttgcggtgtgcagacatggttgaggaaaatggtcgtcatttcaagaactacaagtacaacattattcccctcaattttcctggttcttccgaggaaattatggaacttccggagataagaggtgccattgatgcaataagtgacatagatggccttccaatgccagacatgtcttctatccaaaggcatgaggataaatctatccaagatctaattgaatatctttcactagcatttggatttcagaaatcaaatgtagaaaatcaaagagaaaatatggttttgcttctcgcaaatattagtacaagaactgctgcccaggaagggcatcctttggttgatacagtgaatgaattgtggaaaaaaatatttggaaattataagtcatggtgttgctatttgcatattacttcaagtatcataatcagtcatgatattacagaacataagaagcaacagctgaagcttcttcacattggcttgtatcttcttatctggggtgaggcttctaatgttcggtttatgcctgaatgcttgtgctacatattccaccatatggcaaaacagttgcatgacatggttgatgaaaacaattttcaaccaccacaagcacctgtggaagagggatcatttctgaaaaatgtcattgaacctatctttaaggttctgcaaaaagaagcacaaaaaagtagagggggtacagcaggccactcggcttggagaaattatgatgacctgaatgaactattttggtcagagaaatgttttactgagcttaactggccgccggatctttcttccaacttcttttataaagggtgcggcatggcaagaaagcccaagaccaattttgttgaagtacgcacatttctgcacatatttagaagttttaatcgaatgtggatgttttttatacttgctttccaggcaatgctcatagtttcatggagttcttctggatctctttctggaattaccgatggaactgttttaaaaaatgtattaagtgtttttatcacagcagctctactcaactttataacagtaactctggatataatgtttactgtacaagcatggggtagtatggagtggacaaagttagtcagatatttactaaaatttgttgtcgccattgcttggataattattcttccattgacctattctagttccatcaaatacccatccggtgctggcaaaatcctaaatagttggattggggattggtataatcaatcagtttataacattgcgatcgtcatatatatggttccggatattcttgctgccttgtttttcttgttgccacaacttcagaatgtcatggagcgctcagattcacgagtgttggttctcctgatgtggtggattcagcctagattgtatgttggacgtgggatgcacggagatattttgtcaatccttaagtatgtcttcttttgggctgttctgctcatctccaagcttgcattcagtttctatgttgagatatcaccattgattgatccaacaaagttcattcttgaccaacaagttgggaactatgaatggcatcaaatcttccctttcttgccacgcaaccttggtgttgtcattaccatatgggcaccgattgtcatggtttacttcatggacacacaaatatggtatgccattttctccactgtctttggaggtgtttcaggtgccctaagtcatgtgggtgaaatacgaacccttggcatgttgagggccagattcaaatcaattccagaagctttcagtcaatgcaatgcgataaaacagcgagagcaagcatttgagcacagaagcttctttcgtgtttggaattcattcatcaattccttaagagaggaagacttcattagtgatagagagaaggacatgttgatggctccgtcatattcaagcaatttatccatcattcagtggccacctttcctccttgctagcaaggtacccgcagctgttcatatggccatgaattccaaagaaggggatgagcatgagcttattgagaaaatcaaacttgatggagacagatatgatgcagttatagaatgctacaaatccttgatgattatactcaatagccttctgctagacactaatgatcagaatattgtcaatgatattgataaaaaagtgacttatagcatgataaaaaaaactttcttggaagacttcgaaatggcagaaatcggcaaagtaagttctacattggctagattgttgcagctcctgaaaagtgaacctattaatgatgttggagagaggaaaattgttaatgccctgcaagactttatggaaattacgacacgtgatttcatgaaagatggacagagtttcaaagatgaggatgagagaaatcaaagattcatgaacctaaatatgaatatgataaaggaagattattggagggagaagtttgtccggctgcacttattgttgactatgaaggattctgcaatggatgttccaataaacttggatgctcgccgtaggatcaccttctttgcaaactcgctttttatgaaaatgccaagagcaccacgcgtgcatgatatgatttcatttagtgttctgacaccatactacaacgaagaagtactgtattcatcacatgacctgaatagaaaaaatgaagatggtatctcaattttgttctacctacaaaagatctatccagatgaatggaataacttcctagaacgtattggagttgaatcaaataatgaagtgtcgataaaagggcgcatggatgacatccgtttatgggcatcttaccgtggtcaaacacttgccagaactgtgagaggaatgatgtactatagacgagctcttgaactacaatgctatgaagatatgataaatgaccaaggttatggcctagctgatttggatacagctaaagctgcaaggtccaaggccattgctgatattaaattcacttatgttgtctcctgtcaactttatggcgtgcataagacatccaaggattcccgagaaagaggtctctacgagaatatcttaaacctcatgttgacgtatccagcattgcgcattgcttacatcgatgagaaagaagtacaattacgaaatggtaaaatagagaaacagtattactctgttcttgtgaaaggtgatgatgaggaaatctaccggataaggctccctggtaaaccaacagaagttggagaaggcaagcctaataatcaaaatcatgccataatcttcactagaggagaagcacttcaagcaattgacatgaaccaggataactatctagaggaagcatttaaaatgagaaatctcttggaagagttccttcttacacatggaaagtcagagcccaccatattgggtgttcgggagcatatatttacaggaagggtacgatttcattatggccatcctgatgtttttgatagactctttcatctgacaaggggtggcataagcaaggcatcaaagattatcaaccttagcgaagatatatttgcaggtttcaattcaactctgcgtcgaggaaatgttacacatcatgaatacatacagttgggcaaaggacgtgatgttggaatgaaccaaatatccaactttgaggccaaggtggcaaatggaaatggtgaacaaacactatgccgtgatatttatcgactaggacacagatttgatttctacaggatgctatctctgtattttaccacagttggcttctacttcaatagcatggtggctgttctcacagtgtatgtatttttatatgggaggttataccttgttttgagtggcttagaaaagtcaatactgcaagatccaaatatccaaaacataaaaccatttgaaaatgcacttgccactcaatctgtattccaacttgggatgttgctcgttctcccaatgatgatggagattggccttgagaaaggatttggcagagcattggcagagtttgtaatcatgcaacttcagttagcttctgtattcttcacttttcatcttggaacaaagactcactactatggcaggacgatacttcatggtggagcaaagtatagagctactgggagagggtttgttgtgcgtcatgcaaagttcgctgagaattatcggatgtactcccggagtcactttgtcaaagcactggagctgcttattcttttggttgtctacctagcttatgggagttcatacagaagctcaagtttgtatttgtatgtcacagtttcgatatggttccttgttttctgttggctgtttgcaccttttgtcttcaacccatcctgctttgagtggcacaagactgttgatgactggaatgactggtggaagtggatgggcaatagaggtggtattggattagcgcctgaacaaagttgggaggcttggtgggtgagtgaacatgaccacctgaggaatgcaacaattcgaagcttgctcttggagttcatcctttccctgcggttcttgatctatcagtatggtattgtttaccacttgcacatagtgcatggcaacaaaagcttcttggtatatgcactgtcatggctggttatagcagttgctcttgtgtcactaaaggttgtttcaatggggagagagaagtttgttacaaggattcaactagtgttccgcatcctcaagggcattgtgttccttgtgctcattggtttgcttgtccttttatttgttggttttgaccttgctgtctcggatgttggcgccagtatcttggcattcattcccactggctggtttattcttctggttgcgcaattatgtggaccgctgtttcggaggttgatcatagagccacttcacttgctgtgttgcccatatggtaccggtggtgcatgcagaggtccctgctgtgccaggttcagacagaggaccggtgctgcgcttcggaagatgggaccatgggactccatccaggagatggcgaggatgtacgaatacaccatggggctcctcattttcctgcccattgccgtgctatcgtggttccccttcgtctctgaattccagacacggctgctcttcaaccaggccttcagcagggggctgcagatctctaggatcctcgcggggcagaatggtagcggcacaaagagcgactgatgctttgacattaacggagttatccattccgttgtgccatgtggtatctcgttgctattgtccgctaccgttatgtgtagaatcaagtatgttcatcgtttgaaaaagtgtcgcgcagtttgagtgtgtatgtcggattttaacctcttaattcagttcatattcattggttgtttccatttgatttgcacgtatacgttggaatctgtctgattttcggtgttaaaagtaagtgtttgtttttagctagaactttctctactcctttaaagcaccaattttatatgtcatgctttgcgtacgaagca

SEQ ID NO: 35477 - DNA, 1123 bp, Zea Mays
cccaaccctagccgccactacctgctccctctccctagcagccgacagctgccatccagcgccaccaggaaagccgcccaggcgccccgcctctgcatccgcccgccaggagcagcgcccctgcaacccgctctgaagactcgacgcccagagccgcgcgcaaccccgttcgccgccccgccctccgtctcccgtcgcctcgcccctgcgctccgtcagctgcccctccccgacatatattttcacagacactctctcagttatccaaatattgtcagtcagtttagatggtcggtcagccaccagggcctccccgtccggccgtcgtgcgtccaacagtcgggcaccggcgggcggcggccgctcgcccctgcggcttgggcgctcggccacagccagtgcgggccgtgcggcagtgtccactcgggcctcggccagctgctagctaatcctaatcagtaattacttttgcactttgtggacaagaagttgtgaatgccttcagtgctgcagtgttgggcctatcttcaggttgtgtttcttctcaagtcaaccaagagcagcctcatgatggttcccctcctctgagagaagatgacaagaatgggcattatgtttttgctgttggagataatctcacatctcgttataagatcaatgcaaaaatgggagaagtctacaggaatcagtggtcttctccgctacgctcctgaaatatttgagcagtctggagtggctagtttgttttcagacattggactttctcctcattcaacatcaattctcatgagtacccttaatgctttgctgatactcccttgtataactgccgcaatgctgctgatggatgtctgcgggagaaggtagaatctgagacaccatgaaaattagtgatgcagttgtggacttttgaacaatagctggagtgatatgaaacattagtgatgtagttgtgggcttttgaactgcttcaagctggagtgatgtcgctgtggtgcttttgtgactgatctagctagctatctgtaaatgatctagttgtgaatgatattataattgtgatgtttttgtgaatatataattgtggtgcttttgtgtttatgtgatggatctataactgtgg

SEQ ID NO: 35478 - DNA, 1975 bp, Zea Mays
gcacttgcttcaatactagctcgctcaccactcaccagtcaccagtctagcaagcaacaacaaaggcgtaggaggaagcttgttttggaccgagcaagcgagccagccgagcgtgggagagagagaaagaggaattaattgatgggcgaggaggccagctgcgacgccgtcagcctgacggaggccggcaccaacgccaagccggtgggcaaggaggtcggccgcgagccggctgcagcccccgccgccgcggccgacccccggctgcagggcatttccgacgccatccgcgtcgtgccgcacttccccaagcaaggcatcatgttcaacgacatcaccacgctgctgctgcgccccagggtgttcaaggacgccgtcgacctgttcgtcgagcggtaccgcgggatgggcatcgacgccgtcgccggcttttccgcctcgtccggtacgtggccccccttgggaccgcgtgatcggacggttgcgtgcggccggcgcacgggatcgggcggtccggggacgccggcggtacacacccgtcgtcggtttccgcgggtggcgcgccctgatgtcacgcggctccgctgtcgctgtcgctgtaactgtttccgagattttgctctgcggctcgctggatcctctgtccgcttccgttccgcgggccgtgttcccgaatttccattttttttatttttctttacaagcgggacgtacaaatcgagcgatttgcgctggctctgataaattgttgggttcacttggacattcctgtccagggattgaggccaggggcttcgtgttcggcccggcgatcgcgctggctattggcgctaagttcatacctctgcgcaagccaaggaagctcccaggtgagagattccatgaccatgcatgttctgtttttcttcttcttcttaacccatctccacactctgcactgtacccagctgttgcttttgtcgatctagtgcccagcctgtggcgacaccctgatcaagtatatgtttagcgaggagggttcttgcttagcccataatctctgacaccgccagagttgtttgtctggcctgcatgcagttgcagtcccgtgaatgggatattaaaagaaaaatgcaacagacggtttatacgagaccgatcattcattcattccccacttctgtccacaatgttgtagaatcatgtgctgacaccggctctcggaaacaattattattattattattggaaggtgaggtgatctccgagaagtacgttctcgagtacgggactgattgcctggagatgcgtgtcggggccatcgagcgatccggcgagcgggtgctggtcatcgacgacctggttgcgaccggagggacactctgtgctgcgatcaggcttctagaacgtgctggagccgatgtggtcgagtgcgcgtgtgtcattgggctcccgaaattcaaggatttgtacaagttgaatggaaaacctgtatacgtgctggttgagtctcgtgaataatcggagaaatgacaacttattctcaggtgtcagagtgatcagggatattggctgtttactccttgctactgcgattgaacagtggagggacgacatggacaaggacaagtatattcggtgcatcactaagtcttggtgaggggagagattgtagtgttttaggctgagtagtgaagagcctgtagttctgcacggaacatgatggttattagttgatgcaacagcgttgctgttctattattgtttgttgaattttgtggctttggtttgaagcctagcctgggctcaaacagggatatgcatggcgcttgagtgaacaacttcgacagcaacacacacatgcttaatgtcagggaagtagctaggaacctgctacttgttacccgtacgtagtgtcatggaactcataaggtttagtggcaaaattcataaaaatgacacgggaaacgaacacagcacgcgtagcaggggaaaa

SEQ ID NO: 35479 - DNA, 2417 bp, Zea Mays
gctagccgaagctccgagtcggtcaatctatttccaccagtccccatccagtacaggccagcactgccgctgccgtgtcgccaccggcccccggctggctctccagcgactccgtcggcggcttgccttcccgcgccgcgccgggcccggatcgctcgccctttccgactgtcctgctcaacgccgccaccagcacgtcctttcccgcgccggaggtcccgctcgcctgccacagcggtgcggcgcaagctcccccaagcgtttctcaagtgacgagaagaagaaagagggggagaaggaggttggcgtcagtgggtcccgcggaccaatcagctagagagctgagtgatgtctcgcaagcgatgaggtctttctttcaccctttcctctctcctgcattggattggaaaccggctgaggacgccgtagcgattagggagtgctagtattgtacgtgtaatggttggagagtgcttgacagcctcatgagatcggatcggaggccatcattccacgcactggtgatgaaaagctcgcttggtgcccctagctagctagtggcgaagcaaggaagctagccagccaagatcctgcttgtgagaaaaaaaagggagtagatccagtaattttaagaatctggtcaacatacctacggcaagatggctgatattgtaatccgcgacctggagagggtagtcaaagtcgcacttgcgatcaagaaggccgtggaaacagctaagcagaacaaggaggattgcgttaagatcggtgagcgtgcagctgaggtcagtactcatatgaagcggctgaaggagaatacaaaagcaatggaggaccctttgatgagcgatacgctcaagagtatggaagagacactccaacgcgctcttaagctcgtcaacgagtgccagaggaagcacgtcgtgctccattacttaaatgccggcggcatgtccaagaagctgcgccaggtgcaggaggatatatcatataaattgtggaatggggtcttggccaccgttgtcgacacaaggattgctttggaaaagcagatccaatctgctattgatgcccctctgcaccaacaccaacagcgtgcagggcaggtggaaacctcacaaagtagtcattcaagaactgatcaagctagcgagaaaggaaaggccatgttagcaagagtaaaaagggagcagtctgaacttttgtctgggagtattacacgacggactagatgttgccatcaagaagttagcagtctctgatgatactcaagagaggcgcctgcaacttgagcttaatattcgtgcaaagcttgaacatggaaacatacttaaacttctgggatattgcctcgatgcccaagaaaaagaaaagctatactttctggtcgaagaatacataccgaatgttgaaagcttggagaaatttattaatgtctctcgactcgattggtcctcgtgtttcaagataattcaggggatagcaaagggcttacattgcttacataagcatcatattctctatatggatttgaatccagccaacatcctcgtccgttcagatatgaatcctgtggtcatcaattttggatcatcaatagtgctggatcgtgatgatgataaggtcaccggggatgccgtagcaggcacactgggttatgtcgctccagaaaaacttatggaagcttatgcatcaatgatgtctgatgtgttctcttttggaatcatcatcattgagatcattaccggcaggagagcttcacctttcgttgatttaccggaatggggttcagttgatgagatgattacatcagcgaaagggttatttgatccggcgctagctaacgagtctcagctgatgaagattaataggtgcagagaggtcggactgaagtgcattgagcgggatccgaaacgtcggcctaccatgggaaatgtccttgagatgctaagtagctagagtgacaggcaccgatttgaggtgttctcggttaggagtggattgaagcggattagagataatcaaatctcttgctagtcaaaactgaatagaaatgggtttactttccctcaatcccctcctacctatgcaaccaaacaaggccttatgggtttcaacaatttggtttgatgtattgtcacaaattgatcatttgtaacattcaagatttatgcgcaaatgtattggcgtgtggattagagagtttctatcttataggctggctcttgaatgatatggcaaacataagctagcaaaccagttcaactactgagggtgcacatgaacctcgtgtttactagcatttttttttcgtatgctatttcctagttcaagtttgcatctcaaacctttttcatgtatgtacatgtattgtaaatgtgtcaagtgttaattttattgaaacaattgaaatgtgt

SEQ ID NO: 35480 - DNA, 3443 bp, Zea Mays
accctgccgcgcgcgcgcacacgccgctcgctccgtcctcggcttcctctttgcgaccaccaccaccctcgccggtcgccgcgctcgcccaccatttttttttacgttgccacgctactttgctcccggcccctgctcactctgctgcctgccctacctcgactcccgcccgttacttccacccctcggtttgctgcgggagcgagccagcactcgcgggctcgcggcgtcgcgggcaatgccggcgacggcgagcgagtagggggctcctccagggacggaggagagggatgggctgccggagctcgcggctggacgcggcggacgtgtccccggcggccgcgctgtgccgggagcgccgggacctgctccgcgcggccgcggaccaccgcgcgcgcctcgcggccgcgcacgccgcctacttccgagcgctcccgcgcgtggccgacgcgctcgcgcggttcgcgagccaccaccacgccgccacgccgccgggctcgccggtgctcacgctgccgccgccctccgaccacgcggacgccgacgccgacgccgagcccaagaagcagcggagcggctccgcgtccggctccgcgacaccgcacaccggctccggccactcccacatccacttccactccgacgattcctcggaatccgatccagactcctcgaccgacccctgcgccggccccggaggctgtggcgctggccacgtcgacggcgacggcgacggcgacggcgaggtcccgcggccggcgcctgcccttcggcctggcgttcccttgcccggccgcggcggccacggcgagccccaggaacgccaaatccaagacccagcttttgccaggccggagatgccgtgggagtacgcttcgtacgacccctatccttcgttcccaaacaccgagttccaaaatgccacatttcctaggtactactacatgaaggccagctcgacgccggcgaacacggtgtatcaagaaccgtacggctacggcaacttcgccaccagttcgtcctacatggggtacaacaacccgatgtacggcgtcccgttgcaacctgatggggatcgcccggtggaggatcgtggccgggaatcggtggctccgccgccggcggcgccgccgccaatgccaatgcctgagacgtcaccgtgggacttctttaaccccttcgattcatatgagcaggagctcccgcagtatagaggcaaagggtacgattccaatgggtcgttcaccagcagtcccaactcgagtgaggtgagggcaagggaggggatcccggagctcgaggaggagacggaactggagtctatgagggagtctgtgaaggcaaggaaggctgtagagagcacggcgtctaaccggattgacaatgcggatgtcagtgccaaggtgaaagtgtccatggagcacaaggaagttgagattgagagtgtgtacagtgtttcggtacttgagtcaggggacgagagtgtgtgcagttgcgattgtgaccatgccaacactagaacagaggggccaatgcaggtgcctgcaggagatgatcaaggggggaaggtgagctcagaggatcactcatccatagttgtcggagaggatgtatggccgccagagatcactgggacaagagatgtcgccgtggttgtagaggaaataaaggagcagttcaaatcagtggctgcttgtggagatgacgtcgcaaggatccttgaggtggggaggatgcagtatcgatcacggaatagagtcttgagatgctgtatgtgtgggagaaaagacttcataaggaaattatggaggaagaaaaattgaggattacatatgacaaagaatggaagcgcttgaaagagctggatgctagtggtgcagagccatataagatcgattcaacccgggcctcaattagggcactgctcaccagaatcaacatttccatcagatcagctaaagttatttctaggaggatccacatactacgagacgatgagttacacccacaccttgttgcgcttatccaagggtttgttagaatgtggaagttcattcttgagtgccaccggaagcaattccataccatacttgaaactaaatctcacattctgatccctaagaatggaccggaaagaagctcgtccaaggttacactggaactagaaatggagctcctgaactggtgttcctgtttcaggaactggatcctgtcccaaaaggcttatatcgaagctctcaacggctggctagtgaaatggcttccccaggaaaaggaggagactccggacggcattgcgcccttctctcctggcaggcttggagctcctgccgcgttcgtgacagccaacgactggtgccaggccatgagaaggatgccggaaccggaaggcggcgtagtagacacgatggaggctttcgctgtcaacgtgcatacgttgtgggagcggcaggacgaagagcagcggcagcagaggctgagagctgactacctctccagctccagggattttgaaaagcggatcagatctcttcagaaggagcatggctcgcaggggcagtttgacgctggcagggcagcggtgcttcccgccgttgccgacaatggcagggcagttgataaccgcatggttgcactggactcgttgcacaagggattggacgaacagagggcccggcacgagcacgaggaaaccgtgaggcagatccgcgaggccagcgcggctgatctgaaggcaggtctggctccgatattcgaagcgctggaatcttttaccgcggagacgctgagagggtacgaaaatgtcaggatccctgccaaaagcattggcgggtgataccttttaagccccccacggttttttttttctgttggcagcagttcttggtacatccaaggaactattgtcaatcttttagactgtcttcagtttgccagccatgcgcaagcacaaacaaggccccattgtggttggggtaatgtagagttcatccagtgtacaagaaagggcggcccagaagttcctgcatgattgcgcacgaagcagtgttgccatggatgctttttgagataatcctgatttctgtggtagcaaattcatgtggatctttgagactagtcggtagctagagctacttatccacagagagctgctaggagcctgaactcctagttgcagccccgcaaaggagtggggggagccggggaggggatggcagttttgtactagtcattttcagctcctgtacatattgattatattagctaagttggtgaattatctatctatctatctatctatctatctatcaggctagctcgccatccgtgtacaattttatctgtgcatcgtacaagttgtatttaatgccgtatggttatgccacgtggacggcctggtcctgtatggcgctgcctgctgaagactgaaggaagagtctgca

SEQ ID NO: 35481 - DNA, 358 bp, Zea Mays
ccaaagatcagctgctaggcattcctataactgaatttggttcagttctgaaatctaaaatttgttgtatggtgccaagtttggagcccttttgtggttgttctataaggttttggactgaggtttctatagaggaattgaagaccatatattggtgaacaacttctttaaaggtgatggacatgatccgatacgaaaattggagtaacagctgctcaaaggttggactgtcaggtggctagtgacttagtctattcagaatttaaagtctgaaatcagtagtgatgcaaagtttagagccctattgtgaccaactcttgtggttttggactaagaattatatagtaaagttggagtc

SEQ ID NO: 35482 - DNA, 1889 bp, Zea Mays
aggcaagccttttttcgcatatgtggagactgttttgaacctgtgacctggtgaattagaatctgtcttggcagaccatttctcatcatttggggatctttcgtccttgtcctggaagatactgaagcccataaccttgatgcaaccctaaaaccttcgctgagttgctcagcttgtgtgacttacacaacacgacaatcagctgagaaagcatttattggtggtaaatcttgcaaaggacacacactacgatttatgtggttgacagcatctcctggctcaaataaccattataggcatcagaatacctcagttcatgtgaggccctctactatccctggccatactcaaagcatatcatctgagtcccccagccctgttgggaaagtatcatctcttgctacatctgttatggtagccattcctcataataaatccatctcaactgtggaaaatacaaagacttctccagcgggagtttccaaagtttcatgtggtagctcctctctatcatcaaatgataagtgtccttctgaatgtggttccacaaggaatgttatctcagattctgacgttccacaatgagttatgggatttgttattttagttcacaagcagtgagacacctcagcttctgacagatcggaaaggggaattatgcatgtttttggcttttcactcatctcactgtatgtgggccagtcaagactacagatgacatggatggatggaatcatggaatcttttttttcctggggcacaacacttcttttttgtttgatacatggcacgagactttttttttagaacaacgcaggagatctgcgagttatttcattaagaaagaaagataagaggctaccaaaaggtgagcccccagtacaatggttggctatgacctgagggcctatacgatgtgctcaaggccaccaaaacacagaccccacacccaaccaatttccaaggttgaactgacgtgccaggagctcttggagggcactggcacctgccctacaccaaatggcaccttcataagcagcttcctgaataacagcaggaacaaaaggccttctcccctccaagacaggtgtatttcggtgcttccaaatttcccaagtaaccaaaataattaaagaattgagaccttttcgatgctccttaggaaatgctctaacaactcttctcctccagcttaggaatctgtcgttgggctgaggtgagagagtcggccactgcagagtccacgcttctttagcaaaaacgagacttgcttaatgctatctggacgaggtggtgttatgaatcttgatttggtggctcggctatttcataggtctacacctagtcaaaatcccatcacatttgaagttattggaagaccttttgaaaactttggtgtttaatcgtagggcagcgcggttaaggctgtaaaaagaaaaaaaagagaatgtttaaagaaatatgggttcaaaagcatactggaagtggaggctttctcggtaaccaccgtctaatcatctcattgttcacggagactgagtggtgtaggttatttgtacacttcattttgggggcgcatcgtgctgaaagcagttggtaatatgctaattctgtagtttgtagctcctgctgaaatcagctttgtggattatgttgtgagcacgatgaacatcaaactctcgcaagtcccatcgaggcatcttgtcgaaaaacttctgctgtgcatactgaactaaattttgtgccggtgtatcatctgtcgactatcgtgttggtctatttagtatcccttgtgatcgtttaccttactgtgattctgatttccttttcatatatgtatgtgtatatctttatgttctccccacactcctgaataaaaaaataaagaa

SEQ ID NO: 35483 - DNA, 519 bp, Zea Mays
cagaaatttgcaactgagattctgggacagctaaaacagaaatttgtttataaaatacaaaaatcaatgatatagcagtttccattctaaagtaggtagtagaatcataacatgagaaaaataatatataactctgagaataattacctttggaacaacaaattgtgatagttgaggatgatatcacacttgttgccccttttaactatgtcattcaacttgcagagctgaataaataaaagaattgtaagttggatagagagagatctacagaaagaaaaatatgaacatgagatttaacattaatccatgcaccaatacccctgcttgccagtggatgatgcgatgctgatttctcatcatcaactgctcttcagcatacctcacaacactatcactaccaatgccaccttcaatattgtgaaaacattcaagggaactccttaatttctccaccttccgttgaataattttgagttcaagcctcttttcagaaatgatatcaagttcttcctgggt

SEQ ID NO: 35484 - DNA, 2192 bp, Zea Mays
atgccattgccatcggccgcccagagcgctctcgtcgtggcggccgtcgccatagccaccgccaccgtcctcctccccttcccacggacgccgccgcgggaccgcttcgccgacatggtgctggccaacggcaccatctacaccgcggaccccgcccgacccttcgccgacgccatgtccgtccgcggcggccgcgtgctccgcgtcgggacctacgagtccgtcaaggagctcaagggccctcgcactcgtgagctgaatctcagtgggaacgtggtgctgccggggttcatcgactcccatgttcacttcatagacggtggattgcagcatgcgctagcttcctaatgctactctctgatactctgcagctagcgagggtgccacttcgtggggtcagaagcaaagatgacttggttgccagggtcaaggaagctgtcagagataagcaacctgggcagtggatcttgggcggaggttggaatgatgattttgggggagatggtctcccggctgctgtttggctggatgatatctcacctgataatccagtctggctctctcgcatggatggtcatatgggagtagccaactcattagctatgaagattgctgggattgacaaaaacacaaacgatccaattggtggaactatcatacgaacaactgaaggagagcctactggtcttctagttaatactgctatgaaacccatatttgatgtcattcaaaatgtttctaaccatgaaagaagagaggctcttcttagagcaagtagacatgccctaatgaggggagtgactactgttgttgatgttggaagttacttccctggggcctcagctgagaaaacgtggcaagattttgcagaattagaaggattcacttgtcttgtttttatctatgaccttatttgtactcctggcatactgacacaagtattgataccactacagaaatctataaatgggctcactctatggaaaaatgattttgagagtatgcttattcttcccaatgcccacatggtctcgtgtttccgatcttattagtgaacatggtcgatcgctaagtcagtggatccatctaggtggtgttaaagctttccttgatgggtctctgggttcttcaagcgcgttgttccatgagccttatgagggtgatccggataattatggtctccaaatgacagatttagacagcctacttaatagaacactagaatctgacaaatctggactccaggttgccatacatgcaattggggataaagctaatgacatactactggatatggttgacaagattgttgatttaaatggagcgaaggaccgtagattccggatcgaacatgcccaacatctggctccaggtgcagcaaaccgctttggcaagcatggtaccattgcatccgtgcagccagatcatctactagatgatgccgaccatgcttggagcaagattggggtggaaaggtctgagcgaagctcctacacatttcgatcactgttagatggcggtgcgcagctagcttttggttctgactggcctatttcagacatcaaccccttgcaagctatccgatccgcagtgttccgcaagcctcctggatgggaggtcccctggatccctgcggagcgcttgaccctggatgaatcactgaaagcgcacacgatgtctgctgcctacgcctgcttcctggaccacgccgtgggcagcctttctgaagggaaatacgccgattttgtggtggtaccttctacatcgtgggacgaattctccagcgatttgccggggcatgtcctggcgacgtacgtgagcggcaggcaagcttatccatgacagatagcagttgtgtaagtgttggagaccaaaaagagcagcgcggacagtccggccctgaggccggaaggccggacgatccgcggtccggacagtccgcggtgatggcgcggacggtctgcgcgtgcgcagagtcagttaggatttctagtttctcgcgggatttgttacctaaaaccgcgggattaactcggaaatctgttggaagcggatccagacctcccctttatatcgatgaagggctacggccgattgaactccccaacaatcgaacaaatcaagtctatttctcgtttttaccttacgcattaggaatagttctagtctagttctagtttagcctctcaatc

SEQ ID NO: 35485 - DNA, 1605 bp, Zea Mays
ttgggctccatgtgttcgcatgcttggtgagtcgcaacagacggtttccatatgattaccccctgatgacatcaatgatagacaggtggcgcccagagacaaacacattccatcatagaattggtgaggtcaccccaactttgcaagatgtttctatgttatgtggccttccattgaaaggcaaaccagtgtattctatcaatgtgcgcaatgattggctggaagaccttaataaacggttttcaagtattccatggaaggagggaatgaatgtaccggaggttgaaaaaatcgataccaaacactcaaatggcccactcctgcattggctcaaatctctcagtggcaacgttgcagataagttcttcataacatatgctaagcttttagctgacatgaataacagagattgcatttatagttgggggtcagcagtactagcagcaacatatgaaggactttccaagatttgcataacaacaggactttcaatgcccaaggtacgcacacttacgggatgcccattgcttctcaacctctttgtgtatgagaggttcattgaattgcgtcctcgattaaaaaatgcatacaattattcgactccggacaacatggatggggacactatgggttcacggtggtgctgaagtgagttgaggtgggctagcgaggatcctaagaaggcacgtaaaacattcaccgaaatgaatattggaaaaccaaggatggcctcatcttcaacaacactgtccagaagcacccggtagagcgggtgatgcgacattttagtttataccaagagcagttgttggttgcagtagaggatcagcaagaaggtgagcagttgttggttgcagtagaggatcagcaagaaggtgttgcatggccagaaagagagccaacaaatgtactgaaggaggaaagggtacacgatgttgatgcattcaaggagtacctgaaatggtttagggaacgttcacgtgtacgtgtggctttcattcctgaggatcccagaatgaccaacgaggatcccaaaatgaccaacaacaaccatcttctttcaaaagcaataagttgatattatcacatgggcccaggagaaaacggcagcagactacaaccaggagactgtaacagatgaggccatgatattgttagatatcaatgtgaagtgcaaagaattcctggattattataatgaacttcagccaacgaccttggatgcataggatgaactaacagaggacaaaactcacacaaccatggatacagacgtcaatccaaattctgcttcagtttgtaacggctcttaaaattctacttccttttgtgaaggtggcagtcgtgaaggtggccatgaacaaaaaaatccaaacacttttgtgagagaaagcaggtcaaaaaggcgggctctgtataaagcttgcatagatttggcttgtacaaaaagtgaaaatgatacatacaaaaaaaatcataggaaacagggctgctttggcagaattatcaagcaaatatctgcgtcacctaatgcctgtgtaagcattttgtttctcaaatgttaaatcactctcaaagattttctttgctgataaaatattccta

SEQ ID NO: 35486 - DNA, 3039 bp, Zea Mays
ccacgctcctcacgagtcaccggggaggcggggactagcgcttggcaaaatcaacgaacgaccaacgcacagtcaaacactccgacgaccccttcctccctcacccctagccgcttccccggaccccgcgccgatcccaccgaacccatggcgtcggagatcgaggtgctcgaggacaccaccacctcctcgacctccctcgtcgcggccgcgtccacggccccttccgccgcggagggcgcaggggcgccggcggagaacgagtcgctgaagaacgacgtgtacaccgcagcggcgtacggagatctggagaagctgcagcggctggtggagggggagggccgcccggtcaccgagcccgacggcgggggctattacgcgctccagtgggccgcgctcaacaaccgcgtcgccgccgcgcagtacatcctcgagcatggagcagacacaaatgctgtggatcacactggacaaacagcacttcactggagtgctgtacgtggtcatattcaagttgccgaactacttctgaaagaaggagctaagatggatgctgctgatttatatgggtatcaggccacacatgttgcagcacagtatggtcagactgcattcatttaccgcattgttgcgaaatggaatgctgatccagatatccctgataatgatgggaggagccctttacactgggctgcttataagggatttgcggactccatacggcttcttttgtttttggatgcttataggggacggcaagacaaagaaggttgtactcctttacactgggctgctattcgggggaaccttgaggcatgcactgtgctagttcaggttggcaaaaaggatgatttgatggtgaaagacaaaactggcttaactccagcacagcttgctgccgataagaatcatcggcaaattgcgtttttcctcgacaacgctagaagggtacatgacagaggatgtggtgcgaacaccagatttgggaaattgtcaaaattaggccttgcaccttttctttggtgcaccattattggcatgcttattacatacgtacactctgttatattaggacaatatgtcatgactatgacagcaccatttgggatgttcgcatggtcaggagtttttcttgcaactgctgggttggtcatgttctataaatgtagcaggaaagatccgggttacatcagcataaatacaaggggctcgcaaaatcaaagggacgatgaaccactgctgaagatggagttagaaaatcctgcgcttctttttggcaactggtcacaactttgtataacctgcaaaatagtcagacctgttcgttcgaaacattgttctacatgtgatcgttgcgtggagcagtttgatcaccattgcccttgggtatctaattgcataggaaaggtacatcggtacatgtttccaatgtgatttcatactttcatagttgtggtttaatgtacctgccttctctattgtatttgagttaaaaacttaagatactcaagcaacaatgcctgaaagcttgacatcaacatataatcaacgatgaaatttgataaaagttgacataaaaatcatgaagaacaaatgggaattcttcatgttcctcaccttagaagtttttgcaatgatcattactggctctgctgccattataagacttgtaagggatccagattctccatcatcttttggtgcttggattcattattctgcgtttcagcatcctggggttgtttcatttctcgcattggattgtttccttttctttggagttgcagttcttacagtttctcaagcatcacagatagcaaggaacattacaacaaatgagatggcaaattccatgagatatgcatatctcagaggcccaggtggcagattcaggaacccgtatgatcatgggattcgcaagaactgctctgacttcttgttaaatggatacaatgaggacactgaacggctagaccagacattgcacactgatgaggagatgggaatgatacagatgacaagagcggtttcgcagaatggtgacaatcatttacatcatggtaatggcacggaacatagttgcgctgattcacaggcaagcccaaaacctcatagccaagtgggttcgcctcagtgttgtgatcacagtaagaggactgataggacactgttgggcctaggtttgggccttgggcgaaacagtgcatcccggcagtatgttcggtctcttatcccattgtgatctatcatttggatatcatgtgttcgtttcagtgtagattggatttgttcactgctccggccccatcttttatacgtgcccttgacatggttcaccatgtaccattggctggtcagggacattgttgggccattagcacaggaatactgagatatatctagtgtttgtagttttggggtgaactcagagaagttgaaggtaacgacttggcttgcgaatatcagctgatctgcactcgggaaatatcagagagcttgtgcagaaaaggtaacagttatgggcttatggcagatgcagtagcatgagatgtcttcataattgttgtgtacatcaggttcagtggtcttgggggcctccttcttctgaaggtcttaaaaacacggttaaccatttattttcagtatgttattaagtattacaggagcttcgttactagaaaaacttcgacatagatcaatgaaagcacgacgaagcaagctttgttacgttgtcacagtaagtcgatgtagggagaatgtgttgttcaagctgctgagtgcaaatgataatattgtccctgtgacatttgtaaatcttgtatgtaatctttgagggtatgaatgtaatatcgtacgaattgtacgattgcttataaatagatgaacaatactgttcacactgaattgagattgcattcacgctttcgctttcaagcaagccgaatatacaaatgtaatgtacatcatgtatctctttgttaatatatgagatgtatcttgatgttgtttgacatttgatatgaaataaataatcagcat

SEQ ID NO: 35487 - DNA, 1967 bp, Zea Mays
cgccaagcggataataaagcgtcccccacctccacctcctcctccaacgacaacctccacctcgccttcaactcctccacgctcccgtcctctccacctctcgctcccacctcccccgccgtcaccaccaccaccacagcctctcccccgcaacgcgttccttcccggtgcatgaaaccctaaacctataccccactcccctccccgagccatcctctccccccgcggcgatggccaaggcgctgctctactcctccctcctccccgggctgccccgcgctgtcgggagcagccggagcgctgccgcgaggctgctgctgctcccgcctctccggctgcggcgctctacacgctcgccgacgcagcggtagccgcggcggacgccgccgcgggcgcgggggacgacgccggccaagctgcggcggcggtccagaagaacggcggctggttcggcttcatctccgaggccctcgaggtcgttctcaaggtgctcaaggatggtctctcagcagttcatgtgccgtactcctacggatttgccatcattcttcttactatcattgttaaggctgcgacattgcctttaaccaaaaagcaggtggaatcaactatggcaatgcagaatttacagccgcagcttaaagcaatccagcagagatatgcgggcaaccaggaaaggatacagctagagactgctcggttatacaggcaagctggtgtcaaccctttagcaggatgttttccaacattggcaacaatacctgtatggattggtctttaccaggcactttcaaatgtagcaaatgaggggctattgacagaaggatttttctggattccatcactgggtggtcctacaacaattgcagctcggcaaagtggtgctgggatttcgtggctcttcccatttgtggatggccatcctccgctaggctggtatgacacgatatgctaccttgtattgcctgtgctacttgttgcttctcaatatgtctctatggagatcatgaagccacctcagagtgatgacccgtcacagaagaacacactcctcgttttgaaatttcttccatttatgattggctatttctctttgtcagtgccatcaggattgtctatttattggttcacaaacaatgtcctcagcacagcacagcaggtttggttgcggaaaatgggaggagccaagcctgtagtgagtgagggggataggaggataattacagcaggacgagcaaaacgctctaatgctcaaccagctggagaaaggtttaggcagctaaaagaagaggagagcatgagaaaagtcaacaaagcactcgctgcaggagactcaaatgcatcgtcatcaacgtatgacatggaggatgaagagtcggatgacgagaccacagaagagggagggcccgtggaggaagcatccagtactggcagtgacaagaagcctccaagttactcagggaagaagggcaaaagatccaagaggaagcgcatggtgcagtgatcgtcacagctcaatcggatgcgattttcgccacaactggttgattcagttgaccagttaggtgccgcagtggatcacggagacagttttggcggtctgctggagccctatatttggggtgcagacaaaatgaacagcttccggggtcacaggtatttgctgctaagcttatgcaaatggaggtagctgagtatatatgctaggcctgagggtgagtgatggaccggagaacaggagtcgggtacgcgtgcaagcagagagacagggtctgtagaagtagataaggtgtaatctctcgtcaagctgggttccagaatctggattgtcctcaccattcgtatgcattgcattgtatttgctttcctcttgtaacctaatgaaccactgttttggagggtatgatcgcgcaagctgacaaccatccagtcgtatacaaatgagttcgaattcgtcttaaaaaaaa

SEQ ID NO: 35488 - DNA, 2147 bp, Zea Mays
acacgcctccttccttccttcctagcccttccgtcctgtccagactccagactccctccacaccagtagggactagggaggacgccgccactgcgacctgccggcagacgtctgccccctgcttccggcatccggactcccctgcgccgcagttacgttacgccggcgatctcctcggctcaacccggggcctttctctctgcgccccgccagctgctagcaacccagcaggtgaaggagaatggcgggaggtggcacgggcatcaggaaatacatgggggctcttaaggacaccacaacagtcagcatagcaaaagtaaacagcgattacaaggagctggacattgctattgtgaaggccacaaaccatgtcgagaatccaacaaaggagaaatacgtgagagatatcttttaccatctttcacccggaaggcctcgggcagatgtcgcctactgcatccgcgcccttggtagacgtctttcaaagacacgcaattgggcggttgctatgaagacattaattgtcatacaccgtgctcttcgggaagttgatcctgctttccgtgaagagcttattagttatggaagatctagctcccatatgctctatctgtcatactttaaggacgattctagcgcagaagcttgggattactctgcttgggtgcgcaattatgctttatatttggaggagaaacttgaatcattccgtgtactgaactatgatgttgaaaaggatccgttgcaaattcgggatcttgatacaaatggattgctcgatcagttgccagctttacagcagcttcttttccgactacttggttgccagccacaaggggcgtcatcttataacgtcataattcagcatgcactttcaatggttgctctagagagtgttaggatccaaacagccatcaatgacgggatactcaatcttgttgacaagttctttgagatgcagagagatgacgcaataagggcactgggcatgtatagaagagcaatcgagcaggcagaacaactttcagaattttatgaagtgtgtaaaagtatacatattgggcggggtgagagattcctaaaaatcgaacagccgcctgcatccttcttggcgactatggaggaatatgtgagcaatgctccccttgcttcaacagttcaaagaaatcaggctgtactggccatagaggacagcaaaaaatcagaagttgaagaatcacaaccaacgctgcctcctccccactctccagctcaagaatctgggcctgagccagttcaacaagtcccacctgcagctgatccaacagatttactgggaatcaatgaaccaacccctgccacatctgaaatagatcaaaagaatgcgggggccttggccatggttccacaggataatgcgccaaaagcacctgcttctactaccagttctggaagtgtggagactagctgggagctggccttggtcactgcacccagttcaaatgggactgctgtcactccaagcaaattggccggtgggctggacttgcttacactcgacagcttgtacaacgaggcgcaccgaagagcgcagcagaacgcaagctacaacccttgggagaccaatccagcgtcaggcccagtgatgcagcagcaaatgtacgacccgttctacgcctccaatcaccccgtggccgcagcccgcaacgtccagatggctgccatggagcagcagcagcaacaacaacatgccttcgtgctccagcagcagcagcagcagcagatgattgtgatgatgatggcacagcagcagcagcagcaagcttcttccaatccgttgtatacggccgccgccgcccacacgtatggtgcaggggtgcagctccacgcgggcaacgcgtactctggagctgggatgatgtaagcgttgcacagaacctgctgtctggttctgaccggcatcttccgttctttcttgttttttctcattattttcttgcatttttttttacattgtaagaactgtgttagggctagaactagaaatctgatatagcatcaatatgagcacattcttgatgttcatgaccaataatggtcgatgcgatgatggctttgaactgaagcactaaaatagtatcgatccttgcaaatttaggacttgtttg

SEQ ID NO: 35489 - DNA, 4767 bp, Zea Mays
atggggctcaacgactggaacaaatcctcgtcgatgctcagggatggttttagggtagatggagcatcccctacatgtgtcttccatgggatggcccaactgcagatctgttcctgggatactacacaatgactacattgcatactcggagctgctcgacaggagcgtcgtcggcggtgctgtaaacatctcctagagtcctcgggcacaagaaggtcaggcggtgatgccaatgcagatcatccaatcagatccagaatgcctgccactgtatacttggagctgctcgacaggagcgccgttggcggcattgcaaacatctcctatagtcctcgggcacaacaaggtcagccaatgacgccaacgcagatcatcccatcggatccggtattcttgacgaaaatccctgaagatgggaaacccacgctgctggtgcaaacaccgccggtgatgccagtgtaggccccattgcccttggacgggatgtcactgactacaatggagtacctttctttcttcgatgtcagtcgattatgtttactatggaatatggatgttctcttatatgcttggttgtagctcctgacatgcagttgtagcttggctcgaggcgggcatcagcgacgacaaacatcctgctcaatttgttgtatgataaatactgcgaaacaatgctggtgtttcataagatgaccgtgcagctcatgaaaatccagagggtggagtcgagcgagacgacgtggccggcgcggcgccaggtcgtggcgtgcgccgctgtttgctggtcgtggcgtgaggtcaccaaggaggtggtgaagacgctcaaggagtgcggcaggatcaccttccccatgtcccttaagcagaggctgttaaagaagtgcttggatctttagcaaagtttgcatgtgttttattccctaatattcctgaagcctacttggatcgctggtgcgacgtttacagctttggtgtcatattatgggagctggcaacgcttagaatgccatggagtgggatgaatccaatgcaggttgtgggggcagttggtttccaggatagacgacttgatattcccaaggaagttgatcctctggtagcaaggatcatattcgaatgctggcagaatgaccaacaacgcacgggcatatacctagtacaccttaaggctggagcgagggcgtccaccactcaccgtgcccccgctccagcccccgcccgcaacgtcttcctcccggcaatcccgcccccgcccacgccgtcccttcccttccctgcatcccgcccgcgccgtccctccctgcaatcccgcccccgccagcgtcgtgtccccgccgcacatctttcccacctctttctttcccttgctctgctaacgcgccgccggtccgtcggttgccgcctatcctgcttgctcgcgcgaccgctgttcatggtgatggtggatgaaggcggcaaaggagaggcgcagccgcctggattagacccaagaacccgccgatctgcggcgaccagggcgaccgacgacatggatggcggtggccgaggagaggagtgggagggggcccccccggctacgtgctctcgctcccggcggcggcgctgcccctgcccgtcgtcgtctcctgcctggacgccaccgtccggcgcaaggggcgcaaccatatccgccaccgtggccatccgtcgggctggccccgccgccccggcccccggtccacacactcccacgcctgcagaggagaggtcagcgaagagggtcaggatgtgcctgcagtgcggcgcggcggtgacgccgcagtggaggtcggggccgatggggcagggcacgctctgcaacgcctaccgggttcggctcaaggtggccggggtactgcgggatcagggccggttgctgccggagtaccggccgctggcgagccccaccttcgagccgtcggagcacgccaacaagcacagccaggtgatgcagctccaccggcagcggaagagccagggccagcaccaccctctgcccgcggagcatccgcgagccatggacgtcctccagtttccccagcggtggcaggcctacacggcgctccggagcgccggcaagagcgtcgagataatcttcgtgtcgttggaccgcgacgaggccagcttccgggaccacttccagggcatgtcgtggctcgcggtaccgttcgacgctgctggcctactacggcagaagctgtgcgcgcgcttcgccatcgagcgtatcccggcgctgatccctctgtcagcgtcagcgacgccgtccagcgggctgggatgtggagaggacgcggtgaggctggttggcgagtatggagtagatgcgtacccgttcagtgcgcagaggaggagggagctggagagcatggacgatgccaggagaggaggaggccggcttcaggagcttcttggctgcgaggagagagactatgtcatcagtgcagatgacataaagattcctatagctgaccttgctggcaagacagtcggcctgtactttggagcacactggtgcccaccttgccatgtcttcaccaaacagctcaaggaggtgtataacgagctgaaaatcttgagaccggtaagcttcgaggtcatcttcgtctcgatagaccgcagcaagggggaattccaagcaagcatgagttcaatgccatggcttgccatcccttattctgacgctgtaaggaaaaagcttacaagaatcttcgttgtcaagggtatcccaggactcctgatacttggtctggacggtaaagctctaaaaacagatgtccatcgccccgagctcctccccacctacgaaggctccaggtgtaataaaataaaaggtatcaaggcgcctaggatcacgcctaaaaacgtcatcagatttagcagctatactgataccttttattttattacacctgaagcttggtactggtctgagtatctttatctcaaaaaggaatccctcactgttgttatctcagatgtgaaatgcgatgacctaaaagaggagggcaaggtacaacaaactaaaaggggaaacagtattcacgaccattctagttcacactcaattcggtcgttttctgcattaacggagtcaggcccaggcctaacctcagttcatccgagcagccgaacacgcccgccgccattctacgccctgctgcccaggtcggacggaccctttgccggagacgagcacacgccacagcagagcagcgcgaagcgagagatccaatggcggcggcggaggggcagtgggtgctcatggcaacggggcggacgccgactaacattgcggtgatcaagtactgggggaagcgggacgaggcgctcatcctccccatcaacgacagcatcagcgtaacgctcgaccctgaccatctctccgccaccaccactgtcgccgtcagcccctcattcccttccgaccgcatgtggctcaatggcaaggagatctcgctattaggaggaaggtttcagagctgcctcagagaaatcagaaagcgtgctcgtgactttgaggacaaggagaagggcgtcaagatcaagaaagaggactgggacaagttgcatgttcacatagcctcgtacaacaacttccccactgctgctggtttggcctcttcggctgctggccttgcctgtttcgttttcacccttggaaagctgatgaatgtgaaagaagattatggagaactttcttcaatagcaagggatctgggagtgcatgccgcagtatatatggtggttttgtgaaatggtgcatgggagaaaaagatgatggaagtgacagtattgccgtgcagcttgctgacgaaacacactggaatgatcttgtaattattattgcagtggtcagttcaaagcagaaggaaaccagtagcaccagtgggatgcgagatagtgttgaaacaagtcctctcttgcagtacagggcccagacagtggtgccaggtcgggtgttgaaaatggaagaagctatcaagaaccgtgactttgaatcatttgccaaattaacttgtgcagatagcaaccagtttcatgctgtatgcttagacacgagccctcccatcttctatatgaatgacacgtcacaccggataattagccttgtggaaaaatggaaccactcagaaggaaccccacaggtcgcttacaccttcgatgctgggccaaacgctgttctaatcgcccaaaaccgtaaaactgcagcacatttcctccagaagctcctatactatttccctccacaggataatgatttgagcagctatctggttggcgataaatcaattctaggtgacgccggattgcattccatgaaagacgtcgaggctcttccagcacctccagatacgaagataccggatcagaaattcaagggcgatgttagctacttcatctgcagcaggcttggggcaggtccaaaggttgttgttgacgaaggtcaagcactgatcgattcagtcaccggacttccaaaaggcgtgtagttctagatttaggttggaataatggtttaagctggggattaaagacaatggtatcatacaagcaacctgggccggccaataaagatagaacacgttctcgccttttgtttttctccctcgcctagtatgtggctgaaatatttgtttcgctattttattgagcacttcagctgagacgcaagcggagaataataactttgtcgtgtaggagtactgcaggagcgctgcatcttggagctatgcctatgcgtgcgtgcgt

SEQ ID NO: 35490 - DNA, 1670 bp, Zea Mays
cagaggggttgctcgtgatgctttggatatttggactcgggctgaggagctggatgcagacggggatgtgcttagcctattttaatttgaggtttgtgaatgttacattttggagaaccccagaagctgcggaatcacacgcaaaaatggcacatagtacaggcttggtacaggctatcctatttgaagttgtggacagggataacatcgggggatctgcctatggcggacagaggtccatatgttgtaccccagatcttgctaaactagagggctgcaagcaaggggaagtaatcaggaggccatcctctgatgatccagattggcccttcgtgctagacacacacttcagtgctaatcacctttcagtgaagttagaagatgagccagtgcgcattacaaagacaggcatgtacaacttgttcttcatatcctgtgatccaaaactgagaggccttactatgagtggcaagactatctggaagaatcctggtgggtatctaccgggacgaatggcgcctttgatgaaattttatgttctcatgtcgctggcgtatctgttggtaatgattgtttggtttagccagtacgtaaggttctggagggatatattgccaatacagaattggatcactctaatcattgcacttggtctgtttgagatgacactatggtactttgagtacttgaacttcaacagcagtggtgtgaggccagttggaatcacaacttgggtggtcactgttggagctatcagaaaaacagtttcacgtctactcatcctttctatctcaatgggttatggtgttgttcgtccaactttgggaggtctcacttccaaggtgttgctactcggacttacatatttcctggcgtctgagttgctggacattgcagaaaatgttggaacaattaatgatatatcaggcaaagcaaggcttttcctggtccttcctgatgcatttttggatgcttttctcatactctggattttcacttctctttcccgcacactagagaagctacaggcaaggaggagttctgtgaaattggatatatacagaaagttcacaaatgcattggctgtttctgtgatagcttcagttgcctggattggttatgaggtctatttcaaagcgacagaccccttcagtgagaggtggcagagcgcatggatcataactgccttctgggatgtccttgcgtttgtgttgcttcttgtgatttgttatctgtgggcaccttcccaaagctcgcaaagatatgcatattctggtgaagctgctgacgatgacgatgaggaatctcaatctctgacgaaaggagatggtgaagtagggatggtaaaaattgacaaggacagaaatgctggtgtcagcagtgctttcggcttagaagatgaggctgaggaggacaagcgggaatagccatttcttgttcctgatgtcccctaggtcccagaaacaatcgatattttggagcagcaatattgcaagaatacttctttttcaagttacatgtggttgctgtagaagtgcttggtattgtaaacatgcgaactctatttaaaagaaaaggattaggaattctaatccaaaggcaaaaactaacgtgcaattaagctttacatacaaccgtgctgcaattaaactatcaaaagtcatgttttt

SEQ ID NO: 35491 - DNA, 4035 bp, Zea Mays
cgcatgctcgctcgcacgcgcccgcgccgccgttctacttccaagtacagctcgcctcggcttgccagcgccatcttttcttcctcccactccctcacctgaccggtctgattctgggtcgatgtcggtcaccatggtccgacccatggtcggaggagagcggagacctgcggtagcagcatggcgcggacacggggaacggagatcagtgaaggccttccgcggaagagtggcggggaagagaagcgacggggaagcgcactgccgcgctcacatggccgaccaagatctcgaaaatgtagatttccaagcaaaaatgggcaaagcgcctctaatcgctctccccccacaataggcttgccatttgttgccatgcaaccaacgagcgtccagcaccaagcaaacgagagaaagaaagagtgggtgtgagcactgagcatggagctcgccttgggggccatggccagcttggcccccaagctgggcgacctgctcatggaggagtatgtcgtgcacaagggcctcaagcccgacatcgagtccctctccgatgagcttgtgatgatgaacgccgccctccttgacgcgtcccggattccacctgaccagctcactgcggtggaaaagctctgggcacgcaaggtccgggacctgtcgtatgacatggaggacgccattgacgatttcatcctgcgtgtggctggtggtgacaactcagccaccgactccaaactcttaaagaagatccttgtgaaggtcaaggacgtgatgtcaataaagaagctcaaggatcgacgccagatctccgacaaggtcaaagacatcaagaaactctccagtgagttggctgagcttcgtgccaagtacacagtaaggggtgcaggtgctgatcttgctgcgagcatcggcattgacccccgtgtcatcaatctgtacaagaaagagtcggatctcgttggcatccaggagtcaagggacaaagtcatcaggatgctgtctttagggaccaaatatgatgatgcgcatgcgtctcatcaggatctaaagatagtctctatagtcggggttggaggattaggtaagactactctagccaaaacagtgcacgatatgcttaagaagcaattcagcccttctgcttttatttctgttggtagaactcctaatctgaatagaacattcgagaagattctagtggaacttgatgccaagtataagcaagttgacatgaccagatgggatctagaacaatttggaaaagaactgcatgaattcttacagaacaagaggtacttgatcgttgttgatgacatatgggatgttggatcatgggaagcgatcagatatggcttgaagaacaataattgtggaagtagaataatcatgactactcggaattttgagcttgtcacgaaagtagaagaggtttatagattaaaacctctttctaatgaaaactctaagaaactattttacaaaagaatacaaagtcaggaaggagaaagtcttgatgatgaactgtccactgaaatcatagataaatgtggcggcataccattggctatcattgcaatagctagtttgttggttgaaagaccatgtgaggagtggtcaaaagtgtatcactcaatcagtcttgggaatggagacaatacaacaaagatattgtcctacagctactatgatcttccttcttatctcaagccatgtctactgcaactaagcatatttcctgaagactatcagtttgatacaaatgctgcaatatggatgtggataggtgagggtctagtccatcttgagaaagaggagggtagcctatttgtggttggagaaagatatttcaaggagcttgtgaatagaagcatgatccagccgatagaggacaaatatgatcggttggtagaagtattccgtattcacgacattgtatttgatcttatccgtaagttgttgaaagatgaagacttcattacccttttggacagcggtgggcaacattcacctcaagctagtttaagaagagagaagaaaacatgtgtgcctcgctctgactgcaagctacgtcggctggctgtccgaaatcaccatgtgcagcgcttccctgaagacatcatggacataccagaggcgttgaggtcacttaacattatatattgtaatattgcgattatgaccccacttcatagtttcagagtctgtcgtgtgctatgtatagaatacagctatgtaccgatcagcctaaagcatctagggaagttgttgcatctcaagtacctagagctatatggcacgcctgttgatgagctccctaaggaaattgggcatctgaggtctcttcagacactgttattagtcaatactggactagacgagctgccaccggctgtttgctcgcttacacggctgatgtgcctgatggctgaggggttcaaaaggttgccagctgacaagatggggaacctaacgtccctggaggagctacggctagagagcatagttggtcagagtgccacccaagccctagtggcagagcttggcaagctgacgaggttgagggtggtcaacatcaccttttcagaggagcttgaggagagcttgcaagaagcattggtgcaatctctgttcaatctgtggggacttcaggagctagcactttcttctaaatggtcgcagcagggaagcgctatgtggggagactgggagccaccaaggcagctcaggcgcctgattattaaaggtatcatcttctcacgacagcctcgatggatcaaccgctcttgcatggcacacctctgcttcttatctctggcggtgcacgctgttgaagcacaggacctagataacctagcgaggttgccagagctccggtacctcaagctagatggtgtcagctggcctccaaggtatgatactggcccggacgacttcaggaatctgaggttctgcgatgtgggtacaatgctcgtgtttcatatgggcgccatgccaaggcttgaagagctggtgtttggagtttgtgcaggatactggagttgggaacacaatggtgtgctgttggagcagtgcccaacaatggatgtgattgaagatcttgacttgggcctggataacctcctttcacttgagcaagtcacggtcgtagtcgactgttcaggcgctactgctgcaaaagtgcaggaggtggaggccgtggtcatgcgtgccatggaaaatcatgccaaccgtccaaccataaaaatggaacgagtatgtgaaaacttcatcttatctgacaaagagcaggaggatctgcttcagcgacgcattgaaaaggaaggccgcttgctcgagttcaaggataaatctgatgctttcttcatcacattcctgcggttgcttcgacatcctctaaaatccgttatttcccacgactgtgcgggtgccagcatgtgcgaggtgcagaaagtggaaccagcttggagacatgcagccgaggttcatcctaaccatccaagtattgaactgatcagaaaaaacaacgacgaaattgcctcctcatctgaccatcccaacacagagctcaggaattgataactcggtatgtccaatccttccaaaccagccgcagctttcacgttgtctcatcccttcctacgggcttggagattttagatgctatatttatcgagtgatctagacgacatgattgagggtctatatatcgtgtgtttatgacttatgtattgtgaggttaaaatttatgagaggacatgtatgattcattatgtgtggtcaagattgcattgtgtgtaattgagatttgtatgtggatgtaaatgaataattgtgtgtttaagatttatgtattgtgtggttaaaatttatgagtgaacatatacgatcaattgtgtgtttgtgtgtggtcaatactatgtattgtgtatttgtgcgtgggcgtgaatgaacaatcacgtatagttaggaattatttattatgagcttttctgaaaccatggcagctgactctgctggtaatgaacccacagccgcaaa

SEQ ID NO: 35492 - DNA, 2660 bp, Zea Mays
catgttcctccctgccatgtacacttgcatctgcataccttcttcttgacctcaatcgtaacgtttgacgccagaaaccgtcgtgtatcacacagccggattcacccataggcccaccgattcccatatggagcccaccaaaacccaacccattacctgatcccaggcggcagcggaaacgcaaggagaggggcggcgatgatacagtagatttcaaactcaaactgaccaccagagagagatagaggggagagatcggagaggaaggacgtttggagcaggcggctattgcaggctttgcagccgccgtcctcctgattcgggcccccctccccggatcgctccagattcgcacgatttggggatcgtgcgtttcgccatcagatcgggagaagaaaaatcaaggtgaaggggcaagtttctgcaacttaaataaatagagtgaatatgactgacatgaattctgatgagattcttgaggttcctgacactcctgaccgattacagcagtcaaaataccatgtttccagctctattgttgggagggatggtacaatggcagctgctaatccatcaccacagcgcaaatttagaattagattcaagaacaattccgtgcaaggttcatcaagtcaaaataatggttgtagcatactgcctgcagctttagatactgatcatattttcaaacaagctgaagcagcacagattctggaactgtctaaagactataaggcaaaattttccctacagaaacctgacagcacaaggatatctgttgacagtgaaaagagggctggaaaacatggctttgatcagagcagaagcatttcgaacaatataagttgtagtgtgactggaggaaggaaccctaccttccaagttaaagatggagaggttggtcagcaagatgcaggtcatcagagtgcaaactttctagacataggaccaggttttcctactattcaagtgggaaaaccaggatacagattatgcactcgcactactgataagctgaaaggtgtaacaggtgctgatgtttgtccaggatcaagttctggggaggtcaaaggggacttgatcactaacaaggtcattgcaggacctacaagccctctgcgtgtttttcctcgaaggcatgtgggccaaaaaaggctggtacgcaatggatgtatttccccctctaacatagccaagacagatgcaaaagttaatgaaaaacaggaaatgtgctctttaagtgaacatttggaccatccgcatcagcctgatgcatttgacggaggtgatgtgattgacctcacggagaattcaccaataatgacaaggcagagatctgaagtgaacaataaattgatgtctggacacaatatggacacaagggccgcaaaaaagctgagaacagacagatttggcaggactttggttcggcagtccaaatgtcatgcaaacaacagcagttgttctgaagttagcttatcaggcctcaacaacaatggaaaaggaattgactgtgatatcttggatagtgatcaaactggagaagctaatttgaggggggttgatcttagtactgctggaacttatctaaacaaaaacttttctgatataagcacggagcaaggttggagaacaacacacaaccacacaagtaaattacccatttcgtttatgggtaatataactagcagttccggatgggaatctggatcttctaccacacgatctaatcaaaaccatggatctgctggaggcaagcatagctctgttagtggagcaaacataatagttcctgataagatagggaataaaacaataatgcttggtagagaaaggagaaaacaaacctcaacttcttcccatattggtgaaagctctagtgctgctgacgaacctagaggtgatcttcaatcgtcaaaaatatcagctggcccaaatcatagcagtcatcagcataatattcctaagcacaattggagtcggatgagttattggctcgccaactccaggagcagctctacaatgaatctgctcgttttgccccaacagaagagattgatgcaattgtagcaatgtcacttcaacatgaagaagatactcatcggacatctaggaccttaaggaggttccaaaaccatactagaggtgctcgggctactcgtttgagttcttatcgaaatgctcttagggctgaattagcaacagcaaacaatatgatttcccgtcagcggaatactgctccaataaatttgggattgagagctgctttagcaagatatcctggtgctttgcacattcaaccaaacattgacttaaatgactatgatgcactgcttgctctggatgaaaataaccaccagcacactggtgcttcagaaagccagatcaataatttgccacagtcagtagttcagtccaatagcattgaagatccatgttctgtctgccttgaaaatccttctgtgggagatactatccgccatttgccttgctttcacaagttccataaagagtgtattgacgagtggcttaggagaaagaaactgtgcccagtctgcaagtttgggattaactgaagtttgccgtaccagtctacagtggagttctacttggtagtggcagcgacgaggtgctgcaatttctcatacgggatgctttcc

SEQ ID NO: 35493 - DNA, 4157 bp, Zea Mays
acaacatcttcgtcgtcaacggggtcagaactggtggccatcgaatctgcttatccgcaactgcatttcccacgaggagcctaaagtccttgtgccggagtatgcattgagctatggtgattcagtagaagatgtatgtctttggtggaaaccataatggtcgttactttggcgacattcaggaggagttcttcagcgccttcaaggaggagatggagatcaagcgacaactcgagaaggtgcaggtggcatagagggatcattgttgcccattgaagaaccactactagaataagaaagtccaccaattttttcagcaccattatttccagcttcattgtaactgctagacaaaataaggtactacttaactgagaaacactacttctagccacactaggattattcaagaccagcttgtggcacttatttgtttgttgattgaatccaagttttgtagcagtcaagtcattagatctggttttgtcaccttttttactaataggatttgtttacatggtttcagcatctggcggtaaagttgtttatctttttcatacctacaatctgaatgaccttattgcgcctgtgtatttgtagccaccacaacgttgactgtgcctagatttcattccctgtgtatttaagtgtcttgttggaatgcttttgatatttgactgttgtagtatctttgctaccatgtgtgccagtttttcaagttgaaacttcatcgtgctaacaatttatttgcgatattttgtttactgctgcctgtactccctctgttccaaatcagaatacatttattacatcagataggtacattatgaaaagaatctgatgatacttatttgtatcataaattttattactttattatttaaatttggtcaaaactaagatgatttgactctctaaaaattttgaataacttatacaaaagagggaggcaactaaggaaataggagtctgccttctattttgttcatcttcatccttcaacaacttagtacattagtttatattgtttttttggtgattagcagtttagctctcttgatgtgttgctaactgatattttatgatgccatattccaaaggccccctggtgctttgccatcatctctgcttggatatgaggcactgacaggttccctagatgattctagatttgaagattatcttcacagtaagacatgctatcatttgttattgataggtcattttccttctctatcacatgtatgataatttttcacttgttattatatttttttaatcaataacagaaagatcctgatgggatacagtgatcatacatgcactcaacatatcatgatcttcttttattacaaattaaagcatgtcaccatctttccatttcaggactgaaccaagattgtgagcacattgtattgctaagacaattttgtcgtacaacgttcgtccaccctccatttgtagatttgtctgcatctactctttgcggatcgtcgactcattgttcttgtcatatgtgttcgaacagtttctttcagatgtcaagaggtggatcttgtttctacagtgagttggtgatctggagacgatcgagtgtagagtgttgaaggcacatctccaatattcctacacaaaaacacaatgcacatcaactaacagaagtgcaataccctctcatgtaactgtattgcaaaagaatatggtacttatgcacctaaggagaaagggaagaagcatactttttttggctctggtatgtgtagctcccattttagattttaccaagtatcaaatgtacatttcttattgtttgatgactaacatcatgcagaggtattaattttaaaaaatgacgctgaaccttaaaatatattcaaaccattcatttacatcatgcaaaggtatgatattaattccatggatcgatgagttaaatggctattttaagctaaagcttgttttcctttacaagaggtggttttatctaaaagaatatctttggagtggttcttttacattctatgaaaccatcctttttatttgttgccacatgtcagacgtcatatttaaatgtgcatacacaaatatactaattgttttagctgacctagagtttatctaaaagactcggataggctgaatgtatgagttgtttcttgctgtaaatatggattggtaacgaatagagaaattaggtttgctttgtagtattacaaaaatatatgaatccttgagaagagttctttctagaattgataaaatgaattggaatgtggagctgtggattgatgaatctatcaaacctattctacaattgtagcctgcaaatagtaaatacgtacctctgtgtgttcttaagtcttaacttaatatcctaattcttggcaggcttcatgtgttgtatctttctataaatatgaacaaagaataaggttgatggaatttagttgattattaaatgatttgtaagtgctcaaaatggatgacattaacttaattgcagagcaacattgtatagtcgattaaccgtgtttgtaacatatttattctctcatctttgtgttggagtgcttgcaacatattttgtacttgcatcttcttttggtagttaagagtgtaaccagacaactcatccattttcttccatttgcacccaaactttcattgtcttattgttgtcaagcgcataatgtgatcatgttttgcttggggtggcatgaaactatagtgacaatatcagtgtggccatccagtttctgtacaattcttgactacaggtcccagttcaagttagtttgccaaatttctatggcttgtgcagctagcatcttagtgctctttgcaaaaaaagagtattattaagggtttagtctttgagctttctacatagaaggggctacttgaaatcaccataaattttcattgctttcattctctcttttggtatttcagtttggttatggtttaactcttcttttgctatttgtgtcgaccatttatgtcacaataacttcactcaatactctgtacataactgactggtcatgatatcatatttcgataaagtatttatgacaatctaagacacacaaatggtctgtggaaaacctttggatggcaagcttgtatcgtatgccttccaaattttatagtagtaccattttttatttttgtttggatacctcttctaacagagatcttggtaatttgaacttatatggtcatctggtgcctgagcttggaaaattggagcatcttcagtatttgttatgatcaccgtaggcaggttttctccacacagatgggtttgagcaaccaggacattgttgcactttttggtggtcacaccctagttggtggaatcagggaagatgccacaagaacaggtttgggtttgagggagcttagacgtccaaccctttgatctttgacaactcttcaaggagcttctgagtggagagaaggaaggccttttgcagctaccaagggacaaagctctcctctcttatccatccttctgcccacttattgacaaatatgtagcagtatatatatctttgatccttgtcatttgttcggggtcagtttatgttaacctgggtggctgtaataaatatttgtcggccttgtgttttgttatcttcttttctcttgaatggttcatttgaagatggggtgaactaaactgaatatgtagtctgtatgtttttatggttcatttttcttttttatttatctatcatatctatcggagaagctttgtcatatgaagcagagtatggtaggttggtggggcattgcagtgcagtggcagcgacactctgattaactatgccaacggattgatcattgcatttcctctgggtaactcagcaggcaaggggcctcgaaatgcaatggttgtcaacaaagaaattgtgacagattggagtcgatgatatatatgtcgtcactttcatgtaatcgttatacactaacattctgtcgaataaagactagagtcgataataatttgccgtcgcaatgcatgggtactatactatttgtttaataagataaataaaaaaggaaaccctaatggtacttagatgtatagttttgtgagattaataatatgccatgtgtgaattgatccctggtataattttgtgtctcac

SEQ ID NO: 35494 - DNA, 1842 bp, Zea Mays
ctcgcgtccgatcgatccccatccccttccattgcgtgctggagccctcctccgcgcgctttctctggtgacgccgtccatgtctcctcctctcttcctgcacactgattgaggtcttcattcttctctctctcttcacccatgacacatccatccagccacccccactagctctctagctagccatcctcctcatcaccctctccgcctctgtctcttgctgtcttgcggcactgttcttagctgcaggtagctccgtccagctcgacggttctctcttagcagctaaggaaggcgacataaattataaaaggcgccacttgagggcagggccaaggaaagttgtggtttccaactcctcacctcacacactctcttcttctctccttcgttctccctcgcaaagtcagggtcactgaaagtagcggaagagcccaagtagttcttcgccaccggtaccgcatcgatcatcatggtgttctcctcgctcccgatcttcctagaccctcccaattggggccagatgcagatgcagatgcagcagcagtcaccgctccagtgtctcctcggcagcggcggtggcagcgaccaccaccacctcatgcctcctccgtccggcctggcgccgctgccggggggtcctgctgacacagcggcgagcggtccggcgggaggcggctcgtccacctcggcctcagtgcaagccgcggcgggagcgggggcaggggcgcagcctcgccccgtggtgtcgatggcggagcgcgcccggctcgcgcgcgtgccgctgccggagcccggcacgctccgatgcccgcgctgtgactcgaccaacaccaagttctgctacttcaataactactcgctgtcgcagccgcgccacttctgcaaggcgtgccgccgctactggacccgtggcggcgcgctccgcaacgtgcccgtcggcggcgggtgcaggcgcaacaccaagcgctccagcaagaagtcgtcccgcggcggcggcgcgggcgccacggcggcaacctcctcgtcctcgaccacctccacctccaccacggccactaccaccaccaccacgagcgcggcgcttgaggcctcgctggagggctaccaccactacctcccgctccagatgcagccgcagttcctgcagcaggctggcctgcacggctaccatttcgccgacgacggcaccggcgtcctcgcagctgacgggttcccgaggggcgtcgtcgcctcggggctgctcgcgcagctcgcggcggtgaagatggaggagcacggcagcaacggcggaggtgccatcgcggcgcatcatgagcagcagtcctactggcccggcagcaccggcggtggcggtgggtggccggtggagttcttgtcggggttcagctcatcctcgtcggggaatgtgttgtgagttgcatgtggccgcgtccaggtccacctgggcatgcatgatggggggcatgcatgcatggatgctgatgaagctgaactagctcaccatcctcaattagttctagggtttatgtggtgtttggaacttaattggcgtcgtcttcttcaattaggctggtgatgatcttgtgttggggtaaggtttttacatgttttttttcttatgagttttaagctggttaatgtcgtgcagttggtagttttgcatgtagtgggaagtgcatgtgttgactcatggaggttatatgtgtcaggttacttaactatactatgtttaattatatgagaacttggtgggcatagttgtactagtacaacccgtttctaaattgcagatgtgtgtttggatgttttattgttgatcgaaatgttggaaaagttatg

SEQ ID NO: 35495 - DNA, 217 bp, Zea Mays
ttgggttcctcctttcctccttcttttcttccttcttcctccctccaaactcccatggaagactcgcacccacacgacggacaccaagtggggaggctccaccttggagaggaagaggtggggaggggggctagggttgagggatggcgctgcaatcacttggggaagaagaagagggattggggcggctgcaagagtggaagagagaggggagggg

SEQ ID NO: 35496 - DNA, 2314 bp, Zea Mays
cctccctttgcttcccctttactccctccctctccgagtctcacttcatgtgcgcaggtgcgcgccgtgctcgactttccggcttctcctctctcgccaggaaacaaaggccgtgctcgactttccgcattccggcgtcactgcgcgcaagcaatagcagtaggccccttctcctgttctaactgaggggtcgaggacaaagctcctcattgagttctccttcagtggggtttgatgcgaggtgctgccaaggtcatttcctcttgctgtgctccgcctctcgttcagataaagcggtcgggataagtttgtaaattgcttgtcaaatcaggacaagattctgaattaggggaacctaccgcatagtttgctcatcagacaggccgaaggacaatgtcatcgcctaacaattctgtcagcgcggcactgtcagaaacgacccccgtgtttcagttgagagtatggcaactgattgccattgctgtcgggatagtcatggcgatcctgctcgtcattgcgctttgcctttcgctccagaggaaaaagaagacagtgaaagggtttgacaacagttcgctggctgagatccctatcgtttctaaggaaatcaatgttgacagagttggtgctcagagtctacatgacagtgaagcgcccttcatgccagtgcgggataagtatacgcagaccaaaggtgcagggcagttgggagagagtagatccgtcgacgccgataccttcagccagttcagctcagtgtacaacgtagagaagggtgggagctcatactctgaagattacagtcacagcagctctggtccagctaggaaaggtagctcaccatatgcatattcagcatcaccgctggttggcctgcctgagttatcacatctaggctggggccactggtttaccttgagggacctggagtgtgcaacgaatcggtttgcaaagagtaatgttcttggggagggtggctatggagttgtctacaagggtcgtctggtaaatgggaccgagattgccgtgaagaagatccttaataatctggggcaggcagagaaggaatttagagttgaagttgaagccatcggccatgttcggcataagaatctggtccgccttctgggatactgcgtggaagggatacataggatgcttgtctatgaatatgtcaataatggcaacctagaacaatggcttcatggcatgaatcaacacggtgtccttagttgggaaaatcgtatgaaaattctccttggcactgcaaaagctctcgcgtaccttcatgaggccatagatcccaaagttgtacacagagatatcaagtcaagtaatatcttaattgacgatgaattcaacagcaaggtttctgattttgggttggctaaacttctgaattctgacaaaagtcatatcaatacaagagtgatgggaacatatgggtatgtagcacctgaatatgcaaacagtgggatgctaaatgaaaagagtgatatttacagtttcggagtggtgctgttagaatgtgcgaccgctagggatccagtcgattactctaagcctgcagatgaggtgaatctcatagagtggcttaaaatgatggtcaccagtaagagggcagaggaggtagtggatccaaacctcaatgttaagccaccaaaacgtgccctcaagcggacaatcctggttggtttcaagtgtgtcgatcctgacgctgacaagaggccaaagatgagtcacgttgtccagatgcttgaagcagttcagaatgcatatcatgaagatcaaagcaagctcagccaggtgggatcacagcagtcgctagaggagacctcaaacagcgctgatgcctgaacctcctattctgaacaagcacatcaaataggaccctgaatcatctgatagcaacattgatttgatcattgctcggcacttaatagagtgagcggtgatcggatttacagtttgggtttgcatatactggaggtggtggttaaatcaattagtagcaagttgtttctaaaaggttcatgtcttttacccttaggatatgtatagttttcctgtaggggagcatagaagcaccttcatctttatttgttgttcgagttacaaggagggactaacctcaggcatataactacagtcactggatttcgttacccatgtgtagtgactttttggaaagtcgttattaccctgagatatgaaaacatgaattcctgcaacgaagtactaccccgttctcgaatatttgtcaccggctagttcatttttgaactaaaatgcgacaaataaaaaacatagggag

SEQ ID NO: 35497 - DNA, 3101 bp, Zea Mays
aattgctgcatgggaagtcacaatcatgagtagagctggtcgtcttgtgatggtcaaggtattgacaatggagacttttgagcaccttggattttttttgcagctctctgaaggaactccattaagccaagcagctaccttttttgcgaattcggatccagacatgcccgctgctcctgtacctgctgctttggtacatgattgggtcttgcagcatatagcttcagcattagaatttatggcagagaagactgtggcaaaagaaaacagccaacataatgcatttgatcctgatgtcacaatgtctgatgctgtcacgaatacaagaattcatagcagttcaccaactggcagttctgcaccaaactatcctggatactaccgaaatgcatcatttgtggagggttgctcgaaaacttcagttgtcaaacaagcatcggatctgaaagggcattcaataaaggttttgaactgccatgattctgtaatttacattttagccccacttaagtatgcaactgtctatggatgttctgacactaccattattcttggtgctattggtaaggttgttaaagtggagcattgtgaacgtgtacaaattattgcagcttcgaaacgaatttgtattgccaattgtcgtgaatgtatcttctacttgggagtaaatcaccaaccacttattgtaggggataaccataaattacaagttgccccatttaatacttattatccacaactcggggaacatttggcacaagttggtgtggatcctaatgtcaacaagtgggaccaaccttttgtgttgggagttgttgatctgcatgactcattatctcatcctgccggggtttctgatgtccaggctgagtccaccacttgtctagatcctgatctatttacgaactttttggtacgtgagctatatattcctttcattattgctatcttatgctagacttgaaaaaactcaaatgcagttaaaaaagttttatgatgagatatctcttgctttgacaacatgttgcgtctgatgcatctgcattaataaggttactcgattttttgcagtattattgtgtccataacagctggagtaggaacctatattccatatttttgtaatactatgttactaattgatcaatcaattgacattaatttttagtttctgaatgttctcacctaaatatgggtggtaatggggctttggcctctccagattcaataaaatattgtgggtggtaatatattgtgttgtggttctgtaaaagttacatctgatgcattttaaatgactacagtgtgcattttttcttgcaaaatattaaaaatggcagccagctaattctctatgcagattcctagttggtttgaagtagaaggacctaccaaatacaatccatttaccctgcctgaagtttattgggcgtcccaaaggaaaaagcatgcttctctggaagatattcaaaagaatatccgggagctggagatcgatgatatccggaagaaagaattggcatgtgcccttcatgctcaattcaaagattggttatatgcctcagggaatatccgccagctatactgtttgcaaggcgaatgagcataagatggggttcttgtgtaagcgcgagatgcagcagtacgcgtctgcaagtgcaatccaattccgggcgcctccgaaatctgaaagtgacttccaagctgagttggtgtcgcctgccctgatgcacttggtatttcagctgtagcgtttgtggagttcagaggcccagggagcaaatagctgacgcagaaaccctgctggaccttactgctagtttggtagcatcagtaaggtcccaatcagttctgggaatcacaccttctgattttattgctggactgctgaagaaatttggaaagaaaggaggttccaatgataatgtttcattggactgggctcgtcttgggcttgctacctcacgtgttttcatgtctgcatctggatgtgccaccatgattggtcccatgacgacagaagtgaagccacgaagagtttgtattaggaagaagaggactgcgaggccacatggaaacgcttgccctgaacagcttgctgatccatctgagaaaacaaagtctgatactgacaagaacatgtctgctatatttgatctcctgaggaggaagaaaagtgcaaggctggaacacattattttgaacaggacatcatttgctcaaacagtggagaacatatttgccttgtcattccttgtgaaagatggaagagttgaaatcaaagtgaatgaccagggacatcattttgtctgtaaggctgttgcttccttatatgctacagtatcatggttattcaattgttatgtgcttatagactgtagtgtgcctgattgaactctcttgattgcaacagatccaaggaatgcaccagtggcaagtgctgttgcctcaggagatgtggtctataaccactttgtcttccgatttgattttaaagactggaagctcatgaaaggggttgttccagagggagaagagcttatgccgcacaggtcctctcagaccatagccaacacaggaggaaacaatcctacccagtctgaggcacctttggccacaccaagcacaacgatcaggaagctttgcaggaaccgtggcctcatcttgcaagatgagttgatcgcgacaggtgcatatggagtcatggaacaggagatgttagccatgggcacgaacgacgccatggaagatgagatggtagctgccatgggtgtgacggaagctatgggagagaagaggaagtacaagcgcaagcgtctgttccaggacgtctgatgcgttgatccagctgaccgttgctgatggtgtacatgtctaggtagtaggtagagatgccaacccggctcacttcagcttagcttaccttagatgcatttgggtcaaagcaccccatttggtatgggttatggtggctcttggaatggctgagcgtcacgttattttggaggtgttcttaatgttagtttctggcgtacttaagactgaagtaaccatagtgaaggtgttggatgcttgggttgaattgcagcgctgatgttgtc

SEQ ID NO: 35498 - DNA, 2448 bp, Zea Mays
atgccgtacgaaagctggtggacgccgaaggtgaattcggtggcgccggtgccgaacccgatattcatggacgcctctcccctgaacccgccgccgctggtggaggaggagcttgtgctgcgccgcagtgctcgttgcctcaataggccaacccggcccagctacgcggaacaggagcctcctaaaaaacccggcggccggggccggagcaagcggaagagggacgaggagaaaccggagctggcaccggcgcagcagggtgccaagagtccggacaggaaggactccaaggatgaggcgggtgagaagaagccgacgcccatgattgcggcgctgccggtctcttgcgctggcgttgctgctgaagacgatgcgacggggaccgggaagagcgccaagctgagggtgaaggagacactgagggcgttcaatagccactacctccactttgtgcaggaggagcagaagagagctcaggctgcgctacaggagattaacgctaagagtggcctcaaacgtcagaccaaggggggtgaaaagaaacgcccatcaaagcggcctgacctgaaagcaatcaccaagatgcaagaaatgaatgccgtgctttatccagagaaaacgattggacatctaccagggatcgatgttggagatcatttctattctcgcgctgaaatggtagtgttgggcatacacagccattggctcaatggcattgacttcatggggctgaaataccaaggaaaggagtattcaaacttaactttcccactggccacctgtatcgtaatgtcgggggtatatgaagatgatctagacaaagctgatgaaattatttatactggtcaaggaggaaatgatttgcttggtaaccatcgccaaattggctctcaacagttgaaacgtgggaatttagcgttgaagaatagcagggagaatggtaatcctgtccgagttgttcgaggacatttgtcaaagaatagctacactggaaagatctacacctatgatgggctttacaaggttgtagatgactgggtgcagaagggagtgcaaggccatgttgttttcaaatttaagttgaagcggcttgagggtcagccatcattgacaacctctgaggtgcgatttactcgtgcagaagctccgacaactatttccgaattacccgggctggtttgtgatgacatctctggagggcaagaaaatattcctattcctgctactaacttggttgatgatccacctgttcctccatctggtttcaagtacttgaaatctctacaaattccaaaggacatcaagattccgtctagtattattggctgtgattgtgaaggaggttgtgctagcaacaaaaaatgtttgtgtgctcagcgcaatggttctgatctgccttatgtatcatataagaacattggcaggttggtggagccgaaagcagttgtatttgaatgtggggctaactgcagctgcaaccatgattgtgtaaacagaacatctcaacaaggtttgcagtaccgcttagaggtatttaagacagcttcaaaaggatggggagtcaggacttgggacactatcctccctggggctcccatctgtgagtacacaggggtgttgaggaggaccgaagatttggatggttcacagaacaactattgttttgacattgactgtcttcaaaccatgaagggtttggatggaagggagaaaagggctggatccgaaatgcacctgcctaatcttcatcctgagaatgattcagatgcacaacctgcacctgagtactgcatagacgctcactctattggcaactttgcaagatttataaatcacagctgccaacctaaccttttcgtccagtgcgtcttgagctcacacaatgatgttaaactggcgaaagtgatgcttttcgctgctgacaccatacttcctcttcaggagctatcctatgactacggttatcgattggacagtgttgttgggcctgatggaaaaattgtgaagctggcctgccactgtggtgctcctgattgccggaagcgcctctactaacctgcagtgtgtttatttctatttggatttttgaggaaacagcttatattgtaggaaaaacagtcatggtacctatgtagttgacatgctcttgatcatatatagcaaaagaggagcaatttatggggtgttcggtttaagaatgaaattagagatttagaggacatggtggtcatggtagcatattttgccgacaatcttcgattaactgatatatctggacatctggtcctgcaacacttatcctctggataaatatatatacgttacatgtttcctcaatgagtcaatggcttggatctgtgttttttctatcatttgccgtctcgcgcgtgcgtgtctgtgcttaatcgataaatacacggactactcaggtacctttttcaaattgtg

SEQ ID NO: 35499 - DNA, 1111 bp, Zea Mays
accaacccccacgatcagaaggatccggagttccggacgggcggacggccactgcaacgagctcgcctgtcgcctcgccccggcgccccgcgacaacgagacctcctcctccgctcagccgcagaagccacctcgccgccggcagcagcgttggcggaaaaggggtggaggcgcggcgattgttcgcgggatgagctacggcggcagcagctccctcgcgcccggtgccaagaggccgttcgagtacgggagaacgcatgtggtgaggcccaagggcacgcacaaggccaccattgtctggctccacggccttggtgacaatggaaccagctggtctcaactgctggaaacgcttccccttcctaatataaaatggatatgcccaactgcaccttcaagacctgtgtcattgtttggcgggttcccctgcacagcatggtttgatgttgctgacctttctgaggatgctcccgatgacactgaggggatggatgcctcagcagcacatgttgcaaatttgttgtcaactgagcccgctgatatcaagcttggtgttggtggctttagtatgggtgctgctactgctctgtactctgcaacttgctttgctcatggaaaatatgggaacggcaatccataccctgtgaacctaagtcttggtcactacactgttccagaggagatggatgaagtttgcaaatggctcacagcaaatttggggctcggcacttcgtcatcttgatcgcgagaaagactcgcggtgtcggtgtcttctccagggtagtaaatgggctaatagcaaatttgggcttgggtatacggccatgttctagcttttcttcacgcagacgtgtctgcgagtgctgtacgcttataatttctatattctggtctacgtcgatttggttgacacggatattgtttgtttcaaatattctgttttccggtttggaattgtgatttgcttcctccgtatggcatcgagatgtctgcaaaggttttaccgtgactgccgaatcgttttgtttgtctattgtatataatattattgccagggacggacccaagataaaataggagtgaaagcatacttacaaggaggaacatgaaa

SEQ ID NO: 35500 - DNA, 4429 bp, Zea Mays
aaatcgctcggcgcctactactagcccgaaacctaggtggtgggaactcgggatacgaggtcctcttctccgccgcttgtcctcggcaagcacaaacgcggatttggaggccactgggctttggaaattcaaagtagactgcttggatcataacgagagagcacaaagggcctgggttttgtaaacagttggctttcactagagtcgatccattccatactgagcttttgcatatcatcaattcatcacacaatggatggtgtgcgatgcatggagtccccagctgctggtgatgccccgcatagttctttccgaacccttgggccaacactcctggtttcaatggggtatcttgacttcggaaaatggttggtggcagtggaagctgggtctcggtttggctatgatcttgtcctgctcgtgctgctttttaatctatcagctattctgtgtcagtacctctcgagctgtatcggcattgtcaccaaaaagaatcttgcggagatttgccaccaggagtatgatcagaaaatatgtgttgttcttggtcttcaagcaggactgtccttgctaacttctgaatttaccatgattgcaggcatcgtagttgggttcaaccttgtatttgaaagcaacaatcccatcacagtcgtatgttttacaagtgttgtagttaatctgctaccatatacactctcccttctggacaagaggaaggctggaatgtttaatgcctacgcatctggctttacactagtttgttttgtgcttggtttattagtgagccatcccaaaacccctgtcaataccaacgtaatgttccccaagttgagtggtgaaagtgcttactcactgatggtactacttggcacaaatataatagtacacaacttttatactcattcatcagttgttcaggttcagagaagatttcagggtcatacccttggtactctgtttcatgatcaccttttttctgtactatttgcattttctggtatctttcttgtgaattatattctgatgagttcagcagttgatgagtccaaaaacacaatggccattaacttccaagatgctagacagctaatgaatcaggttcatgtcattgttctcttcttatccgtcaagtcttttgtttaattggctatttgttctccgttcaccttcctattaatgtaaagagcagcattcgaattctcaaattataagacatgaccataggtttggtgttgtggcatgctactatacttgcatgtttggattttcaactttgtgaagttattgtattataagtacattacctattttttgggttgaccaaatggtgcacgagtttcaatattttactatggtcaaaaggacctaattggagtagcagagttttaggaaaaatatagttctagtatatttggggttcaagttatagatattagaaatcctatagtgtgtgtttgctttgtggaagtgcctcatgctagatcaggtcgtgtatcatgagtttattccatgaatttttgggtggaacaaacccattcttcatgtgtatacattagcttgtgagaattgagttggtgatgcatcaactcattctattctacagaccaaacaaaaagtgatcatgatggatcaccatattactcaaacccaatacacgttgttctaaacaagggctaaggttgggagaaatgatgtgttctagggaagccactggggacactctcttaggctcattccctgaatagggacataaagactgagttataagtaagctgctgggatgctctttttctcttcaactttcttgaaaacttagcctccgcatgaactggccagcgcatattcaataaaaatagtatccctttgagcttggagtgtgcattgaaggaggaagctccttcctgaatttcgtctggattcttgtattttgcaggtgttcacaagtcctgtggcgccaattgtattattagtggtccttctcttttcaggccacatcgtgtcaatgacatgtattattggtagtgatgtaatttcagaggatctcttcggcataaagctgcctctttttgtgcaccatctgttacctaaggtttttgccatgattactactatataccatgcgaaggttgtgggttttgaagggttatatcagttactcatggtctgcccaattatccaagctatgctccttccttcgtctgttatacctgttttccgcatttcctcgtcgagatcattgatgggaagataccggatatctcgatgtgttgaaatattgtgcttcctagcatttcttctaacactgtttacaaatatcatttttgtggcggaagttctttttggtgatagcacttggacaaatgacctgaaagggaacactgaaaaccctattctacttccatatatcgtcgtagtcctgatatcatgtggatctattggttttgcactgttccttgctgttactccactaaaatcagcatgtaatgaagctgagagagcgttgtctgtgcactcataacagagagaaacgttggatgccactcgtcacagcaaaaccgacttctctgagaatagggcacatgaagcatatgaagaacagaggtccttagccatccttgttccacaggattcactgaaaggtgatagaaataattttcgtagcatatccgtcatctcaaattagcttttgatcacaagggcagtttctgacgctactctacatgcaaatcatatgtctagtaatccagaagttcatccttagcattgactggacagagcctatgtcaactgaaggttgtgcccttaaaattgactggacagagagcctatgtcaactgaaaaaggttgtgcaaatagactcggatgcctgcacggacaacgctctgtttgtggagaagtctgaatatttcttttatcaatcactatttctcttccatttaaattcacaattaacaggatggttcttatcatgactgtacctctgtttgtgggagtggaagtgttggcttatctacctattactcaaagaaacaccactgtctcacctgacacctccggtgattgctgcaaacagaatgctttgttggttgttgaatgaagcaaattaatgtggacagtggtactgcaaatcaggtggttcctctataggatacaccatgtgtggagtctgcaacaaggttctagtctcaacttgcacatatggtggctcttgcgagttgtgacatgatcgtctgacatcaaagcgtgaaagacgttaataaatctgttcaggagaagcagtcatctagcgtggcaagcttggaattgacaatgagtgaggtggacactggtagatctagtagcagggtcaaaggatgatttcttttaccaagtatgcttgcattcgtgaggcaaatcaatgatacattatttagagcgtgattggttgcctgctcggcccagcctgagcgtatccagtcattcaggcccatggcggcatgctaaagaggtgcaataggctattgtttggttactttgtttcatctcatgatggcccattagagcttgcctttggttgcaaggctgtacagacacttgagcatggcaagcctcccaactagagaacagaagacaccagtcatgacaacgatgttctttctcctcactaagtatgcaccttttcctcttgttgcctgccgcagacccactagtagcacctgcagctgcctcctagctcttcggagcctccccaaacagccttgaaacatcatcaaccttcatggcatctgtttgtagtgagctctcagcaaagtaagatgtggtacccattgcaaacttgccagttgcaagaccattgccaaagatcacttccatctgcttgtaattttctatttggcatgtttaagtactcagcattcttagcccttcagggtgtgcctatattgcaagctcacaaatgttagtgtaaggctggaattaggttagtgggcacttaggaaaggttacaaaatcacagatacaattaacatacatcttgatatggccacctatagtgcacttcatctagactgatcatgtgtcattcatcatcatcatcacaaaggggctatttgtttcggtttttcgctagattttagccgtcatagtcgacttctagataccagacacagaaaaccgaacgcttcgcatctcagtgcgcttcaatgaaaatcatttttttttgtaaaaatcgcctaaatctgttggaactttgttccatatgctcttggcaagttggtggtgcgataaggcattgggaagcaagagtgcagcatggcaaagcgacctagattggtgatgctgggaatggttaggtttagcggtgcaggtgcagggcggcgactagtcactagagcgtgagctcttgcgtgctcagaggagatttcatacattatttgctccgtacaacaaa

SEQ ID NO: 35501 - DNA, 1251 bp, Zea Mays
gcgattgcgagtcgtctccaataaatttgtcgcgtccggcgatccatccgtcttccccctccctctgccctcgtgctcctcccgtcaccctcgtctccactccccgtgacgaccaggaaggaattcttcctccgtccccgttcgccccgtcgtctcgtcgttttctcacctgcgtgctgcgttcgcggacaaacttcttggttggtgactcggcggatcctgagccagagcctcgcaggagggagaggggggagagcggaggagaaaccacctttctttccgttccagacaagctcccagctttgaccgccgccgccgccgccgctgtgtgtgtgtgctcccttagtagttagtccctgtcgcgtcccggatcggagctcccctccgtgcacgggacaccgccggtccgggcgtctccactcccccccggatcgatcagctccgcctccgcaagataggcaagcaatgaggtgcctgcctttcttgcatggagacaccaaagagaaggatccagtcactaagtcggcctctctacggtccatgagcacaacatcaacggagcgcgatgtccgctccggttcagacttcacctccttgaatgtttccgacatgagcgccgagtcgataaggaggacgcagtaccccagcttcactgaccgcccgtctaacctgagggtgttctcctttgctgaactgaagagtgccacccgcaacttcagccggtctctcatggttggcgagggtggctttggctgtgtgtacaggggtgtcatcaagacctccgatgaaccgaacgaacgaattgagatcgctgttaagcagttgaatcgtaaaggacttcaggggcagaaggagtggttaacagagatgaatgtgcttggaattgtggatcatccaaacctagttaaacttataggctactgtgctgaagatgatgagaggggagtacaacggcttttagtgtacgaatatatgcctaatggaagtgtggatgatcacttgtcgagtaggtcaacttctactctgtcatggccaatgagactaaaagtagctcttgattctgctcggggactgaagtatctgcatgaagaaatggaattccaggttattttccgggacctgaaaacatctaacattttgttggatgagaactggaatgctaaactgtcagactttggtttggctaggcatggaccagcagaaggtctgacccatgtctccacagcgagcagtagatgagattaaagtccc

SEQ ID NO: 35502 - DNA, 1553 bp, Zea Mays
atgttctgccggttccagcctcggtcgcggatcgcccactctcctcccccacggacgcagatcccccgcctcgattcctcattccttcaatggcgcatcccttccttcgatggcgctcctcgcatcccgcctgcccgccgcgctcgattcctccttccttcaatggcgcatcccgcccgcagccaccaatcaacgcccgcggatcctcgtcaatcaactcccgcggatcctccaccctcctccccaccgcggcggatcctccaccctcctcgtcaatcaacgcctgtggtcctcccccacgcggatcctcgcaccacccactcccccgcgtgcgtccctggcccctcgagctcgcgcaggccagaggaccgcgctcgcccccctgaagattactccctccccaaggagctggcggcggcgtgactgtgtcgggagaaggaggccgtagaggacgctgcgcgggggctgcggcaggagctcgactccgagcggtcctccccggagatggcagccagatctgaccattgagccccctaatcgagcggatccaagatttaggcggtggtgaccaatctgaacggcgcacactcgacatggccattgctatggcactaagggagagcaagcccgtgtacctcagcatcagttgcaacctccctgggctacctcattctacctttagttttatgttcaagtacatgattatcgggagaaaccaagatatggtctgtgcgctgggctgaaggcggacgcgcttgctcatcaaccgcgtgcggtcgagtgctagagccaccgattcaccgtcgagtgcatcacccgctacatcgctgggctacagcagaagtatacacaaagtggtggagtccgctccctttggcttcgaacccgacaccaataagccagcgctgtaccagaccgatccatcgggtaccatctctgcttggaaggccaatgccatgggaaggaactccaactctatgtgtgagtttctgaagaactacaaagacctccggcaaggagaccatcaagtttgctatctgtgcacttctagagattgtgaactgaacttaaatcatgcattcagtattggtctctagagaggaagctctgccaagcattactaagaactgatcaggtatacttatccatggtggaaagaaaaggtgattgactcagacttgaaaagaaaagatggcctttgcccattgacgcctgaggagactactcttgtcctcagagcacttgacatcgatagaagtatgcaaatatacattgctgctggggaaatatacggtggaaagcacaggatggcttctctaacttcagcatacctaaatgttgtatgtgcacaaatatattatgcatctattgtagcgtacttgttacacagtactcttccatctctcctttttttccttgttgatgccaaaatcaagtttacaagtatggttgcccctcacccacagcctgttacatattttagtatcatttatttatggaaaaacgaattctcttgtttagtatcatttatttatagaaaaacgatgtgtacg

SEQ ID NO: 35503 - DNA, 245 bp, Zea Mays
gacataagtggtatcaaagtcgtgctgactgtaggaccgctaacctagagtagaatggtcgctctaaggactacagacctctgtctctgccttgactttgatatcccttcaaaagttggtcctaccgaccaaacctatgttctactatacattataccttgatgaaaatcatgttttattctaatccttcattcactcatgattcattatttgccggtcctattaattctgttctcacccttttg

SEQ ID NO: 35504 - DNA, 727 bp, Zea Mays
gaattcagcaagttacggagatggtggagaggtgtagatatttttaagaaagcgtacataattttgccgattaatgaatcgatgcactggagcttgatcattgtttgcatgcctacaaaagaggcagattctgggccaataatacttcacttggactctcttggtcttcactccagtcaaaagctttttgacatagttgcgagggaggatatggaggcgtctttcgaaaaatatcaatagggaaaagattgaggtttattcaagatgcgccagagaggttgacaaaagagggccttggcatgtttggacgcagatggttcaaccatgaagaggcttcagcgtttcggggagggatacgggcgctactgattgatctatttcatagtgctctagacgacgatggaccatcggaggcagagcttgaagacaaggacattcagatggactgagcctgctgttgctgctttgattgaatatgtaacctcgttcactcccaagtgaagtttggccgtggagggaatgcgccccgttggctacacacttttgtttacacgctcgttcattcggcggtggaaatgtacagttcaacgttatctaagggcctgtttggaaccggattcagattcaacaaaaatatatttacgaaaagttagctaaatggtttagggtttagatcaataaaatccagattcacaaaatggtgcctttagatttaacaaaaaaaaca

SEQ ID NO: 35505 - DNA, 215 bp, Zea Mays
ctgagttattacataaatcggagttcttgagtagcaaataaagttcacaaaataaagtgcagcggataatcgatgtcgtcggtactgaggaaatgggcaaggcctagcccactactcctcgtgctcctctcctgccggagcaacaacccactcgaccgtccaacccggtggcagggtggcaggccaagtcacaccatcaaccaattcctgcatgg

SEQ ID NO: 35506 - DNA, 2979 bp, Zea Mays
ttgattagtgcccttacagtcatgtctattgagcaggatcttgtgaagggtaaagatacaatggtgccactagttgattttcaagagaagaaacgcaccggatggagggaactgagaatttcttcatctggagtggtgattgtcgatggtgcgtatgctctgcattcaacactacgatcattgcttgatatccgagttgctgtggttggcggcgttcattttagcctgctttctaaagttcagcatgatattggagattcttgctcattggactatctaatcgacagtatatttccattgtttagaaagcatattgagccagacctgcatcatgcccaaattaggattgataacagctttgtctgctcatttcgagaaccgtactacaagctgaagtgcaaaaatgagatggcaagaagttatattcttttgaacaaaataaagtggaaactgagaactttattgagatgtaccttaggccgccttttgcttctgaagaaatgaagattgatgattggattaaggttaggcaatgtggaataagatactatctatctctcggagaccaaaggattgttgacaagtacttcataatccgtccaaaagctgagtttgaggttggacgaacaactcttggaggattgttggccttggggtacaatgttgttgttagctttaagcgtacatgcacatctgtcaatatagatcaattactgatagctgcagagaccattgacactctaaatgagacctttttggtattaaaaggtccaagcagaaagattgttgcagcagaggcttcaaagcttggtataaagggaccatggatcacaaaatcatacttagaaatgatcttggagagcaaaggggttccacgacttaatacaccaccaccggtatcaagcaaactgctaactgaaagtcaagaaaagaaaattgctgcacctaaacctattcgtgtttctgctgaaaacattacaaatcttgatgacttgatgcaaccgtggacgagatccccgcccaagaagttggaacaagaacacgtattggcaaaatggcagtttatctcagattcttcttcaagaagtaacatccagctggctcctctgccagattcttatgacctggataggggccttctcctatcagttcaagcaattcaggcattgttggagaacagaggataccctatcattgttgggattggtggtcctagtggatcgggaaagacaagtttagctcagaagatggcaaatataattggctgtgaagttgtaagcttggaaagttattacaagcctgaacaagtgagagattataagtatgatgattatagctcattggatattgctttgctcactgagaacattatggacataaaaaagaggcataaagcggaagttccttgcttcgactttgaaaattttagccgaaaggggttcaaggagcttcaagtatccgaggaaagtggagtggtcatctttgaaggtgtgtacactttacatcctgctataaggaaatttctggatttgtggattgcagttgttggtggagttcattcacaccttattgcaagaatacagagagacaagaatcgtgctggcttttctatttctcagactgaaatcatgaccactgtgtttccactgtttcagcaatacattgaaccacatcttgtccatgctcatcttaagattcaaaacgattttgatcctgtgctctctcctgaaagctcactttttgtgttaaaaagtaaaaaacaggtatcctgccaagatatactgaaggtactagatgctagtaaagtctgcagttctgtccagaactttactgatgtgtacttacggcttcctggcataccatcaaatgcccagctgaccgaaggtgagtgtatccgggtcagaatttgtgaaggaagatttgcattgttgatacgagagcctataagggaaggaaattttattatccagccaaaggttgattttgatattagtgccagtactgttgcagggcttcttaagcttggttaccaagctgttgcatatattgaagcttctgcggtgatttaccaagatggaaagattttaatagaagttgaccatctacaaggagtgtcgactccatatcttcaaattaaagggacaaataaagaaattgttacctctgctggttctgcactctgcttggatggttcatacacaacaaagagttatcttcaaattattttggagagcttaccagctgatggtaatgtatctattggtattcacaatcaacaagctgcaaggctgcaggaactggttgagttcatccagtcacagggagggagctttaattcagatttatcgtcaccaatacgagaaacttcctctacagatagtgtgattgatgatatgcagtccaggataaggaagcttgagagatggaatacgataaacatggttttgtggactatattattgtctgctcttgttggatattccctataccagaaaaaacgtcactagttttactgatagggtaggacgcatacctcattcatggcgtctgcagaactgacttgcacgcttcaggcacaaagttgtaagtgctagagaaaatgaaaagcagcatgtagatacaagatctaagacgtgagagatggcctgcgctcatgccatccctgatggcagtcttatttgtttgatcactcaatgtctgtaataatcttctcgtatgagatccatcaaaaaaatttgtgcagttaatgtgtatgaagcactaacgttgataatcttctcatatggtccatgggcgtttatgtattgtcatcaccacttaagtattctcatctccattaggccttgttagacactcgtatttgtctcgatccatgtgtattgaggtggattggaatgtaacttaaattaaattacatctcaatccatgacaatacacgtggattgaggtgtccaagtattcttcacgtggattgtttaa

SEQ ID NO: 35507 - DNA, 1633 bp, Zea Mays
gtttaacattgttatggatggctgggggcactacagcaatcgtggcgctacagtactgccggtactgtttttgtgatgctgcaccctgcgctacagtacccccgggtgctgttcatggttagggctgcaagcgaggggagggagaagggggtggtggctgcgttgtcgccggcggaggcgaggaggatgtgcatggcgcagggcgtcgtggctgatctagagagagaacttgcggctaggactaggaggcgctgggaaggccgaccgcagggctttgccgacagctggcaagagagaagggatttccttctaatctcttgcttaccttcaattgatacaatctcttcttatatagagagggttacttgaccccttaacactagatctaatcttatctctaattctaatcttatcccaaactagtctatctttatctaaacaacctgagggcgtgctacagtgccacttggcccctgacaaacatcatggtatgttttgcaagatcccctatgtatcatgtcaagaagaaatagtggcctccgtcttttaaccttctgtttcctggttatttggtaaccatttgctagttagttttatcagtctgctttcgttataaggtttaaactaaggttagtagtgatgtgtaaataattgttgccctagcaacgtcactttgtggaatcagtctgttttgctttccttttaacagtggaaagctgcaaaagaggagcttcgtgatgaagaggaagatgagcctgaaactgctctagaggcattagaaaggaagcgacaaaaggaaatagaggagtggcggaaacaacagatagcttttggacatgctcaggaaaatgccaattttgttcctgttcgtggcgtgaccgtgtaaaacgcagaagggctgaagcaaaaaaggagtcaaaagatgacattgttgttgcatctttaagtagttccaaacagcataaaggatctcctgatctagcagagctttccaagggtcttcctactggttggcaggtaagtattctcgattgtatcatatcagatgctaacatagtgtgctgtgtttaaggtagcttccgctgcagcttccaagaatttgatatctattgcaagtttgtaactgatacaaagaagtgaacaatcgtgaaacactggtcatgagtgcaccctctgttcctgtgtagtgtactgtaaaaccttgttaatctgccatgccatgttttacaaagtggttagcactgcttatttgcgttatcctctctgtgcaggcatacttggatgagtctactaagcaggtctattatgggaacagtctcacgtctgagacgtcctgggagcggccaacaaatgaatgaagatctataaccttggtgtgcggtcaaccgaacgatacaagttgatttgttaatgtagttgatgctgttgaatgggcagcccaattttgtttggcagccaaccccatcctttagagaagaacaaaccacacctcaccaggagatggctgattgtttcattgtcttggtcacaaggcacaaaatttttgatgggataggttttgcttggctaacctatctgcagtacaacatctcttattaatcactaactagatgaaggcacatttcggtcatag

SEQ ID NO: 35508 - DNA, 1336 bp, Zea Mays
tggacgttgactaagtggcagataaagaattctagagatctcgctattaggaggaaggtttcagagctgcctcagagaaatcagaaagcgtgctcgtgactttgaggacaaggagaagggcgtcaagatcaagaaagaggactgggacaagttgcatgttcacatagcctcgtacaacaacttccccactgctgctggtttggcctcttcggctgctggccttgcctgtttcgttttcacccttggaaagctgatgaatgtgaaagaagattatggagaactttcttcaatagcaagggatctgggagtgcatgccgcagtatatatggtggttttgtgaaatggtgcatgggagaaaaagatgatggaagtgacagtattgccgtgcagcttgctgacgaaacacactggaatgatcttgtaattattattgcagtggtcagttcaaagcagaaggaaaccagtagcaccagtgggatgcgagatagtgttgaaacaagtcctctcttgcagtacagggcccagacagtggtgccaggtcgggtgttgaaaatggaagaagctatcaagaaccgtgactttgaatcatttgccaaattaacttgtgcagatagcaaccagtttcatgctgtatgcttagacacgagccctcccatcttctatatgaatgacacgtcacaccggataattagccttgtggaaaaatggaaccactcagaaggaaccccacaggtcgcttacaccttcgatgctgggccaaacgctgttctaatcgcccaaaaccgtaaaactgcagcacatttcctccagaagctcctatactatttccctccacaggataatgatttgagcagctatctggttggcgataaatcaattctaggtgacgccggattgcattccatgaaagacgtcgaggctcttccagcacctccagatacgaagataccggatcagaaattcaagggcgatgttagctacttcatctgcagcaggcttggggcaggtccaaaggttgttgttgacgaaggtcaagcactgatcgattcagtcaccggacttccaaaaggcgtgtagttctagatttaggttggaataatggtttaagctggggattaaagacaatggtatcatacaagcaacctgggccggccaataaagatagaacacgttctcgccttttgtttttctccctcgcctagtatgtggctgaaatatttgtttcgctattttattgagcacttcagctgagacgcaagcggagaataataactttgtcgtgtaggagtactgcaggagcgctgcatcttggagctatgcctatgcgtgcgtgcgt

SEQ ID NO: 35509 - DNA, 1669 bp, Zea Mays
ctggagcacgcgcgaatacatccagcccaccccctgccgcctcctcctctataagacgagacctgcgcaccggcaccgccatctccgtctccctgtctcaccggtgccgcttcccctcacccgctcgatttactgcccaatccggcccgcttcgccccgccacgaattttaatcaaccgtttggagcttgaatttgaattccagctcgaatcacccacccggccagctgggagcgagagcgttccagctcgaatcacccagcccgccagccgggagcgagagcgagctgggtgagctcgattcgatgcgttgctgagcgtggctcaaccgattcaggtcgggcggtggcgcagtcagagggatctgaaccctagcgccgtccggatctgtgacccgcgctgctcggcgcgtcggcggcatgagtgcctggaaaacgtggcgaggaggagaagcggcggggatatgagcggagccagcggcagcggggacgacttcgggcgggcggtggcgcgtgccgcagtggcgcaggcgctggaggccgcggggttcgactgcgcgcaccgctccgcggtggacgcggtcgtcgacatcctcctgcgctacatcacgcacctgggtcggtccgccgccttccatgccaacctcgccggacgcgcgctcgccaacgagcttgacgtcatccaggcgctcgaggaggtcggcgccgacacggacggcttcgccggcgcggcggccacgggccactgcctcgtcagctccggcgtcgtcagggaccttatggcgttcgttgactccaaggacgaggtgccgttcgcgcgtccgctgcctaggttccccgtccagcgcgtgcagccgcagcccactgccagcttggcggtggcggggcgggagactgggatgaggcacgtgccggagtggttgcccgtgttcccggatccgcacacgtatgtgagtacggaggtgtgggttgagccaccggcgaccaaggacagggttgacaaggtggagcaggtgcggcaacggaggaaggctgagaagtccctgctcagcttgcagcaaaggctggctatggcaggtgcggatgggtttcgtccagtagctgctgtggcgcaggataacgcagagaaggggaaggagatacaggcagctgggacaaagagaaacccatttcttgagccagcattgccgcctggagagaagtatgtatctgaggttgatatgcctcctgaaaagaagaaaccctctgtccttgaggcatttgcgccagctatccaagctagaaccatcaaagagttcgatgctggggcagggttggatcaaaatcaaaggaacatcgttccaaaggagagggctcgggtgcatcttaagattggatttggaaagaagccatttgctgcagctctgaactcaagagccctggacctgagggaagatccttcattcctgaaagaggaagcaaaggatgacaagaagcggagagcaggcatgatattaagggcatcgatggagaacccacaagaacttcctcagctctaaagttatctatagaggaagtgcggtacccagagtggagttgcatcatggtgtaattgtggaacttcagcttcctgaatctagaggcaattatcaagtcaaataccaaacagtgggacagtcagtctctgtactc

SEQ ID NO: 35510 - DNA, 2970 bp, Zea Mays
ctgccacctccctggcctttccttccaccccaacaccccatctcatctcttgctcctcgtccgtagttgcagttgcagtgtcctcggccgcctctagtcctagccgtttactccttcctttcaccgcatcaagcagagagcaagcgaggcaagagccatgggcgcctttctgctcttcgtctgtctcctggcgccggtcgtcgtgctcgcctgcgccgtccgcggcaggaagcggcgggcgtcctccgcggcggcgggcggcaaggcgctgccgctgccgcccgggtcgatggggtggccgtacgtgggcgagacgttccagctctactcgtccaagaaccccaacgtgttcttcgcccggaagcagaaccggtacgggccaatcttcaagacgcacatcctgggctgcccctgcgtgatggtgtccagcccggaggcggcgcgcttcgtgctcgtcacgcaggcccacctcttcaagcccaccttcccggcgagcaaggagcgcatgctggggccgcaggccatcttcttccagcagggcgactaccacgcccacctccgccgcctcgtctcccgggctttctcccccgaggccatccgcggctccgtgccggccatcgaggccatcgcgctgcgctcgctcgagtcctgggacggccgcctcgtcaacaccttccaagagatgaagctgtacgcgctgaatgtggcattgctgtccatcttcggcgaggaagagatgcggtacatagaggagctgaagcagtgctacctgaccctggagaaggggtacaactcgatgcccgtgaacctgccgggcaccctgttccacaaggccatgaaggcccgcaagcgcctgggcgccgtcgtggcccacatcatcgaggcccggcgcgagggcgagcggcagcgcgggagcgacctcctggcctccttcctggacgaccgcgaggcgctcaccgacgcccagatcgccgacaacgtgatcggcgtcatcttcgccgcccgcgacaccaccgccagcgtgctcacctggatggtcaagttcctcggcgaccaccccgccgtcctcaaggccgtcatcgaggagcagcaggagatcgcgcggtccaaaggctcctccggcgagcccctgacgtgggcggacaccaggcggatgcgcacgacgagccgtgtgatccaggagacgatgcgggtggcgtccatcctgtccttcaccttccgggaggccgtggaggacgtggagtaccaaggtgaggcgtcaatcatactcatgcggtcatgcccctcgctgtcaaaaaaaaaaaaaaaaactcccgccaccgtttcacgttggattggaggcgggggcagtctgtccctgtcgtgcgctgctgcggatgaactggacggacgggacgcgttcctaaccgaaatgaatagacagactgactcatccgctgtgtgctggctgcagggtacctgatccccaagggctggaaggtgatgcccctgttccggaacatccaccacagccccgaccacttcccctgcccggagaagttcgacccctcccgattcgaggttgctcccaagcccaacacgttcctgccgttcggcaacgggacccactcgtgcccgggcaacgagctcgccaagctggagatgctcgtgctcttccaccacctcgccaccaagtacaggtggtccacctccaagtccgagagcggcgtgcagttcggccccttcgcgctgccgctcaacggcctgcccatgaccttcgtccgcaaggactgatgagccgccgacagatgtgtggatcgtggacggagccacaccaaaaccacggcaggccgacggaaccaaaccaaagccaacaacaaacaggcggatggatatggtatggcggtatatgctagctagtactactataggagccgcgaaaaccgcttccgggatttggcgttgcggcggtcgccatcggacgggacggggacaggcatcaggcaagcatgggatgatcacagaggaaagaaaaaaaaagataacggtgtacagattcttcttcagctagtaggaccggatcccaagaagccggaagaggagaccaaacacaaaattaggcctagccacgttggtgtcactcggtgtaagctactccagtaggcatcagatggcccagcgccacaaagaagtggcgcttagttgtaaaaccaaaccccccttttttctccatcgtcttctttttcttccccccttttcagattttttataagctataagctagccagacaacacctgtaggagaagaataagggaaaccataaaagaaagagagggaggccctgattgggattgtaagctagctaggttgtccgcctgaaagcaggctggcagctaggcacaataatccatggacggatggatggattggatgggtcgccggagtcaaaaggaggccacgtcgtcttccccgcaggcgcagccaaggactacggcccgggacggcgaccccgccttgtatttgtttcgtgatttcgtccaatgcaaaaaagacagtgactgctttcacagcaccaactgcccgtattactaatttaattctctaaagtgcgtctgcgtctgtgttgcgttgcatatttgcattgctcgcctactcatctccgacgactaaggctgtccgtccttgggttctcccgctaatttgaccaaccaatgtttagctaacgctgtttggatcatctggcaaacctgtttattaatcttattgactttcccccctattcctccactttgcgtcgagagtgaggacgaggacagcataacatatataggcccagcacgatttcatttgatttttttaataaaaatgtgtatattatatttgattataaaatacgaaagataaaacttgcttattttgttggttaagtggatatgaacgtgtatttagagttagcaaccatggttcctcaatctttacttaagcacatt

SEQ ID NO: 35511 - DNA, 323 bp, Zea Mays
gaaacaaaatatagacagacaaacacagtttctcggcggtttctcattgattatttttcaaaattgaaaatatgtgcacggaaatttaccggaactggtttctcagtgctaattggcggtttcctggtgctaattggcggtttcctgaccgagaaatgcggaaaccagtcatttaaatgaatatgaaacgagattgggaaccctgcttagtaaacgcccttctaaaattttacacatcaaacaatgattgggaacgacagcctctgccatgaactcactgccaagcttcggctatggagccatctctcctttgcccacggcca

SEQ ID NO: 35512 - DNA, 5387 bp, Zea Mays
tcgggtcccctcaaatcaatcgatcacacgcgtcccgccccattcggccattcccagccttcgagaggtcgccgccgccggtcgctgctccgccgactcggggatgccaccggcggtagcgcccgcctcgccgcgccaagaccctagcggctccagtctttccgccgcagccgccgcggcttccatggcgaacccggtcctagggcttggcctcgcgccaccgggcgctgagccctccgccggaacgccaccgtcttcacgccgcgcgccgcgcttggccaagcggcgccacgcgcccgcctcctcccgtttccgcgcggcgcaggcctcagtcggaacatggaacccgtttggcggcggcggcggtacggatggacagactcgaggttttgtgtttggtgctgcttccccagtgagccagcagccttcggagccagcagtggagatatcttcatccagtgaggcgcccttcgtgtttcagagtgtgagggagaaccttcctcggtttgaggagggattgtctggttcatcaatgctccctgataagatggggaagctgaacctgcgcacatcaggtgaggttggcgatggtctcggtcaggggagggatcgaaaggatggaagttcagcatttggtgttgatatatctggtttgttttctaacaaggaagataatgggctccaggagaagcttacacagttgaatttaggccacagagaacccttgcaaagtgagaagagggatagtgctaatggtgtgccacaagcatttgtgtttggatgtaatggagctgggagttttgctgattgtaagaacacagttgcctctggtgcacagtcagatgatcctagttcagtttgtggcactgatgcaaaagctatggctgggaagtcgacgcaattcaatataggcagtcaagcaccttcctggggtggagggattgagggtactaatggagcaccagaagctttcacgtttcaaagtaccgcagtaagtggtcatgtggataatataaacaatgttgtctccggtgccaataccagtgccaatacaagttcgtccactgttgctaaaggtgtgggtgatgtagatttgcttccagaaaagttaacacggttgaatataggaagtgacatgcccttgcatgagtcgaaaagtggttatcagcccaaagtgtttagagcagtccaagggacaatttttggaaatgaaacaagcagcacatcagataggagcagtgaattcctctctgcaaatagcaatacttctagttcaagcagtgatttgttctctacagcaaatagcaacacttctaattcagctaatggcacttactgttttcctccagagaagacaccagatttgaatgcaggagagggagtcatgtcggagagcttggaaagtgatagttctaactgtccaccacaaacctttttatttgaaagaaatgaaacccgaagctctgtttcacactctgcaagcatagccatggatgacggtggcaattttgtcaatcacaaaaatactgacacctgtagttcagctcgtggtacatttgattatgcaggtgctctcccagagaagatgacgaaattaaatataggatgcagaaattcataccatagcaggaaagatgaaactgctactgaaccaccagaagtatttgtatttgggtgtaatgtttctagcttttcttctacccatactgcaagtaaatcacatgatcccacgactcctgaattttgttttcaaagtaaagcagaggcaacttcaggatatggggctgttccccaaaccaaagttcaggagtcatacttgtttacgactttgaataattcttgtagtccctctacttttgagaatgcagttcctgctttcagttttgggacaatggatgcagaaatagaaactgctccagatgatcatttttctgtcaaacaggatttgcctgggttttccagggagaccttatttggtttagacagtataaaatctgcatacaaggacaaaagggaagcacacaaaggcaaaatgaaaaataaaaggccaactaggctaaagcaacatgctcagctccatcaggttatttctaaggaagcctgtaacgatggaaaatcatcagatttagcaggtgactattcaccaatggattgttcgccatatcctgcagaagctgaacatgtgccaacagaggcatatgtggcttctggtcagcccgttcacattggtgatagtgttatctcaaactggaacaccagctgtgctgaagatgatgtagtttctgcaaccgagcacttgattattgatgtaaacctaccaatgtttggagatgaaggtagaggaccgaaactagatgcatctgagagcaattttggtagcagcttttctagttttcaaggagatcaaagtaatggaccacagcattctttcactaatattgggcaagactgtaacgataatacctacagaactccccatgattttgttgagcctcctgcttttcaatcaagctcatcaaatttcagtgggctgaactttagattcggtgtgtcatcctctccacaaatctctgcagcagcacaaagacgtaacacaagaaggaagttaagaacaaagggcagtctggcatcgaaaccttcaactatcggctcttttgaacagtcaaaatcttcacaagatactaagggcatgcggtttttctgtgaaacaagcaaaaatgaagacccagtgaaagagcaaccgtcaagaaagtcttctacttctgcggccttggaggcttgtgaaacctggcgtactagaggattattatacccgtggaataaactctgttacccactatggtgtttctggacattgttctcgcgcattgatgctgtgttacagcaaccgtgcagctacaagaatgtcgcttggcatgatgtgggaagcacttcaagattgtttgactgctacatcaattgaccccacctttcttaaagctaaagttagagctgccaattgccatcttgcattgggcgatcttgaagatgcattaaaggagttacatggcctgtttgaacagtaacactgggagttcttctgaccctaaaaatattagccgaggcttctgatggcctggaaagagtcaagagagtgatcgattgggtatccctgtgcaaggaacttattgagaaaaaaacatctcctgaagcaacaaaagccttagaattgatctccaatgcattgcacatatgtccatattcagacagcctcaaggagatgaaggcagaggcattgctgatgctacgaagatacgaagaagtgattcaactatgtcaggagtctgtaaatccgactgaaagaaagccagctttattcaaagataatggagaaccaaagaattccagtctctttgaacaaacacacttctctggaaggtattggcggccctatctcatttgcaagtcttatttcctttcaggcaagctggatgaggctgtcgaattattaaagaaacatgagcaagtcacacctgtcaaagaaagtgacgtgaacacatatcaagaaaatttctcatcattgtcagcgattataagagaactactttcccttaaggctgctggaaatgaatcatttcaagctggtagatattcagatgctgtcaaacagtattcagcagctttggcatgtaatagtgaatcgcgcgcattttcagctgtctgtttttgcaatcgcgcagctgcgtatcaagcactcggtcaagttactgatgcaatagctgattgttcacttgccatggttcttgatacaaattaccccaaggcaatttcaagacgagccaccttatacgagatgataagggattatggacatgctgctaatgatttaaggaagctaatctcacttcttgaaaagaaagtcaatgtgtctggaatatcaccaaaagcttttaacaagcataaagatatcaagcaagcacatgcgaggctttcacacatacatgctgaagcaaaaaacgatacccccctgaatttgtatttaatcttgggagtggagccatcctgctcttcagcagatattaagaaggcataccggaaagctgcattgagacatcacccagacaaggctgctcaattattagtaaggaacgagaatgctgaagatggattttggagggatgttatcaaggaagtctatgcagatgcggatcatctgttcaaaacaattggggaggcatataatgttctttctgacccggacaagcgtcaagagtacgactttgaagagaatctaagaaatgctcggagagtatcgagttcaaggagcatgcgtaggtcacctgaacataactacagcgacagaggctttaatccacggcagtggcagtcaagcagagcatcacgttggtacagcaaatcagacgattactggtaaagaaggcactacggcgtggtcatgtggtgagaagcaacttttgcaactatgtcatgtgtggagcaaatgcctccttgcaccaaagatgggatgggatgcacctgccttcccttaggtgccggtgctaatgcaccagccttgcagtcagcagctttcctgtttgtttgctgcgtttctttttcagaggatggaaatattaggattgatcaattggggatctgggatgattgcttgacactggtagcgtcgtgacttgactagcacaggaaatatggaggattaggaagtggtatatcaaatagtcttttgttggcctggtgatgtctgaacactgactgcttgggagtggctggcatgatggtatctgctctgaagtcaaaacactgagaacaacatcaaaggttagaaatctgggtaaagatgtcagtttgtccaataggtacaggcattcttttgctgaatgcatggcccgctgtcgtaagtttacagcagatcagctgaaagaaaaagagacaggctcttctgtttggcgcgtgcgcgtgcagttttgttctgttgtttccttattaccaaatgatgtagcgttggaaagagtgggtacatattgtgactgcccaatgttgaaatctcgtaacatttatttattctttattactagacttgttagcctaatgttggaagcattttgagataatcaaggttccttcaaagcaagaagaggatctggttatggtaccgtttcgtttgtaaccatggtaccgtggagattcttttgattcgattctcgattgtgctagttcaaagttcttagtggttaaaaaatcagaaatatttgaagcttttagcaggattttggctttttttcacataaaatcggattataaggggaaacgagccatatgtgaagtgcatgttctctcatgttgcttatgataaaaatatttggatgacttgaacccgcccatggtttttt

SEQ ID NO: 35513 - DNA, 532 bp, Zea Mays
cacgattttaaattacaagatctagcagtacacgtttgatctcggatcgacgacccgcgtccatccaggccgaaacagtacaccattgatttaatctggatcgttgatttcttgatccacaaccatgactccttctacctcccgactcgtctgggcaacgacaccgcgccccagggcaatgcccccaccggaaccagacgaagggcccccagacgctcgtagcacggcgatagggtatggcagcccccccaagcaaactcccacagcaagcccccaaaaccaaaacccaccgctgctaaattatgcatgggacatggtgattatgaggggggttccataccagggatgatcagaatgatggggctgaccacggtctagcagaaatcatcgacgttcaaacgacacccagagctgcgatccttctctagcctccgaatttgacgatcccagctagcttccagcacggtttggtgatgacgaatccctcccctcgctcagttcttcacggtagtactcaaagtttgtgatcgac

SEQ ID NO: 35514 - DNA, 1344 bp, Zea Mays
cggccacgctcgccgcgggcacacgcggcgcgctgtgctcacccctgtctgcctgcgcgcccggcacgcccgcgcccactcacgcccggccctgccccgcgccctcatcgtctcctcccggcctcccctcaaagcccaccgccgctgcccccacgccacccaccccaccccgcccccgcccctaccgcgcggtgcccgagacccagaggccagacccctttcttcaccttccttcccatcgcaatcgcaagcccccggctccggcgctcggcggtcggccaggttcgggagatcacttcgtcgcggcgaggagggagggggtcgccgttagcgcgcggcacttggatgagaagggcagcggtggaggaggatgcggaaggcgtacagggactccatcaaggtgctcgaagctgacatccagcacgccaacacccttggacggactgcagcctcgcaggggctcttggtctgctgagaatcctcatatacaaggtttatgtggatggcacaacaaccatgtcgactcatgagaggaaagccagcatcaaagaattctatgctgtgatatttccttctttgctgcaactgcaaagggggatcactgatgtcgaggacaagaagcagaaggccatatgcatggagaagtacagaaagaaagatgaggatggacgggacaccttatctgatattgatgttgagagggaagaggagtgtgggatttgcatggagatgaacagcaaagttgtgttgcccaactgcacccatgctatgtgtatcagatgttaccaggactggagttcaagatcgcagtcctgcccattctgccgtgacaacctgaagaagacctgtcctggtgacctgtggatctatgttgaggaccaagatgtggttgacatggagacggtgtcgagcgagaacctcagacggctgttcatgtacataagcaagctgcctctgattgtcccagacgtcatcttcagtgtgtatgattcccacatcaaatgacttccgacgcgaccttcctgacgaccttcagccagtgcccagctccagttaatcttatgcccccatgtcctccattttcatgctttgctcaagcttttggaagtgcctgaactgatttggaaccgcaagccttccggtggtgctttagaaacttgtttagtgcctgcatgcatccttaatcatatgcagccactctgtacatatctgacttggctcagttaataggggactgtgcttgccccaaatggaggcagggccgtttgtgtctttctcatgtttccattagcgaagcaacgcaaagttctggggggcattggaaggtttctgctgcaatgttag

SEQ ID NO: 35515 - DNA, 1275 bp, Zea Mays
atggcagagcatctcatctctacggctgaccacgacaggctgccggacagctacgtccggccggagacgcagcggccgcgcctgcgcgaggtcgtccccgacgcggagatccccgtggtggacctcgccgaccccgaccgcgaagccgtcgtcgccagggtcgccgaggcgtgccgcacccacggcttcttccagttgctcaaccacggggtgccggagcagctgacggcggcgatgatgtcggtggcgtacgaattcttccggctccccgcggaggagaaggccaagctgtactccgacgacccggccaagaagatgcggctgtccaccagcttcaacgtgcgcaaggagacggtgcacaactggcgggactacctccgcctgcactgccacccgctggagcagtacgtccccgactggccggacaacccaccatccttcagcgttgctggcgctttgatgtgcactggccgctcagtgtcagtgggagacgagcttgcagtgtgaatggtttatttggtcaaaactgcgcctctgagtgcgcttctgatctggtatagtcgcagcagaggctaagaaagggttcctgcccgtcgtcgacaagaaggctggctactctttcctctacccgttcggatgggaggaagtggctgtgcaagggcaagacaaggtgtacaaagatgtgatagagcctctcgagagtgtgagcgtcaactctattccaactagcaaggaggatatccgtgatcttggtcctccggataaggttgccgaggctctgattaaaaaggttttggcaccatcaacacagaagacaaagttaattgaggcgaaagagaatgatgttgatgggagggcttactacacttttgagttcacagctcaggctccaaactacaccagacatgcacttggtgctattgtaattgcaaatggcaaattttacacattgaccactggagcaaacgagaggaggtgggaaaagatgaaggataggctgcatactgttgtggattccttcaaaatcgaaaatagaatatgagtgcctgaattgctgtgttgtttttccttcgttgattcgctttttcttacataactgcagtgctgagatttttcagtagtaaataccgggattgtggattatgctgatcagtttcatttcgaaatgtttgttaccagacttgagcaacatttgtttgtactttatgtgtataataataatatcttgtttggatgtagatattggagcataaaattgggaattagaatcaatgt

SEQ ID NO: 35516 - DNA, 968 bp, Zea Mays
ggctgagtgcgcgcccatcagtcccgggttcccgccacacccctcccatccccctctcaatcctgtccccaaatctctctcttctctctagcggcgaggcgaggcggtgaagacgagcgagcggcgaggatgttgtgggtagacaagtaccggccgaaaaccctagacaaggtcaccgtccacgaccaggttgcgcggaacctcagaaagtgtcggagcaggattgcccgcacctgctgttctatgggccgtcggggtccgggaagaaaaccctaatcctcgcgctcatcaagcagatgtttggcgccggcgcggagaaggttaagctggagaataagacatggaaaattgatactggaacaaggacacttgagatagaattggcgatgttgtcaagtgctcaccatgtagagatgaaccccagtgatgctggctttcaggacaggtatgttgtccaggagatcattaaagagatggccaagaacaggccaattgatgccaaaggaaggagagcatttaaaggagcacaagatgcgccttggatcaaaggctatttttcatctggaagctttcgtggccaagttcatgagcatttacaaggagttcctggtggctacatttggttgagcaaaacctcgagctacaattagggttgtcacgttctgtcaggggctatcgcattgtatcggtatagttttgtactaatctcgtcagcgactatccttctgtcaacccgggtgacccctctgacttcatcatagcgtctgcttgcacgttgacgttcgtgacgacattatcagacgtcattacgcttggttaacaaacagcctgaaagcgggacaggctcggaagttagaaataacagcctgtgaagacgtagacgttgatgacgacacgataagaaatcatttcgctcggttaaagagaatatccttaatgtgcggcagactcagaattcagaaccaaat

SEQ ID NO: 35517 - DNA, 483 bp, Zea Mays
gttacaagttacatcaaatttacattatgtttatcagagtgattacaaagtgattcaaagaaataactttgaactgttataaattatttatagttttgaattatatgctagctccaatgaccatcctcaataagaagtataggagaggtacttagacttataagaaggccgagcccaccggcacttagcaccattcacagcaacacacttctattttcggttcttcctcctgcatgtggccagttaagatagtccttgatcatacaggcctacatacacatccaatccttaattaacctgggcggagcatcacatgttcctagcccaagtctcgagttaagtacttccatccttaggagtgtttgtgttccttaggatgaaaagagcattatagggaactttgcagtaagatcccaccatgctcccaatgaaaatattcttgcaggtagaagtcatccttcctcaggataaacctgagctagg

SEQ ID NO: 35518 - DNA, 1796 bp, Zea Mays
agaagatgatagaaagacgctgatcctagccttagccaaacaaagctccgacgaggcagcggccacggccagctggcatgctcctgctgcggcgccttgtccgggccggccggtcgtggggcaccgaggcgagaggcctcgcctcgggggccccgcgggaggcggcggacgccgtggtggtgggagcgggcgtcgtcgggctcgcggcggcgcgcgcgctggcgatggccgggcgcgaggtagtcgtggtcgaggcggcccccagtttcggcaccggcaccagttcccgcaacagcgaggtcatccacgccggtatctactaccctccgcgaagtcttaaggctaggctttgtgtaaggggaaaggaaatgctctacaagtactgtgaagaacgaggtgttgcccacaaacgaatcagcaaactcatcgttgccactggtgctgcagaggttccaaagttggacatgcttctcagaaatgccaaagaaaacggggtggatgatcttcagttgatggagggttctgaagctatggagatggaacctgagcttcgatgtcttaaagctttactatcacctagtactgggataattgactctcattcactcatgctctcccttttggctgatgctgaaaacttgggaacaactatatcatataacacatcagttatcagtgggcatgttggatccaatggccttgaactccatgtttgtgaaagcaaagagctgcagaattatcatgtagggtctcatgtgaacgcacaacttgttttgcttccgaagcttgtgataaactctgcaggtctgagtgcagttctacttgccaaacaatttcatggccttgaccaggaatttgtgcccactcctcactatgcgcgtgggtgttacttcaccctctctcaaaccaagagtcctttcagtcggttaatatatcctctaccagaggatggtggcataggagtccatgtcactttagatttgaatggccttgttagatttggtccagatgttgaatggatatctgatggtggaaaggaccatgtgtcatgttttctgaacaagggtgggatgtccatggtgttcctggactggttaatttgtttggaatagaatcccctggtttgacctcaagcttggcaattgctgaacacattgtttcaaagtatttgtgatgggagtctcctatacaaagcttcattgccagatgctccatgcactgcagaatgatgaacctgacgtgtcaggaccagggttcaccaaagaaaatcgtacagtaaaaacaacattttgagctgttttttttcttgatcatttggatacttattgcatgtgactgttagaagatgaaattctatgaaagtttcagcgaaacattaatatgatggagattgaacgggtatatgacactttacgggcatggtacctggtctggactctgaatgtggactagagaattataccaagttgcttgatagatggcgcaactccacttctagttgcacaacggaaattgtaataagcccaacactgtgatacatgttggtgctagacctagacatttgtgtcggtcgggcatcacttgctgctatcgaaacatatcacgaaacagacgaattcaaaagaatgaagaactatgaattgggatatgatgcataggattggtcatattgaatcacattgagatcgactttcgttttatctatgaacgtgtggcggactggcggctggtgccatgtgtttactacctctttttgacatcttcacaaggacgtccatgatattcttggacttccg

SEQ ID NO: 35519 - DNA, 2872 bp, Zea Mays
acaacgaactatcctgttagccagccctaaacccttctgtcccgatggcgtcgtcgtcgtcgccgccgccgccgaagctgccgattcccggccgccgcaacatactcatcactagcgcacttccgtacgtcaataatgtcccgcacctagggaacatcatcggctgtgtgctcagcgcagacgtgttcgcgcggtactgccggctccggggttacaacgctatctacatatgcgggacggacgagtatggcaccgccaccgaaacgaaggccatggaggagaagtgcacgcccaaggagatctgcgataagtaccatgctatccacaatgaagtttacaagtggtttaacataaaatttgacaagtttggacggacctcttctcctgagcagacagaagtctgccatgcaattttccataaattgatggaaaacaattggctcacagaaaatactatgcagcaggcttgttgaaggaacatgcccgaacaaagtctgcaacgcatcagcaagaggagatcagtgtgaaacatgcagcaccttgttgaatccaactgaacttattgacccaaagtgcaaggtttgtaagaacactccacgtattcgtgacacggatcacttatttttggagcttcctctattgagagacaagctggtaaactacatcaatgaaacttcagttgctggtttgtggagtcaaaatgctattcaagcaacaaatgcatggctgaaggaagggctaaagccacgctgcatcaccagagatcttaaatggggtgttcctgtcccccatgagaagtataaagacaaggtgttctatgtttggtttgatgcacctatcggctacgtgtctattacggcatcctatacacctgagtgggagaagtggtggaagaatcctgataatgtagaattgtttcagtttatgggcaaagataatgtgccgtttcacacgatcatgttcccttcaacgctactcggaactggggaaaagtggacaatgatgaaaacgataagtgttactgaatatttgaattatgaagcaggcaaattttccaagagtaaaggtattggagtctttggtaatgatgcaaaggatacaaatattcctcctgaagtatggcgatactatttgcttatgaatcgccctgaggcatcagatacactctttacttgggctgatttgcaagccaaattgaacagcgagttgctgaacaacttgggaaacttcattaatcgtgtgctaagttttgttgcaaaaccagctggagctggatatggttctgttgtacccgatgcacctaatgcgggcgcgcacacattgacaaaaacacttgcagaaaaaaccagtaaatgggttgaacaatatctcgacgcaatggaaaaggttaaactgaaacaaggactcaagagtgcaatgggcatttctagtgatggaaatgcatatttgcaagagagccagttttggaaactttacaaggaagatcctgcagcatgtgcaatcgtgatgaaaacttcagttggccttgtttacctgcttgcctgtctgctggagcctttcatgccctctttttctgatgaagtgttacgtcaactaaatttatctccagaagaaaatctgtcattaagtgaagaaaagggagaaattgcgaaggcaaaaactccttggaattttgtaccagcaggtcacagaatagggaaacccgcacctctgttcaaggaattgaaagatgaagacgtagctctccatagagaaaaatatgcagggagtcaagctgagagaagctcaaaagcagcagctgatgctgaagccaacaaagttgctaaccagctcaagggcacaaaattatctgatggaggaacaaaaaaggaaccgaagaaacaatctggtggctcaaaatcgaagacagctgaggctgacattacagttgcaaagttggatattagagtggggcttatcagaaaagcagagaagcatccagatgctgattccctttacgtggaggagattgatgttggagaggacgcgccgagaacagtagtcagtggccttgttaaattcatacctcttgaagaaatgcagagccggaaagtctgcgtgctctgcaatctgaaaccggtggcaatgcgtggcataaaatcacatgcaatggttctggctgcatcgaatgaggaccacacgaaggttgagttggtggaacctccagagtctgctgctgtgggggagcgtgttacctttgctgggtacgcgggtgagcccgaggcttccctcagtggcaagagcaagacgtgggagaagctggccgccgagttgcacagcaacggtgagctggtggcgtgctacagagatgtgcccttcactacctcggctggagtctgcagggtgaagacaatagcgaacggagagattcgctagtaccaccacatcaccgaactgcagccagcggagccagtctgtgtctggtttcgctgaaagcgattgttcctgattttcatcttcgaaaattttggtatttccatttgttcaaataccgcaaagcaaccatgatttagaaaaatacagagagtgccctttccgcatcctcttttttatcagttagtacttggctcctgttgtctcactcggaggctccatgcttcttgctctatctgtatttccttagaagtgattctttacctgctcttatttatagttccatatgaaaggaacgaagtgtatcagaacatcactttatatataggagggcctgtctgtcactgccccctgtcaatgcatggaaaggagcaagcaaggaagcttgaaggaactgtaaacagagcttggccaatgggcagcgcccgctagattcacgaacgaacgaccatgattgccg

SEQ ID NO: 35520 - DNA, 3358 bp, Zea Mays
ccacccctaccgcctgcctcagatctcgatgcggcgcaagcttcccggagacgcgccgctgtcggcggcgagggccggtcatgcttcgtccgcatccgcgccgtccgaggcggacctggctcagctctccgcggccatcgcagccggggaggacctgggccccttcgtgcgccgggccttcgcgtgcggccgccccgagccgctgctcgcctcgctccgcggcgcggcgcgggaccgagaggccgagatcgaggagctctgccgcgcacacttccacgatttcatccgcgccgtcgacgaccttcggtccctcctggccgacgccgatgcgctcaagggctccctctcggcgtcccactccgtgcttctctcctcggcggccccgctgctcgcctcgcttgagtccttcctcgctgcgcgcttgctcgcggggaacctctcctccgcgctagcctcctcccgacggtgcgtacggctgctcgcgctcgcggcgcgggcgaacgcgcacctccaggccggcaaccatgggctctacctcgccctgcgcgccgtcgacgccatcgaccgtgatctcgcctcgggatccgagctgctgccgctacccgcgctccgccgcatgcttctcagcgtcgtccctgcggtgcgcgcgcatgccgagcgcgagatctccagggagttttccgactggatggttagcatccgcgctgcttcgaggcacctcggtcaggtggccatcggccgctcggctgccgccaggcagcgccaggaggagctccgctccaagcaccgcccgctggagggctgcatcaccttggatgacgatggagttggtgacctcgatgattttgcggcagccgcggcaactgctgacgcggcagatggtgctgctgcagcctcttttgaccttacgccgctctatcgagcgatgcatatacaccagacgctggcgctgggtgagcggttcaagaagtactacctggaaaacaggaagctgcagctgacatcggacttcgatgtcattgcggcgacgccattcctagagtcccaccaggtgtttttctcgcagattgctgggttttttattgttgaggaccgggtgtttagaacagggggtgggcttacatctcggccagatgtagatgcactttgggatgctgctgtggggaagatggtctctgtgatggaagacaacttctccaggatgcagacagcaaatcacttgcttctcatcactgattatgctgctttgctttcggccacaatgcggcggtacggttatccagtaggaatgctgctcgatgtgctggctaagcacagagacaagtaccatgatttgctgcttgcagattgccgtaggcaggtggcagaggcactggctgcagataagtttgatcagatgctcatgagaaaggagtatgaatactcaatgaatgtccttgcatttggaattcagagctcagacatcaccccagctttcccatacgttgcaccgttctcctgcactgtcccagatatttgccgtattgttcgctcattcattgaagattctgtgagcttcatggcacaagggggtggtggggatacttatgcagcagtgaagaagtaccttggccgtatcctttctgaggtggtggatgcttccattcaaaaacttgttgattcaggcagtggtctaagtgtgtcccaggcaatgcaggtcgctgctaacatgtctgtgatggagcgggcatgtgagttcttcacacgccatgctgcacaactgtgtggtgtgccactgcgtgctgtggaccgtggtcggcgggacttcccacttcgcaggtcacgtgatgctgcggaggcgctcctgctgcggctcctatgtgctaaggttgatgagttcatgcggcaatctgatggtgttaactggatggctgatgacgctcctcctggcggcaatgagtatgccaacgaggtcatcatctaccttgagacgctcacatcaactgcacagcagatccttccccttcccgtgctccgccgtgtacttgtggcagtgcttgcccacatctctgaaaggatcattgagctcttcttgaacgattcagtgaagcggttcaatgccaatgcggtcactggaatagatactgatctcaaaatgtttgagacgtttgcagagggcatgtctagcctgttcgtggactcaggtcaagaatctgcaaaaaatgaaatgaaggctgcacttgtggaagcaaggcagctagtgaatcttcttatgagcaatagtccagagactttcctaaatccagtgattcgtgaaaagagctataacaagctagattatagaaaggttgcaatcatctcagaaaagtttagagatacctcagagagttatttctcaacattcggaacaaggggtgccaggcagaacccaaagaagaaatctctggataccctgatcaagaggctcagagaagccagttagatatcctccctgctgtaagattatatacatgcaactggcttctcacatcctgattttttcatgaaagtctgtatcttgtttgtgttatgcctgtttcttgttaatcttgtgctgtaactttgctgttgttagattctatgtttcaaatgtgtggatatcttcctgttgattctattgccatttactatatgatcgagaatctcataatggttaatttttcctgtgaggagaaagtgcttgataagctcactattttatatttttcttcagaagatagggatgcttttatttcctccctccagttccatgcacttggtgacaagcgacttgatgttatatatttgaaagttataaaggggctttggagttcaatttacctcgctgtttaggtatattgaaattggatgatgactaacagggtagatgattgtttggagctgcagaacctcagtcatttttccttaccaattcagaaatagcgaatctttaaatcaacagaggattttcctaccaatatagagaaaccagatccataaagaatatgcttttgcataagcatacctccataagctttgtgagctgtgttcatgtccaaaaggactcgcaaagagaacagggactacaagttggtattgtcattcggtgaaaatatggtcattgcacaaaagcgtcccatctgcgcacataattttcaactgtgatcatggcacaaaaagaaaatgttcaagcctgtgcacatttattcatgttggaagtgtgatgatcagctcatttgttacaaataagatgaagtttaaccatttagttctgcaattcatcgcctttgtagtggcaagaattgttgatttatctttaaatcaggattgttgattttcatctatgttcatgggatgggtg

SEQ ID NO: 35521 - DNA, 2686 bp, Zea Mays
ctgactccctcttcttcgtcttcgcgagcagcgaggcatcacacgcgcctgcacgatctcctcctgcgagcgagatctcaccaccgcagcggcgccgtggccatggcgggaaggtactaccagggccagggcggtggcgggggcacgtccatggaggtagtcagcacgccgaaccaggagctggccctcaccaactgtgcatacgtctgccccgcggacctccgtcgcttccccaacgcgctcgccgtcgtcgccgactcctgggtcttcaccctacgtgaacacaatgctgtcgcaagcgggcgcattgccttgaatgctattcaacgtcgtcaggcaaaggtttcagctggggattctgttactgttagcagttttgtcccccctgatgatttcaagttggctttgctcactttggagctagagtatgccaaggcaagagccaaccgaaatgacgagctggatgctgttgtgcttgcccaacaactccgtaagaggtttctggatcaggtcatgaccttggggcaaagggtgccatttgaatttcatggaacaaactatgtattcaccgtcaatcaagctttgctagagggtcaagagagttctacaccattggatagaggattcttgtcaagtgatacatacatcatatttgaggctgctcctaattcaggaattaaggtgatcaaccaaaaggaagctgctagcagcaaacttttcaaacataaagagtttaacctggaaaaattggggataggtatactgctatatggacctcctggtactggcaagactcttatggcacgacaaattggaaaattattgaacggaaaagatcccaagattgtgaatggacctgaagttctgagcaagtttgttggagaaaccgagaagaatgtgagagatttgtttgctgatgctgaaaatgagcagaggacacgaggtgatcagagtgacctccatgtaattatatttgatgaaattgatgccatctgcaagtctagaggatctacccgcgatggtacaggtgtacatgatagcattgtaaaccagctccttacaaagatagatggtgttgaggcgttgaataacgtattgcttattggaatgaccaatcgtaaagatttgcttgacgaagctttattgagacctggacgattggaagttcacatcgagataaacctgcctgatgaaaatggtcgtttccaaattcttcagattcatacaaataagatgaaagagaattctttcctatctccagatattaatcttcttgagctagccgcaaggacaaagaactacagtggagcagagttggaaggtgttgtcaaaagtgctgtctcgtatgctttgaaccggcagataaccatggatgacctcactaaacctttggatgaggaaagcattaaggttactatggatgactttgtgaatgcacttcatgaaattactcctgcatttggtgcttccaccgatgatctcgaaagatgcagattgcgaggtattgttgactgtggtaaggcacataagcacatttaccagagagctatgctccttgtagagcaagttaaagttagcaaaggtagtccacttgtgacttgcctgttggaaggtcctgctggaagtggtaaaacagctatggcagcaagtgttggcattgacagtgattttgcatatgtgaaaattatatcagcagaaacaatgattggtttcagtgaaagcagtaaatgtgcacagatttgcaaggtttttgaagatgcatacaagtctcagttcagcatcatagttcttgatgatatcgaaaggttactggagtatgtagccattggaccacgtttttcaaacttgatctctcaaactcttctggtcctcctcaagagggttcctcctaagggaaaaaacctgcttgtgattggaacaacaagcgaggttggcttcctagaatctgttggaatgtgtgacgtgttctctgtgacataccatgtccccaagctgaaaaaggaggatgcgaaaaaggtattgcatcatcttgatgtgttcgatgacggggaccttgatgcagcagcagaagcactggatgatatgccaatcaagaagctgtacacgcttgttgagatggctgcacaggggccaaccggaggaagtgcagaagcaatttatgccggagaagacaagatagatatcaaccatttcttcagcatcttaagtgatattatccgttactgagcccgcatggatcctaggtatccagtgggaggttatttgcacctgtgcttcatcaccccttgtggcatccttacagcgtgttaagagtggtttgatgtgttgtttttgtttggtgcgcctactagagctgttggatttgaccagaggcgaattccacgatatagcgttttttgtattgtatgacgatgtttctacagttgataataggatccagctatagacctcagaaaagaaatgaatttcattctccttttacatatggttccagctcttctgtgctcatttttagaatacgaacaatctgttttaaggctgcaaggacgccctaatcgaacttcagccacctggaatcggcttctccgctggtcactatactgctgcagctagcttatagatcacttattttgaacattgtggttgttagaaaattagttattttcagttgcattttaatccagaa

SEQ ID NO: 35522 - DNA, 1686 bp, Zea Mays
gactctcacttcctgtgtgctctcgtcgcctccgatcgaatcgtgtcgggcgggctcgtgcccgatcttgtctggtcctgtcttggctccccgccaggaatagcgcaccgagatcccttgcgcgcacggaccagcagatcgcgcgcgggagtgagagggcgacagggcgtggccgcgaggtgggcatgggatcggagggacgggtctggaatggcgcgggcgtggccgccggcagcggctatggcggcagcgtcgaggcgaaagcgaccaccgcggcgcccgcggacgttcccacgtcggcggcctccgtcgacatctcgctgccgctcccggagatgtcgcctcacatcataggtctctgcaaggagttggtcaaagggtggtcgtcgattgacagctcgcgcttctccatcgagaccgtgtctgggggcatcaccaatctattgctcaaggtttctgtcaaaggaaacaatggcaatgattcttctgttactgttcggttgtatggaccaaatacagacttggtgattgatcggaaaagggaattgcaggcgataccgtatctctcagctgcagggttcggggctcggctgcttggaatgtttgaaaatggagtagttcagtcattcatctatgctcgaacactgtcacctgcagacatgaaagaacctaaaatagcagctgaaattgccaaggagctacgcaaatttcatcaagtagatataccagggtctaaagaaccacaattgtggaatgatatattcaagtttttgaagaaagctgcagcattgaagtttgaggataacgagcagcaaaagagatatgtaaagatctcatttacagaaatacaagatgaagttaaagaacttaaggatctcttggacattctgcatgcacctgtggtttatgcacacaatgacttgctttcaggaaatctgatgctcaatgatttggaagggaagctatattttattgattttgagtatgggtcatacagctaccgtgggtatgacattgcaaatcatttcaatgagtatgcaggatttgactgtgactttaatttgtacccagataaagatgcccagtatcacttcttcaggaattatctgcatcctgatagacctagtgaggcacaagatatggaagtgctttatgtggaaacaaacactttcagactagcatcgcacatttactgggcattatgggctcttattcagcacttgaatgcaggcaaaggtatccccaattgactttgactatcttggatacttcttcttacggtatggtgagtacaagaaacaaagggactcctgcttcgccttggcacaaagtttcctctccgggctaagaaatggctagagcctgagaatctggtcaagggtttgcactgttgtacgcatactcggggcgggtacgcgttgtgatcatcgtctgctactcagaaactctattatagtggtggtagcagcctcattttgttgtatctgatggtagtttcgtcatcgcctgataggaaagtctcatgatcgccctcgggaacgcagggtggcgagatctgtacttatatttgtaataaacacaatccggatgggttctgtcctgtgcaatttgttgtgcgcataagcattccgtgtttttatacattattgtgaggaattgcataagtttttttgtttttcgattaaa

SEQ ID NO: 35523 - DNA, 2831 bp, Zea Mays
tcacttgcatctaggcttctagctgtactcctcggccggtcggtcccacccatggacagtgacaatgattgcggctccgacgccggcgccgagtgggtctgggtacgccgtccgtcggaggttgaggccgctgccgcggcggccggatggctggcggatgaagaggcgcggccgctcaaggtggtcttcggctccccggctaagtacttcaccgacgcagcgccgatcgggaacggccgcctaggcgccatggtctggggctgcgtcgaatctgagaggctccagcttaaccatgacactctatggacaggtggacctggtaattatacaaatcccaatgcacctgctgttctttctaaagtaaggagccttgttgagaacggaaagtaccctgaagccacatctgctgcatatgatctatctggtgaccaaacacaggtctttcaacctcttggggatattgatctggtctttggtgaggacatcaagtacacaaattacagacgagagctagatcttcacactgcaacagtcaccgtcacatatactgttggggatatagtctacacaagggaacatttctcctcaaacccacatcaagtcattgtgactaagatctctgcaaataaaccaggaaatgtctctttcacagtgtctttaactagtccactagaccacaagattcgtgtaacacatgcaaatgaaataatcatggagggtagctgtccaggccaaaggcctgaagagatcaagactgctgctgatcaacctattggaattaaattttctgcgattctttatctgcagataaatggtgccaatagcacagtggaagtattgaatgataacatgctgaaacttgattgtgccgactctgttgttttacttcttgcagccaccacttcatttcaaagtgcattcatcaaaccttcagaatctaaactggatccaacagtgtctgcttttacgacattaagtattgctaggagaacgtcatattcacaactaaaagcctaccacattgatgattaccagactcttttccagcgtgtttccttgcaactatcacaaggctctaattatgatcttcggaggagtaggctagttcagtcagcagagactagttctcagggtgctaatgtatcggattatggttttcaaatatctggctgcaccagattgacatcccttaatagttttgtgaagcctacggtagaaagaattgtaactttcaaagacaatgaagacccttctcttgtggaacttctgtttcagtttggtcgttatctactcatttcgtgctcaaggcctggaacccaaatttccaatctacaagggatatggagcaatgacacttcaccaccatgggagtgaattatgaggctagtggttgggtcagtcatcaagtcacagacttatgggcaaaaacatcaccagatgctggtgatcctgtatgggctctatggccaatggcattttttagagaaaacagcgtatccactattggaaggatcagctaggtttttgttggattggttaattgaaggacacaggggatatttggagaccaatccttctacatctccagaacattattttattgctccagatggtaaggaggcctgtgtgagctactcaacaactatggacatctcaattataagggaagttttctcagctcttatattgtctgctgacattttaggtaaatccgacactaatgtggtgcagagaataaaaaaagcactgccaaatctcccaccaatgaaagttgctagagatggcacaatcatggagtgggcacaagactttcaggatcctgagattcatcacagacatgtgtctcacttgtttggtctttatcctggacatactatgtcacttgaggaaacacctgacctctgcagagctgttgccaatagtctttataaaagaggtgacgaaggcccaggctggtctacttcatggaaaatggtcctatgggctcgccttcacaacagtgaccatgcatacaaaatgatactgcagctaatcactttggtggatccagaacatgaggtttcaagagaaggaggcctatacagcaatctgttcactgcacatccacctttccaaattgatgcaaattttgggttcccagctgcgttgtcggaaatgctggtacagagcactgggaccgacttgtaccttctccctgctctgccccgcaacaagtggcctcaaggctacgttaaaggtctgaaggcccgaggtggtgttactgtaaacatcagctggaaggaagggagcctccatgaagctctgctatggtctagcggcgggcagaataccctttcaaggctgcactacggggaccagattgccaccgtcagcctatcatcgggtcaagtttacaggttcagcatggatttgaagtgcttgaagacttggcccctgtgatagcacacatttgctgaaatgaaagatacgattgattgtgcaaaaattcatgaaaacttctggctggcaagaaaataatcgatttcatacatcaatcataacacgtatcatatttcttatttactgtgtatgtttagttacatttcactgtatacatgtttactcgttgcccgtgccaagtgctatacagtgcacgactgcatgtgcattctgttaacatttttttagatgggaacatatcgaatgcaaaccacgttttggtgtaaacttcgtcctactaaaaaaagtttcaaaaaattctgaaaaaacatgaatgtacatctcagcttaacttatctatatacaaactttcatggtaaaatttatcttactctagcagttaaaaaaacaaa

SEQ ID NO: 35524 - DNA, 1967 bp, Zea Mays
ccccaccgcacgcatccagtggctgctgccgcctcgcccccgctcctcctcctctcccgccacccacgccgcgcaggcctcacctactggtcgtcgttgcctaggggccagaacgcagggcccacagccccgccgcccgccaccgcctccaagcctgctgcgccgctcactgtcaacctgcctcgccaagtcgcccggatctcgacgccccacctgcggccggcggcggccccgccaaggtgccctgacagacgcggagacgccaccagaaccacggagttcgtgcgctggctggttgtctgcggaagactctccctctgctccgccactgccgccacctccctgctccaaccccgcacctccgcttcgccatgaacccttcgtcgtcatccacctcctcctctggcgggtaccactctagggccgctgcctttgcttccccgcagccgcgcggcggtggcggtggcggcggccgagatgggagcgaccgcatcgacgccctcggtcgcctcctgacgagggtgttgcgccacatggcggcggagctgcgcatagatatgaggaccgatggatacgtgcgcgtccgcgacctgttgaagctcaaccttcagaccttcgccaaggcccctctcaagtctcacactgttgacgagatcagggaggcagtcaggcaggacaacaagcagcggtttagtctgttggaggaagatggcgagctgttgatccgggcgaaccaggggcacacagtaacaactgtcacatcagagagcctgctgaagcccattttgtcccccgacgaagtgtcagaaaaaaccttgactcgattttgcaatttgggctaaagcgtatggcaaggttacacatacatttctcaagcggcttaccatcagatggagaagtaaccagtggtgtacggcagaatgtaaacatcttgatacatctggacgttagtaaagcacttaaaggtgggatgaagctttatatttcagacaacaaagtgatcttgacagaaggttttgatggcgtcgtcccggtgaaatactttgaaagagtcgaaacatggccaggacgagctccaataccgttccagagataacaggccatgttaccatttttcgacgagttagtttctctgtgcctgaggatgtcaagagggtttgccaaccatctatcctaattaatggagtacgagaagtttgcggagtatgagcagaagtactcagaggatgcagcaaccaaacattgaaaagtatcatggggagttgcctgcctgctgggctgatgcccttcctcagctcagtttggcaacttccagaagcatacgcctgaggtgcgcaacgtctgcttcggagcgagggagcatggcatgggcggcatttgcaacggtgggcacagcccagggctccgtttcatggccaacgactgctatgcaagcagtccttctttacaagcgtgcaagcaaacatccggtccattagattacgatccaaccacagatataactataatttgttatggttttttataaagattattgagttggtggtgaaaaggtttaagtattaaatgtgacctacggttgaatcacgatctaatggaccagatggtttgcttatggtttgcttgcacgcttgcaaagaaggactgcttgcatagcagtcgttgccccgttctatgttgttggtacctatcttgcttctctgatcgatcaataaaaggagacattatttgagggaccctttttgggtgccttgtatgctgtagctgttcaagtggctgaataaggctgcaagtcttgtgtaaggtgagactctgatgcataagctttgcaacttgcaagtgatgttggattttggaatgttatcaactttagtacacgttttctggccgtctgatcgaatcctggacaccaggggtagaattaattggtcgatcagagctgttaatcgtccaggccttgaaaaacg

SEQ ID NO: 35525 - DNA, 2660 bp, Zea Mays
gtgtaggcccagcgtgtcagacactgaggctgttgcagccgtgattcccgagtcccgacgactcgcgcggtcgcgcccctcgccttctccgctggtcgactggtccggctggtcttccccctcggcatcgcactcgcacctcccaagcgtgcctgaatctcagacttgtccccccactgcctcggccatggctgtgcgagccacggtctcccgcttcccggccacgccggaggcgctggagtcgtgcgccgtccagtggggcgtcgccgtgacgcccttcgccgccgtcgacgagcgcggccagcccccgaccaccggcgccggcggggaccgcatcccacgctgcgagcactgctgggcgtacttgagcagccactgcgatctggagcgctggggctggacctgcgcgctctgcggcacgctcaacggattcgacgacgaggccgagcgacggttccagcgtcccgacgcctgccccgagctcaattcctctttcgttgacctcgagatcgcagtggatgaggcaggggctggaggagacggcgtgcaggcgctgcctgtttatgtggccgcagtggacctcgcatgctctgaagagttccttgaacttatcaagagtgcacttcttgcggccctagaagctcttattccgggctccttatttgggcttatgacattcagccacaagattgggttgtatgatgtccaaggttgacacatgcaaggatcgaattgctgctgccctggagacactgcgacctacatcttcatgggagagaggggctgcttctgggcatgaagaggatgctgttttgcttggcggacgtggttttgggacagccatgtctgctttaattgagtacctaagttcaggatatggttctacttttgctttggctcgagtatttgcttttctgtctggtgctcctgattatggagctggtctgctagataccaggagatatggggagcaatatgctagtaaaggggtagacgctaaccttgcattgctccctgaacagatacctttctacagagacctagcagctgttgctgttcagtcaggagtttgcatagacatatttgctgtaactgatgaatacacggatttggcttcactgaagtttttaagtattgaaagtggtggatatctatttctttatgcaaatgcagatgattcaacacttcctcaagacatataccgcttactaagtcgaccctacgcatttggttgtgttctaaggctgagaacatcttcagattttgaaccaggcaattcttatggacatttctttcctgaccctcagtatgaaagtgtgcaacacattatctgctgtgattcatttgccacttatgcatatgactttgagttttcccataacaacggtttctccaggcatacagatcctgctgttgtgcagatcgcttttcagtacagcgtgattgaacctgccaaggagacatcaggcgatggatcacaatcatctgcaagttataagttctctctaaagaggcggctgagaataagaacattgcagtaccgtccagctaggaatatcagtgaaatttatgacagtgtagatccagaggttgtactgcatatccttgttcataaggttattttagaatgcgtggataagggggttagagaaggcaggcatcaagttcatgcttggctatccctccttgcagcccggtataatcaggtcctgagttctgatgtgcgaactccactatcgagcatagacattgacttctcgcagtgcccgcagcttcaaacgatacctcaacttgtttttgcattgttgagaagtcctcttcttcgcttgcatgaagaaggtgtacacccagattacaggatatatctacaatgccttttcagtgcactggagccatcttctctagctaaagctatatatccggttttaatatcgtattcctcgcctgacaagcaagcattcccacgacacactctcagccgtgctgctctaatcatgagcgagagcccaatatttcttcttgacacatttaccaaccttatcgtttactattcctcaactgctgatccttcatttccttttcctccaccccgtgactgtcttttgagaacaacaatcaataaactgaagcaggacagatgtataaccccaaagcttacattcatccatggaggggaagatgattcaacattgtttgagagctatctcattgaagagcaagatgtcgatggatcaggtcttacaactggttcaggttttgtagccttccgtgagagcgttaggaatgttgcaggagagatcatccaggaagaaattggaagctagtttcagctagaagacccttttggtcccgctgcagagcgtataaactcggatgctttttaaccctaattaatatcgtagtagttaacttagatagccaaaatggagaaacaatgtcaaaataatatgaggggccacatgatttgtagttgcttctggcaataactgctttaggcttgattaatcagagaagcctttctggtacactggtaaaagggtcgagtacaccaatacaccgtgtgatcctggctgtctgattttttttggagaactcaaattttggtgtatattaatgctgctgtttattccgattaaattgaggccgttcgaaacctagag

SEQ ID NO: 35526 - DNA, 2793 bp, Zea Mays
taaaaccccaccggttttcttttcccgcggcaattaccataaaaagagctcccaatctctctcctctctccggcccctctctctcgtttctggcagcagtggtgcggtactaccaccgctctcactccacacacacacaccgagtatacggctaagcaggagagagaacgggagagtgagactgagacggggtcccaagtacaattctcgcctggttcttgatcgaaggcatgatcaagaatcaccagaaagttctagatctttagacggcagtcttccttggactcctcggtttcttttgttctgagctctagccatggagggtgggggagggagtggaatgggtgggttcccggaagccacgggtaaccttctcgatgccgcagctcaggagttccaccctacggtctgtgccccctatcctctacagccgcttccgcaacagctatactgcccccacccatatccagccatgccggtgcctccgccgccgcaaatagccatgttacagccagtgcctccgatggcgatggccatggcgccgcagccggggtacaccttgccaacgacgacgccggtggtcaatggcccgtcgagccgcgtcgtggtgctgggccttgtcccgccgcacgcgcaggaggccgacgtggcgcaggcgatggcgccattcggcgcgatccgctcggtcgacgcgtgcgcggtggcgtccgagggcgtggccaccgtccatttcttcgacatccgcgccgccgagctcgccttgacctgtgtccgcgagcagcacatgcgccagcagagccgcctcgggcagctctacgcggcggccgccgtagccccggcgtgggctcctgcaccgacgccccaggcctgggactggccccaccccaacgacgacggccgcggcctcgtcctcgggcacgccgtgtgggcccacttcgccaccggcgccgacgacggcgacaaccgcggctccctggtggtcctgagccccctgcccggcgtctcggtcgctgacctccgccaagtcttccaggccttcggggacttgaaggatgtgagggagtcggcgcagcggcccagccacaagttcgtggacttcttcgacacgcgcgacgccgcgcgcgcgctcgccgagctcaacggccaggagcttttcggccgccgcctcgtcgtcgagttcacgcgcccttccggccccgggccccgcaggcgcgggtacgcaccccaccagcaccggcccaccgcgccgactccgccgaggcttcaagcgacgtggcgaccgtcccaaccgacgtcgtctcagccgccggcatcctcgtcgtcgtccggttccgtaagggcgagggaaggagtggtgcttctgaggaggagctcctgtaagtctagcgcgggcagcgaccagtcgtccaagggaggcaatgccggaacgagccatgagcgcaagaccaagggcggcaagatcgtggtggcggcggcggcggcatcctcgtcgaccccgacagcgtccgggaagcaaacccagaaaggcgtcgggagcagcggcggcgggagctggaaaggacgaaagagcgggtgggaggcgcgcttcctgttcaaggagcccgaggccggcggcggcgccgacacgcaagcaacgccggcttcggagatggatacgaggaccaccgtcatgatcaggaacataccgaacaagtacagaagctgctgctcaacatgctggacaaccactgcatccaatccaacgagtggatcgtggcgagcggcgaggagcagcccttctccgcctacgatttcgtctacctccccatagatttcaacaacaagtgtaatgtgggctacggcttcgtcaacctgacatcgccggaggctgccgtgcggctgtacaaggcgttccacaagcagccatgggaggtgtacaactcgcgcaagatctgccaagtgacatacgcgcgcgtacaaggcctggaagcgctgaaggagcacttcaagaactccaagttcccgtgcgacagcgacgagtacctgcccgtggcgttctcgccggcgcgcgacggcaaggagcttacggatccagtgcccatcgtgggccgctcgcccgcggcgtcgtccgcgtcgtcgcctcccaagagccgggcggctagcgtggaccggcttgggcaggagctgatgccggcgccgtcgtcatccgcggacggcgcgtcgtcgaccactacgtccacccacgcgccgtccgaacacgacgaggaggaggaggagggagacatcaggctcgcaggcgagctgcggcggcttggctacgacgactagctggctccgatcctagctgcagctaggcgggcgacgcctagctcagcaacgatcggcatggcgtggcgtcgcttcgagaagcgcggaggcagtagtgacttcggccaagcttttcacagatccgtagcgctcgctcctgcacgcgcaggcgaagcaagtgaagtggactgggacttgactttggagaagcaaaagtgagctgatgttcgttggttcgtagacgctgcgcacagcaggtgtggagtcgtgttcttttggattttggtttgaagtttcctactacttgtttctttgaaacttggagctatagctagcttaggcttagctaggactgctgggaggggaaagggcatgcaggggactatcaattcgtggttcgtcatgcgctcgttctttacattaaaataagattgttattagtacagctttacaatacttctgcatattcggagagagactctgatctcatatcatcacgagttgcta

SEQ ID NO: 35527 - DNA, 1314 bp, Zea Mays
tcctgttatagatacttctttggaagtatcaaatattatttacaaaaatgcttagccctgcttagatcttgtggatagaggttgtcttttgcaataatgcctagctcaggggttatcctgaggaaggatggcttctacctacaagaatattttcattgggagcatggtgggatcttactgcaaagttccctataatgctcttttcatcctaaggatggaagtacttaaatcgagacttgggctaggaacaggtgatgctccacccaggttaattaaggattggatgcgtatgtaggcctatatgatcaagtactatcttaattgcccacatgccctggatatgggacagggtaagcttgaacacggctattccatacatgaaaagacaatcccacactgggagtggagagatggcgagagtggcacgtaccctcctggcaaaggaccgcctaaaaggggtggtgtgctctcgggtggcacggaccagttcatgtagtgaaggatccgtgggaatggtagacatatgcaagagttacgagaaacatatgtcgtgtggttagagatcctcagctgagtaaatcgattcagatcgccgttatatccccggacagtggagacttgatctctgacctgcaacctaggtcaggatgtaaacattatgaataaaaataatgttgtattgatgagatggtgaaattagactagatgcaactagagtctattaatatttaatctggcgttaaaatattgaaagtaaggactcactttagtaagctatttctgcaaaagtatctaagttgattcttgctcaagcctttccttgattcctatttaaccagcatatccttgagagtctttttccttagacgggtaagatttgtgaaagtacactccgtactcagggtttttgaacccatgttgttgtaggtgatgaggagtactctaagtgttcctgtggttggagggcgtttccaattctggaggactagctaggtttatgtataagctttggagggtttctacctccctgcttttgtaataagttatgcactttaagcatattaggacttgtaataaatgtaactcttcctatgtaataaccttcagttttagaaatgaaaagaatgttttgtgaagtcttccgctcttatctccgaagtgtgtgtgtatcgaatgtggttactgtaatatgcatgtatggtgggagatccttggggtgatgagttcaagttgttgaactcgtgatagccttgttaagttacctagtacacatgcatagccatctgaggccatcaaggcaaggattggtgcatg

SEQ ID NO: 35528 - DNA, 987 bp, Zea Mays
tccttgtgttctcagcggtacgacgtcgtgcgcggcccgacgtcgatcgccaatggcgtgcaaggtgaaagggatcttcaagggcctcaaggccttctcctggatctttggtaagcgggcattttgtttctctttcccgcctgaaaacctcaaactctggacatggacgcactgtctgttttcctccatgggtcgtcgccggtccttgcagcggtgaaggagcacgagatggagatcggttgtccgactgacgtgaagcacgtcgcgcacatcggctgggacagcgtggcgggcggcgtgtctccgagctggatgaacgacatcatggcgtcctcagacttgtcgtccctgggcaacttcgcagcgctcactggtacctcctgggtttctcaagtacatctctattgatgacgtccctaaggaggttgtgaagaaggataccgagctggagatgcagagggaggaccttttgacgaagcctgagcaggtccaggctaagattgtcaaagggcgtgtaaagaagaggcttggagaattcgcgttgttcgaacaaccattcatcaagaatgacaaggtcacaataagtgagtggctgaagcaaactataggtacaactggagagaatatgaaggtcaggagatttgcccgatacaacctaggtgaagggctggagaaggaaagccaggattttgctgctgaagttgcagcacagacagcagcgaagccggcaccatctgctcctcccaaggatgagaagcctgctgaaacaacagaatctgctgaaacaacagaatccacatgcaattatattagcttaatttgtgtctaaattactattattagaatggtttctaattctaaaaaaccaaacggggccttacttaaaaacaaaacaaaaggttgtgttctctggcatctatttgctagttacacactactctaaaatttgtatgcaaaagtatttctgagaatgaaaccaaaattggc

SEQ ID NO: 35529 - DNA, 2419 bp, Zea Mays
caagaggcggaggaagaggaggtggtgccggtggtcgtgctgctgctgctgctcgtggtggtggctgtgcaggtgcggagatcgtcgatcgatcgctgcggttcgtcggcggcggtgtcgagatgtcgatggacttcggtgccccggcggatgaccccaaggctttccgcaacatctgccgcgaccggatactgaaggacctgcttaagcctgacaaggataaggagaccaaaagctcatggaaggttcttataatggacaaattcacggtgaagatcatggcttatgcttgtaagatggcggaaattaccgatgcagggatttcgcttgtagaagatctgttcaagagaagggagccaatgccttcaatggatgcaatctactttcttcagccactgaaagaaaatgtcataatgcttctatctgacatgtctgggagatgcccactttacaggaaggcatacatcttcttcagctcaccgattcctaaagacttggttacttacataaagaatgacagtagtgtaataccacgcatcggtgcactaagagagatgaatttggaattcttcactattgacatgcagggctttgtaactgaccatgatactgccctgattgatttatacggtccaagtgaacaaaattccaaaaagttcaacgatactataagcacaatggctactcgcattgcgactacatttgcatcattgaaggaatttccatgtgtgcggtatcgggcgccaaaaggagatgcttccacaacaactaaattcgatatggttccaaagtggcttgctactgctgtttgggaaattgtgtcaaaatataaatcaactattcctgaatttccccagaaggagacatgtgaactgctaattgtcgacaggcccatagatcagatagcacctgttattcatgaatggacctatgatgcaatgtgccatgatctactcgaaatggatggcaacaaatacatttatgaggtatcaaagatgggttcggaacctgaaaagaaggaatctttattagaggatcatgatcctctttggcttgaacttcgccatgctcacatagctgatgctagtgagaggttgtacgaaaagatgaacaattttgttgccaagaataaagcagcacaactttcaagagatggtggtgaagtctcaacacgggatctgcagaaaatcgttcaagcattaccccaatacagtgatcaagttgagaaattgacgctacatatagagattgctggaaaaatgaacaggtgtatcagggagtatgggctccgtgatattgggcaattggagcaggatttggtttttggagatgcgggagcgaaggaagtcatcagtatcctcaggtcaaagcaggatatgagcccagaaaacaaaatgaggttgctgattatatatgcaattgtatatccagagaagtttgaaggtgacaaaggggaaaagttgatgcagttagcgaagcttccacatgatgatatggatataataaattgtttaggatacttggatggttcaaatacaaaaaaatcatcaaggacgggtactttctctctcaaatttgatgcccaaaagaagaaaaatgctgccagaacagacaaacaagatggtgaggaaacatgggctttatcacgttttttcccacttattgaggagctgattgagaaactgagcaagggtgaattacctctaaaagagtacccatctatgagtgaaccaagttctgcttctgcttctcaagatgccacacaaactgcatcatcaactgcacgaccagcacaaaatccacaaccgatgtctatgagatcaaggaggacaccaacatgggcaaaatctcgtaattcggatgattcttcaagcagtgattcttcagtcctgagacacgcatcaggtgacttcaagaggctaggcaaccggatttttgtcttcatgattggtggagccactagatctgaactgcgcacggtgcacaagcttacaatgaaaatgaagcgcgaaatcgtcttgggctcttctagcatcgatgatcctccgcagtttatttcgcttacacattatacatacttcaccaatgaacagctctacattttactaggatgttgtcggctgtcaccagcgacccattgattatcgtcgaactgatcacagttattattctcttaatttttttttaattgaggaagtgagctggcttgtctggatgtaaaataagaaatacgtacacaacgttttgtttgttatttgatgttcttgttgacaaacagataaagagagaagtcattaggaggttttgtaaaaaaggcctaaaattgatggttatatgatatagaaactgtattgcacggatctataacagaatatggataaaattgattatggagggacacaacttcctttgcttgctc

SEQ ID NO: 35530 - DNA, 1044 bp, Zea Mays
ccagccgccaccttcctctctcctctctcccacccggctgtctctctctctctctcctcgcttctctctcccaggcagcgccccgcaggacccgacgcccagctcgccaggcgccatcccgtccgtgccaggccgccgcgcccagagacccgcccctgcagccgaggacgacgcaccaggagcgcctgacgccacgaagccccagccgcgcacactgccctgcgcactgcgcactgcaactgcctcgactcgccgagcagcccgcgtgcacccgagccgcccgcgaccgtgcccagctgcgacgcctcgaagcccttgcgcgcagcgcccgaccgaagccgccacccgcgccgtccgcgtgaatggagccatttctttggcgttaatggagctttaacacgtgcgtttctctcccattactctcatccataaagtcccggccgccattgatggagccgccgaccgttcacttcctcccctcggcgtctctctctccccgtccgctctacaagaccgccggatctctcctctctctccttacccgaacctctctcacgctttctctctcccttgctcgccgttcgccatcgtgctggagcccgtccgtgcagcaccccggcactcgcagcagcgccacgcacccgccacacaaagccctcctctgctctcgccgtgcccaccccgttcgtcgatcgtccgccatccgtggagcctcaccagaactcacgccccaccgtccaaacgcatcgccggagttacgccgtccgtcgtcgacgtgaccgtgcagcatgacgaccacgctcgttccctgcccgacagaccaccccctgctcgtcgacattcacccctgcacatgagcgaacccaaggtttaagacaaccccaacctattaatttattgtctaaattatgtgttgaattaatttatgaatttgtgaattatcgttgtaatattatgcgacttgacgattcatgtatgattttagagattccgatgtttacgtgcaaccaaaattgaaccccgcgataatactttgaatatgcg

SEQ ID NO: 35531 - DNA, 4494 bp, Zea Mays
aaatagctaaacccaaatcgataccaaacccagcccggaacgcacgccccccgccgccatcgccggcggccagccactacaagcgcggtgtccggaacctgtactgtactaccaaccccaacagcctggactctgatgagccccagttcatggcctgccatctctcccccctcttcaatctccgactcttgctgctgctcggcgctgtcctcggaaacgccgtccttgtccgcgccggcggggcggaggcgtcagatcgggctgagccggacccgtactcgatcctgacgtggcacgactactcgccgccgtcgcccccactcccgcccccggacccggcgtcgtcgacggcgacctgtgagggagacctccacgggaagggggacttccgcacgcactgcgaggtcttcgaggaggtggaactgggcgacgatatctacatcacggggaacggcagcctcgtgctcctctctggcgcctccctgacctgcgagaaggtcggggacgcacggcgacggtggcgggcacggtggccgtggcgccagctgcttcgtcaaggaagggcagactcaggaggattcatggggtggtgatgcctatgcatggtctgacctcgaacacccttggagctacgggagcaaagggggctcgaccagtgttgagaaggactacggtggtgccggtggtggcatcgtgtggctgtttgctgatgatctggtcatgaatggcacagtgctcgccgccggtggggatagcaatgagaagggtggaggtggttctgggggaagcatctttataagggctgcatcgatggggaaggagttcaggctgtccagataatgcaggagctgctggaactctttatgaagcagtaccaaagagtcttattgtcagcaacaacaatttgagtacacagacagatactcttcttttagagtttccaaatcaaccactgtggacaaatgtttttgtaagaaatcgtgccaaagttgctgtccccttgctctggagtcgcgttcaggtccaagggcaacttagccttctttctggtgctattctaacttttggtctcactggttatccatactcggagtttgaactgatggctgaggagcttcttatgagtgactcaataattaaggtgttcggtgctttgagaatgtctgtaaagatgctcctaatgtggaactccagaatggaaattgatggcggtggagattcgatagttgcaacttctttgttagatgctagcaacctgatagttctgaaggaatcatctgtgatacactctaatgctaatcttggagtccgtggccaaggtgtcctgaatttgtctggggacggagacacaattgaggcacaacgccttattctatcgctgttctacagcatacaagttggacctggttctgttttacggggcccacttgtaaacagaagtagcgatgatgtggccccaaagctgaattgtgaagcagatagctgtcctgtggaaataatacatccaccagaagattgcaatctaaattcttcattgtcgtttacccttcaggtatgccgtgttgaagatattgatgtatggggtgtcgtacaaggaactgtaattcatttcaatagggcaagaagtgtcactgtgcatacatctgggaccatcagcgcaacaggctttggctgtcgatctggagtaggacaagggaaaatgttaagaagcggtgtatgtggtggtggtggacatggtggcaaaggtgggaatggtttttataagggagaccttgctgagggtggagctatctatggcaatgctgatctaccctgtgaacttggcagcggcagtgggaatgactccacagagttgtccacagctggcgggggtataatagtgatgggctcatgggattattctttgccaagtcttgccctctatggttcagtagaatcaaatggtggcagctatgctagtggctctgttggaggacctggtggtggttctgggggcacaattcttctatttgtgcacactttgtccttagctgaaagctctgtcctttcaagtgttggtggcttcggaagtactggtagtggtggaggtggagggggaaggattcattttcattggtctaacattcctactggagatgaatatgtgcctgttgcagctgttaagggatcaatacttacaagtggaggagtcagcaaagggttaggatattccggtggcaatggaacggtcacaggaaaagcttgcccaaagggtctttatggtacattttgcaaggaatgccctttgggaacatacaaaaatgttactggatcttctaaatctttatgctttccatgccctccgggtgaactccctcatcgtgctatatacacaaatgttcgaggaggtgctgctgaaactccatgtccatacagatgcgtgtctgacagatatcgcatgcctcactgttatacagctctggaggagttaatatatacttttgggggaccttggctatttggtctatttctttcaggcctccttatcttgttagctcttgttttaagtgttgctcgtatgaagtttgttggcactgatgagttacctgggccggcaccaactcatcaagggtcccaaattgatcattcctttcccttcctagaatcactaaatgaggtcattgaaactaatagggctgaagagtcacaaggtcatgtacacaggatgtatttcatgggtcccaacaccttcagtgaaccttggcatctcccacacagtccgccagaacaaataacagagatcgtatatgaagatgcatttaatagatttgtcgatgagataaacacccttgcagcttatcaatggtgggaaggatctatttacagtatcctctgtatacttgcctaccccctggcttggtcatggcagcagtggcgtaggagaaagaaattacagagacttcgtgaatttgttcgctctgaatatgatcattcatgcttaaagtcttgccgttcacgtgcactctacgaaggcctcaaggtgactgcaaccccagatctaatgctagggtatttagatttcttccttgggggagatgaaaaaaggcctgatcttccacctcgtcttcgtcaaaggtttccaatgtccctgatctttggaggtgatggaagttacatggctccgttttcacttaatagtgacagtgtgcttactagtcttatgagccaggtatcgttttaagatctttcaaattgaactgttcatgtccttacactttttctcaggaactcgtgccatatctgttacaggctgttccctcatggatatggcaccgtcttgtagctggattgaatgcacagctgcgtttggtccgtggtggaaatctgaaagtaacgtttcttccggtcatcaactggcttgaatctcatgcaaatccctctttagctgagaatggtatccgtgttgatcttgcctggttccaagctacagcattagggtactgccaacttggtcttcttgtttatgctgttgaaggagaagctgcacttaccgaacctgatggaagccctagagtaaaaatagagcaacacacacccacacagaacatgctcgctgatactcaactaagtcagtccaggattaaggatgctctaatgcgcaaaaggatcactggtggagttctcaatagtaatagcttaaggacactaaaagacaggagagatttgttttacccattttctcatatcttgcacaattcgaaaccagttgggcatcaggatcttgttggtttggtaatctcaatactgcttcttgcagatttcagcttagttttgcttacttttctccagctgtattcatattctatggtcgatgttctcttggttttgtttattctaccgcttgggattttgtcgccttttcctgccggtataaatgctctatttagtcatggaccgaggcggtcagcaggccttgctcgtgtgtatgcattgtggaacataacttcactggtcaatgttgttgtggctttcatatgtggttttgtacattataagttatcaaccaaaacacacccgagcgtgcagccctggaacctgggaacggatgaaagcggttggtggctcttcccaaccggactcatgctgttgaaatgcattcaagcaaggcttgttgattggcacgttgctaatttagagattcaagaccgtgcgatgggtaaaacaattatattattaacatgttccatggtcttcgctgacagcaaggctggtaaagctgtgagaaatcggtgtggtctgggtgatgtgccgtttgcagctttgcaattcatcgagggatgcaaaaaccttctgacatatctgacgctgtgtcacttgcagacctgtagtggtggatggatggctaagtgggtcacctaaacaaaaccgggtgctatgtactcggcagagaatgtcctcgacgatggatggacaactttaggggctgtttggaactggttttaagtctaaaaccac

SEQ ID NO: 35532 - DNA, 3114 bp, Zea Mays
gaagaactagtaacagccatgggaggtcatttgctaactaaacactctatggacgtgaattttgtaatcgtgaaggatgtcttggctgccaaatataaatgggctctgaatactttgaagaagcccattgtcaccatgaagtggttagagcaatgctggattgagcatcgtgttgtgcctcatgaaccttacaggattcttccctttactgggttgaatatctgtgtcactaaactggatccagctttctaaaagacaacacaccttgattactatattgatttcttaacatattattacaaacctggaggtgacaaatatgtcatggcccaaaaatggggtaatatttacattgtgaatccaaaatgggttgaccaatctgttgctcgaagagcttgtcaagatgaaaatagctacctcgtttgtcagacttcatctgcctttagtggttcaaagagttcccataaggagcaacaaaatccggagatcagtagtgcaagtgcaagctttcaacctgttccagcaacatcagttgatgattcagtatcaatgtcacaacatttgcctgcttcatttggtgatgcttcacggatcagcagcactgatattgttggtgcacctagtgtccaagagacagatgacatgcaggttgatagtcatattgctgaggactcagagccagaaaacgatgatctatatttatcaaattgtcgaatttctctggtgggttttgaagagaaagagttgttaaggcttgtcatgctgatacgtaatggaggtggatcccggcatattttgctaagtgagaagcttactcatattgttattggtacaccttcagatgaggaaaaaaaggaggtaagacgtctggctgcatggggtgtaataaatatagtgaaagtaacatggttagaagactgcaataaagcaaaaaaagaagtgaaagtatcctcaatgcatatagctactgagctcctcttgaagggattttctcaagtaagcatggaaaattctgctgatacacgtgaaactaaggtagccaaaagctcaggtgggatttttcatgttccaactgtcaatgacttgcatgaaaaacaccatgaaaaaggtgtgtcatctgaaaggaaaccaaaaagaggcaaacatgaaaacagtataagtaaaacccgatcagcagccaggactgaaaaatcaagtcaacagaatggattggccaatgttagcgagtaccagctccaatataaagtaacatcgataatgaattctggaagtagcagatcaaatatattcaaagggagaacattcagtttctcaaattcattttctcatgacaagagacctgaggttgttgattgggtcagagatggtggaggcgttatggtggatgacatacactcaactgctgcagatttcataattgagtgccacggacaaaacagcttgccttgtgacttctctcattcacttgtttcaactcaatggatacgatcatgtttggaggagaactgcttacaagatgttgggagtcatcctatcttctctcctttgcgctgtcgcatcccattcccaggatttgaaagctttcgtttctgtatttcactttcacaatatggagagaaagaaagacatctgctgaagaacttgtgctttctactgggagctaagtttacagacaaagcatataagggagtaacccatctcatctgcaaatttgcaagtggtcttaaatatgaggtttactccaaaagaggaactcccaccattacttctgagtggctctatgagtgtgtaaaacaggataaacttctccctgttgatcactttcagccaaaaccacttacatcacaggataaagatgcttatccgtgcactgccagccaatattccacacaggctaccagatttgattcctctgagctgcttagtggttgtcaagtaacaaaaaacaatgcaacacacaattctgtcaatgaagaaacaactatgcctgctgttagtagaaagagaagaatatctgttcctggtaaggttaacggtatttgtggaaacatcgaaaaaactgagaaacaactcgacaatagctctgtccctgatgtcgcagatgccatagaggttctatcatccaagattcaggatgtgcaatctccgaggagtatatttcaacctgacaattctgttgttcaagagcagaaagatacacactcctttgacatttcaaggagctggctgaacataagcaagatagcacctctgtcacaaaggttcaaaacttaaactctgtaccagtcccctccccagctcctactacttactaccctttcagtgagacgcagacagaatctcaggtcgttggatacgaagaagatttaacaggcaggcagaagatcatagacagggttcggtctcagagcattaatgtgactccgtcgagtgagattctttagttgtggaggcgaaccataacttctcccagatctgactgtcaaattgcgatagggaagatgtgttatgaaatctgcttgttgtgccatgtcggcttcaaattaagcagcatgaatggagtctacgaatgtggagtcgtattcctagccagatgacccgcgcagcataaatcaagaagatttccattgcatggcattcgatgaacggaacctcgcgctattacatcgtgatcttgtggatgtaaccacccttgtttgtagaactgacagacactaaacgcctgtgatccgtttggtcctgtacattaacaatcttgtacactatacaagagcaggtaaaggagttatatatatatatatatatatatatatatatgggtatgaacagatgtaacagttcatttttgatttaatgctcaattagtcgaggtagctggtgtagcactatgaaaatcattaaataaaataatgaatttagttaataatgatattaatagtaatgaattttcttttaagcgtgtgtcatttatttgcctttggaatgattttttggatgctcatgattgattttggtcatttaatagcatttcgttttaaataaaaatcctagtaaataatatatataataatattagtccaagaattaatatcttatttataaataattttagtt

SEQ ID NO: 35533 - DNA, 3013 bp, Zea Mays
gctagcgtcagcctcgtctcgctcgttttgctccgtctctcttcctcctcacttcccacccaccctcgttttgctccgtctctcttcctcctcacttcccacccaccctcgctcgttttgttctgtctctctttctcctcactccctccgtcgatcctctgcagcttgcatcggtcgaccagtagtcttccactgtaatcgcctctcattattctttctgccacgctcctcttcgtccttactccctccgtcttgtctatctgtagccacttcgtcttcctacgtttttgccaggatttgaggctgtcatagtatgctctctgaccgtgctggcgggaggaaggagtgaaatttatatttgcctgttcccaccatactgtaatatgaatacaaggatggcttgatctggcaagtgctcgccattctatgggcccatcatgcttttcgagtacactgtttgatcacaaggagcggtctgctgccactaaacttcaagttgttgatcatgatggcctgaaaaattatcggggatatgctcatatgccttggccttaatttaaactacttgtatgagatggagaaatgtcacaaaacacaggatgaagacgactccaggaatccacccatgcctctcagtgactcagtggcacaaacgacagcctagtcaggactaggagacgtcttcacatcacggagtagaccactcagcaacaacagtgcaacggtgttcggacttttgttcacatatgggagtgtttaagctcctgcacctagatttagaaacaccaccatgtaaaatagacaagacagtgcttttgcaaacatgatgctaccacgagacccgaactcatccttcagcgatggaggcctccacagaagctactaggatggcctccagcttatgacctctcactgccgaccgcaccttcctcagaatatgttgcttcatcaccgccctctcagcagactggagtttcttgcacatgttcaatccctggatgtacctcgacaccgcgccgccgaaaggatcaccggctttctcaagggccacgagcttctcgacgatctgagaagcgagcattctctcgatacagggtttggttccaacctccgtgatgtccaccagaaattgcatggctagatccttggtcttcaaagacttgcggtccagcaagttcaccagtttctctatggttcttagttgcagaaatctttgcaagacaagggatccacccttcgcaaagacgatctgatggagagcgtagtacgctgaatcctggagctcatcgatgttgcactgcagcatgtcaatgagctcgtgaacaatattaagctccaggaacctatgcacgtatggctctcctccagtgcaggccaatttcatcaccaaaaaggcggtctgggacctcacctggttcttttcaacctctctgcgttgtagcagccaagccaacctatcaaacagatggcttcccagaaggaggtcctgcacccttgtatcatttgccgtttcagcaagagataataaaccttggatgcctttaatgatatttttgttgtctctctgaaggatattatgaagaatcacctcaaatgattgttgaggctttggtgattgcggcacatttctgtcagataaaacaaatctttccaaactgatccgagcatgccagggcaaatgaagcagcactgcaggccctatgcacccttgaagtggagcaccaagttcacagaatgtttttagcgtgataatcgcgtggtgctgtgagatctcagaaccattgcccagaagcacaagaagtttattgtcaattcctgattcaatcattgtctcaacagccttcagctttccaacctttgtcagagatgcaagtgttgtaaacacaatttcatgccactgctcattttctgcagtcaagagatctgcaattcgaaccatgggaattcttgacaaaatttcatccgcaattgtggcatcaacatgctcagatatcttggtcagaacagaagagaggttggctagagttgaagtatcttcacaggcaccaagaagatcaattaatttatctatggaacctgctatttcaagagagtgagcaagatttatgtagtctgatggggaaaatataactgtaattgcggcagtgactgcaaaaataagatctagtgaccctatagaaattatctctgctattcgagggccaagtattttgctgaacccaattctatttgtctcaagttcagacagggatctgcatgccatgagagcttgagttgtgtttaccaataaaatctcgatgtccatgaattctagcagagaaaagaatgatcccatcttctgttcggctggccgtttcatacactctttgccaaaaacaaaaagccaaggagctactaatgccacattatatgaaatggaatcagataaaagagcacgagtggcatcatttgttttgttctccaggtaaagtgagaccatgtcatgcatatgatacaacggctggtcctccagtttgataataagtgatccttcgactagttttgaaaccacgagagagaacagtccgcactgctcaagcgctgaccaaatggattccagacaagcctcaggaacaggttcttcccaagagatagctgcaagagccatgaaaaaaattcttgaattttctggcattgcttctaagctgaactcaaaagatccaaatatggtcaacgtagtctccacatctttctcattgacgtatgaaactggaccaggtgcacatgtggcatatgttgagaggttggatatagctttctcccatttttccactctagtttccttcctcagagccttgcccatgacagcaactgtaaggggatggtgaccacatcgatccaacaagacttctgcgacaggctgtgaagtatagagaagttaaacattcaaaaaccatggtgtttggaatttttagttattctattttttcatgatgtatcttcttctaaaatatcttactttgcaagtttggca

SEQ ID NO: 35534 - DNA, 1974 bp, Zea Mays
aaccccttttctcctatccctgcactccccccccccccccccctgctgccccgcgccgaagcaggtgtggcggcgctgcgagcctgcaaccatctccgcagactccgctgcgactcatctgggctacgacccacgtcaaggctgctagttgcgttcgttggagttgcggcttccgcgaatcccccaatccatcccagtcatggcgttctggggggtggaagtgaagcccgggaagccctacacccacatccatcacgctgaccatggccgcctccgcatttgccaggctacactgggcaactgtgatgctgctgcaaggacggtgctgcaatgcaatgttggcaacaagattcccatcaaactttgtagtctaaatccgaaattggccgagacatgccatctagaggttgagtttgaggaggttgatgatgttatcttctcagtaattggtcatagttcgatacatctctctggatactatgtctgtgcaagcaacaggtctaatgtgggggatgatgaatcagaatcttatggggaagatattgggcactccagcaccgatgaggagcatgataccagtgaggacagctatgaatctgacttcattgatgatcgtgaagttccattatctgagaagtatgggtctggttctatagatgacagtgatgatgagtgcacccaacgatgccacagacaaaaagctgaaaaaacgactcaaaatgctgaaagacggcggcgcttgaagaagcaccaagtaggtagcactgattacgatgatgatgatactccagtcatgaaacatgttgcgaagcgctgtgctcctaaaatatctgatagtgacaatgctaaggttgctgaggaaactgaacatcaaaatggacaggcaaatggcatcaccaaaaaaaggattattgatgtcaagaaaagaaaacagtcttccatcagcgaggatcctgcatcgtcaatggatatgacagatgctaatgcaccatctgtttcaaaacaagttgatgaaataaaaaagaaatcaaagaaaaagatgagaaatcaatcaggggaaaataatgagaagcagtccaatataagaacattggatgacgggttggtggttgaatatttgtcaatgggaaacaatgatgcaaaagtggcttctgatggctgcaaggtctatatcaaatatgttggcatgttgaaggatgggaaaattgttgagtctaatgttagtgaaaagccttacaagttcaagcttggtgctggaaaagttatccgtggatgggatgttggtattcatggtatgcgtgttggcgagaaaagaaagcttacagttccaccttcaatgctctctggcggtaaatcagtgggagaagtacccgaaaattcttcagtcatatatgaaatcgagttagtgaaagtgaaataaagaaaaaatatgtcaggcttttgcatgtgccctatctcagcagctgcaacagttgcaggaattttgttgatatacagatgactcatgctcatgttttgcttccttctggaagaatttatatgtgccactcgtgccacaccataggacatcgagcagtgaactgcagcgggtgctttatccatgcatgccttgactggatacttggttttgcactatctggctacattactttgtaaactgcatacgatggttgaagcactattgtggtctggtgatttgccatatgtttgtgactacttcgcggttcactgctttgaatcatgtttgttttgccaatattgattgagttctgtaatagtttgatcagggtctcttggcttacgtgccagtcttttactgtagaagtggattttttttttccttgttacgtttggcagacgttgaactggtgcaaggcctttaaagtaatggctaatatatcgtccgtgcgtcacgaggatacaaattattcaaaagaatattagagcaaaatgattacttaaaaataaacaata

SEQ ID NO: 35535 - DNA, 2500 bp, Zea Mays
tttgtcctccactccacttcccctcttcacgagaggagagagagagagagagagagtgcgtgcgaatgcggagttactcggggactggtacgagcggagcaggggtgggcggtgggggaagcgagtggaagattgggagccaagagcacggagagtgccccgggatcttcacctcccatcattcgagggtggagtgctgtctgcgcagaaatctgctcaccgggtgccaggaaacaggtggctgtagagaattgcttggggattcgtcaagaaacgacccagtaggtggttgtgcacttgttatgctgagactgaatggaggctgtagacaagattgctgagcccaaagacccttttgtgctcactgcccagaaggttcagagctcggagccaccgatacctataaaggcgtcatgtgaagggaatgactcccaacagcaagaagagacggatttgccagatgatggcgaagagagcttccggagcatggattcctctgatgaaggtgtccggagctccttctctggggctagtcaccctccagagcctattgacatggatatcatgaagacagtctatgttgcaatcgacgagaagtccgagccaccggttagtttagtgcgaggagtctcggtgaaggggcctttcatagatgacctctcgatccgtgttacaggcgcaaaggcaaatctggtggtaggtgcaggcggtgctgaaggtatggctgaagagaggaaggtatctgcttctgcagtggcatcagtcaccacagcaaggtcgtctcaggctacctctttgcctcaggactcggaggagaaggagtgcgtctgggacgcttcactccctccgagtggcaatgttagccctcacagtagtattgacagcatgggtgtggtcactgctatgagcaccctcaacagctgcacgagcacatataaaagcgagaccatagctggtgaagcaatgctcaatgtggagaggaactgtgagagtgtaaagggtgttcgaggtgacttactagaaagtgcaaaaaccagcatgagtcgagcaagtgatagcagtgttgttagtgatgacagcagctggagccacatcactggaggtgccagcaagcctcacaaggggaatgatcctagatggaaggcaattcatgctgtacgaactcgtgatagcgtgcttggaatgagccattttagactactaaagcgtcttggttgtggtgacattggcagtgtttacctctcagaattaagtggaactcggtgctactttgcaatgaaggtggtgatctgcatactttgcgacagagacaaccaggaaagcatttctctgagtatgctgcaaggttttatgccgcagaagtacttctagctctggagtatctacacatgttgggagtggtctatagagatctgaagcctgaaaatgttcttgtgcgcgatgatgggcacataatgctttcagactttgacctctcgctgagatgtgcagtctcacctacactcatcagaacatcagctttcgattctgatcccagaagagcaggtggttctttctgtgtacagcctgcttgcatagaacctacttcagcttgtatccagcctgcgtgcttcctccccaaattcttcggacagaagagcaagaagaagactcgaaaggcaaggtctgagttgggacataacgccggcaccctgcccgagcttgttgccgagccaacatcagctcggtcgatgtcatttgtcgggacccatgaatacttggcccctgaaatcatcaaaggcgaagggcacggaagcgctgtcgactggtggaccttcggcatcttcctgcatgagctgctgtacggcaagaccccgttcaaggggtcagggaaccgcgccaccctgttcaacgtggtaggccagcaactgaaatttccggagtcgccgtccacaagctactcgagcagagacctcatccgtgggctcttggtcaaggagccgcagagccgcctgggcgtgaagcggggagcgacagagataaagcagcatgccttcttcgagggtgtgaactgggctctcatccggtgcagcactcctcccgaggtcccgaggcctgttgaggccgagctgcctgtgaagtatggggtggcggaggcgatcgggagcaacagcaagcgggtagtcggagcagacgtgaagtcggccggaaaatacctggactttgagttcttttaagagcagtgcgtgcccagtggcagctattgtttgcgtactgtccgtgtatggtcggttttgatgtttgtgtgattcgatatggtgatttgtgcctcgccgtcgatgcacaattgtcaggtttgaatcgaccaaaattaggtaggtgtgtgttgccatttgcctgctttggcacatttcgagtttatgtatggaactatgtatagagtatgcattgcaatttgcagcaaacctgaaaagcagctaagaaggccctttcctccttgtttatgcaatgcatctgttcc

SEQ ID NO: 35536 - DNA, 4233 bp, Zea Mays
gtattaaattgttttatctctcccgagccagcccgttgctggctgcttgcttctcgcagagacagggagtgagtgaggcagaggaggcgtacctgcggaggcgggcagccgaggcccgcgcaattcgcgtccagcagggtgggtcgggctcgcggcgcctctattggcattcccgcggttgtgcgggcgggttggcggccagcgagatcggctgttgtttctggcggtttttgtgaggtgtttagtgttttgctgggtgtgactgtgagcgtggattggcgactgctggaggggtttggggatcgatttgaggtcgtcggagcggagatcccgaggggacctgcggtttcgttgtggcccgtgagttggattccggacgcagtgccgtccggcgggccgccgagacgatggcgtcggtggaggtgaggtcggtgcggaaatccacggccctgcgggcgcgcggcgggcccagcaagctgcagtcggcgcggtcgatgccgctcgactacaggtactcggacggtccctcggcggcgaacggcgccggtggcgggccggctgggaacggcgtcgggcgccgggcggttgcggtggaggcagggaaggaggagaaggaaggtgaagtggtgcggttggagggggacgacgcggactctccgtacagctccaatgtggtgacagcggaggaggaggcggggaatacaggtggaggaggagacgaggtggattcggcggccgcggcgacgccaaggcggttgtcgccaagggcagcagcgagccccacgcaagtcgacgcccggtggggtgacaccagctcgtacggcgctaagaagaagcatagagtgttttgtcagcttcgaaatggtgattgggcattatgcacagtacttgcaacctccggtgacgagtctgttctaaaggtttctgaagggaaagtactgagattgaaaacagagagccttcaacctgcaaatcctgaaattcttgatggagtggatgaccttatgcagctaagttatctaagtgaaccatcagtgctgtacaatctgcagtacagatactcccaggacatgatttatactaaagcaggtccagttttggtggctgtcaatcctttcaagaaagtttctctgtatggtaacgagtacattgatgcatatagaaataaatcaatggatagtccacatgtttatgcaatagcagatgcagcactttgtgaaatgaaaagagatgaagtcaaccaatctataattataagtggtgagagtggcgcaggaaaaacagaaactgcgaaaattgctatgcagtatctggcttctcttggaggtggaagtggcattgaatacgaaattcttcagaccaatccaatactcgaggcttttggcaatgcaaagacattgagaaatgataactcaagtcgttttggaaagcttatcgaaattcatttcagtaccactggaagaatatgtggtgccatgattcaaacatttttgcttgagaagtccagagttgtgcaatgtgcagttggtgaacgatcgtaccatatattttatcagctgtgtgctggtgcacctgcatctctaagagagaagttgaatttgaaaaaggtagatgagtacaaatatcttaaacagagctgttgctattcaattgcgggcgtggatgatgcccaaatgtttcgaactgtgacggaagctatggacatcgttcatatcagcaaagaggaccaagagaatgtttttgcaatggtctctgctgttctatggctgggggatgtctcgttcacagtaattgacaatgaaaatcatgttgaaatcattgcggatgaagcttcaaaaatggttgcagaacttcttggctgcagtattgaagatctcaatttagctttgacaaagcgccacatgaaagtaaataatgaaaacattgtccagaaacttacccttgctcaggcaactgacacaagagatgctctggccaaatcattgtatgccagtttgtttgaatggcttgtagaacaaattaataagtctctctcagttggcaagcgtcgaactgggagatctatcagtattcttgatatctatggctttgaatcatttgataagaacagttttgaacagttctgcatcaattatgctaatgaaaggttgcaacaacatttcaatcgtcatttatttaagcttgagcaagaggaatatgtggaggatggcatcgactgggcaaaggtcgactttgaggataatcaagattgtttgagtctatttgagaaaaaaccactggggttattgtctctgctggatgaggaatctactttccccaatgccacagatcttacttttgcaaacaagcttaagcaacatcttaactcgaattcttgcttcagaggagaaagagacaagggatttgctgtccgtcactatgcaggagaggtggcttatgatacttcgggttttctggagaagaatagagatttattgcacatggactcgattcagctccttgccaaatgcaaaacttttctgccaaaaatgtttgcatctaagatgttagttcaaccagatgattctatgtctgttccatatagatctagtgctgctgattctcaaaaactaagtgttgccatgaagttcaagggtcaactgttccaacttatgcaaagactggaaagtacaacaccacactttattcgttgcattaaaccaaataatttacaacttcctgcaatttatgaacaaggacttgtgcttcaacaacttaaatgctgtggggttctcgaggttgtccggatttcaagatctgggtatccaacaagaatgactcaccagaagtttgctcggcgtgtttcagttgcaattcttcatcagttcaacattttacctgagatgtatcaagttggctacacaaagttgttcttccgaactggacagattggcaaacttgaagatactcggaatcgtactctacacggtattctaagggttcaaagctgtttcagggggcatcaagcccgtcatcatgcgagagaacgaataagaggagttttggctcttcaaacattcattcgtggtgagaaagcacggcaaatttattcctctttgttgaggaaacatagagcagcagttattttgcagagtaacttgagatgttggcttgcaagaaggtatttcataaatgtccggaaggcctcagtgataatacagtctggtattcgtggcagtcttgttcgaagatgtaatggcaatattgatctaataaacgtgctaagagagtttgaatcaaaacaggaggcagagggtgaccaaattttgatcaaggcatcagtcctggccgagttacagaggcggatactaaaagccgaggccacagtacgtgaaaaggaggaagagaatgagacgcttcatcagcggcttcagcaatatgaaaaccgctggttagagtacgagcagaaaatgaaagctatggaggaaatgtggcagaagcaaatgcgttcgttgcagtcgagcctttccgtagcaaagaagagtcttgctctgcatgagacacctaggatgtcggactcatcagtggatcagagctgggaaagcaacgggaaccatgtcagcagcgggtctcagctggtgccacgcactggtgggcgcgaaatgagcgctggcctgagcgtcatcggccgcctagcagaagaattcgaacagcggagccaggtttttgctgatgacgccaagttcctggttgaggtcaagtccgggcaggcggatgccagcctaaacccagacatggagctccggaggctgaagcacaacttcgactcgtggaagaaagatttcagtggccgaataagggagacaaagatgatcctgaacaagctcgggaacggcaacgagtcatcgcccaactccgtgaagcggaaatggtggggcaggctgaacacctccaagttttcgtgagtttgttatgtatactgattggtaattcgtagatgtaccggtattttacacgccggtgtggttctagcttcctagagtttctattctacggggtgtcgtgacttgtgaaagtcgagtgtgttgggctggagttgtgttccgtggagggcgagttgtatagttcttccacaatggcttcctttgaggggggtcaaggactactgaattgtgatgtaattacttgctgaagtagttgtcgaagcgggaagattgtgacatcgctcactattccactatcctcgtgctttac

SEQ ID NO: 35537 - DNA, 908 bp, Zea Mays
aaatcgagtcgagcaagttatcgaggaaccagtatttcgtccggtcgtccagccctatctgcagtccaccgtcgggcgagcccgagaatcccgtctcctcggcgccgcggcccccggtttttttatgctttcctttcggtcggcgacgcatacattcggcgagggagaggaagaagtcagtaaagtaaattctgttgctccaattcggacgaggagatgccgcggatccctctgatcaggttccccaagcggaatctcaaagccccatctccatccgcgccagcggcgtcgcaacccgcagaccagcacgcgaccctcatgttccggttagctggggggctccatctgatatcacctcatatgaattggaaattctaggaacatcaataagattgtatgcctgagcttattgcctttgacctctgaaagagtgttattgaagccatgtcgatatggaagtgttttttttaattcagtctggaagttggctgttgagacatccatttccagtactccgcacatgtaactgagcaaaccgtgaacacatttagttccttgcagaagtgttgagcatggaatggttttgcttttgcataccaggttattttgttgcggatgttttgcattcttgcccccaccataagatcgctgagcatgctttttgaagcatgcctttcttgtgcatgtacttgcccacgaggccacaagatccgtgtgcttttggataagttgtgccgttggtgagcccgtgctgcagtttctggttcccgattccgtactggcgtcagccgtcagtgttcccggttctgtttgggtgtttcagcggtttaagccttgcagaaatcagcctctatactgtagtggttcatttcacgtgcgcacggcagtttaacccaaaattacatgtg

SEQ ID NO: 35538 - DNA, 454 bp, Zea Mays
tgaatgtttagccgtccgcggcaactttcagtggtcagaagctgtagaaagccgaaacaagggctctgtctcgtcttgctggataacccgggctctcttgtgactggtcaagctccatccactacatgtggtggcggaggtatctttcgccaaaatagacggaaagcggccttttgattttgccactagaataccgaccacgccttgcaaccaatcatactgtagtaagtaatagtatcacggcggctttcgatggcatgcatgtgtgtggccatttggaacgtgggccccctcgtgcagtgctaggggcaagttcctgtacatgcacggggctatctggagacccagcaggcggccacatttgaaacatgtagattttttttttttaaaaaaaaattattttgcgagatccaatccaaccgcaagtggacgacgtgcgtaccaccttcccgta

SEQ ID NO: 35539 - DNA, 1877 bp, Zea Mays
  misc_feature (1876)..(1877): n is a, c, g, or t
caaacgcacacacccggaccccggtctgcgtttgtccctgcgggctgcggccctgcctcttctcgtctcccgttcccctcgccgcgtgagctctctctctctctctctctcctctgtggtgacgactgggcgcccgcacccctggcagccgccgccgcccagtccccgtcgggcccttcggcaggtcttcttcggccccttcgccggcgacgagccgcaccaggcgtacatgtgtacacccagcccaggcccttaactgcgcccgcccctgcgactggttttcctgctggtttctgtggatttggctgccggaggattggtgcagcctttaggatcacggtagattcgctgtgaaatccgaagggtgctcaggagctgcgtgatcgaccgcctgcaggtggggtgggcgcagaagggaggacaggtggagggtctggtgaattgttatagcaagaagaagaacaagaccggcagtggttcgaggaatcttgcagccagagcctggtcctccgagatggagggttctgatgagggtggagaagtcaacacgggcgacctcatcggcgggatcggcagggagttggccatttcatgcctgctccgtcttccccggtcttactattatgatgtggcatgtgttaatcgatctttctactcccttgtgaggtttggggagctttacaggttgaggcgtgaggctgggatcgtcgagcagatgatctactgctcatgcaatgttctcgagtgggaaggttttgatccgcgccgccaacggtggttcagcatcccttccatgcctcccatagaatgcttcacacttgctgataaagaatccctggccgtgggcaccaacatcctcgtctttgggaagagggtggaagcccatgttgtgctgagacatggaccactcttccaagcatgaatagggcacggcagatgtgctctggtttcttcatggatggcaagttctatgtcatcggtgggaaatctgagaggcacaatgagatccttagttgtgctgaggagtttgacttggagagcagcacctggcgcttgatcccagatatggcacagggtcttaatggtggaagtggtgctccacctcttgttgctgttgtgaataatgaactttatgctgctgactatgcaacgaaggaggttaggaaatatgacaaggaaaataatgcatggatcactcttggattgttacccgggaggtatacatcagttcatggctggggcattgctttccgtagttgtggagatatgctcattgtaattggtgcaatgagtgctggtggtagcggggtgattgaaatttgttcctgggtacccaataatggactgccagattggaagatcattggcacccgccgttccggaagctttgtgtacaattgtgctgtgatgagttgttgacataccagggctattacattatcaactgtacatcttgaccaaaaggaaggataaagaaggcaaattctgctgagtctgtttactccttgatgggtaacttctgcccacaggcattttaggctaagctgaaggtaagctatctactatctatgaaggcacaagttggatgatagcacattgtcttcatgagcttataagtgtggtgattagtcatgtatatgtttagcatataataggtgattgtgtaattcagtttgtgtaatggtccattcaaacgtaacaaaatcgataggaggatgaacagaagattgacgtctgtgttctgggcctgctctctgatgagggacacacatcgggcatgcatatgtgagcccttcagcggatatcatatgtttgtatggttttctgtcagctgaattgaacttaatagccattgcttttaagtctgactatttgnn

SEQ ID NO: 35540 - DNA, 1564 bp, Zea Mays
atgggagatgaaaaacatatattttcctttggaccagatgacaaggatggttttaaagtatgttcaaaatgttccaaaagcaataatgataatatcaaggaagaggcgaataaatgtcctggtgacaaaaaagagaatatggaaaatcatgcttccagtgcatggacagacactgagacgttactccttttagaaggagtcctaaaacatggagatgattgggatcttatcgctcagcatgtccgcacaaagaataaatcagaatgcatagcaatgcttattcaattaccttttggcgaacatatgctgggcacaataaatggtaaattcgttagcaggctccacataaaccagacagatgatggaaaaacgaaccagcacattatggagtcttcaagtcactcaaccgaaatggctgatggcatgcagattgatggaagtgaagatagtgctgataaatcagttgaagaatatcctacaaaacgcagacgattgtttttttcaatggatgctaccacttcattgatggagcagttagctatcctgaccacagcagctagcccagatgttgctgctgctgctgctgatgccgcaattaaagcatttggcaatgaaaacccgcaagcaaggaaagcctttcgcctcaacgagcaagaatataagactaaggcttttgcttctaatcatgtccaacagattgaccacaaagttagcaataaggatacggcgatgcatggccagagtggttctgataagcaggaaaagaagttcattgctagcgcatatcaattgagggcagctgttgctactgctgttggtgtagctgctgcccgtgctaaaatgcttgcagaccaggaggagcgagaaatggagctcctaatggcgtctgtaattgaaactcagctaagaaagatgcaatacaagatcaaacactttgaggagctagattcactcatggatcaagagtacaccgctatacagcaaatgaagggatccctcatgaatgaatggataaaggtccttgagcatgcattccgggctggagtgtctctaccgagagatgaattgctcaccaaactgttgctgaactagccgcccatcccatgaggacctggctgtagtcgagtagttctctgatatgcgtcacccccttgactgttgctggtagatagcttcctgcgtgggtgcgtctgtaaaggtgccgattgtgctttcgatttctcagaattttggggatcagaacaacccttcgtaactctttgccctgttgtaccaaactaggttagatggcaaaattgctgaaattttcttgtagctgttgacatgtatggtttcgttcgtatggatgtgaaaatggtacctcagttttggagtttcaaatcactggtttagaacatcaaatcgtccagagcattcaatctagattcgatggtgtttactcttatctacatttcatagataaaatagataaaggatgatgtggaaggcagagaaaatagatagagggtgatgtagaagattagaaataaaaaatggtactccctccgtttctttttatttgtcg

SEQ ID NO: 35541 - DNA, 2003 bp, Zea Mays
gaattctccccattccactgcgtgatcaactggctgcatagcgagaaagtggatccaccatgttcgcgcgggtccgcgaagctgctgggtggcgaaacagaccttagccacatctgaacaaactccagtaagcagtgggaatttggattccactaccctaagccacacatcagcatcaagtggatcctctgcccgagtgaacaaaggcggctgagtgctgaggaactcctgataagtggccgctgctgggggacgctgatggtgatcaccaccaccatagtgctgaggtggtggctgacgttgagccaactgtcgcagaatctcattctgctgagccatcagttcttgcatggtaggaggcggcggtggtggtggaggaatgcactcattctgtccacggcgcgctcttcctgccatctgaaaattttggacgttcttaatatcatacttctgaaatcaaggctcgcacatagtaaaagatttgaaaggacaaggtttgtaaaaagccaaacatttccttgcatttttcataaaagacactacataacataaatttccttcataacttaaaatcgacatcatccatcattcataaatccaaaagagttttctaacggttacaacagtgcttaaaagactcaactcttcctagcctagtaccccaaaggtgcaaaagctaagctagctttgaggagttctactgctgcacacttctatccaaatttctgaaacctaatggacaaacaaggcaacactggacttgggggaaggtggtcttcctgagccagcagtgtccaagctggatacaggctccggctcctctcctccctcgatgtcaacatcctcgtcggccccttcggcctccatgtcctggatctcctgatggtgcatatccaggtgctggttggcttcctcaagttgctgctgagtgttcagaagttgatcctcgagaacctcgatggtgttctccctggctcctactagctactcaagctcttggatctgggtggccatctgctccaccaggaggtccttctccaccagctcagtggataggtctaccataaggtcctccctgttatccagggtgatcttggtagcctccaccaagctcatcagctaggacattgcctcacctcgcactgcttgcagacggtacatggcattcatgcatcgcaccgtcaggtgagcagtctgctctgggtaaagagcccacacatccttggcatgcaccactcgatccttccacattggcttgtcctccttttcagcggggaacaagccaatgggatgagtggacagctccaaggggtgaaagccataaaaggtcgttagcccgaggagagcaatggcctcaatagtgtcttcagcccggtatccgaaagactcggagtccaacgaacgccagcccagctgcaagggatgaggctccaaggtcatcctcaccctacagcggggtacccggtgctcctcgaacaactgcaccagataaccggctccctgcagcacctcccacaaaatgcagggaaaaccctcttgcgcaagtccgtccgtgtgggaatgtgcgttccctccttccgaggactcgtgagaagtcatctgtgtaagggtaagcgtaagcgaaaaagaaaaagaattaagaaaataaaagtggattggggcttggctttcccaaggttattgatgaggacatcacctgcaacatgagtacgactacaccagcagcacctccacatcaagcgccacttccttcattagccgggctagtcactcgggcctgtgccagagatcttaacttcgtcatgctactgaagaatgagggcccagaagaatagatgaccagcccaactacgacccatagtggacgacctagggttggccgccactaggggctgcaccccctctctctatttatccaggagctgcgcctcctttgttctttgagttttgttttacgttagctttagctactctagaacacgcgcaaataagcgctgtctttg

SEQ ID NO: 35542 - DNA, 1714 bp, Zea Mays
ttttgagaagggtgcctttaaaataaggccctcggattctagcgtccctcggggctcggggaggagcggcaggcacaatctccttctggtagcccgtacgcttcttctacaggcccttgcctgcccccctgtcccactgcctccacacaccattgtcatggactcatggtcaccaccaccacaccaccacacttcactcgactccacagcctccagtttatccgtttgctcgacaccattgctattatctcctcgctcgcgtaatccatcgttttccgccgcgatcagttgttcctgatcaatcctgtcgaactactactctactactctgcgtagatcgatcgggtcgatcaggctcgctcggctgaagttcatcggatcagaggctcgggctccggtttctcgcccgcaatgctgaagaaagcgtcagcaggaagagctgcggccgcgacggggcgcggcgatcccgcagcgcccgcctcgcgtcccagtcccacagccaaggtcgccgagggcggcgcctgcagcgccaggccggcctctcggctcctctccacgaggtcagtcccgagcctcttcgcggagtccccgatgacgacgagccccgccgcctccgcgcccgagctgctgtccagggccccgctccgctccggcggtagcccgggcgcggcgggcctggcgggcgtgctggtggcggaggaggccgacgagcgggggtccttgttgaggaacgggcgcagggtgctccgcgggacgcggctccgggtgcagctgccgccgccgccgccgatcgagttcggcgtgaagaacagggaggcccagctggcgctgctctcccccgtgcagcggtcgccggcgcggctggcaaggcggaggagcgaggtggaggaggagctggccggcgaggactacacctgcgtcatcgcccgcgggcccaaccccaggatgacgcacatattcgaggaccgcgtcgtcgagagctcgacctcgacctcgagctcgacctcttgcgatgggtgcaacaaggatgctgctctcttgctggtgctggaaagaggcgacagcgagttctgcatcgaccaacggaaggcgctgtttggcggcgaacgggctggcggcgagcgggcggtgacaaactgaactctccgtcctgaatcttggcacacccgcgctatatgtgaagcgacgaaccattccgttcttcatctcgtttgaagaaattttgatccgtgctgggaccaatgctatcgggttcagggtgatttgtccctgtgtcttttttggtgattcatctctctaagttttagagctaaggctccaaacaaatgatttacatgttacctttaaacattaagcccaccttaaattaaagttttagagcttttaaagcgagctaaagtgcactaaagcttttagaactctaaaacttagtcctgaggctctaaatttgtcgttaggacatgtataaccttatttaatatgaagtcttttgagcagtctctaaatgactaagtgtaaaaaaatataagagacaaactcttcacgaagaacctgtctcttcacgactttctatacacgttgtcttttaggtgcatttatgatccagagtctcagtgttgtaccacatagtctcttatccgtatcttgtacttaaaaaaacgaactggattctcagggttgtacatgcccttacgactcttcactataggacata

SEQ ID NO: 35543 - DNA, 1038 bp, Zea Mays
ccgcaggccacagcagtcacacgaagacagcaagctaaacactcgtactctgtcgtctccttcccgagcccacaaacccttttgccaatggcacatcctgctagtgctagcaatgcccgcctgaccaccaccatcctcttcatgtcgcttctgctggtcttggctactgcttcactgggatgcccgtgcccatgctcatacacctgtgagaacgagctgaactggcgcgtgtatctgaagcaagttgtcggtactggaccaagtcacaaccaggaggtaattttcagacctcagcacgctaatccgttcggccagaccgtcgttcaggactggacgttggtagacgcgcctgctcaaggcgcaaaggtggtgggacacgcgcaaggcgtgcatgtcttgtctgatctagccaacgtgggctggttcgtctccctcaacctcaacatggtgttccaaggtgacaggttcagcggatccacgctcccggtgatgggagttcttccaccggagggggagtgggctgtcgtgggagggacaggagagctggctctggcacgcggcacgatcaagcacagaatagctggaagcgcacccgagaccaacttccggcagctggatatccacgccttctacgcgaacggctcagccagctgcgtcgtaggttctgctgcagtgatagccgagaaggggtctgctcacgccaagtgatgccatgcgaaacagttgcatgcatcctgtctcaagtgcaaacctacaggaaagaagaagaaaaaaaaaacataaataatcagttggacggatgcaaatgaagtgaatcaagtgatggtgctgcccttcatgtcatgagaagtaggcagaggaggcaccgtttgtgtgtgtgtgtgtgtttccttacaaataaataagacatgggtctctggatggaagtcatgaaactaccaatccagcgtccatctatcatgcacacggttcgctgtggtcgttgctgtacgcaactactgttgtcgttgtaatgtttgttgtgtaatattttcagga

SEQ ID NO: 35544 - DNA, 1646 bp, Zea Mays
cctccctccaccactctcggtcaccgtcgccgagctctcctgcattgataggcagcatggtgatgaaagaagcagccgaagagcacgatggccgccgcgacgtgaccgtcacggtggagccggcgctgccggtgcagcaacaccgcctgccgctgtccaacctggacctcctcctgccgccgctcgacgtcagcctcttcttctgctacctccacccggcgcccaccgcgatcgctctcaaggaggcactggccaagacgctggtggcgtactacccgttggccggggaggtggtggccaacggcgatggggagccggagctgctctgcagcggccgcggcgtggacttcacggagacggccgcggccggagtcgagctgcgggaggtccggctgggcgccgtggacgaaggcgttgagaagctggtccctgtcaagaagaccggcgtgacgatggcggtcaagctgagcaagttcacgtgcggcggcgccgtcgtcggctgcaccttcgaccaccgcgtctgcgacgcctactccttcaacatgttcctcgtcgcgtgggccgcagccgcccgtggcagctctgcgccaccaccgccggacccgtgcttccgccgctccctagtcgccccacgcgacacaccacatcggcgcgcgccgtccaccgacgccctcatcaaccgcctcttctctcctcgaagcgccgcgccaccgcctccacccgccgccgcaggctccgtcaaccggatctaccgcatagccgccgaggacatcgccgcgctgaaggcctcggcggggccggggcgcacgaagatggaggcgttcacggcgctcctgtggcagctctgcgcaagggcggcctccccgcgccagagccagtgctgcatgggcgtggtcgtggacgggcgcacccggatgttcccggacggcgccatgaaggcctacttcggaaacgtgctcaccatcccgtacggcgtcatcggctccgaagacctgcgctgcatggccctcgctgacgtggccgacgacgtgcaccggtgggtggcggaggccgccaccggcgaccatttccgcgggctcgtggactgggtggaggcgctgcggcctaagccggccgcggcgagggcgtacctgggagggaccggcggcaacgaggcgatggcgtgcatcgtgtcgtccggtatgagcttcccggtgggcaaggccgacttcgggactggcctccccgcgttcgcgtcgtaccatttcccgtggcccgccggcgccgggtacgtgatgccgatgccgagcgcgcgcgggaacggcgattgggtggtgtacgtgcacgtggcgccggaggtggcgaaggtgatggaggagtccaccgtgttccaagccctggtgaacagctatgcgtttgaatgatgatggagatgggccggcatattcgtggatgcgcgcgcgttgccgtccacgcgtgtgtctagagctagtgttgatgtgcatacggcatggagttctcactactcagcagtgctaccaatttgcctcgttggttactatgtttgccagaaaataataatagtaactccatgcatatatgtcacgtgacatatgtgtaattaacaaaccaaggcctactttgcctagttaaattatgtggagaaa

SEQ ID NO: 35545 - DNA, 3492 bp, Zea Mays
caaaatggcccgggccagcctgcaagaaaaaacttagggttgcaagaaaaaccccagctcctttccttgtattgtcggaaatcactgtctcccctccctaccttcgcaagtttgcgcctaaaccctagctcgcttcccaatggcgccgaagaagcgcaaggccgatcccgccgagtccgccgacgctgcggaggcagccgccggcaaccaccgccaggagccagcgccctcggagcccaagccccgcgccaccatctacttccccatcaccgacgacccgccggagcccgccgccgaggaggacgaggaggatggcgctggcgaagacgaggacgacgtggaggacatcggcaagctgctcgagccactgtcgcgggagcagctcgtcgcgctgctccgcacggcggcggagacgagccccgctacgatggcggccgtgcgccgcgccgtggagtcggaccccgccagcaggaagctctttgtccacggcctcggctggggcgccagcgccgaggacctccgctccgccttctcatgcttcggcgagctcgaggactgccgcgtcatctctgacaagcagtccggcagatccaagggctatgggttcgtcctcttccgctcccgccgctctgcactccgcgccctcagccgcccccagctccaaatcgggggccgtcttgctttctgccacctcgccgcctcaggccccgcgcccccagcttctcagtctcagaaccctagctccaacccaaacaccaatgccaactctaactccaataccaccaccaatgcttctggctcatcatcgtcgcaacctgacaatatgccgcgcaagatatttgttggtaatgtgcatgctgatgtggacgtggaccgcctatataactattttgcacaattcggtgagattgaagagggtccgtttggctttgacaagaacactggcaaaccaaaaggattcgcattgtttgtttacaagtctgtggagagtgctcgccgtgctttggaggagccaatgaagaattttgatggcaagacgctcaatgtgcagaaagccatagatgggaggaccaagggctcatctggaacgaatacaaatgctaactccaatcccactactgcatctgtggctgctgctgcagctgctgcgcagatgactgctcctgccactgccgccattagcccatatgatccatcggcatatggtgccactgcggttcctgacatgagttttgcacaacaagccgctatgctgggatttggtgcacagcaacaggcattcgctcaacccaatgcaatgcttgccatgatagcggcaatgcagaacccagctgcactagggatgacaccagccatgtttgctgctatgaacccagccttcgccgctgctgctttaggtgcaggcgggcagcaggcacagacagctggtcttacgggctttggagctcagggttttgggacgcaggcatttggagctggaggtgcagttttcccaaatgcagcaggtgttcaagcagcaacagctgcatatcaaggaggtggggctcctcctggttttcaagggccacctggatttcaggttggccaagcaactacccagacaagcactgcagtggcagcagctggttatcaggctggggcagctgggcagggccaggtgcctggtgctcagattggaggcactggttttcagggtggatattgacagaactagttgctgtgctgtttggaggtatgggtatttatggcttttgctttaagcctggaaatttcttctgacgttggattcgatgaccatgactttaagatcttaaatgagttgcagctttgttgcacttttaagtttatttttaaatttgctcagtgtttaacattagccgtgcaaaatagcttgttagttaagtgttttatataatcccatacgtaaaagagatggtttggtctgtgggatggttgacatatggtatctccgggaatttattgttcataccttgaaatattttggagctctttcttgtgtcaaccttattgtgactctggtcatgccctgacactttataactggattactaattactttagcatcttcattttctcaactaccccactttatgttgatttttccatgaattgcctatgcgaggatatactgttcatatatgcacaatcagaatttggaaaaaactgttttttcgatcttcctattagactcaataggacactaaagtctaaaggtcatattactagaatttattcttactgcttgtagattactgcgctgttgaccttagtagtgttaaatcatcgtgtgaatcatgaattaggcaaggtaaaactgtcaggtggatgaatattaataatttttaattcttttgcatgcaaccatgctgtcgttttattttcaagacatgaaagtagtagtattgtgaaattattatgtccatttcatcaacagagttattattactactgatgatcttatatcactgctcattgttgtcttatgcctgctgtgtttgaaataatacagttgacacttggcactgactaattagtcaaacattgcttgcaaaattgcaatttctaaaacgcagtactagttccactagagtcgaaagcacacttggaggtaattagtgtgcagaggcggcatctgatcagcagtggcaggggaatcccaagtcctctgttccttctgacttctaatgtgctgtatggccctggccagcctaggttatcttctggttggcatttctgttatttaattttcttattaggttcaaatactaacggcaccctctgttttgggcccttcactatcacatcctctctcttctgaaactgtcggaatggtaatttaactgttgagtaaaaattaagagtcatttatcaagtgatttccgctgaatttgggttgcttgtctctcgtgagacttgagaagtagtgaaccaagtgattgatttgctggagtccagtaactaagacatactcgacaaacgtgcagtggtgcactgacactgcccttcagtttgtcaagtggtcatcaaagcagaacggggccaagcacccatggttgctgggccctggttccgcccctgaacagtgccaaactggccaactttagtttaaaaatatattcgataaatttctgactattaatttgcagagaaccatagcctgccaaaattttgcaggtggtagaccattctatttttcagttatcttctgtgggtaaatgtcaccacagttggtagctagcagttctaaatggttattgactattgatagtttctgggatttgataatccatatttcccgcacagaacaattgttcatttgttatttggtcgcttctagttttttctttcccggacttcaacaaagtgccttgagaacatttgttcagtttttttgggtcgcctgcatttttggcctcactgtcaacagagctacttgttctgataattacactcttttgtgatcgaatggca

SEQ ID NO: 35546 - DNA, 1305 bp, Zea Mays
caagctagtttctaactggttaatgatgaatatgattgatcgaagaagctcggagtatacattttggggaactatggcagcgactatcaccgtccacaccagcagcctacatcatggcaagttcactcaacatccccgatgccacaagatgcggcaaggagcagtccatggcaaagccctatgcagttccaggatccaatgtcaggataccaaggaggtcctcccagcgctccacgtccttggggctcacattctggtcctggaggccgaggttcttattcaaatccaccaaactttgggttcagacacccgaatcccagccggggtggcagcccaatgaactatggaccaagaggtggcccatattcatcttatggacgtggcagggggcccaactactttggcagcccaggatcaagggggagaggtgggagggttggctgccatggccggagttacttcaacaagtcaatgcttgatgacccttggctggacctgcaacctggtgtcggcaacatactgatacctaggggtgagtatgactccaacaagtcctggctcccagaatcgctgcgaaaaaagaaggaaacgccgcctgctcaagggcaaattaaaccgacgccaggattgagcctagcagaataccttgacatgtctttcaatgaggtttctgataaagagaagtaggctttttttatgtatgcatagctacgacgacaggttgatgtttgtttttgccatcgtttgcaatagatctttggaagcacctcttcattacaactttgtaggctttgtttttttttaaaaaaaagagaagcagaactttggagaagggaaagttgcaaaggttgcgtagcatgtcagcgttttctgctggtgcattaacgaccagtgcctgtttcgtcttggattgcatagaaagtttggtggagattctgttgaaggaaaaaaaaagaagggtgcaaatcttgtgccaaaggtcagctggagatagatgctgcgcttttctttctttgttggtgcatatatgtataacgtgagcatccaaagtgagctaggcacataataaaaagcgcacagatcttttgcgtgatggcaattagagtctgctaagagaaggctgatcaagcatatatataagatgagaagaggaagaaaaggttgtgtttgttaggaagaaaggaccgtccatctcactgactgacttggaatagacaatgaaatggaagtgagtttgaagctaggtaatgccgatatcatacgtgcttgcatgttgacactgattacagactaatttgattccag

SEQ ID NO: 35547 - DNA, 1065 bp, Zea Mays
ctatatcttcggcgtcccagctcacatgttagtaagaataagaagagtaccacattgaagattgtactcccgattatggctggtttgattcttctaataacatgcacatggcttgtattcaagccaaaagacaaacacaaaagcaagaaaagtcagtacacactgcaacactcggatgcttccaacaggtttgagaacgaaaatttggaatttccatcaattgccttagaagacatcatcgttgcgacaaacgacttctctgattttaacatgcttggaaaaggtggattcggaaaagtttacaaggcaatgttggaaggtggcaaggaagtagctgtcaaaaggctcagtaaaggctctacacagggggtcgaggaatttagaaatgaagtagttctgattgctaaactgcagcacagaaacttagttagacttcttgattgctgcattcataaagatgagaagttactgatatatgaatacttaccaaacaaaagcttggacgccttcctttttggtacgttctgacttcatttcacatattacgaaacaattttagactaactgaaattgtgactcacaatacattcatgaagatgctacaaggaaatctttgcttgattggccatcccgtttcaaaataattaaaggtgtagcacgaggacttctttatctccaccaggattcaagattaacgataattcatagagatctcaaagcaagcaacatcttgttagacacagaaatgagtcccaagatatcggatttcggtatggcgaggatttttggtggaaatgagcaacatgcaaacactactcgagttgttggaacatatggttacatgtctcctgaatatgctatggaaggctcattctctgtcaagtctgacacctatagctttggtgttctactactggagattgtaagcggcttaaagattggctcaccccatctgataatggactatccaaatctcattgcttatgcatggagcttatgggaaggtggaaatgcaagggaattggtggactcgtcggttctggctcattctctgtcaagtctgac

SEQ ID NO: 35548 - DNA, 568 bp, Zea Mays
gaacctccctactttgttgatcttccatgttgaaagaacttcaccaaaagtgtcccaaggaaatggatgaatatgctggttgcatgtattactacaccaacgaattcgacttctgccgtaaggagcagcaagcttttgaggaagcctgccccatttccgagtagatcttgagagttttacttgcagtggtcttcgcaaataagggaaaaaaggcagaaaaacagcgttcatgatatcccatgtttgttgtcctcatggaatttgtactggtgaatgaatagcacagcctggagctattcaccccatttgccgcccctcaggattttagagcaggcgaatgctctaaaatggtgatgatggtgttttctctttatggttcacaaattacatttggcggactcgctgttatttctgtctgtcccgagtgtgttaacccgctaatctgatcttctgctctggacttccacaaggctatggcacaactacaatgtactcctacatcatatcgtctcaaatctgaatagtctgtactctgtacagactacagaaaaaaaacattcattgcctt

SEQ ID NO: 35549 - DNA, 2767 bp, Zea Mays
ctcgagcaaattcaacctcttgcaagttgcaccacaaatctgtcagattacctctcgtccgcgtcaaaaaaagggaggaaaaagggcaaaagaatctgaccgaaaccaaagttgctaataacttgggacgtcgtttcccggcgtgcacagcaccgctcgatcgagcaaacacaaacccttggtggagtcctctccgccgccgcgcgctaacaacctacgtacgctatcgccgcccgctcgcctcgacgggattggtccggccgttggcccgtcccccccaccacgctcgctccattggcaggcgagaccgtccatcctccgaccccacccgtcggccgccgggatggcggcttcgggcggggatgcgccggaactcgccgtgataacaaatgcttgtaatgctgcaagcgcacctgaagaaaataggcttgctgatgacagcaacaccatttcagaaaatgcccaggaatcattgagctctttgccagaacaagagtcaaatgatgctagtgttaacacagaaaagaaagaacctggcatttcaaaatgcaaatcagtggacgaaataccaaaaacagtggctgtaaagaggtgcaagaacattgattcaaagaaagtctcctcaaataacaataataatccaagctttactggcagtctggttctgaaaaaacagccagcgaagggaggccatctttttcaattatgtgaaaatggaatgtctcaagacacaaagactcctagcacaaggatatgcataaattcagcatgcaaagctgtcttcaattcagacaatgcattttgtaagaggtgttcatgttgtatttgccatggttttgatgataacaaagatcctagcctttggttggtatgctcatcagagattggtgatcaggattgttgtggatcatcctgccacattgagtgcgcactcaagcaccgaaagactggatgcatagaacttggacaatctatacagcttgatggtaactactgctgtgctgcatgtggcaaggttattggaatacttgggttctggaagaggcagctggtagttgctaaagatgctcgtagagttgataatctctgttcccgcatatatctgagtcatagacttttggatggcacaactcgttttaaagagttgcatcggatcgtagaggatgcaaaagcaaagttggaaagtgaagttggcccccttgatggtacatcatccaagatggctcgtggtattgtaggccggctgcatgttgctgctgatgtgcagaaactttgcactttagcaattgaaaaggctaatgagtggcttagctcaaacattcaatctgaaacaaaacaaaatggtttaaatttgaagatattacagcttcatctttggtgttggttctcaaggaagctgtttcctcacagtatcatgctatcaaaggctataaactctggtactggaatagcagagaagcacctttcacaggagagcctgctgttttccccaaagaccaaagaaggattcttatatccaatctgcagccctgcacagaatattcgttccgtattatttcatttactgaggatggtgaactgggccattctgaatcaaaagtatttaccaagagtgtggaaattattcgtaagaacacagagctcggagcagaaggttgctcatcttctgccaagggagctggtaagagacaaaatgttaggtcattaggcttccaagtgcgccagctgggtaatgtcttccgaaaagcacagactgaggagaatggttaccccagcgcactgtgtaaagatgagattgaagattcatgcgatcagagtgattctgtgattccagtcaaggaccaaattccacgtggtgcctcccgtaagctcgatctcaatgagacctcagtcccagacctaaatgcagaagtagtcatgccaacagagtgctgccagaatgacaacggctgtagttctggaaagaatgcattcacaaaatcgaatggttgtggtgactccgaaacttgtgcggaggggcatgtaggggatgcaccggccatggaatccttgtctcaaagtcgcaagcaggcatcagatttggagcaggagacttgtgttgatgacagcaatttggtggcccgtgcagttaggctctttgccccgaagttaggccagttagatgacaactatgagtactgtgtgaagattatacgttggttggaatgttctggcctcattgagaaggatttcaggatgaaatttctaacctggttcagtttgagatcgacagaacaggaacggagagttgttatcaccttcatccgcaccctaatcgatgaacccagtagtttggctgcgcagcttttggattcctttgaagaaattgttaccagtaagaggctaagaactggtttctgtactaagttgtggcactaaccagatagagcatgaaacagctatctaataatactctagtattcttacattggcaagattaactgggatgacggtgtagtaagtacttctatatgttttctgataaatgtagttaaacagatgttgctgagcttgggtatttgccatgatgataatattcttacatgggcaaaaattaactgggctgtagtgtaatggtgctttttatttgttttctgataatgtagttgtctgatattgttgtggcttggatatttgccatgatgatgtattcttatatgtgaaaaattaactgggatgacagtgtaatgctacttccatttgtttttatgataaacggttttgatct

SEQ ID NO: 35550 - DNA, 261 bp, Zea Mays
aacctccaaaagcacataattacagggaggaacaaggatctcatccatacctagggtttccccaagaaattctgcaagaagagatggggaagaacatctccttgatcctctcttccccttcaactcaatgtgctcctcctcttctcgatccttgttgcgcgggggaggggagatctagagggaggaggaagccatggagaggggctgccatgggaggagaggacagccaacccaagggaaaagaagagaggggcggccaag

SEQ ID NO: 35551 - DNA, 1970 bp, Zea Mays
caaatatttgttcctctctttgccttgcagacaaatagcacacagcaatcaaccgtcgtcttcttcctcgacgcctcataggctcatagggttctccaaattctaaatcgttgcaagcgaaaccaccaaaactgtactcacaaccctcgtctgcgctgcgccaccactcccccgtggcggcttgtagttgtagaagttcccggaaccagacaacccctaggcgctgagttttctgatagcggcttcggatatctcgtcgtgggcggccatggcgggcccgtgctgagtgcggggcgggagcaggtgaaggtctccgagctcgagatctcgatgcagattcgggagggcccggcgcggcggcaggcgccgtccgccgctggggcgctgcggtcgcccatgtccgccatgatgctcgctatgttcgctactatggcctccttctacgtcgccggtcgattgtggcaggatgctcagaaccgacttcatctcattaaggagctcgacagacgaacaggccaggggcaatcagcaatatctgtggatgataccttgaaggttgttgcatgcaggcagcaagggaagcggttggcatcacttgagatggagctggctgcagcaaagcataaaggttttgttggcaaatatactcctgagacaaatggaactcattctgggaaaaagccactgattgttattggaataatgagtagctttgggaggaaaaactaccgtgatgctgtcaggaaatcatggcttccaacaggttcaatgctgaagaaactagaagaagaaaaaggcattgtagtacgttttgttgttggaagaagtgcaaatcgaggtgatactttcgatagggagattgatgacgaaaataggagcaccaaggatttcttgatattggatgatcatatagaatctgatgaagagcttcctaagaagacaaaaagtttctttgctaatgcagcagaaacattcaatgctgcattttatgctaaggtcaatgatgatatatacataaatgtcgatactttgagtgcaatgctcgaaactcactgggacaggcctcgtgtctatataggttgcatgaaatcgggcgaggttttctctgacttaacccacaagtggtacgaatcagactggtggaaatttggtgatgggaaatcgtactttcgacacgcttctggtgaaatgtttgtcatatccagggccatagctcagttcatttctataaacaagtccgctctccggacatatgcccatgatgatgttagtgttggatcgtggatgattggccttgccgtgaatcatgtaaatgaagcaaaactgtgctgttcatcgtggccctcaggcttgattcggaacggctgaatcagcagccaaagttccgctgaactttggcacgacatacataggtggcatccaaacatgccctgaggttcctcactggtcctgatcaaggtcctgtttaggtgcgttatgttcagcgctataacgagcaacaatgcttaatgaggaagagttttgcaaacactgtgcctgttggatcgaatcggtattgggaaaattttgttttcttctgccatcttgtgtagtcctttggaggaggcttgtacgagccagttcatactgattactggatcggatatcttgtttttcttttccaaaggaaaggtcttgcatattttctttgcaaggccactacactagaatcatgagttctgacgaaaagccctctgcagattgtatcctgttccgcgtgccatttgtagatgccccaccctttaccattcttttttctgacagacactgccattgttggagtgacagaaatcaatagcaattcgggagattactttgctccagaatacatttatgcgtaatgcgtgtcttcagacctgttgccatggttgtgattttttgacacatacataatgatgccctcttgaagtcaagaatctgccatgtacact

SEQ ID NO: 35552 - DNA, 461 bp, Zea Mays
acaaaatcgaactcccagattcaccatcagactcaaaacactcagactcagagccaaacgaattatcatctggcactacggttgaggccgccacaaaatcagtattgtcagtagcggttgcttgcataggcccaaacgtcggaacctgcgcagcaaccgaggttcagtatcacacaaacaaaattttacacttgaaatccctaacccctattccgccaccaacgaaggctcggccgttgctgcgaggtcttcggcagcaggttcgaccaccgccttcgaggcatcctcgcccgttggcacaggggctggcgcggggtcttcgccagctccaatcggcaagggggtcaccaaggggcccttgcccacatcgatcgaaggcgccagctccacccccgaggcctcgggtagcgtgctgtctagatcgccaaggtccttaaccttttcgtcatgcgccatctgca

SEQ ID NO: 35553 - DNA, 484 bp, Zea Mays
acttcgaaaggagctacttacgtcccatggccatcactatcagatggtgaagcaagatcttgagacgcattgaagactcctctagttattgcagatgctgcaaaatgccgagcccccacgagctttctattgcaggatccagatgggaaatcatttgtaacctcacaaatgccagagtagtgagcaggtactggataactatcagttgatagatcatctgcaaagctagggtgggttggatctattcctgtgtcgatgaggccaatgacgacaccctgacccgcgaattgcggaccaccttcttgcacccaggctccttgcggcagtccaaggaattcaggggtatgagttgttgctgtcctaactgagtaatccagcatcacatttgctacttcttttctcctagatagcttatctgcctttcagtacaagcaaaaaaaaaagtaaactcaataaaacatggataaatccaaataatctttaa

SEQ ID NO: 35554 - DNA, 2340 bp, Zea Mays
aacatcgtaaaccgagagcggatgagacacaacgagttaacaaaagcttgaaaattcgtccccaagaggaatcaaatccaggacttgaagtgttagtcggaagccttaacctctatactggagacgtttgccagaattccattatgtattggtgtctttggagatacgtgctgtcagaccttccgtcagacatcgtcgtccatgtcgacgacgcaaggttctacctgcacaagttcccccttctctccaagagcggtctgttacagaggctgatagtagaggcgagccagaacggcagcgacgaagttgccatacaagacgtccctggcggagcgaagaccttcgagatctgcgcgaagttctgctacggcatggtggtgaccctgaacgcgtacaacgtcgtcgccgcgaggtgcgcggcggagtaccttgggatgaccgaggacgtcgagaagagcaacctggtgttcaagatcgaggtgttcctgagctccggcatcttcaggagctggaaggactcgatcatcgcgctgcagaccaccgacgcgttgctgccgtggtcggaggagctcaagctggtcggcagatgcgtggactctgtcgctgccaaggctaccgtcagcgcgtcgaacgttgtgtggtcgtacacctacaacaggaagtctgcgtcctcggacgagatcgtcgaggctcgcaggagctcccaggcggttcccaaggactggtgggttgaggatctgtgtgagctcgatgtggacctctacaggcgtgtcatggttgcggtcaagtcgagggggaggatcccctccgatgccatcggagaggcgctcaaggcatacgccgctagatggctgcctgagtgctgtgacgcgctggtagacgacgcctactctggagcgtacaagcacctgctcgagaccatcgtctggcttttgccctcggacaaggggtcttcggggatctcctgtcgtttcttcctgaagctgctgaaattcactgtcctcgtcggcgctggggagctcctgaaggaagagctcatggacaggactgtgttgcagctccacaaggcctcggtcagtgatctcctgatcccctccaggcctccggcgcagaccgtctatgatgtccagctggttcagacactcatcggcaggtacatgagccatgccggggtatctcaaggtgggatttttctcaacgaccttgaccaggagatgtttgagacgaacgtggacggtgaatctttgctagcgttgtgcaagctggtcgataggtacttggctgaagttgcctctgatccaaatctctctgtttcgagctttgtggatttggcgacttccatgcctgaaacagccagaccgacacatgatggattgtacactgccattgacgtatatctgaagttgcatcccggcctacccaagatggagaagaggaagatttcgaacctgatggacgtgaggaagctgtccaagggggcgtgcatccacgcggcgcagaacgaccgactcccgctgcgcgtggtggtccaggtcctcttcttcgagcagctgcgcgccgcgggagccgccgccgccgctgggacgcccagcgccagcgtggcgcggtgcatagcgcgcctggcggagcaggaggaagaggaggagcgctggaacgacggccgcgcgctgccggagcccccgacccccggcgcgctgaagaggcagctggggagcctgaagctgcagggcgaccaccaccagggcgcgggcgacgacgggcggcgcctggtggcgcgcagcaacagcgtggccaaccagagcagccggatgtcgctgtcgtcgcggtcgcggaggatctttgacaggctgtgggtcggcggagcgaagctgcccggggaggccgccgccgcgggcaaggggtcgtcggacacgtccgggagctcgcagagcccgcggtcgtcggcgaagccgccggagtccaagtcgtccagctcgtcgtcaaggaaccggcggtactcggtctcgtaggccggggccgggggccggccggtcggcggcggaggctgtacagagaggaaggagagcctggtccaagcctaaacgtagctgctgctaactttcagagttcatgttgatctcgtgctgcctgcagtatgtggcatgcagctagaagaaatctttgttctgtcagtccagttgttctatctaatcttgagataatccctggtttctgtaacagacttggaaactatgattcagtcgaattctccatgaactgggcaatcctttttggcggctccaccactcgtgtcatgtgcttgatgtaaaatgccgtaatagtctaaatccaggttttaaa

SEQ ID NO: 35555 - DNA, 2056 bp, Zea Mays
ccaccgcgctcgccctcttcgtcgttgccgtccgtctccacagtccccacccatattccattttggttatcctcttgcgtcacacctcctccctcctggcctcctcctgcggcccacttatatataccaccacgtcgatgcgctgctccgccggcatctccatcgccgtcgcgccgccgtagatggcctgacatttttcacttcatttgtcatcccaattccacaaacctcgcgcgcggcggcggagggaaacaaaaaaaaaaaggaaggatggcgttggagccggtggcgcgggcggtggcggaggaggtggcgcgctggggcgcgatgcgccagaccggggtcagcttgcgctacatgatggagttcggggtgcgccccacggagcggaccctcctgctcgccgcacagttcctgcacaaggagctccccatccgcatcgcgcgacgggcgctcgacctcgactcgctccccttcggcctctccaccaagcccgccatcctcaaggtgagagattggtatgtggagtcattccgtgacatccggtccttcccagaggtgaagaaccaggaagatgaactcgccttcacccagatgatcaaaatgatcaaggtgcggcacaccaatgtggtgcctgcggttgcattgggtgtgcagcagctgaagaaggacttgggtggtccaaaggcgttcccacctggaatccatgagatccatcagttccttgatcgcttctacatgtcaaggattgggatccggatgctgatagggcagcacgtcgctttgcatgaccctgatccagagcctggtgtgatagggcttataaacacaaaaatgtcacccatgacagtagctcgaattgctagtgaagatgcacgtgctatttgcatgcgggagtatggatcatctcctaatgtcgacatatatggtgatccggggtttacattcccatatgttacaccacatctacatctcatgatttttgagctggtgaagaactcccttcgcgcagtacaggaacggtatatggattctgataagcttgcacctccggttcgaatcatagttgctgatggagcagaggacgtgactattaagccaaaggagtaaaagagatttaagggaagttcactctatttatttcttgctggcctgaggagacaagacccgtattaatagtcatccagcaatgtcagctgactttttttttcttctggttacagccaaatgcaactagcagaaatgtaaataaacgccctttatgatgctaacagatagccaatccaactaactggctaacgccttttgttagaattttctcattaattgtgatattcaaccgacaaacttgtatcttctgcacctatgttagcaaaaatcaatagcttcgattattcatgatctggtatgaagtatgaactgtttgactaaaccatacttttgcagattactgatgaaggtggtggaataccaaggagtggtctctcaagaatttttacgtatctctatagtacagcagaaaaccctcctgatcttgatgtacataatgaaggagtaactatggctggatatggttatgggattcctattagtcgtctttatgctcgatatttcggcggggacttgcagatcatctctatggaaggatatggaactgatgcatacctccacttatcacggctgggagattcggaggaacccttgacttaatcgattcataagaagccattcctcattcctgtagttaggactctattgctttctcaattaccgtgctggtatgcaaatattgttctgaaggccagtcacctattagttcagctgtccatgccctatttgttatctttgttgttcattcatcatctcgatggaatgtgatcataattcagaatagttttgcttctggtttgtactgtcattataattgttcaacctccaataatggtatctgtcgagcacccgaggcattgaatttgagtaatggaattcaccataattgttcaacctccaataaagtctgtaactccaattcttcaaagcatgttttttagttcga

SEQ ID NO: 35556 - DNA, 1771 bp, Zea Mays
cggaaaccaaataccccgaacgtccacagcgagcgagaggccgcaaactcccgagaccgtacgaaccagacgattcaccaatcaccatggcggcgccggcgcggcgcaggtcctgcatctcctccggtggagccggagcgcctccttccgctgctgcttcgcctcttctccgccctccgccgcccgctgcgaggccggtccaaggccatgctcaaggggatggactactgactactccgaacccgagataaggacatgatttaagacatgtgtgtgtttcaagtagttcgttgattgggtgcaggcgcaggggtttcggccaggccaggccttgatgctgtggaaatgcctgtacgggaacaacgtttgggctcatttttacgacgagctggctggtttaaacaaggatttcaggaagatgataactgagcatgctgatctcaaggcattaattgtgaaggacattcatcggatagaacccgtaaggggcaggacaactgtctgtgtttcaaatgaagttggttgggccatgaaatgtcagttttgcttcactagaagggcatgggtcaaccatttcacaatatcgacaatgtaataaaagcctcagcaataatggttcatgagcaaggccattttagccctcgcaaggttactgtctccacaagtggttttgtccctcagttaggaacccaattgcttgctgccgccagtcttaatgcaaggacagatgaggttagaaactggataatgactataaacagaaaggagaaccttaacttgcttcttggcactttaagaggtgaacttaacctcagaaaaaaaaacaaatagtgctatctgaatatgccatgctttctggagtgaacggcagtggatgatgccaaaagtcttttgtagagctactccaagggatcccatgcaagcaagataaacctcatctctttgagttccctcgacggttcccaatccaagcccacatcagacgataaaatgattgagttcggcaaacttttaattcaaggtgggctcactgtctttgttcggtcagcagaggggatgatcagatcagatggctgcctgcgggcagctcagagagcctggagactaccagctgcctctgcaccgtgcacctgagaaaattttgaggtcgtcttgtgatgctagacagtgcattacagtaaactggtcctgaggcctgagaaaattttgaggtcgttttgtgatgctagacagtgcattacagtaaactttagcgtcgtcgagaccgaagtgggctgaaaagcgctgcatcgtgcagccgcgtgacagtgggcgtctttcgcatggttggttcgtcgctgcggtctgagtcgccaaagctgaattctgttgtcatcggggagtgattcgaaaagtttggaacgaacctatcggtggtcaggaatgaggtaagaatctgaaggactacaaggttggcttgcctgagcgagataccttaaccattaaggtgtgcatggcacttggcacctagtcaccagaccagatcaccctaaatggtggaaagaaaaaagcgaaagatctagcgcaagccccacccggatcaaagtttctctctctctcttttccccccaaaagcaagtccatcacgctgcacattatgggcgtctttagcactgatctgaacacgtaagcacgatatacggttgcgccttgcttgtagcgtttggttgaagagccaagtagaacggaaccgttctgtcccagttttgttgttgtttggttacaaagtaac

SEQ ID NO: 35557 - DNA, 1796 bp, Zea Mays
ctcgcatgtccataaaactgtcatattgggagaggttagctgttctggaggcctttcaaaggatgtatggtgtacatcttgatcgtgacctggatactctgttacatatgcctaatgatggagacacgtggtctgtgatgcaaagttgggttttgcctacacggtcattcctagaatttgttatgttctcaaggtatgggttttgtttttaggaatcttactgacaatcaagcaagtgttattacatgtataactagataaaatatgtatgcactggtttattatctgatgttatatgcatatatcaaacatactgtgaatgagcacttggatatagctgatctaagcatatttatgtcagcattgctagcagtatattgctaatgataatttggggttgtgtactttgtggaaaaattacctgttaaagcacagccttgctttaattgactcggggtccaaaaaagattagttttcaactagtatctggtcatttgatcatttcgaaggattatgttgttataacaggcatccagcatcctagatgtcaacaaggttaaagtctttttggtcgctatttgcttgcttacattgttctatgttcattccttttacctgataggactgtcatatgccatagaaattcaggcttttctatatgcttcattagggctagtttgggaactccaattccccaagggatttctattttcttaaaggaaaataaactaatttcccttggaaaaatgaaaaccccttagaaaaatgaggttcccagattagcccttagtgtttacattatgctgttgattttcagaatgtttgttgatgcactggatgcacaaatgtatgacaagcaccatcaaactgggcattgcatcttgagtctccacaaggaccagcactgctactcccgtcttctggagttgattgtgaatgtttgggcattccacagtgcacgacggatggtctatgttaatcctgcaactggtcaaatgcaggagcagcaccatctcagcggcaggagaggtcaaatgtctgtgcagtttttctcctacgccactctgaagagcatggacgaggagcttgcagaagagtttgacttggatcacccagacaggaggtggctctggccacaaactggagaggtcttctggcagggtctctatgagagggagcgtagcatgcggcagcatgagaaggagcggcggaagcagcagagcagagagaagatccagagaatcaagagtagagctcggcaaaagacgttggggaagtatataaagccaccacctgatgatacagttgtctcgaacgatacaacgactgtagatttatagcattttgaccatactttagggtgataattcttaccgtggaaaattttggttcattctttcattgttacggctaatgtcctcggtcctcactgagtacccccggcaggtgtgaatatttttggtcagttttatcgtgccctctggtgttcagggtgctttacaggcgattttgtaacatatctaggccattaagtttaaatttgggttcccgtagcgtagatgcttttgttcttttcgcttacgagcttctcaataacaggcaacagctgctccgcgtttgcagtctccttggtacaaattgagttgacttgattgtgtcagtctgtcagatatttggttgaacctgcgctattatctacgtttcggtgttgagaattttgttcaacatcctgtaacatgaaaaaccacattatatcttcgattgttttggtgtcttacacaaaatctgtcattatg

SEQ ID NO: 35558 - DNA, 1072 bp, Zea Mays
cacctcctcgccggtggttcacggttctgccatacttcaacatccagaggcatatggccatggcagctcgacttattgtcatcatcagcaccagatggaggaggatgagcagctacaccaacaacctcaaaattttgatgggcgacggtcgacttctgggctcgaagaggttattatgggatgtagttcgaggaggtccaaaagagcggaagcatctggcccaggtggaaacaaggagagcagaggatggcagtacccatccttctggccatctggcagccaacaggatcatcatgggtagaagagcagcaacacatccctgcctggcactgtatgtgccgcaccacctttgcatgaagccaaccttggagagggcaaccgaaagcagagagacacctgacatcatcattactagctaccatgataagatcatcatataaacctagctacactgtcgtacctaccatatctaggcttacaatactttagcgtgagtgcagtcgcttccaagaagcaaacaaaatcagggcaaagttatatcaaaacaaaaacaaaaaaatacaaacccagccttttgccgcccccgctctctctctctctctcgatacactctttggtccccagctcgtatacgcttctagctactttctcttcgaccaatgcgcgcgtatggatcggataacgtacggggatggaacgaagtttcatttgaagcgcgctcaaatttacatgctgcatgtctaaagagacaaagatggtattggaggctaggaggaaaagcaaaagggagagaagaatcatgaaaaagaaaagcaaggggagcgaggcgaggccgggggacatgaaacaaaggtgacgtcacatgagaacggtcagtagttaaccgtcggttgtgcacagtggtcgatgcaaaatcattaccacaatcatggttcatccttgccttttccttttttttcccctcccccttataaaatgctgctaccgtagtttagtatactaccactactatacaattatcccattgcattcttattattgtagtttgtttgcgttgatgcatgcattgttg

SEQ ID NO: 35559 - DNA, 4069 bp, Zea Mays
gaaaaagtgcagctcagccacgaatagcagaaatggccgcagtagtgttttggtccctccgccgccccccacggtctaacacacccgcccgctaattcgccgaccagcctgccatcacccgctcgctgcagccgccgcgcccctcccactcaccaacgcggcaacgcccatggcgcccgtctgctgaaaacacccgccgccatgcctcgcgaccagatggtgaccaatggttttggagcaaaaagggataatgcaggggcaaaaaaatctccccagcaaattcagaggctggagaagttttactctgatgtacagtatccaaagccagaggaaatgggtgagtatgcaacctgtgttggtttgacttacagtcaggtccgtatatggttcaaagagcgaaggagaaaagagaggaggatggagatgggagccattgggtctcagatggaaaggcaatttagtgcacgttccagtggacctagatgcagcagcagttcttcgttttgtaaccaagctcccatctatgacatttcacgttcagagtcggacacctggggtatgagcacggcaggagaggaaagtaaaattctatcacaagttctgtttcccaaggattatatcctgagcaaaattttccgcaaggatggtccacctcttggtagtgaattcgaccccctcccccaaagtgcacatggctgtatcagagacactacatgccatcattcctctgagaaccaaagaactgtgaagaagagaaagatcatagagtcaactaaccagagatctgatgtgtatgagaatactgctcctgtgaggaaacatggaattggcaaaggtctaatgacagtgtggcatgccatgtattcccataacgtgaaatgtcaaagcggtcgaaatttcattgatgaaactggttgcttgaggtctcttagaccgtttgacgattttgatggattagaagatcgcgataatggaaggaagactcaaaatcaaggtatgacacggaaaaagatagtcaaaaggagtaaagttctggtgaatagaaaaaaggtgccgtgtaagagagttactggtccaaaggtgcatcctccaatggcttgccatctttcagttgatgaatcagaatctttagaactacagactgaactagtgactttagtggatgatgaggagctcgagctcagtgaattacaaacagatttacttgccaagtttcctccacaaagtttgaagatgaaaaagctattctctacaaaaccttgggagtcatcacctgaaatggtgaaaaagctttttcagcccacatatattgattggagaattaatcctgacagattatccggctttgggccaaaacagcatttgctgaatcaagaattctttaacaaggagaaaaatcaaatggctaaatatggtttacgtccccgcacactgaaaggagaattgtttgcactgttgtctaaggcaggaagttgtgggttaaaggtttcagtactagccaaatcatctgagattattgatcttaatgtttcgagcccattagaactagagcagttgatatctttagctctctccagtgacatcacattatttgagaagattgcaccttctgcatatcgtctccgtgttgacccccaaattaaaggggaagaagattctatgtcagatagtgatgattctggaagtgttgatgaggatgaggatgctagccgaagtgatgatggatctgatggttcccaaaagttaaaatttcttgagaatgaaagcagacttgctcgaaggaaggagaaaaatgcacatggaagtccaaataaatgtagtgaaattgatgaaagttattcaggtgaaaaatggcttttggcattgatggaaggcgagtattcagatctaagcattgatgagaagttggattgtttggttgctttaatagatgttgtttctggtgctggttctgttccaagacttgaggaaccgcaaagagtcttgcataatgtgcccagagtgcatccaccacaatcaggtgggaaaataaagaaatcaactaaaaacctttgtcaatatagcgatgagtccttaaatggttcaggaagtttggattgttgtcatcaaggccagtcaggaaggcgaaaaaatcaggattacaccactgaccctggaaggaacgatttacctattgctgctcatggaccacaagttgttctcttaggatcagaccgcaggtataatagctattggctcttccttggtccttgtagggaagatgatccagggcatcgtagggtctacttcgagtcctcagaggatggtcactgggaggtgattgattcaccacaggaattactttccttgctatctatcctcgatagcaggggcactagggaagcacatctccttacatcgatggagaagagacaagcctgcctttttgaagccatgaaaaaacatgtggaaggagggaaggcagccaggcttccagcctcatctgattcatactgctcccagacaagtagtggagatggaacttcgcccaagacaagtagtgtggatggagcttcatctgtatcagacattgagaacacttctgttcctacaagcctcaaagatagtaatttggattcatcgtctgccgtagtaattgaaagtgggaggggaggtgatgagaaaatatctatgtgggaacggctgcaagcatttgataaatggatctggacttctttttactccatccttactgctgttaaaagtggcaagaagtcatttaaggagtcactacttcgttgtggaagttgtcatgatctatattggagagatgaaaagcactgcagaatatgccattcaactttcgaggttggttttgatcttgaagaaaaatatgctgtacatgtggcgacgtgcagggagcctgaactttcacatgaggtaccaaatcataaatttctgccatcacagctacaggcacttaaagcagccattcatgctattgaggcctctatgcctgaggcagcttttactggttcttggatgaagtctgctcacaagctgtgggttaagcggctgcgacgaacgtcatcattgccagagcttttgcaggttcttgtcgattttgtaggggcaatggatgttgattggttgtacaaaagttcatctgcgagattgagaacaaatctggatgacatcattgtcgactttcagacaatgccacaaacaacatcagcagttgcactttgggttgtccaattggatgccctcattgcgccttatttggataatgccatggcaagacagctggtgaatgctaggtagcttacaaagatggattcttttgcgtgatgcacaagcaccccgagctgacttctttttctggcaccatctgcaagttttttcttgatgaaagcttttcatctaggtgagacagaacatggggtctgctttgagttcgagaacaagatcttgcgacttgctgtaaagcatggaatatattgttccctcccagcagagcattgcgtcatagacaatgaaaaagttttgttaataatcgttgcttcagatatgtgaaagttttggctttccatgtagcgacacaattgggatgtaagcaatttctgaaacagaccgctgtttgcaggtggtgctgtttgggacttgattaccagctgtgcccttagttttaacggaggggtggttataattttgttccttctatatctgtatgtgctaagttgctcctagtccgtgagagctttctacattaggctatttttgtatgttatgtaaccagtttctattagagtgcagttgtagacatttagaacatgtacaccaatattgtgactgtttgaacaagtgagggaggcatagaagacttcatacggatgaattcatgattagaataaaattgcaccaaaaatcaattttgaaccgttacctttttggtatctcgtatatgttttttttttgtctatgtagtgctagttgataaatttcggatagatgtaaataggaaactgaaactctattcggatagatgtaaatagaaaaatgaaactctatttgtttaaaataagttaga

SEQ ID NO: 35560 - DNA, 1234 bp, Zea Mays
gcatacagttccctggtgcactggaaccatcatggtcaaacatgtcaaggaaaaaataagagatgttatgagaaaaatgtttgtctctgatacggatagtcacaaaaggtagcaacataggggctgcattacctagaatggtgaatacatgcctggagggaatatatatgactttcttcacaagcaaaataacttcttggacctccataaaattctaagatttgctatcgatatctcaaaaggaatggattatctgcaccagaataacattatacacagagatttgaagtctgcaaatcttctgctaggccatgaccaagttgttaagatcgcagactttggtgtggcgcgacatggaagtcagcaggggcagatgactgctgaaactggaacctaccgatggatggcaccagagataattaatcataagccgtatgaccacaaagcggatgtattcagctttgccattgttctttgggagctggcaacttcaatggtcccatatgacaacatgacacccttgcaagctgcattaggagtaagacagggattgcgcttggacattccgggcagcgtgcacccaagattgaccaagctgattcgacagtgctggaacgaagatcctgatgcgcgtctgacttttgcagagattactaaagaactccaagatagtctacaccatatcgaggcacccaagggagccagccgtcgatctagagcaaagatgcagaagaaataagagggcaaggtttcctacttttttttgggtgtgttacactagttgcagtatgagtgtttaaggtgtatgtcgcggttataaatattttaaggccaaggaagtgttaaaaaccgaccttagctcagttggtagagcggaggactgtagtggattgcagatgaaatccttaggtcgctggttcgaatccggcaggtcggagttgtttttaaaataacatttttttgctcaacaatgttaggctactcgcctactcacctgtcgctactctgtactcactacggttaaagtcgtgctctttttcttaacatttttacaaatgtcattttgcacaaaaaaaggaaaaaggggatgcatatgtggtcacattattatttgcataaaagccatgcagatcaatattcaggaacagaaaggccaaacgcctgcgaaagttgttgtgagagaccgttgcttaataaaaggcaaaacagaatgtaactatcccgtgaacaaaaa

SEQ ID NO: 35561 - DNA, 4039 bp, Zea Mays
gactgaggtcgccacgtggaagcggtgatccccgcctccgcgcaacccctcccgcctacggcagcagaaggagcagaagctatagcacagtgccgcctcccacctcctgtcgtcttggcctcgctttaaaatcccgcgacgcagtggccgctcgcctcttttggagcaggccatgtgatgtgaagcctctgacctcccgataccttccccttcctcccgtgctgctgcagcaggacagcgcggcgttcgcggttcgcctcacggggcggtggagttccgcgagatccgtgtgcaatgtcgtcgcggccgtcgtcgtcgtcgtcctcgcggcggagcagctcgccgttctccgcggggcaccgccgcccgcccaccgcgtcatcctcctcctcaagctcgtacttcagctccggccgcctcattccgcggtcgtccccgtcctccgccagctccagcttctacggcggcgggggcgggggcagcactcggtccaccacgcctggccgccgcagctcatctgtagcgcctgcgccgacgccggcgcccgcgcttgcgccagtgccgttctcgagctcggacgagctcgtcatcgaggacacctcccgatccggcgacagcatctccgtcaccatccgcttccgaccgctcagcgagcgcgagttccagcgcggggacgagatctcgtggtatccagatggggatcggcttgtgcggtgcgagtacaacccggcaacggcttatgcttatgatagagtttttgggccttcgacaaccactgaggctgtctatgatgttgcagcccggcctgttgtaaaaggtgctatggagggcataaatggtacagtttttgcctatggtgtaacaagtagtgggaagacccacacaatgcacggcgagcacaattgtcctggaataatcccactagccatcaaggatgtcttcagcatgatccaagatagtcctggaagagaatttttgctccgtgtgtcgtaccttgaaatctataatgaggtgataaatgatctacttgatcctactggccaaaatttgcgtgtgcgggaggatgcacagggaacctatgtagaaggaataaaagaagaagtagttctgtctccaggacatgctctttcttttattgcagcgggtgaagaacatcggcatgttggctctaacaacttcaacttatttagcagccgaagtcatactattttcacattgatgattgaaagtagcgcccgtggtgatgagtatgatggcgtcatgtattcacagctcaatttgattgatctagctggctctgagagctccaagacagagactacagggctaagaagaagggaagggtcatacattaacaagagccttttaacgcttggaacagtcattggcaagctcagtgaagggagggcaacacatataccctatcgtgattctaagttgacccgtctgctacagtcatcattaagtggccatggtcatgtctcactaatttgcacaattaccccagcatcaagtaacatggaagaaacccataatacattgaaatttgcaagcagagcaaaacgtgttgaaatttacgcctctcgtaaccggataattgatgagaaatcattgatcaagaagtatcagaaagaaatatcctctctaaagcaagaactcgatcagctaaggagaggaattgttggtggtgccagccaggaagaaattatgagtttacgtcagcagttggaggagggtcaggtcaagatgcagtctcgtctagaggaggaagaggaagcgaaagctgctctaatgagcaggatacaacgcttgaccaagttgatacttgtttccaccaaaaacaatattcctgccttgacagatggtcatcagcggcataattctgtcagcgagcaagataagttaagcacttcacaagatagctctacacttgtccaaaatgagggcacaacaaaagaccacctaccagactccttagatgagatcaaccaattaagatctggcagtggtgaacattcttcagctacttgttctgctacagattcaatgcaggcaggattcacggcatcagatcatatggacctactgattgagcaaattaagatgctcgctggggaggttgcatttggtaccagttcgctgaaaaggctaatcgaacagtccatagatgatcctgaagggtcaaaggaccaaatagagaatttagagcgtgaaatccagcaaaagagaagacatatgcgagccttggaaaaacaaatcatggaaagtggcgaggcatcagttgctaatgcatccatggtggatatgcagcagactattacaaaactaactgctcagtgcagtgagaaggcttttgagttagagttaaagtcagctgataatcgtgttctccaggagcagctacaacagaagaatgcggaagtcaacgatttacaagaaaaagtttttcaccttgagcaacaactctccgcaaaagtgggtatatcccctgagcaggaaactgattgcgcacagcaggaggctattgatttgaaatctaaacttcagtccaaggttcttttactaatcctgttcttttactttgtgtattcgagaccctggtgcagtatacctacgtgtaaaatttggcatactctggaacatggaattattcatggaagctgaattcgaaaagctaaaattcgagcatctgaaaattactgaggaacagtgcgacttgatcaatcaaaaccataaattaagtgaggaagctgcatatgcaaaagaattggcatcttcggctgctgttgaactcaagaatttggctgaagaagttacaaagctatctgtactaaatgtgaagcaagcaaaggagttactagttgctcaggagatggcacattcaagggttcatggtagaaagggtcgtacaaccagtaggggtagggacgaggttgggacatggagccttgatttagaggacatgaaaatagagctacaggccagaagacagagggaggctgctttggaagctgctttggcagagaaggagcttctcgaagaggagtacaagaaaaagtttgacgaggcaaagaaaaaggaactgtctttggaaaacgatctagcaggcatgtgggttcttgttgctaagttaaaaagaggggctttaggcatatccgattttaatgttgatgatcgaactgttaacctagctgatataactaatggcacaaaggaaaacaaaggtgaaaagaattttgctctagttgagaagcaagtttcagaagattctgtgaagtcgctgagcacagaagaacatagaagtccagagtttgaaccacttcttgttcgtctgaaggctaaaattcaggagatgaaggaaaaggacactgatcccctgagcgataaagatgggaactcacatgtctgcaaagtttgcttcgaatctgcaaccgctgcagtattgcttccttgccggcatttttgcttgtgcaagccttgctcgcttgcctgttcagagtgccctctgtgccgcacaagaatagcagacaggataatcacgttcacatgaacggcgtgctagcttcaggtgccaaacacttagatgcttgcatgttggtgctcatgccaacgctatccctctgaaatgtacctaatgatgtgctgtgtatctctgacaggccattctgaagcatggcgcactcttgtaaaatggtcggtggtatatgtttctctttttttccttagcaaagaaggtgccttttatgttccttctgtgttgtatcgccattctttgggttcccctatatggctatatagcttcaccttacgttctttatcaaggagctgcaaacgatgagaccccattggaatgcaggaattgtacaggaatttcacaaaagttcattttcatagaaaaaacacaacaaaaaggcaaaattactgtgttctagtggagccctgacttctcgctctgcaaatctctatctctgcaaatttttcaaaaaaactcctacatttttttataatcaatctgtacttatagtctcttatctactat

SEQ ID NO: 35562 - DNA, 2611 bp, Zea Mays
gcacagctagacagcttgtttggagccgcttcgtgccggctttacggtggaaaaaagcggacgaactctcccaaacggcggccaattgtcccgggcatgccttttgtcccgcctgcgattcttctccccgcggtgttcaacgtgcaaggctgcaaacggaatcggcaaggcgaggcgcagtggggaaaatcccatcgattcgctcggccctcgcccctccgctcgctccagaggcaccggcgccgccgactccggactactactccccgcgacgcaggcgctgtctccctcctcgcgcggcggccgccaccgcctcccagacgcctttgaggcagagaaggtgtcaactttgtttccatttgattggatattgtctttacgatcattgctagtgtattatgattttatgaaagatgatggtactatgtgaggtcaaatgaaagttatgatatgccttccttctgatggccagaatatgttaattgatcagtttggataccattgcgataagtagctgtctagatacaccagtacccacaaattctctcacacccaatatgccgacatggtggggtaaatcatcgtcaaaagatgttaagaaaaccaccaaggaaaacctgatcgatacatttcatcgcttgataagtccaaatgagcaaaagggaagcacaaaatcaaaacggaattgcaggcgtggcaataatacagctgctgagaaagtttgcaaatcaacaacagtgtcacgtccaacttctccatcgaaagaagtttctcgctgccaaagtttttcggctgataggctgcatgcccagccacttcctattcctggagtacgccctcgagtaactcgtgcagttgctgatgtcaatgtttcaaagcccatattggaaaaacgtggcaaacctccactgcttttgccacttcctaaacccaatccacttcaccggggacctggaagcagtgatattccttcagaaatagtggttgcttctgtctctagcaattgttctgctgatagtgaggatcgtgcagattctcagcttcagagccctgttgggaatgatactaacaatgtaaaaaaggtttcttcaaagaacaagtcaagtaatgtttgcaaggatcactctggtgctattactaccaagaccacgaaagaaatattgaagccagctgctaatgcattcctcagtaaccatacacagtccgcgccaccaagaggtatctcagctgacaataatcaactaaatttacaaaatccccagccagtagtttttgagagtgctcccaatagtttgatgtcaagtccttcgagaagtccaagaccaatatgtcctgatcatattctgacttcagcattttgggcagtgaagcctcatgctgatgtaactttccttggatctggtcagtgctccagtccaggttcaggacaaacatctggacataattcagtgggtggtgatatgctatcccagctttttttgcagcccaccagaggtagtccagagtgttcaccagttcctagcccaagaatgacaagtcctggtcctagttctcgtgtgcacagtggaagtgtttccccattgcatccaaggtctggaggactggcacctgaatctcctacaagtcggcatgatggtggaaagaagaagcaaacccataaattgccccttccaccattgagcatcgctcacagtccattttttccgaataactcgacaccaagtagtcctatttcagtaccccgtagccctggcagaacagagaatccatcaagtcctgcatcgcgatggaagaagggcaagctgattggtcgtgggacatctggtcatgtatatgttggcttcaacagtgatagtggtgaaatgtgcgcaatgaaagaggttaccctattcttggatgatcctaaatcaaaggagagtgcaaagcaattggggcaggaaatatcactcttgagtcgcttacgacatccaaatattgtacaatactatggatcagaaatggttgaagataaactttacatatatttggaatatgtttctggtggatccatacataaacttctacaagaatatggacagcttggtgaaccagcaatacgcagctacacccttcagatactttcaggcttagcttatttgcatgccaagaatacggtccacagggacatcaaaggtgccaacatactagtaaatccaagtggccgtgttaagcttgcagactttggaatggcaaaacatatcaatgggcagcactgtcctttttcatttaagggtagtccatactggatggctccagaggttataaaaaattctaatggatgcaaccttgtggttgacatatggagtttaggttgcactgtcctggaaatggctacctcaaagccaccatggagccagtatgaagggttcaagtaattggttgacatcatgtatgctattgatgctggaagggcaaggaagcggcccaggatcaggatgcagcacatacaagtgttttgagttctcaagtacaaggagtcagagtcctaggttctttcgtttaggagatacattagtcggtttcagttagatatattagcaaattggattagaattagttaaagttgtatgag

SEQ ID NO: 35563 - DNA, 1859 bp, Zea Mays
ggatctgctaatccatccaactccaagcaaatggaatatgcctttgccttgcacccaagaacagtttctgtagtttcggctgcgagcctgaccgagacagacacacaccagagggagagggagacggagagaagggcgagcggcactagcaagcatggcggcggccgtcctagcgcccaagccgcctcctccgctgcctaccagggcctttccttcctcatccccctcgcggtttgcccctgccttcatctccccgcgtcatcccctgagaagattgctcctccgccggagtccaggccccgccgcatcgcccttttcgtcgagccgtctcccttcgcctacgtctccggctacaagaaccgcttccagaacttcatcaagtacctacgggagatgggcgacgaggtgattgtggtcaccacgcacgagggcgtgcctcaggaattccacggagccaagctaattggctcatggagcttcccttgcccctggtatcaaaaggttccgctgtcgctggccctcagtcctcgaatcatcgcagaagttgctagattcaagcctgacattattcacgcctcttcacctgggataatggtatttggcgcgcttatcatagcaaagttgctctgcgtccctctggtaatgtcataccacacccacgttccaatttatatacccagatatactttcagctggcttgtcaagcccatgtggctaataataaaattcttgcaccgagctgcagacctcacactggtaccatctgttgctatcggcagggatcttcaagctgctcgtgttacagcagccaataaaatacgcctttggaacaagggtgttgactcagaaagcttccatcctcgtttccgcaacatggaaatgcgttcaaggctaacgaatggtgaaccagaaaagccacttgtattttatgttggacgcttaggagttgagaaaagcttggattttcttaagagagtcatggaccgacttccaggagcaaggattgcatttattggagacggaccattcagatgttctcaggtatgccggtggtgttcacgggcacgttgcaaggggaggagctatcacaggcctatgccagtggggatgtgtttgtgatgccttccgagtcagagacactggggtttgtggtgctggaggccatgtcatcaggagttccggtagtcggggctcgcgccggaggaatacctgatatcatacctgaggatcaggaggggaggaccagctttttgtacacaccaggggatgtggatgactgtgttggcaagatcaagcggctcctgtcgagcgaggaactgagggaggccatggggagagctgccaggaaggagatggagaagtttgactggcgagcggcgacgaggaagatccgcaacgagcagtacagtgctgcaatctggttctggcgcaagaagagggcacaggtgctgcggcccctccaatgggtgctgcggctgctgaggcggacaatgccaggagctgccgatgccgcagcgaagcaatcctaggagaggggggctactatggttgatggtcctcttttttcccattccttagtataaaatgggctaaggaggccatggcagatgattggatatgtttcaggattagaggggaggaaggtcaagcttcaacattccaattcactgaagaatatataatgtacgtttaggactgttaggttgtaaatcgtcaaagtgtctatgtaatgcttcttcttggcatgctacactatatagtactaatattgatcctttaacaggaattggtgtgcagtcagacaatgataataatatatcttgctctgtctttctagtatcaaaggaggtgaaacgaat

SEQ ID NO: 35564 - DNA, 1371 bp, Zea Mays
aacgtcctcatcttcatctcccaggttttcccctccaatcacccccaggtcttcctctcgcgagttgcggtctcgcgccccccctccgccgaccgccgcctcctcacaaccgcggaagctgcttccctctccattggacgcggccagcttccatctctcggtcacctccctctacatcccacggccgctaccaccttccctctacctcacacggccgccggcctctccaaggtctgcacacggaattgtgtaattgtgatgttgatttcacaatgtcaagtgtctatggcgtctccatgcaagtacacactacactggcaccgcggttgacagtcagaactttgattgcctgtccaataggaaaaaccttgccacgagtcgccgacactccatcccggaagagctaacgaggtgactccccaccgcgcccatgggtgacagccagtactccttctccctcaccaccttcagtccgtcggggaagctcgtgcagattgagcacgcgctcacggctgtcggatccgggcagacctcgctcgggatcaaagctgccaatggtgtagtcattgccactgagaagaagctgccttctattttagtggatgaaacatctgtgcaaaagattcaggcactaacacctaatattggagttgtctatagtgggatgggtccagatttccgtgttctggtgaggaaaagtcgaaagcaggcacaacaatattatcggttgtacaaggaacatatacctgtaacacagcttgtacgagagactgctgctgtcatgcaggagttcacacagtcaggtggtgtgagaccatttggagtatcactgttgattgctgggtatgatgacaatggcccgcagttgtatcaggttgatccctcaggatcatacttctcctggaaggcatcagccatgggaaaaaatgtgtccaatgcaaagacgtttcttgaaaagagatacacagaagatatggagcttgatgatgccatccacactgcaattttgactttgaaagaaggatatgaggggcaaatttcctccaacaacattgaaatcggaattattcgagctgatcgtgagttcaaagttttaagcccagcagagatcaaggatttcttggaagaggtggagtaagctgtctgttgatgatactagttcagacaacaatagcagcgtcacttatgagcagccagcctgaagattgtcttggttttattactctgtaaactgatttgctccagcgccatgtggtggttacatttgaaccctcctcaacgcatactgtagacaatgagataacgtaggatgaatgctgtatttgacatactttgcagcttgtttatgtgatgcacgttcttgcggacagt

SEQ ID NO: 35565 - DNA, 1594 bp, Zea Mays
ttcagattacttgttgtttctagacccgaagagtgtaggttctagtaattatttgtgcctagctctatattttttctttaaagaaaaaggaagaaaagcattagaatctttcacgctgaatttagaagaagctctatcatcaaacaattttttattgagaaatattttttccacactttttctagcagttctctaaaataaaccatggaactgagagttaaaaaagcagcttcttctcatttagttgatgcatggaatcctatatgtgtcactgagtttactttagagaattacagagaatcaattctgatgatcaatgaatcaccatacacaaagaacacaatcaggaagagctcaaccaatctgtctcttgctagctgctagggctactgtttccattttgcagactttgtgattcgtaaaattctttggttggtgcaaaatagaatttttctaaaaataattaaatatttatattgtcaaataaaagcaccagcaatggtacctccatgttcatgtttataattatctgtgattcttacatatttcaattactatgcttatttgttaaggttaaaatgtattatcatgtgacctgccttttgtccacctgcactgcttgttcgtagatgtgcatgcttgtccctcttgcactgcttgtctgttacctgcagcaatctttgccaaacggacacagggaacctatgccccacaggactgcaccacacgtgggacaggtaatgcaggtattgcccccgctgtggctggccggtgtgcaattcaccaggctgccaaacgagccctaaaggccccagcatgggcgaccctctccaggccgccgtcgcagccgcccacgcgctctccctgctatggagaaaaccgctcatggaggtaaaccactgtgttgcgcgcacatcaagatgtcaagcagtggcttctgttaaatatcctatttatgatcaaacagtgtaccttaacgattatcataagaagatgttgaaggatcaatatgagggactgaagacaatcgagcagattacaatggactcagcttcggtcgagaccaatatgttcaagctctgcaaggtgatgtctgttcagtttggccaaaaaggcatcccctacctgaacacctacgacggccgcaccatccgctaccccgacccgctcatcaaggctaacgacaccatcaagatcgatctggagaccaacaagatcatggacttcatcaattttgatgtcggcaatgtggtcatggtgactggcgggaggaacaccgggcgtgtaggagccatcaagaacagggagaagcacaagggcagctttgagaccatccacgtgctgcttggagctttttgctatgtctagttttctcctatttgttgtacaggaaaacatagaatggaattcaaatttggtggtcgcaaaagtctgaagactttaattcatataaagttaggcttaacattagtgcaaacagttgtattttagtttagatttagagtacacttatgtatgcgttgtttgacaatgcttatttatgatatattgaatggtacttatttatattatattaattataatgttgttcagt

SEQ ID NO: 35566 - DNA, 2859 bp, Zea Mays
cctcgacctcacccccgcccgcggaaatctcgcccgcgagatccctctgcccacacaccgccccctctgctctccgtcgatggaagggcgccattaacacaccgcgatcctcgctaccgcccccacgaggccataccatgccctcgccccctcccagatcttcgaagaggccgccaccccgcccctgttcttggcccctcgtcggcgtcggcctcatcgcggcacgggctgcactccttcgccccgctcacggccgcggtgcttggccacctctgggcctccggggtggcggtgctcccgggcctgacagagctagagttggtgcgcaccaaggctgagatgtggtttgcgttcccgcccgacctccgtgccgtcctcgccgcgggcctgccgtcggggcccgggttcccggactggcagtcgcgcgtggggctgcggtccgcattcgacctgcccatcgcggcggcgtcgctacagatcgcgcggggcgagctgtggccgcgctgctagggcgtgcgccccgccgaccccaaccacgcgctatggtctgcttcatctatggcgtggttcctgttttgcctgcctcttgctcctatttgaccaccatgcgcgccgcgaggaccaccactaggtggagcgtgtctccgtggtcttcttcaccgaccacgaggctgctgagaccctaggggggctcgacctggacatcatcgcagtgctccccaccgtcaggtgccatcgtcggtcgaggtccgtgactaagtgtgacgtgtacctgggcgagttcgcgcacagggagcggctcaagcagttgtctctcttccagatcccctacctcctctttgttccctcggcttagccaccaccttggccggtgctccttgcacgtcgggataggaggatgccgaccaagttctagatgaagagcaactgatttgcttcccttggatggattccactgttgagccattcaaaatttgagatgcggattaatttttacaattcatgttttcagatttaccttccaattttcttagtaataataataatgtataggtagtgcaccatgttttgattctaatctatcttgggtcacctgttttataccgaggtaacacctgttttataccgagataattagtatgtattctgagcttcaatcattgttctttatggtgagattcaatgtctccagttaattcattttgtaaattttaggttacagaatgtctctcgagtgtgctagagatgctttgctgcaaaagaccatggacaacaaagaaaatacaagtgaattattttcccgatctcgtgataagctcagagttgatctcatgaatatttctatgactactcttagttgaaaaatactttcccaagacaaggagtactttactaaacttgtgattgatgttgtcttgaggcttaaggtgtacaaatggtttaatgaaagttggttatcatttacattgaactatgatatcttcatctataaaattttactcttcaaaaaggtagcacccacttggaatctattgaaattctgaagatacatggagaatctcttaaggactgggaagaatgctttacaaatccgaatataagttcagtacgatagtgcaaatagagagcatcaggtactccttaggttcctattgacgtttaattgtcctaatgaggttgatccatgttctattacgaattgtatgtgtgctattttcccacaattttctaatcaaaatattcagcacaaaaggatgacctcgtatatgggatattcaattaattgtccatgaaatttgacaaaattagaaaaatgaaaaatatagcaggcctgtagatctgagcaaatgatatgaagtaaatgttgttactttctcaaaacgtagatgagctttttttgcaaggactttagttgaaaattggaaaatctaacatgcctgtagatctgagaagacgatatgaagtacatgttgttactttcacaaaatgtagatgagcttttttgcaaggacttcagttgttatgttgctcctcattaacactaaaacttaacctgcccgggttacaattatacatctcaatccagatcagccttttcattgttctggttctgctcatttatcctttctagtcacataaattcttgccatttgacaccagcactaaagaagatagggagagttcaatgcatgatgtttgttttgttgacactggaagaggcgactaattgaggcggttgtcattgccaccggtgtgcacacattctttgtcaaggccgcatatcttgtcgattcaacaaaccaagttggtcattttcagaaggcaagctaagtgtgatgccgccacataagaccatgcccactgtatttatattttatactaatttttaacgtccaaaggacaccagatgtttcaatgttaatggtgctattgttatacactgatgttttgttcctgtttgcttgcaactttttgcagctgttcatgctatcggtttggaaagaacatgtggaaagccaatctcggatcttgcttccttcagggattgtctccatcctcttgatagcgatctatattggttatttccgaagaagaatcaagaagcaattcaacattcatgcaagtgtggtaccagattgagatatgtctgttagtttgtaacaatataaacttgttagttatgtgtcagagaaaacatagtaacaatgatttgtgctctatttctacccgtcattgtgtcctatctcaatggtgacttctttgtacacaactgtgtggtctctctatgtcctaataaatacatgcatcatcaatgaacttaatggatattgtcaatacagtgttctacaattgtcgctg

SEQ ID NO: 35567 - DNA, 1814 bp, Zea Mays
caaccacggcccgatccgcagcaaaaccttgccgcctccgcgggccgcggcactccaaagccgccatcttctcacgcacacggcacaccgcgcatcccctgctctcggcagtctccgcgggctccctcctccgccgccgcttccatggactccacgccggcacccgaggcagcccccggcgcgtcctcttcctctcccgccgctgccgcggccgccgagggtcttgcggggggcgtggcggcgatgaccctggatgagcggttcgaaatgctgcggggcatcggggaggagtgcatccaggaggacgagctcaggcgactgcttgagaacaagcccgtacccatctgctacgacggcttcgagccctctggacgcatgcacatcgctcagggcgttgtgaagaccatcaacgtgaacaagatggtcaacgccgggtgcaaggtgaaaatttggatcgccgactggttcgcgcagctcaacaacaagatgggaggcgacctgaagaagatccagacggtagggcgctacatgatcgagatttggaaagcggctgggatgaaccttgacggggtggagttcctgtggtcctccgaggagatcaacaagcgcgcacacgagtactggccaattgtgatggacattgcccggaaaaacaacgtcaaaaggataatgagatgctgccagattatgggcagaagtgatcaggacgacttgactgctgcccagattttttacccttgcatgcaatgtgctgatatatttttcttaaaggctgacatatgccagttggggatggaccaaaggaaggtcaacgtgctagctagggagtactgcgatgacatcaaacggaagaacaaaccaattattctttcgcatcatatgctccctggttttaaagaaggccaggagaaaatgtcaaagagtgatccatcctcagctatctttatggaagatgatgaggcccaagttaatgtgaagataaagcaagccttttgccctcccaaaattgttgaggggaatccttgtttggagtatattaaatacattgttttcccttggtttggaagatttgaggtcatccgtaaggaaagcaatggtggtaacaagtaatatttttatttctcatctgctaaaattatttgttttccgacaataatgtggtggaaccagggagatataaagttctgtgccatcattatttatatttggctgacacctgtggtcatgcaattaattatgcagaaattaggttattgaatttccaacataacatgatttattatctctgagggacttctaaggcggttgctttcaaacaggacatttacatgcatgaatgaactaatttctgattacgagactggtgctttgcatcctgccgatgtcaaacctgcactggcaaaagcaataaatgaaattttgcagcctgttcgtgatcatttcaacaacaacaacgaagccaaagttcttcttaacactgtcaagaagtacagagtaaccaattgaggagtggaagctgtccatctttagggcatgtttacattagggtggatatcgccgtttgaaattcttgtatgctattctgttactagttgcataggtagctcaaaagtttcatgtttctagatatataaaaagaatactttacttgttgactacttgatgtgcatcatagggctcaacctaaacagtgttgcactgtaagtattcgataaaagataaacaaagccaatatccaggagagacatgagatggcatgtagatttaaaaatgtcttttggccatgtccaatggagctaaatagcaagcgttgg

SEQ ID NO: 35568 - DNA, 1478 bp, Zea Mays
cgtccaactcgcatccaacgcccctgccgcatcccgcgtccctcccgcactcgtctctgccgcaccgtacgcgcaggcccgcccgcccgctcccattccccacccccacctatggcggcgctctccgcgcccctccgcgccatcgccgccggatcccgcgtcgccgcgtccgaccccgtcaaggtctcgtgcgtgaggagcactggctcagctcacttcggctgcgcctccatcgatctgccctcgcgttctatgggtccggcggcgaagggaaggcaagatgtacaccgcgaggaagaagatccagaaggagaagggccttgagccctccgagttcgaggactccgttgcccaggagctcaagagcgacctcaaggacctgtacatcaacaatgctatccagatggatgttaccgggagcaggaaggctgttgtcatccacgtcccataccgcctgcgcaaggcctttaggaagatccatgtcagactcgtcagggagctggagaagaaattcagcggcaagatcgcagcgatgagatgccctcttccccgaccaccagatcacagcgatggagctggatccggtcgccgctggggcatcctcctcgccagccagtcgcagatgtccctgatggcaagcttcagcaatcgtcaagtacaaagacatcctcccgtgcaaaattcaatttgcccaatcctaatctcttctatatagcctcacagatcgcagcgatggagccggatctggtcgccgctggggcatcctcctcgccgccgccttcaccggtgtcggccacgtccccgccgtggcaaatgcgagttgaacaagtggagcttatcaagagtttcagaattcgggtatgccagggtgcatgccacaagaggtgatatgctggttcagtttgtaagctcaagtacgatggaggttttggaccaatttagaattgtgaagcctgatccggcaaggaggctatggaacaagccagtttaaccatagctgtagtgcatgcaaaagatggagctggagctacttccttatattattgttatgctatataaaagatggcgttgaattacacatcagcgtgttgtctaagttctatacttatctgtgtggtgtatggttctttatgacatttccacatgatagttctttctccctctgtaaaatatattgatcgacaagtgtcattttatagttgtagctaacatcctaacaagggctcctgaacttgagttataatttacagttttgtcagttctaaatttctgaaactacaggaagtaaaaccagcgttgcaaacagggttcctggactagatatctctatctctactactctttaaggccttagtgtaggcgtccacagtataccgtggtgcacggttctgcctgaatacttcaagcatgaatagaaagtaacatatgagcaattctatatccccgcctcataaaaatgactgtgtcattgcaataca

SEQ ID NO: 35569 - DNA, 1067 bp, Zea Mays
gaacagctgtcggaagctgtctttccatgatctaggagccgtcgccgtcgagagctgaggcgaagcaacatagaagacgaggggggagtgcgactcctcgtgacttgtgagggagagaagccatggcggagatggagccgagcatcgggaaccatatggccgaagaccaaccgactccggccgcctccactgtcgaggaggccgctatggatgcagataccagcggcgagcggcgtagcgctgccgcgttggtgggcctgctccgcgggttcctcgccgtgcaacagcgccgggccgaggcctactccacgctacgaaggggtttttctgagtatatggcttatggaggtgaattggcctatcaacaactgtgtggcaatattacagcggagttcaatgattgctcaaaacaaaatttagtcgcagcgatcttgccgatttactgaagggtgttcaagcacatgagaaagagaagttgcatttgacagctaagattcaggtgctgaagaaagccggcaggccttcagagcgcctggtgaaccacgcagactgcaggtcgcgcagcatggcccagcacgtgtgcgtgcacgtcaaggagatcacggaggccgccggcaccgaggacgccgaggcggatgcggagtatgacgcggccctcaaggaggccatacagggcgtgcaggttgccgtgagcagcataaacgaacacatggaggaggtgcgctacgagattgacggactcgaggcagagacgatcggtagcaagtggagcgaagtcgaggaagcgttccctggtaccctgtctataaaatagatagatgagatgagatgagatgagatgttgagcgtggaagactgaagaagaatcacgaacagagagattcgatgtgaatttttgggtactgttcagttcagggtacccgtgttattatacgtcctccaatccaaaatttagttctttctggtcttttttccctccacgtttgaatgataatgaatacagagctacatataaattatattaatagtttaattaatgaatgtatatttagtctaaaataaaatat

SEQ ID NO: 35570 - DNA, 1999 bp, Zea Mays
tcgaccgtgaactggcccgagtgaagtccacgcatccgtctcttcccgctccggcccattgcccattccgttcacaaattcacttctctctctctccgtcgagatgcttcgtggctccgccgccctcctccgccgcctcgcccctcgtatctcgggcggtggctgcggaaacacgactcaccggcgccttcttcctcccatcgcccccttcctccgcgcccgcttcttgtctgccccgactacctcttcaccgccttcttcgtcttcagctgcctgccacgaggaggatgcggaggacagagacctccccgagatctccaatggtgatgcaggtgcccggctcagcatctccgtcgaccgctccgggctctacaaccccacaggtgttgttgtgtcaaaatgcggcagagcactcgcacgagccgtcgtcggaatccgagctcgtcaagcacatcaagagcatcataaagtttcggagtgggccaatcagcatagctgaatacatggaggaggtgctgacgaacccacagtcaggattctacatcaaccgtgacgtgtttggggaatcaggggatttcatcacctcgccagaggtcagccagatgtttggagagatgattggtgtatgggcaatgtgcctctgggagcaaatgggaaagccagcgaaggtgaatctgattgagcttggcccaggacgaggaacactcttggctgatttacttaggggatcggccaagtttgctaacttcaccaaggcactgagcattaacttagttgagtgcagccctacattgcaaaaaatccagtataatactctgaaatgtgaagatgaacatgttggtgatggcaagagaacagttagcaagatttgtggagcccctgtttgttggcatgcctccctcgaacaggttccctcaggatcaccaaccataatcattgcacatgaattctatgatgccttaccaatccatcagtttcagaaagcatcacgtggatggtgcgaaaagatggtggatattgcagaagattctttgtttcggtttgttttgtctccccatcccacagcctctttaatctacctcgccaagcgttgtggttgggctagctccgaggagcttgagaagattgagcacattgaagtctgccccaaagcaatggagcttaccgaacaaattgcagatagaattagttcggacggcggaggcgctcttattattgactatggaaaaaatggaatagtgtccgatagtctccaggccatccgcaaacacaagtttgtggacatattagacgatcctggctccgctgatttgagtgcctacgttgattttgcttcgatcaagcgctccgccgaggaagcttcagacgatatctcggtccatgggccaatgacgcagtcccagttcctgggttctctcggcatcaacttcagggtagaagctctcctgcagaactgcaccgaggagcaggcggaatcattgcggacgggctactggcgactggttggagacggggaagccccgttctgggaaggccccgaggaccaggcggcacctgttggaatgggcaccaggtacttggccatggccattgtcaacaagaagcagggcacgcccattccgttcgagtgagggtccggctcgggcatagctttccccgttctgttggaatgtagcagcgttgtcgaggggttttgatgatcagatcagccaattcttctctgctttttctcatgtacacgcaaaacatggtctcgttattttgtgacggacggaaggagggtacctactcgactgaaacagctcataattgtgtcctatgccattacaatcgcaatgttcctctcctgtcgaaatgggcctctgcacgctattattcgagacgtgcagcccctgagaaagaagcgtgcgtctgttggccacttggcctgcagagtcagcctgtttagatggtacagtactgcactacatgatgatgatgctttataaatagtagcttg

SEQ ID NO: 35571 - DNA, 4338 bp, Zea Mays
gtgcacggttctgccatcgtctcctctccgcgacgcacgcctccctctcctccgccccaccctcctccccacgccatcggcaccgccatcatcagatccggcccaagacgcctctgccccacgcgcccgagtcgtcgaggcacactcctgcccgcctccggcgtccacgcacatctccgcctcacctcggcgcccgagtcgtcgcacgcgttcgaggtggcgtccatcccggcaccggcctcacgcaccatctacagctcccaactctgctcctctcagttctccctctgcattccaccttctctcccttcctctccaagcaccgtcctcctcgcctagatccgtacaagctgcaaataacctctccggtggcaagacagatggagtcgatctccggcgaggatgctccgaagcacaacctgatcctgtccgcgctcgtctccaacctacagtgcatgctcgccgcccgccgcccgttcacggcagaggtcagcaccgccgccacagctagcgaggctgaggccttggctcaggaagcagaggcgtccgatgcccccacgggagatgggacgctggcgaggcccatcgtgctgctgacctgtgccggaggggaaccggtcggcgggtctcgcggcgctcgtcgacgccctcgttgccgccggccgctgcgatgtccacgtgtgtgcccccgaatcgtacatgctgtgacttagaaaaccaaaccacagcgggaccggtgctcggatagggtccaacggcgatgcaagcaaggagtggcatgcggccggaggggcgcagatcggctcctgcacgtgcagcgcagccgcgtgacagtgaagcagggaggccgcgataggcggcacagggagggtgcgacggaggcaaagtgcaagcacctggggacttcaggtaagtagaaaaccaacactgaatttgtcggttctctgttttgtgattgaccgattggtttgttgatctcagaaacaaaaaattgtttcaccgtcaagcaccaatttttaggtaggtcagtgttttgggatgattctccgatgcatcaatagcaaccttgtgcttggcaaagttatttgccctgataatgttgtaggtttagtgaaaagaaatatactgacatatccatcgatccatcgatgcccaatggagattgacctctatcaagatttagttacgtgtctcaatagggcaatatttctgtgagttgtatactgtggattcctcatctgcatcatgaattgatcgcactatttatgccctatttttcaaaccatggtttctgtaattctttgcaccatggtatttttctcaaatgattttatctttcacaacccggactgaagtcactgaagcagaaagaaagagtacaagtctactactgcagaaagcaaggaggatgccaacagaagcagatttcatgtttggatcgggtattgacctttttgtgttctcctcaactcattatttagctacatatcttattaaatcttaatatttggtcattagctaccaacttgcactattattgtgaaaatccattaactttagccaatgaaatggttagactatcaccacgtaggtgatattagtggcattaagttattaatctgtggcaaattctattatcaactattttcttggctaatcattacaatatataatgaagaatactatggcttgaagggatatttatacagttggctatgtatacggtctgcccaagcgcccaacaatgaatgatgtggtgaaggaacttgagatcatcagatagaatgaaggggcacaattgctaaactcaacgtctttatcagttgaacaatttggaaaaaaagagaagagatccttatgcatttgcctatggatgatggaagcaacaacaacacttttgactacaacagtgggagttcaattaagttgttcacccaagtagatagttgtctccactctttcaacaagttattggagtgattatatatgtctgctccatatgaatgccttttcgttttagtatcacatctgaaattaccaaccttttagatcggtgatatttatacagttggctatgtatacagtctgcctaggcgcccaacaatgaatgaagtggtgaaggaacttgagatcatcagatagaatgaaggggcacaattgttaaactcagcgtctttattagttgaacaatttggaaacaaaaagagaagagatccttatgcatttgcctatggatgatggaagcaacaacaacacttttgactacaacagtgggagttcaattaagttgttcacccaagtagataattgtctccactctttcaacaagttattggagtgattatatatgtctgctccatatgaatgccttttcattttagtatcacatctgaaattaccaaccttttagatcggataaaatcttaagcaaaatgggagaaggtttgggttttctgcaatctgtcgtctcctcttctgctgggtatctccgttattattctaatgaagagggctatgagttggattttcgtaggtacatttgagcgtgttttggaatgctgggaccgtgaaacacatgaatatgttgccataaaagttgttcgcagtatccacaagtactctgatgctacaatgattgagatagatgtgctcaatcgccttgtagaaaatgaaaaatatagatctctgtgagtatctcagagacctaattgcttaaagtataaccctattctatttttgacttgacagttcctcttcaatttgtcagctgtgctcaaatttagagatggcttgactatcgtaatcatatatgcatggatgcgttactttatgtttgcttgtatttaatatagaaggctcccttgccttcgttcgatcatgtggtatttgaaagtgatgtctctataaatgaagtaaggtagggcaatgcttatgttactgttgtcagttattagctttttaaaccatgcatctgtcaatgtgtcctgtttcaatagggtcttattataggacgtgatggcactgaattaggatgtttgttcttttgctacctttgttaaacaacatcagatcattcgtattgtatccttcctcggattgcttcttttgttctactacaaatatgcccaacatggcagggagaggtctcgaggtcaagcctggacccactgtcaagtgtgtgcttggacatgactttatcctgcactttccactgctgcacttggggaatcaaagaaaagtgaaagtaccatgtcaaagttgatgaccagaagcttgctattggaaccctctctattgaaaaatacccctagatagaaattgatttggttttcaataaagagtgtgagttgtcacacacatagaaaactacctgtgtatttttctttggttacaaggttgagcaaccaatcgaggaagatgaatatcctttttaacattgatttttttagttttatttcatgtaagactgatctaaacaatttctttgtggagtattttgtttccttgatctcatttttgcttcttgcctcttacataatggatcttgattctgaagatgaagagaaggagctaaacattccagtaatcaaggaaaatggtatatatatcttctcttttgttctttgtgggttttttctagcattgttggggttgaattatggattgtttggatcatgaacatatctaattaggcaaaggtgatgggaaggcagttgctgcagcttcaaaatcaagtcttgggcttgaaaaaaagcaaggatgagtatgagtctgatgattctgatgagggagaaggtgaaaccggagaatgaggagatgtggttgttcatggacgacagcatcaagaaacctgcaacatgcaacctgattttaagaaatctgccacctgcaacatgactgggcagtggtatctctgagatataatgtggacaacggcaaagaatactatgcatacacaacaaaagagtcctacaacctgattttaagtccatttgtagcaaaccatcttggaagccattaactcgttgaatttgaagctgatgtgcagttttatttttatgtcagttttactgatgcagttagttcctaagaagatccatggcaacttgtttcacgctgatgcttgagaagttgagagggatggaaatgacactcacaataaaaatttgattttctttcttgtgatcgtcgatcacaataaacacagtggcacaatataccgtgtaattgtcctttcctggtagaacatgaaatgttgaacttcctcttgtgatatataaagcctatgtatcctacataatatttaacatcttacggaaatttatttgtgctgtccca

SEQ ID NO: 35572 - DNA, 1842 bp, Zea Mays
gaatatccgggcatccggcccaggcatgaacggtcggttaaaccggccaatcctcctctcaagcctcgacgcagcacggcgcgccggcgcgggacgacggcatgacgccgccgtccatcttccaccaccatcgctgcctcgtctccctcccctccgcttccccgacctggacctcgtcccgtcgtctcatccatcaactcgcaaaacccacagtcctgtccctacatctgcgtccagtcttatcctcttccttcgcggttgccgccgtcggcgacgacgaggatgtcgtagtcggggattgcctcgtgttcgacgacgacgctttcgaggaaccggacctggacctcccctcgtccccgtggccgtcggctagcgcctcacgccacggccggaggtcggaggcaggcgagagcgacagcctggtgccggagaggtggaggcatgccgaggaggagatcaacctgacgaagaaggataagcgccgcatcgcgcacgggctgcggttcgggagccgcctcgagcggcgggcgcccccagctgttgctgctcctgatgaattccgcgcgtaccgcaaggggatgctgagcgctgagcgtgagcatgtttctcatgtataccgggggccgctggagaggactcctccgccggaagtgaaggaacatccaccgccggagccggagcctgggacgcgtgtggccccgaggaatccgaggatggggatgggcgttggcacccttgacgacattgatgagtttttcagaagtagggaatatgttcaggatgagatggaggacagcaagagtcctaagggccgtcagaagttgttctcaaatgaggagaagattcttctgaacaagcgagtgcctgatctggaaacagctacttctagtaaatggcttccacttcacacccttgctgcatctggtgatttctatctattgaatagccttttaaaacataacgtggacataaatgcgcttgataaggatggcttaccagcgatccacaaagcaattctttcaaagaaggctgctattatcaattatcttttaaggaactcagcaaatccattcatccaagataaagatggtgcgactctaatgcattatgcggtccaaacagcatgtagtcagaccataaagacacttttactgtacaatgttgacatcaaccgtccagatgattatggatggacacctttgcatcttgcggtacaaacacagaggactgacattgtgaagctgcttttaataaagggcgctgatagaactattagaacccaagatggattgaccccgttggagttgtgcctccggttgggtcatgatgtgcggacgtatgagcttatcaaactacttaaaagtttccgaggacaaaagcagcatgatttagtttagcaactggagggtgtgtgaccctctttgaaccagtgaggttaaccagtgtggtggccttctgggaggccagttttcaatgtaccattcatgattcatggaatcgctcctggtttgagataggaaatagtttacccctagaactggaagcaaacgagcaaaccaggttacagtcgagccatgagaacgggatgaataaacctttctgtaggttggcgctcttcaattattagagggctcgtcaaaaaccgacctttatatgctatgaattcttgttccactaacctatcagctgctgacaattcagctcagatatgttgggaaacgttgatcatgaactaacaagaacgaggattctatgcactcttgtatgcccgatgcaacttcttttgaaatcagggccaatctagggcgtcatccaacaaccctcatgaagtgcccagcccaa

SEQ ID NO: 35573 - DNA, 6327 bp, Zea Mays
atgattctatggccccattctagtttcgttcgagctatgcttctcaaaaagaaggtattcgattgttgcttctcaacagaaaccatggaccaatacagatacaagaattacctggacaacattattttgcagctccgtgaacagtttgcagattcttcattgatggtacttaactttagagatgaaggaaaaagtcttatttcaggcattttctccaagtacaatattacagccaaagactacccttgcaagtatctaggatgcccgttacttcctttggatatcattctccacttcctaaggctgagtgaaaggtggcttatgcttgaagggcagcaaaatattttactaatgcactgtgagaaagatggatggccagtgttggcatttatgcttgcaggtcttcttctgtacaggaaacaatataatggggagcaaagaactctagatatggtgtacaagcaagccccaaaggagcttcttcagatgctaaccacattgaatccacaaccgtctcatcttcggtatcttgggtacatatgcagaatggatgacggcataggatggcctacacaacctattcctttcaccttggattgtgtaattcttagagaaattccaaattttgatggagtcggtggttgtcggccaattgttcgagtatatgggcaggatattccaacaactgacagaagtcatagtgtcatttcaccaccatcaaaggccaagaaacatattaggcgttacagacaggcagataatgcgccagtgaagttaaatgtaggatcctgcgtccaaggtgatgtcgtccttgaatgtctgcatgtggatgatggccaaggaaatgaaaggttaatgtttagggtgatgttcaatacctttttcatccagtctcacattttaccgttgaactttgaggacatcgatgtcccttgggatgccgatcaccagttcacaaagaacttcaaagcagaggtactcttttcagagtttgatgctgagtctgatgcgtcaactgaagtagcacctgattatgattatgattatgactatgataatgatatggatgttgcctctgctgatgagttctttgaagcagaagaaatcttcagtaatgctgaatctcaagatggaaataaggatgcggatactctttctatggtctctacagattatattcgaactccaagtgccgaatgttggaaaaactctccattttccaactttgatctgaatattgacattgatggatcacaagacaataaagccgataacttgggcttgttgttagaaacagtaaatgatggaaagacatgcacatccactgaagccaatattttgctcaacaatgagactgcagttgtgaagtcaacttttaccgctacaatagcatgcacatccactgaagccaatattttgctcaacgatgagactgcagttgtgaagtcaacttttacagctacaatagatggagacacagatagcggcatctcaagttctacctataaagaggatgggtgcatgtttgaaaagggtagttccaagcaggatataaggatgggttccaatcaagacttgagccagattgataatgtattggttaaggaggtgattatattagaaactaatagtactgatgacatacagatgatcaaagaggtcatcatatctgaagttacaactcccaaacaagtggtagaggggaatatgatggaaactgaattagatgaggcagtccacagttcagaaagcactgcactgggagaagacgaggacacaaaacgacctaatacttttttcaaaaaagatgagggacagagtgcacgagatgaatatgctgcttatgacaatggcatagtgattgaacgggaagaaagtcgcaacaaagaaaaatttaccatcacaggcacagattcactagtggctgagcccaaagatttaccacatcttgacagctcaaacacttctttggaactaagttcagccaatgaaaatattgatcagcttcgtgcttgcagtagtaatgtcactgcagagcgaagagcaggaattgacacatcattttccagctccaggagtcagtcttctaatatctcttgtgcgaacattctaccagaagaatctaacttgataataaaccatgcttcaacttctgtgaatgcaaatacagatacaaccgattcatctcgactggtgctaaagaaaaaaccttttctaccattggcgacatctagtcttttttctccatcatctcccagacgcaatctgcttcgtgctgcatccacagatttgtcctttttttctccatcacaaacagaatctaagcagaactccgttacttctacaagtggaaggggtgattcagatacatcttctgtgcttccaccatttcagctctacacatccctgggatcatcatccaaaatgtctctagtacatcctactctgcgaccaataagaacgatttcatctctaccatcattatcatttggcacattcatagagatgtcaatggcttcttcaagatcacccaaacaccaagagcatgttagatctccctcaataccacaagatcaacatcttcacccaccaatgacagaggaaaatgatctacattcaggtagcttaactttgcctgcttccaaccaatatggccctcaaaccccacacccacctccactaccacccccacatgattcttgcacccaaagttattcgagcaccataatatatgaacctgaacaaataagagctgatggatcttgttcctatagtccagattatagacaaagtgttctcaacttaggtgattcctcactaacttcactctctaatagtagtatagctgcaactgaatgtcccttaggagcctctgattttgtagatgaggaagtaacaagtagacctaatatagtaactgccatggatgtcccatttaccaatgaagatacaaattctttgttgcacatgacttgttcttcacctcccaaaacattacaacgtgctgaaccaccaacgctgccgccaccacctttgcctctagtaccaccaccatcacaactaccactgccaactatatgcagtgatagtggatcagttccactggtatactcaaatccgtcttcagattgtccatataaagaaccaacaatgctaccagaacacaaatctgatgttccagctacttctctcgaaggacatgaagcaagtgaagttcaatttctgcaatctgatactgctgtcgaattatctccatcagagcattctgagtataaagttcagcatgtggttggaagcgctgaagatacaatttcaagtatgtcatcctatatacctgcagcacctccatatccaatgtttcacattgtaacagataattcctcatgttcaatatctgcagagcaagtaaattgtgagcagcctttagatcaaacaacattatcaattcatttgaggccatttgaggtggagatatcacaaggtgaaacaattaacggagtcttggcctctataattgatgataaagaacacggaggcattccaattctgcaattgccacaaaagttgcctcattctggagaacatatgaaatctccacctccacctcctcctcctccacaaccaccaccttgtcatgcaacagttataccttctttgtgtttatcttcaaaaccaccttctccaacagaacattacgaaaatccaccttcttcccctccacctttttctagagaatcatgtgttgttctacctccacttccagctccactcttgaatcatccatctcttcctggaaaacatattaatctatatccacctccaccacctccaccaccaactttacatcatatcgcacctgcatctccgtgctcgtaccaaccttctttctatgcagatatagcaacccaacctaccttttcagaggatattgtaatagttccacctccacattcaaaaggggttaatataattccattgccacctcctcctcctagaacaagtgaaactttgtctcaacctcttgatggtgggcaatcaacaggaccagcttctcttcttgaagttactaaagaaaacccaccacctcctctccttccccctgaaggacaaatgggatctccattgtcaactctttgtggagaaattgtgaatattccaatacctccaccttcacttcctggaggacatggagaagttccactatcaactcctcctagaggatgtggggccattccacctccaccaccctttactaaagggataggaggaattacattgccaattggatttcatagtggagacttgtcattcctccaatctaccagagaatctaaaggcccttcatgcttgccacctccacctccacctccacctccacctccaccaccaccactatcttctaatggacacataggtgatctgccaccaccacctacgagtgtatttgtagaggcttcgatccctctgccacctcaaacaggatgtggaggggatccaccaccgccaccacctactggaggacatgtagggcctccaccaccaccgccacctctaggggaatgtgcatgggatcttcaacctcccaaagcatgtgtaagggctcccccgccacctccacctcctggaggatatgcagaagttctaatgccaccaccacctcccagaggatatgtaggggctccagcaccacctccacctcctggaggatatgcaggagctccaccaccaccgccacctcctggaggatatgcaggagctccaccaccaccgccacctcctggaggatatgcaggagctccaccaccaccgccacctcctggaggatatgcaggagctccaccaccaccgccaccccctggaggatatgcaggagctccaccacccccgccttcatatggaggaattggaggagttcctcctcctccaccaccctttggaggactaggaggaactccaccgcctccacctccagcagggtttcgaggtggagctccatcaccacctcctcctcctggaggtcatggaggtccaccaccacctcctcctagaggacatggaagtggtccccctccccctcccggtgcaccttctcctccaatgcctcctggaatgtctggtggcccccctcctcctccaggtggaagagggatgcctactccacctggcggaaggggacatggccttgctcgaacgttaggcccgacattacaaagtgcaatgcgaaagtcatccctaaaaccactacattgggtcaaagtaacaagagcaatgcaaggaagcttatgggcggagctacaaaaacaagtggaagctaatagccatgctgaattcgatgtaaatgaactagagtctctgtttaccattgctccaaaggcaaaagctggctcaaaatcagaaggccgtggaaaatcccttggaacaaaatctgataaagttcaactgatcgatctaagacgggccaataacacagagatcatgttgacaaaaatcaaaatgccgctccctgatatgatgagtgctgctctagctttggacgattcagttttggatgctgaccagattgaaaatctaataaaattttgcccaacaaaagaggagatggaacttctaaagaactacagtggggacaaggaagctcttggcaagtgtgagcatttctttctagagttaatgaaggtgccaagggttgaatctaagcttaagatatttgctttcaagattcagtttcagtctcagattagggatgtcagaaagaatttgcagactgtatcatctgcttgtgaggagctcagaagctctgagaagttgaaggttatcatgaagaacattctgttaattgggaatacattgaatcaaggcacaccaagaggccaggctgttggttttcgcttggacagcctcctaaaacttatagagacccgtgccactagtggtagaatgacattaatgcattttctatgtaagtcccttgcagagaagtcaccagaagtaatggattttcatgaggatcttgtccacttggaagcttcttcaaagttgcaactaaaagcattggcggaggagcagctggcagtggtaaaggggctggagaaagttgaacaggagctaactgcttcagaaagtgatgggccggtttctgatgttttccgtaagactttaaaggagttcattgattgttcgagtgctgatgtatgctccttgtcagcattctattctgaagtaggtaaaagcgcagatgcacttgctctttattttggagaagaccctgctaaatttccttttgagcaaggtaatattcatgcctatagacccatggaaatggtttaa

SEQ ID NO: 35574 - DNA, 1947 bp, Zea Mays
aaagacgcaaaacgtccgtctgcccctctctggttataattttgggcattaattgcacgtctcctccccacctctccttccctccacccgtgccgtcgcctcgcctatccgatctgccacctcctcccgtctcgcacgttccttcccaactccgcagcgtagcctctggtcatattggataaagtaaagggcccaaagtaccaagaaattgtaaacatccgacttggagatggcaccaatcgccgtggtcaagtcctggaagttgatggcgaaaaagctgttgtgcaggtctttgaaggaacttctggaatagacaacaaatacacaaccgtgcagtttacaggcgaggttttgaaaactcctgtctcacttgatatgcttgggcgcatttttaatggttctggaaaacctattgacaatggccccccgatattgcccgaagcctacttggatatctctggaagttctattaaccccagtgagagaacctatccagaggagatgatccaaactgggatatccaccattgatgtcatgaattccattgctcgtggacaaaagattccactgttttctgctgctgggctccctcacaatgaaattgctgctcagatttgtcgtcaggctggtcttgtgaagacattggagaaaggaaagcatgctgagggtggtgaagatgacaactttgctattgtgtttgctgctatgggagtgaacatggaaacagctcaattcttcaaacgtgattttgaagagaatggttccatggagcgggtcaccctttttctgaatctggctaacgaccccaccattgaacgtattatcacccctcggattgctctaacaacagcggaatatttggcatatgaatgtgggaagcatgtacttgttatcttgacagatatgagctcttatgcagatgcacttcgtgaggtttctgcagcccgagaagaggtgccaggtaggcgtggttatcctggatatatgtatactgatttggcaacaatatatgagcgtgctgggcgtattgaaggaagaacaggctccattacccagattcctattctaacaatgcctaacgatgatatcacacacccaactcctgaccttactggatacattactgagggacagatatacattgataggcagctccataacagacagatttatccacctattaatgtcctgccatctctttcacgattgatgaagagtgctattggtgagggcatgacacgtcgagaccattcggatgtatctaatcagctttatgccaactatgctattggaaaggatgttcaggccatgaaggctgtcgttggagaggaggcactctcgtctgaggatctgctttacttagagttccttgacaagtttgagaggaagtttgtgacacaaggagcatatgacacacggaacatcttccagtcactcgatcttgcatggacattgcttcggatcttccctcgcgaacttctccaccgtattccagcaaagaccttggaccagtactatagcagagatgcttcccactgaatcactgatcgttgatcagtgttccaatattttggcaagtgcagctttgaataaattgaacagattggcctcgtggccattttcctgtatttatctgtagtcaggtccaattcttttctgttggtgagcgcaagttattcatagatgactcggtcatgggaatatttgtaatattatgtcatgtatcgttaaatttcagttgttttgtttcagctgccagaactgttagcaagagtattctggagctggaagctcgaacgcaactggttgtatctatatccgtgaatgccgaataaaggaggggcaataaactgcagcgaaatatgtgctgtcagacattgttgaaaattttctcgattttgctgttttgagatgtgagaaatcttttcactgaaccaaaggtgttag

SEQ ID NO: 35575 - DNA, 639 bp, Zea Mays
ttccatcgcaccgtcgtgcgagcaagacccttttctccacccttcacccagctatcatggctaagggcacgtcttccctagccgcgaacacacatatgtgagtaggctgtcgccgattaaggttttgcgcaaggcactaccgttgctgacgacgtgctctactgctctccgtcctccagcgcagtcgacatgaggtcgtccttgtgcaacaggcacagctcgcgcgagctccatcggggacaaggccatacctcaacggagtgcaaggtcggccgcgccgttcgggagtgatggatgcgcatagctggtggtgcgggcatgggtaccggcacacggcgcaactctcttttttcttgtgataacagatcaataacatatcataccttccaattgcatagctgaatcgaaacatgtcgcgtaggatagttcggctaggccggagacctgctgttggggacttgttctcaaatgctatgagttaagaacaaggcaacacaaaaatgttaatggttaaagtccttcgtcctttgaagcattatctcccttaggatataatgatcttcagacgaaggtcatgaaggatgtaccttcatcatcacagtatatattaatgaaagaagaagcataagaaacatgaga

SEQ ID NO: 35576 - DNA, 931 bp, Zea Mays
aattaattaaaaatcgaaaatctattattctctgttgccgaatcgagcgcaagctcatgaaccgacgcgtgtggcatgcagctgtgagagacggagtggccgttacggtccgaatttgaggatttacagacatgaaacaccatctgaagaaaggcacattcgcgtgtggcggaaatcaccagacgagacggtacaccacatttgacgatgaaaagcaactacggcgcagggaaatcggcgaagaagagagccaagaaaaaaacaccaaatgaagcgtcgggtctagctggattactggatactactagatctgccattgaagaaaagaagagaaaaccgacaggcggaacaagagcgcgagcaaataaaaataagagagagagagagagagagagagagagagagagagagagagagagagaacgcaagggtccgggagcagggagggcgaaagtaattcacctcgatctggaggacggcagcattgtggacgtgtggtggtgtgaggccggggcaagggaggagtgcccggccgactggagaagtggagagtgggggtgccggtgggaggcggagggggagggacggggaagcagcaggaggcacaaaaagcctgcaaagccaaaaggcggccgaaagggctgtgggaggcgaggtgtcaggtgtgcaggccgccagacgcccaggccagaggaagcagcgtccgtccgtcgtctcccgtcgccgacggcaaagcgaattcctcgttcccgaactactcctacgtgctacactgctccatctccggctgcgaggacgaagaaggtgagagcggtcgttggctggctggctcgtcgcgagctgcggtacactgtggctctatgcctctatagtgcatcgtcatccttgctcgtgcgttttaattaatcatcacgaggaggaaggtacccgt

SEQ ID NO: 35577 - DNA, 2047 bp, Zea Mays
tcgcggttctaccgctccgctcatgcccgcggccgaaccctcccccgcatcccacagccgccgacgctcaccttccatcctccccgcagcccgcagccgccaacgctcaccttccatccccgcggatcccacgctccctcgggcgctccttccgcgcccgcccacagatctcccatcgacgtcgatgctctgcgattaagcccagctaaactcgcgcggtttggctttggcgcagcgctggagctctcgagacgctcgcttggcgccgaagcggacgaggagcagttgtcggcgtccgctgccgtgtcctcagctccgccatctccttctccagctcgacgatcctctgcttcctgctcgtgaactccagcgcggcagcgtcgagctcggcgcacagccacccgttctcggcttccacccgctctgcggtgtccctgcacctctggagctcggtcttcttggccgcgagctcggcctccaggactgcgccaaagccaaactgctactgctacaactccgccgtgctctccatggaagcttctgcgcctagatcaacagcgttcggccgctggtgcccggcgctaagctccacgccgtcatcgagcgtggcacagtgattccgtcctcgacctccccttcctctgcaacatgtccaggaccgggaactagtagtgggaggatcaccgtccaccgtcgagcgtctgcaaggcaaatcagatcaaccaccacatcggagtgaaaagtctgcgccactctgcctcacacagccaaaaaatgtatcaggtgattaagaaccatcccagctcattgaagctttatgagcagaaactgctaggaacgagtgaagtcatgaaagaagatgtccagaggatccatgacaaggtgaaccgaatcttgaacgaagagtttgctaagagcaaagactacgttcccaacaagagggattggctctcagcttactggactggctttaagtcaccagagcaaatatcacgtgttcgcaacactggagtgaagcctaaaatactgaaacgtgtaggtcaggcaattactacactgcctgaaaacttcaaaccacatagagcagtgaagaagatttttgagctgcgtgcagctatgatagagagtgctcaaggaattgattgggctgttgccgaagccctggcctttgcaacacttatagtggaaggcaatcatgttaggctaagtggacaggatgtggaaagaggaactttcagccatcagcatgcagttctgcatgatcaggaaactggagcaaagtactgcccacttgaccatgttgcaatgaattaaaatgaggagctatttattgttagcaacagagactagttggagcttcattgttgatttttgcaaataagcaagacatgcaaggagctctaaaaccaactggaatcacgaaggtaagcgaacttcagtcatttattatatgcattagagacatgttttcctatctatgacatcatttttaacttgtactatgtttttccggtcctcatggttgccaagattttacttagttcgatgtgggagcaaaaggatatgccaaattgaatgtagtttcatcaattatgctcaattatggatgttcagaggcatccaatttcagtgtgtactgcaatacttgggtccacctgtacttggtttaagaagcgctccgcggacttccacggccgcgccgccgatctcgtccacggcctccggggcacggcgatgcccaggagacaggccctcaaggaagagcagtgcagagaagagaaaggtatctcgactattccaaagcacaagtatgcatccaaagcctgttccccaaaagaaattgtgcaggatcgaaaggaacttcaacctgaaccagcgagagtatcgatacaaagactgtttgaaatcttctagaaatgacatcgaatggaacttcaagctgaacaagcgaaagcatctatacaaagactgtctgaaatcttctagaaacgacatcgaaaggaacttcaagctgaacaagcgaaagcatctatacaaagactgtctg

SEQ ID NO: 35578 - DNA, 2723 bp, Zea Mays
cggggattgagcaagcatcgggtgctttccgttacgttcctccctcccgtcctgtcctgacctcctcgtctcatcatacttcagacttcacacatcgatccccactcccccacggaagcgaagcgtacgctacgcgcactgccctccggcgaccgccccgccgctggcgggtcggattgggtccgatccggatctggatcagcaccggcatcgccgcgacggagatgccgaccccgaggcagcggcatacctccacctccggcgggggcggaggagggaggcgcgccgcctccgggtcggccatgctgccccccgtggtggtcctcgtgttcctcttcgtggtcgcgccttcgctcttcttcgtcgtgcgcaatgacggtcgcgcccacgcccacgtccacgtagcctccgatcgcaagggtaagaatggcaatcaggaagcagcagcaatgaagaacctcaaatctattttgcctaaggaggtgtttgatgctataactgctagtcaacaagaatcaggcacattgagtgttgatttttttaggaatcatgcatctccctcttggaaaactgatgatctagtcaccgagaagagcatggatgtcaatgacaatgctaaagctgaaaatagtttgctagaacattctgtgccaacaaatagatcacccaaagatccagatgaacatcaagttgacaaagcagcaaaagtagctcgaaggaaacttagggagaaaaggcgtgagaagagagcaatggatttggttcataaagatgatgaagcacgtattaagctggaaaatgctgccattgagcgatcaaaagctgtcgattctgctgtgcttggaaaatacagcatatggcgaaaagagaatgagaatgagaattcagactctacagttaggctgatgagggaccaaattattatggctcgtgtctattctacgcttgctaaatcaaagaacaagaacgatctatatcaaaaactgcagactcgaatcagagaaagccagcgggctgttggagaggctaatgctgatgctgacctgcatcacagcgcaccagaaaaaatcagagcaatgggtcaagttttatcaaaggctagagaagaactttatgattgtacggcaatcactcagagaataagggctatgcttcagtcagctgatgaacaggtcaggagcttgaagaagcagagtacatttcttagccagttggctgcaaagacaattccaaacagcattcactgcttgtctatgcgtttaacaattgattactatatcctgccccttgaggaacggaaattcccaaggagtgaaaatttagaaaacccaaatctctatcactatgcacttttctctgataatgttttggcagcctctgttgttgtgaactcaaccataatgaatgctaaggaaccagagaaacatgttttccatcttgtgactgacaagttaaactttggagccatgaacatgtggtttctgctgaacccacctggcaaggccaccatccatgttgagaatgtggacgaatttaagtggttgaactcatcatactgtcctgtgttgcggcaacttgagtctgctgccatgaaagagtactatttcaaagctgatcgtcccaccactctctcagcaggttcttcgaacctaaagtatcggaaccccaagtacctctctatgctgaaccacttgaggttctatctcccagaggtctatccaaagttggataagatactcttcctcgacgatgacatagttgtgcagaaagatttaacagggctgtgggatgttgatcttaatggaaaggtcaatggtgctgtggaaacctgtggggagagttttcaccgttttgacaaatatcttaatttttcaaatccacacattgctcggaactttgatccaaatgcatgtggctgggcttatgggatgaacatctttgatctgagggagtggaagaagaaagatattactgggatctaccacaaatggcaaaatatgaatgaagacagggtcctttggaagcttgggacacttccgcctggcctcttgaccttctataagttgacgcacccactggacaagtcatggcatgttcttggattaggatacaacccaagcattgaccgttcagagatagacaatgctgctgtggttcattacaatgggaacatgaagccatggctggagctagcaatgaccaagtaccgaccatattggaccaagtatatcaagtatgatcacccttacatccgtggatgcaacttgagtgagtagatagtcgtgctgaaaaactgacagatgaggaagagcttattggacagaagtgttccactaccatgtccttgcggtgcgttattcgactcagcaaagtggagaaaaacttataaaatggatttgtggggctggtgtcgcgtgctgcttagaggtatgcctagagaatcgagtgttgccggaattggatcctttttttgtatcagacgataaagtgggagtacaagccaaagcggaaggcatgaatcgaatggattacaggtttaaccctgagtcctgaccaatgtgaaactattttacctacagtatcaagaaatgctggtgtccgttttatgataactgatctcgtagctaatcttgtgtttctcggtcacgtgttacatggtgctagcgcctgagagattggattagtcaatttatttcacaaactatgacattttcttctagcaa

SEQ ID NO: 35579 - DNA, 1855 bp, Zea Mays
agaaaccagaccaacaacaaaaaccgactagcccaggcaagcagaaacccactgtctccgcttccgctcccgactcctttgtctcgtcctcatccatccaaccaggcgagccaacaagcaagcaaaagtaaacggggcgaggagctggagagacgccggcgacgcgggcggagcacgtcgtcgccaacgccggaggggaggcagagtacgtgcgccgcatgcaccgccacgcgccgaccgagcaccagtgcacctccaccctcgtcaagcacatcaaggcgcccgtccacctcgtgtgggagctggtgcggaggttcgaccagccgcagcggtacaagccgttcgtcaggaactgcgtcgtgcgcggggaccagctcgaggtcggcagcctgcgcgacgtcaacgtcaagaccggcctgccggcgacgaccagcaccgagcgcctcgagcagctcgacgacgacctgcacatactcggtgtcaagttcgtcggcggggaccaccgcctccagtcctgatcgctggatgctatgcatgaaatgcatttgctgtgcttgcgagattgggcatttactatgagctttgtgacagttaacatcttggtcctgtttggaagctgggattgggaatcaaatccttacatggtttaggagcatccagtttgaacttaaaccattgtagacatctgctgcaataaaaacaattggcttcggtgagaggcactcatcatcagttcaaacttaaaacgagataagccatcggttgattggcctaattaccttgcttcccgtgattgttcgcctcgctgaaaggatatgctcacaacccgtactgttttgacttgttatccacatactatttaagtacgaaaggacatgcgtactactttcatttgttgttcttcgtctagtcttcagactgataatataaggtgaaaaacttcgatgtttcgcgtgctgtcaagtgattgtgaagcaaagtttctgttagtgtcaatgcgtacaggctgcaatggccatctttactcctacttgaagcatatctctgatccacactgatgatgatgagttgtgtgcgccacttttttttctttttctttcagaactactcatccatcataactgtccaccccgagagcattgacgggaggccgggcaccctggtgatcgagtcgttcgtggtcgatgtgcctgatggcaacacgaaggacgagacatgctacttcgtggaggccgtgatcaagtgcaacctcaattctctcgcagaggtatcggagcagctagcagtggagtcacctacgtcgctgatcgatcagtgaagtcacctgcgtcgcccatcgatcagtgaccaccggtacaaaaaaagacgtcaatcagcaacaaataagaagaagcttcgaaggctggctggagagttcaacctttttgagaccggtggtttggccatcgtcttctgcgtgtaatgtctcttggaatatggaagtattagtcgttgtgtaggattaaacatctgtagtagcttgtatgctagggatggttgtttagccttagaaactgcacctagatacctcatggcatgtatgcatactgctagtatgtgtagagatcagggaaagcatggagcgggttttgcctcttaggtgcatggagatctgtctttttttccccctccattttgcggtggcgactctattggttggggttcttggataaatatactttcccgcgaacgcatagggccggattttggaattggttcaattctcgtaattattgtattctctagtgttattgggatttggggtttggaattgccggactgcgataagtgatgaaaatgtagacattaaagctct

SEQ ID NO: 35580 - DNA, 2050 bp, Zea Mays
cccagacgggcccaaatctatcgcaaacaggcctcgtctcgtcctcgtcctcgtccgccgccaaatcgaacccccccaaaccctagctacccggcgcaacgtccccttcccgcctctccgcggcgctgcgtgacacccggcctccgctacgaaacaccggggcgggtgtagcctagcgggcgggccatggcgtcaacggtgctggaggcgacgcgggcggcccatgaggatctggagaggctggagcggctcgcggtgagcgagctgcaacgggagcccgctaacccgcgtgaccgcctctttcagtcccaccgcgtccgccacatgctcgacctcgtcgtctccacctccggcaagctcgtggaaatttacgaggacaaggacaatgctaggaaggatgagatcaacactcatcttactgcacccacgcaaagtggactgtttagcaagtactatgaaaggctcaaagagatccgtgaatatcatcggcggaacccatctgcccgctttgttagtacaactgatgactatgaagagcttctaaaggaggaaccagttattgaattcactggcgaggattgtttgattcctcttgtgggatcttggtggtgtcgatggaaacttttggccgttaccttgacttgcatgagctttataatgagttcataaattccaagttcggaacactgatggaatattcagcttatgttggctgtttctcccagacggacaagatctcacatagtcataaagctaccagaaaatacagagaatacttggaacatattttggaatatctgacatcatttctgtatcgcacagagccattgcaagacattgataagatttttttaaagctggagagtgaattcgaggaacaatgggccaatgaaggaatacttggatgggggaataaagggacagaaaaagagtctgaaatagatctcgattactacagcacagttgaagaacttgttgagcttggcccagaaaaattaaaacaggctttagctgctcgaggtttgaagagtggcggtactgttcaacagcgtgcagatcgtcttttcttgttgaaggttacaccgttggaacaactagataggaagcattttgccaaagttccacatactaaagatggctcaaacacagctcctaatggtaatgctttcaaggaggatatgaagaaagaaattgcattgatggaagtgaagatgaaacgtctttgtgagctgctagatgaggcctttgtaaggacaaaggaaaatgcggagaagaagcttactttgacatatgaagagatggaagcagaacgggaagaggaggaggtacaagttgacactgagagtgatgacgaagagcaacaaatctacaatcctctcaagttgccgatgggttgggatggcaaacctatcccctactggctgtacaagctacatggccttgggcaggaattcaagtgtgagatatgtggaaaccatagctattgggggcgaagggcttatgagcgtcatttcaaggaatggcgtcatcagcatgggatgcgatgccttggcattcccaatactaagaatttcaatgaaattacatccatcgaggaggcgaaagcgctctgggagaaaattcaagcacgacaaggggtgaataagtggcggccagacctagaggaagagtatgaagatcaggaaggcaacatctacaacaagaagacctacactgacctgcagcgtcaaggcctgatctagggctcctgctggttaaagttgtcgggatttgttcagaacttatctcatgtagttgtaactctgaaaatattggcccatctggcatacattttatgtaataacatgattctccggaactcatgtgcttttcccggttgtcatggttgtctcgtgtgtctgtttgcccagcttggtcgtccgtagctatgttatgttttatataatcgtaaatgtgttattgtattaagcacaagttggtgtttgcatcacgtaaaacatatttttataaaaaaattagaaaaaaataaaactaggctgtttttggtcta

SEQ ID NO: 35581 - DNA, 1806 bp, Zea Mays
ttccaccacaaccagtctcttcctcgcagctcgcaccaacccgccgccgtctatttactgccactccgcctcctcatggcctcccctacggcaggtgatgctcccctcgcgtctccttctccgtctccagcggctgacgcgacggacgcagcccttgccgccgcggccgcggtgccggatccagacatatctttcgggttcctgcgcccggagctcgggaaggagaagctggtcgggacggtgggattccacgagcgccacgtgttcctctgttacaagggcccggaggtgtggccgtcccacgttgaggccgcacactctgaccgactccctcgcctcctcgccgccgccatcaaggcccgcaagcccaatctgaagaagacatcaaattcaccatctgtgaaggagaagatggcactgaatcatcaaatggagatgtgttgatctttccagatatgatcagatacaaagggctgacccattttgacgtcgacaactttgttgaagaagtgtttgtgaaggatattgactggcttcctggatctcctgagcctataagtggttcctatgttttcgtttgctcccatcaaagaagggatataaggtggctgtcagtgcatgctcacacgtgggaggtcataagtatgcaggaaatgtcatcattttcagttctgatgccaagggagaagtggttggtcattggtatggttatgttgtccccgacgatgtgcctgttttgctgcataaacatattggacaaggagaagttgtggaccgtctatggagggggcagatgggtttatctgaggagcagcagaagcaagctctcgagcttcggagcatgacaaatggtggcaaagaatcccttgaagaaaccgaaacagacggtgcttcttgtaaccctgcagcaactggtggatgctgccaaggcaatggtggcttcactcgagctttggagcagcagaagcaagctctcgagcttcggagcatgacaaatggtggcaaagaatcccttgaagaaaccgaaacagacggtgcttcttgtaaccctgcagcaactggtggatgctgccaaggcaatggtagcttcacttgctgccatcctgacctgccaaaggaaaaacgggacaagagcatcgcaattgagcagaaccctaagagctgtgaggagaatggcaaggaggggggtggtgctggcagcaagaaggggaattcaaagacttgcccgatgcccacctggtttgagacctgggagagagctgacacctatgctgctcttgctgttgtcgcagctgccgcagctgtgtttatctctttcagaatctacaagaacctcaactgaagagcttgagagatctttgaagaggtgcccgaaacaagtctaggtgaatcagcgtactggtggtaaaacaatccgggacgagaataatctttacctgtgtatagtaatgtgaggtttagaacctcaaagtagcttatctggagatggtgataaaaaggtgttgtggctacggtgttttcgcgtgtgaacgtccactgctatcgaagtttggatgccttagctgctggtaatcgtaaggcatcaagtaagcaacattcactgtgatgatgttgtcttttgtttgggttttggatgttctggagattctaggttttgaaacaatatcaggttgattgaaaaacataaacatctggaaaaggttaacgcctttcttgtgacatttgaaaatttgaacttcctcgtttatctgcaacctgcgcgcgcatgtttctatggtgaacccggcgagacgccaatggacttcg

SEQ ID NO: 35582 - DNA, 915 bp, Zea Mays
aggtgcagatagacctgaagcgaatggacaggtgtgtatatcacaaaaggaggcaggtgtggatgaccggcagtgaaatggacttgaggaggtgtacttcaatagaggagcgcccaagcggcgaatcagggctgctgcctttgctgcctgccaccaagagctccagttctgccctccaccttctcgttttccctcctcctctctccttgaagttgcgtgagctccaagcggtcgatttcctgttcaaaagagcacatatgtgattcatgtctggcgtccgctgcagttctataggcgtcttcctgacgccatttcatgcctaggcaacacctaatcatatagggcggatgcatcccgaggttgtggcgatcctgacgcccagcactattcatggcggggagcaccagggtacacttttgcatccataccagattattagcctttcagtttgcgctgctgatgcagtaaggataatgaacaagcaaacaacttcaaactttccttgggaaccaattttagtgataaaagagttaagcatgcatatgtagtggctcaaatgattgttgtgtttataggatgttattgcttcgtcggtcagtaaaagaataattccttgtgatattgtgtaagagcaaaggttgattttgcaatttcttggtatttccttgtcaaatataacagaaattagtgccaccagtatgtgtttgtgtgatggtatctgttgatgaagatagactatgtactccatttggggctttggagtatgtatataatgtggctgcaccagaaccaagtccaagcccttttttaaggggggtggtgtgcatacttctgtcatgcttagattgttgtgtgcaatactggattgaagagaagggccagtaacggatcacgtagtctagaattcaaatgcaa

SEQ ID NO: 35583 - DNA, 938 bp, Zea Mays
cgccattccgcctagatgaatcggggctagagccctttttctcgtcactgcggcggcgccggccaacctgcttccgtcacgccctacctctccctccccacgccggccaatcttctactcatcgtggctctagctgctcctcttgccaccacactatcttccaccacagccacctacaatccactcccccatcagccaatccgctcgatccggagaccacaatggcgcctgggcttaaagctgcagcaaaatcaaccaaaccatcagaagtgccactaacagaatatgacaaattgagagccgagaatttgatgaggaataaccaaaagttgcaaagattcgatgttactaaactagcgtcaatactaaccatacttctgcaaagagcaaaggtgacactcgtgaaaaatctggatctttgtatgaggtctatgaaggtgaaggttctgaagatgaggaagtcaatcagtgtgcaacaagacaaagaaacaaattaaagagggtcttggcacatgtgcaacaagatgaacctacaagagtgactaggtagaatacaagggatttggctttaactttcagtccagaactgcaacaagtcaaaaccttaggcctctctactgccacatccacccctccacagggccagaacaactccagtgatcaagcttcttatgatgatgcaaaagtgccagacatggaggaaataactgagatgatgaatatgttgtcgtaatcattgtcctacatgggtggtgttctaatgtcatgttgcttatgtgttgcttatttctatacagttgtggtgcatatacctgaatgtgaatgtattgtctgtttatgtcatttttgcagttccatgattatagctacatcaaggtgcacttgaggcaaccatagatccaaatggaaaaaggaatagaagtattgtaacacccgga

SEQ ID NO: 35584 - DNA, 1415 bp, Zea Mays
cagatggatgcaatgcaaccttttccggtttcctctcctatatgcattcgccgaccaagtgaccaacacgcgccatccattccaacctggggctgaaccgccgaactatgccgttgtcgtctttctccttcctccgccaccacctgccgctccctcttcagctcccgccaacttcaaatcgtcagccaccacacccccgcctcttccacctcctcctccctccgttcacaccgcgccgcaccttcgtctgccagccgctcaccgcggccacggacgatatggctgctgcggccgcggcggcgtcgccccccacactgctcgagcacatgggccaggcgggcacggccgctgacctcactgtccttgtggcccatatccagagcgcgtgcaagcgcatcgcggctctcgtggcgtcccccggcaacgccgagctgtcgcgggccaaggcgaggggtggggctatggcggcagggcgtgacgcgcctaagccgctcgacgaattgtcgaatgatatcatcttgtcagcgctccaaagttctggaaaggttgcagcgctagcatctgaagaaaacgatctgcccatttggatatctgatggcggtccatatgttgttgttactgatccgcttgatggttctcgcaacattgaggtctccatacctaccggaacaatatttgggatctacaataggctggtggaggtcgaccatctccctttggaggagagagctcagctcaactcactgcaaagtggaactcgccttgttgctgctggatatgtcctgtactcatctgccaccatcttgtgtatcagctttggtgcaggtacccatgccttcacattggattggtcgactggagaattcatccttacacatccttccatccaaataccacctagagggcagatatattcagtgaacgacgctaggtattttgactggcccgagggcttaaggaagtacattgacacaatcagacaaggcaaaggacagcatccgaagaagtactcagctcgctacgtgtgctcactggtggctgatttccaccggacgctcatatatggcggggtcgctatgaacccaagggaccatctgcggctggtttatgaggcgaaccctctcagtttccttgctgaacaggctgggggtagagggtcagatggcaagaacagaatcctcaccattcagcctgtgaagttgcaccagaggctgcctttgttcttaggaagcatggatgacatgcttgagttggaaagctacggagatgtgcagcagaaggtcaatcctggatatgaagtttaacgatatgtaaaaaaaggttcagattttttcaagcgcccaagcagaaaataaggatccaccgaagacagtctactccaacgaataatgtaaaataggtacacagaaccgtag

SEQ ID NO: 35585 - DNA, 3188 bp, Zea Mays
gcgggatccgttgaagacggtctcaagaagggtttttggcgtctagcagtccgccagtccctttctgctgcgaacttgcgcgacctgcactgcgtccctctctccactctcccgtctctcgggtctcggctctcgccgtcgccactcgccgcgagcgagatgcagggcctagccgtatcatgccagcttcctcctgctgcggccgcagctcggtggcggccgcgcgcttcttcctctaatagggaagcagttttacaatgttggaagtatgaattaagtcaagaccactatttgggaggccccctaaggataggtcagtctcaaggaagtttgcacagacatcgctctacaaattttctcagaccagctgctgcagctatttcagttgaacaagatgaagtcaatacttatcttccaaaaggtgatatgtggtctgtgcacaagttcggtggaacctgtatgggaactcccaaaagaatccagtgtgttgcaaatatagttcttggtgattcttctgagaggaagctgatcattgtttccgcaatgtccaaagtaactgacatgatgtacaaccttgtacaaaaggctcagtcacgggatgattcatatgcaatagcactggcagaagtttttgagaagcatatgactgcagcaaaggatcttcttgacggagaagatcttgcaagattcttgtctcagttgcattcagacgtcagcaacttgcgagccatgctccgtgctatttatatagctgggcatgcgacagaatctttctctgactttgttgttgggcatggagagttgtggtctgcgcagatgctgtcgtatgcaataaagaagtctggggcaccctgcagttggatggatacaagagaagttctagttgtaacacccagtggttgtaatcaagtagaccctgattacttggaatgtgagaagcgacttcagaaatggttttctcgacaaccagctgagataatagttgctacaggatttattgcaagtacagctggaaacattccaacaactctaaaaagggatggaagtgatttctcagcagccatagttggttctcttgtcagggcacgccaggtcactatttggactgatgttgacggggtatttagcgcagatcctagaaaagttagtgaggctgtgatcttaagcactctgtcttaccaggaggcctgggaaatgtcatattttggggcaaatgttttgcatccgcgcaccattatacctgtgatgaaagacaacattcccattgttattaggaacatgttcaacctctctgcccctggaaccatgatttgcaagcagcctgccaatgaaaatggtgatttagacgcatgtgtcaaatcatttgctactgtcgataatttagcacttgttaatgttgaaggaactggaatggctggcgttccaggtacagcaagtgctatatttagtgctgttaaggatgttggagctaatgttatcatgatatctcaggctagcagcgaacattcagtatgctttgctgttccagaaaaggaagttgctgtagtttctgctgagttacatgataggtttcgtgaggcattagctgcagggaggctgtctaaggttgaagttattaatggttgcagcattcttgctgctgttggtctgaggatggccagcactccaggagtcagtgcaatactttttgatgcattagcaaaggcaaacattaatgttcgagcaatagctcaaggttgcagtgaatacaatattactgttgtattgaagcaacaagattgtgtaagggctctgagagctgctcactcaaggttcttcctctccaaaaccacacttgctgttgggatcattggacctggtttaattggtggagcactccttaaccagttgaagaatcagactgctgttctcaaggaaaatatgaacattgatctgcgtgtcattggaataactggctcaagtacaatgcttctgagcgacacgggaatagacttaacccagtggaaacagcttctacaaaaggaagcagaaccagctgatattggtagttttgttcatcatttatctgataatcatgtatttccgaacaaagttttggtggactgcacagcggatacaagtgtggcatcccactattacgattggttaaagaagggtattcatgtcatcacgccaaataagaaagcaaattctgggccacttgatcagtacctgaaattacggactatgcagcgtgcctcatacactcattacttttatgaagcaactgttggtgctggcctcccaatcatcagcaccttgcgaggtcttctggagacgggtgacaagatactgcgtattgagggcattttcagtggaactttgagttatatatttaacaatttcgaaggaacaagggcgtttagtgatgttgttgccgaagcaagagaggcgggatacactgaacctgacccaagggatgatctatctggaactgacgttgcccgaaaggtcgttgtcctcgcgagggaatctggtctgaggcttgaactttctgacattcctgtgaagagccttgtgccagaaacacttgcatcatgctcgtcagcagatgaattcatgcagaagctaccgtccttcgacgaggactgggccaggcaacgcagtgatgctgaggctgcaggcgaagtcctgcgttacgttggagcgttggatgcggtgaacaggagcggacaggtggagctacgcaggtacaggagggaccacccgttcgcgcagctctccggctccgacaacatcatcgccttcaccacgtcgaggtacaaggagcagccgctgatcgtgcggggtccgggtgccggcgcggaggtgacagccggtggcgtcttctgcgacattctgcggctggcgtcttacctcggtgctccttcttgagcttctactagctacaggtgccagtttcaggaagcagacggagacacactgccatgcatgatgcctcccctccgtgtttgggcttgctcacatgttgtaatgttgttctgaataagtgccaggaaataaggcctctagcgtatgtcgagagagagaggtcgttcggctttggaatagccgattaggtgttgtttttgctgcatgatgcaaatgaattatcgtaccaatgaagggatgtttgcttgtgcctactgccatgtatgctcataaaaaac

SEQ ID NO: 35586 - DNA, 3700 bp, Zea Mays
atagcttctctctctcccccaaccttctcttccacatctccgcttctctctcgcctccgcttcgcttcgcgagagacgggccgacgacggaaccctaggattcgcgcccgcctgagcggccaagccaccaggaccgcgccctccggacccgggggcgccagacaagctccggggcgcgcggatcgaccactggccggcttaccgccgccgctgccatgtcgtcgctcagccgcgagctcgtcttcctcatcctgcagttcctcgacgaggagaagttcaaggagaccgtgcacaagcttgagcaagagtcagggttcttcttcaatatgaagtacttcgaggagaaggtccatgctggggagtgggatgaggtggagagatacttgtcaggattcaccaaggtagatgacaataggtattcgatgaagatcttctttgagatcaggaagcagaagtatttggaagcgcttgataggcatgatagagcaaaggctgtagatattcttgtcaaggatcttaaagtcttctcgacattcaatgaggagttgtataaggagataacacaacttctcactcttgagaattttagggaaaatgaacagttgtctaagtatggggatactaaatcagctcgaagtattatgctggttgagctaaaaaaacttattgaagcaaacccccttttccgggaaaaacttgtcttccctactcttaaggcatcacgcctccgaactctaatcaatcaaagccgttccaacctccacctggtccatctttagctggttggatggcaaatgcagccgcctcttcatctgttcagtctgctgttgtagcagcagcatcaatacctgttccacccaatcaagctgtctccatgttgaaacgcccagctctaacagactatcaaagtgcagagtctgagcaactaatgaagcgcttgaggcctggtggacatggcattgatgaggccacatatcctgctcccacccctcaacctgcatggtcagtggatgatcttccaaggacagttgcttgttcattgtcacatggatctaatgtaactagcatggattttcatccaactcggcatacactgcttctagtgggatctgctaatggtgaatttacactttatgagatcggtctgcgtgaaacattactttcaaagcccttcaaaattcgggatataaatgcatgttcaccacaatttcagaatgctgttgtcaaagattcctccatatccattaatcaagttacctggagccctgatggagaaatgattggcgttgcattcacgaaacatttgatccatctgcatggataccaaccaccaaatgagacacgacaccttctagagattgaggctcattctggaggtgtaaatgatatagcattctcccgaccaaataagcaactttgtgtggtcacttgtggagatgataaactaataaaggtatgggatatgcatggacataaattattcacatttgaagggcatgaggcacctgtgtattctatatgtccgcatcacaaagagagtattcagttcatcttctcaacttcccttgatggaaaaattaaggcctggctttatgacaatatgggatctagggtggactacgatgctcctggcaagtggtgtactactatgctatatagtgctgatggaactaggttgttctcatgtggaactagcaaagagggagactcctatttggttgagtggaatgaaagtgaaggatctatcaagaggacatattctggattccgtaaaaggtcagctggtgttgctggtgtagtgcagtttgatacagctcagaatcacattctggctgctggtgaagataaccatattaaattttgggatgttgacaataataacatgctgatctgcaccgatgctgaaggaggcctcccagctcttcctcgcttgaggtttaataaagaaggcaatcttcttgctgttactacagcagacaatggttttaagatacttgcaaatgctgatggacttagaactctacgcgcattagggagccggcctccttttgaagcatttaggccgcaatacgaagcttcttctatgaaggtctcaggtgctcctgttgttgctagcatctctcctaacataggccgaatggatcacttggataggaattctcctgcaaagccatctcctatactgaatggtggggatacagcatcaaggagcatagatataaagccaagaatctcagaagaaaagcctgataaagcaaaaccttgggaactaatggaagttctaaatccccagcaatgccatgtagcaacaatgccagaaactccagaccaagccagaaaggttgtccgacttctgtacacaaattctggtgttgggttgctagcactagggtctaacgccattcaaaggctatggaaatggagtcgaaacgaacaaaatccgagtggaaaagccacagctagtgttgtgccacaccattggcagccaaatagtggtcttgtcatgacaaatgatacagcagataccaatccagaggaggcagttccatgcattgcactctcaaagaatgattcctatgtgatgtctgcttgtggtgggaaggtttctttgtttaacatgatgacattcaaggtgatgacaacattcatgccacctccaccagcatcaacatttttagcatttcaccctcaagacaataacatcatagcaataggaatggaagattcaaccatccacatatacaatgtcagggtagatgaggtaaaaactagactcaaaggacatcaaaggaggataactgggttggcattctccaccaaccttggcatacttgtttcttcaggcgctgatgcacagtggataccccaggacacattgtcagcttccatatcgcatgcatcatactcatgtaacagccagctagtttttgctgccttcactgatggtaacttaggtgtttttgatgcggagaacttgagattaagatgtcgaattgcaccatcggtgataaacagatcaatccgtagtgtcattgagcttactcagggcttcaggcagctggggtgcctattctgcctctgcaatccacctgttcaccctcttgtcgtcgccgcacatccccacgagccaaaccaatttgcggtcgggctgtcagatgggtccgtcaaagtgctggagccattggagtccgaagggaaatggggagcgcccgctccggcagacaatggcatcattcccaatggcaagacgccagcttcgtcggctactagcaaccctgctgcggatcaaatccaaagatagattgtattccctaagcttttctttttctgcaaactttctaattacactgacttatttgtatgtggatgccgttaggatattatcgtcatttgttgtaaaaaggacagaataggttttatgttcaggtgtggttaactttcaggtactaccctagttatcctgttcatggaagattatgtttgcgatacggggtaatagtgtctataaagtatgtcgcctaaggttttctcaggtttagctcgatagctcaaatgatgtaagctatatatttcttcatgaatgtaaagcaatacatagtttttgctcaagatctatttttacctggttttacatagtttttgctcaagatctattttacctggttttttaatatagcgtgtgttcatcgaaaaagaggaa

SEQ ID NO: 35587 - DNA, 1177 bp, Zea Mays
gccgaactgggcctcaaccggaacttgttttaccccatctcatcccactgactccacccacccgcccgctgcctccgccggatctcgtcggactcggatccgcccgaccaccccgcgccgccgccgcgcagcagcagcaggtacgagaaatatgcccagaagaatgggtggaaatttgatgtcattgacataatggagtctgctgtgaaaggatacaagctagtggaactatatcaggtcctggggcgttcggcaaactaaagtttgagagtggcatccatagagttcagcgagtgccagcgactgagaaatctggacgaatgcacactagtgctgtatcagttgctgttcttccgcaagctgatgaggttgatgtccagctgcgaaatgaggacctgagaattgatacctacagatcaggtggctctggaggtcagtctgtcaatacaaccgatagtgctgttaggataactcatattccaaccggaacagtggttgcaatccaagatgagagatcacagcacatgaacaaggccaaagctctgaaagttctccgagcgcgactgtatgagttggagaggcgtagactacacatggacaggtcaaagcttcgatcagaacagattggaagcggtgacaggtctgagcgaatcagaacatacaacttcccacagggccgtgtcaccgaccatcgcgttggagtcacacaccactccatagcagatgtcatggagggggagagcctggacatgttcgttgatgcgctcctgcttcaagaagagatggacgccattgcttcatttggcgcatagctagattaaaccttgcaacattgattcacgtcatggacaaaatagagatcagcgaaaaacaataccgagcagtccactagtgaattgcctgtgcattgtgtcctgttttggcgtgtgctagttttacataatgctgaatttttaatgtaggcatgtgttataattgttgccgataaacgtgtcgctcatccaattctttccaaactacagttttgctggcaatgttttgttgttcgttctttccaaactacagttgtgctggcatggttttgttattcataaacttggtgcgcctgaattgtctatggacaaacatgtttataagtgatccttatttaagcttcagtaagacgttctggccttct

SEQ ID NO: 35588 - DNA, 4867 bp, Zea Mays
gtaatcttcccacctgcctcggcgcctcctccctctctcccaacctcgcccgttctcgcctcgctgttctcctctgtcacctctccctgagaagcgtggctcctgcaaccggcctccccacctgctcctcctctacgcgccgagcaccacacgacgcgacacaaccgagcacggccgctccgccactccactgcttccgcggtggcgccgcttcactcccgtgctgcagcgagcgttacggagatccgtggggacatgaaccagggtttctcctatctgttgatatgaactaaatttatcagtggtcctattgaatatggagctactgttatatgtcattgtctcatgcaaatgatggtggctgtaagttgtgattgaggaactccattgtctgagaaatggatgaaacaccaactagttctgggcaatctgaagctagttcatgtgaacctaattggtggcctccagacttcttggagaagatacagtctgcttccataccaaggaaacatgatgttttgggtaatcaaagttcctcatcctggaaggcttctcaattactgtggtcaacaggatcttattcagggttaatccctaatggtttctattcaatcatcccggataaaaagttgaaggagactttcccaactattccatcactagatgacttgcaaactcttgaagcagatgggcttaaggctgacataattattgtagacactgagagggataagaaggttttcatgttgaagcagcttagtgctgcacttgtgaaagggttaagctctagcccagcattagtgataaagaaaattgcaggattggtctttgactgcttcaagcgccaaattcccgatgccagtccaactagaggctcgattgaagatacccatttctttggaaataaaggaccacaacttctggggcagataagacatggatcgtgccgaccccgagctattctatttaaagttcttgcagatgccgttggccttgagagtaaacttgtagttggtctaccagatgacggtgctgttggatttgtggactcttacaaacatatgtctgtggtagtttcactaaactctatggtgcttcttgtggatcttatgcgatttccaggccagctgattccgttttcagctaaggctatatttatatcgcacatatctgctgcgggtgaaagcgactcagctgaaaatgactcttgtgattctcctcttgagcccaacagcccactttatggattgtctgataaagttgaagttgaaggaattgaatcttcatcatatctatctggacgatcactgcgtaatatgatgttgagatcaaggacattctctgaggggaaattaagcacgtcatgtagtgaaccaaatatagcaaatgccttttggaggcgcagccaaaggagagttgccgaggaaccccgtggtgctagttccagccctgagcatccattaatgagagcaaggggaagatctatacttggtagtgagaagcaatcatttcaagaatacacagaatctggagctgcttcaagatcagatggtcttgggggcccttcaacctctaatgctcgaagaataaggcgaagaagcattagcattacacctgagattggagatgacatcgtgagggcagttcgggctatgaacgaaacactaaagcaaaatcgcctccaaagggatcatgtcgaaggttcatgctcatatgttatggaagatcaaagcaacaccaatgactgcccaaataaagatgatgcatcttggagaattggtgctactgacagtgactcaagaaaccgaactggttctactcagaaggccatgtcactaccttcttcgcctcatgaatatagaggtcaagttacccaaaaaagtgatgattttataagtaaagagaagatggcattggcatggaacaaagttttccagagctccccatttcttaataaggctttgctgccttttaaggaatggaacatagatttctccgagataacaattggcacgcgggttggaataggattctttggagaagttttccgtggtatatggaatggaactgatgttgccatcaaagtgtttctagaacaggatttgacaactgaaaacatggaagatttttgcaacgagatatacatcctcagccggttacgacacccgaatgttatattgcttcttggtgcatgcattacacctccacacctgtcaatggttactgaatatatggaaatggggtcactgtactatctcattcatatgagtggtcagaaaaagaaacttagttggcgtaggaagttgaaaattattcgtgatatatgcaggggattgatgtgcatacaccgcatcaagatagttcacagggatctcaaaagtgcaaactgcctggtcaataagcattggactgtcaagatatgtgactttggtctatctcgactgatgattgatagtcctatgaccgataattcctctgctggcaccccggaatggatggcccctgaacttatacgtaatgaacctttcacagagaaatgtgatatattcagccttggtgttatcatgtgggagctgtgcacattgagtcgcccatgggaaggcatctccccagttcaagtggtgtattcagttgctaatgaagggtcacggcttgagattccggaaggacccctcggcaggttaatcgcagattgctggtctgagcctgagaatcgaccgagctgccaggagatcctaacccgtctgctagactgcgaatatactgttagctaaaatggaagctgcatgctcgttcacccaattcctgcacaggggatggaggtgcaggtgctggatttgtcttccgattccgagggcgaggtgtcggcgcactcgcccgatcacaagcgcccctctcagcagccgggtgtagaccccaatcgccgggttggcgacaatggttccagcgccgtggacagcctcttcgaggaagcgggcgcggcgaggccaccgcgtcaccccagcgacgcgctgaacaaagggaaggagaaggtcgtcgatgtggagagcgtggagtctccaaagcacggtggggaatcgctcggtgctgctggccgcgtcctgggagctgggagtgatccgtggagcgcactggtgagcaagtgcaaggctggggacagtgggaataatggaactgagtgttgggatagttggggtgactggggtgatcagcttactaactcggcccccgtggcgcgtctagggtcagagaggacggggtttcatgagacatatgaactgcgagggacgcctcagcttcacagtgactcttcagcattcagtgaccagtggaagggtattctgggtgcaagccctgctgatcctgtcaactcactgtggtgctccagggatactagcatgaaagatagtgaggatgaaaccttgtctcaaaggtctgtgtctgttcgtgaaatttctagctgtgattattttcttaccgaagatagtagctcgtcatggctgtcgaaggtcaaggggctgaacttcccacttcctgatgagcatcagttgagaaccaggcagattgagaatgatgagatgtttgcccgtagacttcaggagcagctcaatcagcaacagccaggatctcagcattctgaagcggttgataaaacaatagcctggacattacatgagcaagatgctgagcatgccagatttgctgcaagagaagtccagtctagttctgtaagttgtcacgtggcgaggatagtttatcgtttgtgaattcaatgtagatatgtttatgcatagtcagatcttttatttatgaacggttatgttgatacctataggttttttttttgaaagttatggaacgcattatcaagctggccaagagctatgtgttgaaacggaagaggatggcataacatcatatattcatatctgcctagccagagggacagatcaatggcacacctatattcttatggacgtcactcacctgttcaaagttttgcttcttgggcatcaaatcatactccaatttcaatgtcaagcagaggcggcttgcaaagaaactccaactgccctcaagcggagcaacgcaatatgcttatctctcagttaaccagaggatgcttcagagaagacatggatctacaaacgagattgggctgtactggactcactttctgaagcatttaggaactgcgaggacacgcactctccagattcggatgatgatgattacgaggaccaaatagcgctcggcgtcgacagccagcaaagaggcgcctctgatgatcagataaacagcctgccactatcagtaatcgagggtgaaggtcgttccgatgaaccctgcaatatatgcttggactgccctgctgctggtgattcactccggcgtttgccatgcatgcacaagtttcacaaagagtgcattgacaggtggctcgggatgaagatatggtgtccggtttgcaagtcaaatgtgttctcccagtaggccgtgagcatctcttatactttttggagcagcatcgaagctagattatagttggctgatacgaggcattgttacggctgcagtgtgtacattgcgttcttgacttgtgctctcttctgctccgtggggagcatttgaatgctctttttccgcggagagtttttttggctgtgagagaaggcacggaaaacctcattctgctattctcatttcttgtatacgtgtatgtaggctgacatgcatacaactacctagcgtacgtcagtcttgggcggtgccatgggggtatgaagcgctgagatgggacttgcaccctgaccttgggttgccgaaggccgaagctagcgagatggtcagcaaggctcaaattttg

SEQ ID NO: 35589 - DNA, 2092 bp, Zea Mays
cgcacaccacccacgcggacgcggacgccgagggggaagcggagcgagaagaataagaccccgtctctctctctctcttgagtcttctcctccaccccgccggcccctccaccacctcgatctcatccgatgccctagctaggcgagcttcgcatggattcacctgcggctgcgtcgccttcgctgctccgggacgactcgtgccgccgccgctctccgtccaccgcgtgaccgcaccaccgcccgctgatgaccagcgccggcgtcaacgtaccgggcgacgacggggtcgggaacccggccgccgcgtccgggtccgcctccgccccagaatgccggacgatgcagcgcaggcggcggcgcctcgagccacaaggatccggcgacgccgccgcggggccgagctgggtgcgccggctccgcccggccgcctcccggttctcgccgtcgccgtcgcagggctctgcggacaggcccaacgacgaggagcaggaagaggatgacccggacgtgcaggagatggagctcgtcccgctcccgccggcggggccgcaggagctccagcctgccgacgtccccgcgcaggtgtggcccgtggcgttcggctccctgtccatggcggggcggatgcgcatgatggaggacaccatctcgctccacccggacctgtgcacctgggccgacggctcgcccgtgcacttcttcgcggtcttcgacggccacggcggctcccatgtgtccgcgctgtgccgcgaccggatgcacgagttcgtggcggaggagctgggcaaggagggggccgccttccttcggcggcggcaggagtggctggcgtggggcgacggcgccggcgccgagacgagcgccgcggcgttcgtcagggggccccgcggcgcgtggccggagcgcgaggaggaggagcgcgcgtggcgctcggcgctgcggaggagcttccgtcgcgccgacgcgatggcggcgctggcgtgcgcgtgcgggcgcgtggcgcgcccgagctgccgctgcccgctttccagcgtcgtctccggcatcgtcgggtccacggccgtggtggcgctcctcgtccgcggccgcctcgtcgtcgccaactgcggcgactcccgcgccgtgctctgccgcgggcccgccggcacgccgcccgtcccgctctcctccgaccacaagccaaaccggccggacgagagggcgcggatcgaggcggccggcggcctggtggtgttcaacaacggccaccgcgtgcgtgggatcctcgccatgtcacgcgcgctaggctgctgaggcctgaagtgatcgcggagccggagatcaccgtgacggagcggacggcggaggacgagtgcatgatcctggcgaccgacgggatgtgggacgtgatcgccaacgacgtcgcctgcaacgtcgcccgccactgcctggaggacgggaacccgcctccagccgccaccgccgccgccgccaccgccggccgcgaggaggagccgcggtgcgtccgcgccacctcgctcctggccaggctcgccatcggcagggagaccctggataacgtcagcatcatcgtcgttgacctcaagcacagggagtgaatgactgagtgcctgcctgcctcgcttgcttgctctgtcgccgtgcatcagcagcttagtcgatctaggagtgaactggtaccgtgagaggaggtgtgatcgtctagacctggcatttccttcgttctttcgattcgaagataagattctagctgtttccttttttttggagagaaagaaagtggatggaagattgccgtccttaattaaatgaagacaacaacaacaacaaaaaaagagaggaaaaagagagcaattgtacagagtatgatatggtgcgacatttctgtgcattagtgaacttgcttccattttctcaaggacaatagttcggctggtgtctctctgcttgcttggctgtcgttctctatcgtctgctgggtctgtgggatgaatttttactgcagcagctttgggggagcggcagcactgcttgcagggtgctcatgcgatcttcagctcttaatgcagcggaaggtggcaccgccaga

SEQ ID NO: 35590 - DNA, 3454 bp, Zea Mays
cgcatttcatctttccaatcaagcgagaagcgtctcctcctcccttccacactcctctccactcacgattctcttcccttgattccgctagctgatcagcgtctcgccggagtaatacacagcagcagtaagaggccatggagatggtgcggcggaacctgaagcggcaggcgtcgcgctcgctttccgccttcgctggcgccgcatccccgcacgccgtcgaccaggagaacctccaccccaacctcgcctccacgccgccggcgtcgcccgccaagggcacctcctcgccgcgccccaagcacccagcggctgcggctgcggctgcggctcaaccggcggccaccgccgaggaggatcactccacagcccctacgaccgcgccagcggacgacgagcgcttcgtcaaggtggtggtgagggtgcggccgacggtgagccggccggtgaacggcaaggatctgtggttcgtccgcaagaccgccccagactcagtcgctgtcggcgaccggtccttcccagtggatggcgtcctcgacgacagggcctctcaggccgatgcgtttgatctggtgggattgcccatgatcgagaatgctatggccggattcaacacctccctcgtctgctatggccagagtggcaccgggaagacatacaccatgtggggccctctcggcgccatggttgacagtggctctgaccatgctgaccgcggcgttgttcctcgggttttccagaacctgttctctcggatccaaagaatgggagagagttctcctgagaagcagacgagctaccagtgccgttgctcgttcctcgaggtgtgcagtaatttggttgttttcaactgaaccgtgtcttggaaacggtttctagagcttaaatcagaaataatatatatgatttgcttttccaaattgttgcaggtacataacgagcagatcaatgatctgttggaaccatctcagcgtgacctacagataagagagaacgctagcaatggtatccatgttgagaacttgactgatgaatacgtgtcaacagcagatgatatcagtcagatcttgatgaagggactgtcaaacagaaaagttggtaccaccagtatgaacttaaaaagttcccgctctcatgtgatattcacctgcgttattgaagcatggagcaagggttcatcaaatgggtttagcagctcaagaactagcagaatcacctttgttgacctcgctggtcctgacactgatgaacttggtgcagcaaagcattccacaaaggaagaaagacatcttaagaagtctctttcaaggcttgggaaactagttaacgttctttcagaaactccagagtcacataaagttgatttaccatatgagcaatcccgtttgacacatgtgctgaaggatacactaggtggcaactccagggttatatttttgtgttcgatttcttcagagcacagatgcagatctggaactttaagtacactaagatttggtgagcgagcaaagctaatgccaaacaaacctgtgataaatgagatatcagaagatgatgttaatggtttgagcgatcagatacgtcagttaaaggatgaactcataagaacaaagtctggagacaccacaacttgcaaggctaggtacttcagtgcacaaagtgcccgtgaaagtttgcatactttgcgagtgagcctcaaccgctctcttatctttcctcacatagaagttgattcagaggaagaaatggatgttgatgaagaagatgtgcaagaactgcgtgatcaaattagcaagattcactcttcatctgaagatacattggatgactttatggatgcagaaagtggagacgaaagcactccttgttctgtgggaagaagtgaagatgatcaagtaatcatagatgattttgaaggtccacaacaggaagagcaaaaagaagtatctaacaatacaaatgctaatgaagacctcggttctgacagaaaatctaatctatcaattattgcctccacacggttatcacctattcaggatccaacattgtgctcttctccaaagatccacaacaaggcaagaatgagcatcacttcactggggctatcaccaagcaagattagaatatcagacagcccaggatggcaacataactaaggaaattgcttccaagagagaaactgagcttgaagctttatgcgaagaacaaagagcaaagatccaggagctgagcagtttgattgaccaatataagaacaggtcagaagaactaactagtgaaggcaaggtttctgtctcactcagtgtgaatgagagggaggtacttcttgctgaaatccagagtctgagggagcaactcaaaaaccagactactgtatcaactactggtagccttcttgaccagttaaggaacggcagcacagaccaggagtatgaacttgacaaagaaaggcagaaatggatggagtctgagagcaagtggatttcacttaccgaagagttgagggtcgatctagaatcaaacaggatgcacgcagagaagaccgagatggagctctgcaacgagaagaagtgcacagcagagctagatgacgctcttcaacgagcgatgtacggccacgccaggatggttgagcattatgttgagctgcaggagctgtataatgatcttctcgagaagcaccgccgagtgatggaggcgatctctgaggtgaagagggcggctgccagagcaggcaggaagggctgtgggacggccttcgctgctgccctcgccgccgagctctccacggtgagaatcgaccgagaaaaggagagggctcagctgaaagaacaaaacagaaggctccgcattcagctgcgagacactgccgaagctgttcatgctgctggagaactgctcgtcagattgagagaaaccgaggaagcatctacactagaaaaggagaggactgccgcgttgttgcaagagaacgagaagctgaagaagcagctggagaagctgaggaagaagcacgagatggagctggagacgatgaaggtgcaccttgcggagagccggctgccggagtcggctttgggtgccttctaccaccacgagaacgagaggacgccggacgacgatctgtcctggcgggccgccttcgcttctgcgtacagtgactgaagttacctgactggggattgcttgggagttgagtctcgtcaactgagacaggttgacaattggggcatgagcatttctacgaccttgtttgattttaagtacatgactcgattggggcatggggcaaagtttttatgtatactgcttgtatgggaactgaatttgaacgagttttatgtagtctttcgagtatttttttggtcgatcccccagttcctgtttaccgtactgccaaagtgcagcctctggtcccacctttaactccttttttaaaaaaaaatataccaaa

SEQ ID NO: 35591 - DNA, 1564 bp, Zea Mays
cttctctgtttcctccatcttttggcccatctgcaccctctcggtcgccgcgcgctccgccatcgaagcagccaactccgaccgaaccatcaactgttgttgggcgcgttccacttccttgagccgagcgcaaaccgcctccagagtctccatcatccgcccccaactctcctgcgttcctcgatcgtgatccgccatggcgttcaggatgaagcgggtctggacggatggctttgcagcgggcgccgtgatgaagcagtccgaacgccgggaagacgactccgccctgcgctcaccggaagccgcgcttgccgttgaagaccccaccgccgaggaccttgaatccgataccactgtcacaacccagggacggtggaacgcaagccaccgtcgtgagctgttgccaggcggaagaacaacttccagatgcgtttcaacaggtatggtggaatactttctatatttcttttctgtccattctctagtatttgtccagtatttatagtgcaacactaggctaatacagcccactagaaatatggccacaataggcccaattcacagattacatcttcattacagttgattacccagtaatcaagtagcactcctgacaccgccctgcctctctcgctccaccgtctcatcagcttcatggaaggggggaggtctcgcttcgatttccattcagattttgtttgttgaatgtgttttccagttatgtgtcaaattgctgtgatcgtaggaaacgtgactgacgacaagagggtctacgaagtatctgcagtgaaggtggctgcgtgggcacggattctgagcgcgggtgacgagtgcctcgcctttgaccattgtccattgtccattgtcagggaaaccgtgaaggactttggctctgcgtttggtgtgccacataaccacacgggcgcaagggaaggaagcttgagaaggcaagggggaggaggaaaacctctgcttccacctcggaagagaagcaacgaaacaacgaagagatgaaagagaatagcatcaaagaggggtgactgggctgtggcaccgaggtaacacggctcggcgtcatagatcttggcgttgaggtgcgtccttcgctggcaacaacagactgacgtggcgtcgacgtggccgagctcaagtcatgattcatggcactgaggtccagtcaaaatcggcacctgggcatgcatgttacgacgttacgtatgtagcgagcatgcatttggacttttggagcctcgtcgttttcgtactctagccatgcacctactaatgttgtctttgttgcttcaaccccaaccggtatggatgatggatcgcttcctcagctccctctttttttttcctttttttacagcagctagctagcaaggccctttttgaagcaccatgatcattcagccggggacgccgcagatgctcacttgtaacctacacatggcgccaatgcaaggtagcagcaagtaaaaaaaggcccgagagtaggagcgagtggtggtagtaaaaagctagctggaccgagccgaggagacgtacgaaaactgaccgccca

SEQ ID NO: 35592 - DNA, 193 bp, Zea Mays
tcccagaaaaaactgtattagggaacaatgtttgtgaactatgtttgtatgtgtatttgtggtcccagaaattctgtttgtgaacagcaagaatttctgtttgtgaactgtatcagtgtgtttgtgaacacaaactgcattctgtttgtgaaccattcccagaaaatcagtctgttttcagtttgtgttccca

SEQ ID NO: 35593 - DNA, 1363 bp, Zea Mays
ccaccactccgttccatccctcgcctgccttcgcacgggtgcgccgcccgctcgacggccacgccacgccgcggcgcgccgctcagctgccccggcacccgcccttcctcgccgagctcgggatcgacgtctcccgcacctcctcgcgcccgttccgggctccgcatccggcccctccccgtccccaaccccattccgcagcaggcgaccagcacaacatcccgaatcccccacctcgcattcggctcgccgtagctcctcctccgcgtcccgccgcccccggcacggccactagctgggtatcaaaacattgggttgccaaacaagctaccttctcagattcagatcaatagcttctcaggtccaacaaggggaagggaacggtgctgataatgcaagtgctggccaaaaaaaatggcgctgtggagcatctgaaacgctgcttcccttggctcatatgaatgtcagtttaggccttaggatagagcaaagtagcataatctcaagcacaagtttactatgtctgggatggcatttgatgattcacctgcccaagtgaatgttgaaggagatgtttcagagaaaaaagtagaagttcaagaccagaatgaagtgggtgggatgccctcacgacaagaggaggaggcagcaattaagaaaaagtatgaaggaatattgcccagaaagactcctgcttatatctaagattcttagctaagggctggcatgatgcatctgtcaacaagatcaccagttttccacgctgttgaatcgcagcacaagtttactatgtctgggatggcatctgatgattcacctgcccaagtgaatgttgaaggagatgtttcggagaaaaaaagtagaagttcaagaccagaatgaagtgggtgggatgccctcaagacaagaggaggtatagcagacaaatacagaaaagggctggcctggttaaaaacggttcaggttagcaagcatcatggcccgtatccagaaggtagcttcacgtttgagagaaggtggcttcgaacgagacctgatcgtttccttcgtcctgggcgacttggctggctcttgctcaatgggagttgacaggacagatcacggctagccagtcaggttcgttgtgatgagatccagaagcaagcagcatggctcgatgtgatgagctgtacaagaggcgatgatgcgttatcatctcaggcagatttatatcggaggagatgaatcgcgttcgcgtggctcttctctcggttctgttttactgatgtaaattttagcttatttttaactagaggaacgatgtaagtttaaccagaccaataaaacaaccgtgtatgctctgcttccaatccagctattagct

SEQ ID NO: 35594 - DNA, 2184 bp, Zea Mays
caggcaggcagatcaacaagtcgcagcgcagtcaagcaaggcacgtcggtccaagagcacgacgagcagacgacgctgccggcccggccgtgctgctcctctgagtccgagatctgaaggcgcggcaggaaggaaacgggcgggcgagaggatccagcagccctcccccacgcgcgcgcgacggttagcgcgtcccagatctcggtgcggcgcctcccgcccggccctgccggcgagagcgcggcccgatgaggcggcggccgttcctggaccagcggcggccttcgttcaagcgccggtggcagcagcgcccgtggtgggtgcgcctcgcgctttccctcctcctcgccctcgcatgcgtcctcctcctcgccgtcctcctcggctcccccgaccccggcgcctcgccgtccacctccgccgcgtcctccggatctgagaccacctcctcacctctcctccgtcagagaacttacctggagggaatcacggatgcgctcaacatgactgacgaaatgctgagcgcccgctcgttctcgaggcagctcatggaccagatttatctagccaaaacatatgtcgtcgttgccaaggaggccaacaacctgcagtttgtggcggagcttagtgcccaggtacggcgggcgcagagcatccttgcgcatgctgcagcctatgggggcacggtgatggagcaggaagcagagaaggcgatcagggatatgtcggtgctgctcttccaggcgcagcagcttcggtacgacagcagtatcacaatcatgaagttgaaaggccagattcagtccctagaggagaagtcgaaagttgaggtggagaaaagcacaaaatatggccagattgctgctgaggacctcccaaagggactttattgccttggtgtccggttaaccatggaatggtttaagagtcccgagcttcagaggaagttttcggataggagcccagcagtgcagagcaatctgagggataacagcctctatcatttttgtgtcttctcagacaacatccttgctgtttcagttgttgttaattctacggctataaactcgaggcaccctgacaaggttgtttttcacttagtgactgatgagttgaactatgctccgatgaaggcatggtttggcatgaatgactacagaggggtcactgtggagatacaaaaggtggaggactttacctggctcaatgcatcgtatgttcccgttcttaaacagctacagaatgctgctacacagaagttctacttctctggcagtggtagtcgtggaacaccaattaaattcaggaacccaaagtacttatcaatgcttaaccacttgaggttttatattccagaaatatatcctgaattgcagaaggtggtatttcttgatgatgatatcgttgttcagaaggacctatcagaattgtttactatcaacctcaatggcaatgtgatgggtgctgtagagacttgcatggagacattccacagatttcataagtatcttaaccattcccatcctctaatccgtgctcattttgaccctgatgcttgcggctgggcatttggtatgaacgtgcttgatctggttgaatggaggaacaagaatgtgacaggcatatatcattattggcaggagcgcaatgctgatcatactctatggaagcttgggtctttaccacctggacttcttgctttctatggcttggttgaagcattggatcccaaatggcatgtcttgggacttggctacacaaatgtggatcttgctactatcaaggaaggtgcagtactgcactacaatggaaatatgaagccatggctcaaaatcggaatggagaagtacaagagcttttgggataactatgtggactattcacaccctttgattcagcagtgcttcatgcgttgattgatgtgtatcaacattagaatttttgtaagcttcatggtagatatgttccgagcacatgctccaactgccacacggaaacattgtagttaaatcagttggcttttctctcaagttacaatctctgacaaaacatcagtggatgtctatagcatctgtagttgatggagcacaacaattgcatatctctagccacaggtacagaaccattggtgttttcagatttgtcaagtaccacaaggttagaagttgcattatcgtttctggc

SEQ ID NO: 35595 - DNA, 2236 bp, Zea Mays
gattataataatccgtatcttccaatcaattattctgccatggatggtacattacagcctgctgttggagctgacggaaggcaagtggaggctcaaggcaatgttcttcttgcatcaattgagaatatgcaatatgctgttactgtagatgttcttcatactgtgttctcatcatttggttcagtccaaaaaattgctatttttgagaagaatggggggacacaagctttgattcagtaccctggatatcactacgcacgggcgcctctagagctctttggtggatatgtccaaaccattttatgtgttggagaagcttttcttgaattggtgctatctctaacttatcatgtatatcatcattccgtacttgaccccttcttgtatggccgcaaatccattgtaacattcgtattttcacaacacttatctgttgaacgtggcatctttttttgtaggcctacattctgcatcatacaacataataggtttaaccatcattctataaaacttgcctttcagcttttgtggtatcctcttgtcacaaaatgtcagatgtttgccaacacttcatccaccatgctttgattctatggctaacatcttcatcaatatcttcatcactaagtagcattgatcctaaataccgaaagctatccttcttggacactaattaatttccatctaatatccccttcctcatgtgtagtagtgacaaagtcacatctagtgctaccgagtctaaaacctttggactctagagtctcctgccataactccagttttctatttactcctgtccgactttcatcaactagcactacattgtcttcaaaaagcatacatcaagtgatacctccttgtatgccccttgtgacttcgttccttatcatcttgggacttggttgatttggatccaccataataggtgtgtttttgacaattggtctcctagcctgcctctaatcctcatgcaggttgatgaagggaggagattgtgggaggctgctggtgccaagggattatcctccctggcagcccctcttcctgatacgtgagggctggaggcttcttagtctttagtggtgtctgtgttcctatggaccggtttatgtatgcctatttttggcctccataaggagtcctttgtttgtttatatttttggtcttcttttgactgtgtatcctctcttcttatttataaaatggtgcagttctcctgcgtattcgagaaaaaaaccccctcttccatcaagttgaaaatatgtatctacagctgctgtagcgaaggaatcattggaagggcattgcatctacgatggtggctactgcacatggtgacaagagcagagactatacaattccagctggcgtaatccaaggggtgccacctggtgtacaagctacatcctctgggtggcaaggtaacgttcaagcagctggggcatatgctgccccacccggtgccccttcgcaaagccacggtgccaatggacatgtgcagaactggaatcccggcaactcagtctatcccccagccccaggaccaggaatatatccaggccagatgtactcatctccctcacagtatgcagcgtcagggggcttccctaataccccatccactgctccgccacactatgcagcatcagggggcttccctaacaccccactcccagctcttcctggtgctcctacacaacagttgcacgcttcgcagcagatgctgcctcagcatggaaatcagtcgggaggcgcatccggaactagccaaccggcgccaccagcatcatactaccgttgagttgaaatcttcttttgctattgtacttaacctgttttgtcactgagtttgttattcatcatctaaaactgcaacactgttgtccgtagctgtgtttagatgatgttgggggagaacaacaacatagcaacatgattatattggtggttcttcctctcctaagattgggaaaggagaagatattgcgagtgtttcatattggtggagtttgaaacattgttgctggagatagttttacataagcaaacataatcttcagttataaaggaatataagagccattgctattcatgaacataagcttcagtgtcatcattgtatattcgggatctctctgatggcacgaatacaatagcaagcgcagactcaaatgattgatcctgccgtctatttataggatgtagcatttatataatagcaagcacagtttta

SEQ ID NO: 35596 - DNA, 306 bp, Zea Mays
cctcagatgccggaaatggattgtgcggagcaaccgccatgccatcgacatctattccgctcggacctcccagccccgccgctgagcaaggccccacacaccgcatctgatcagcgaatccccagtcctggtgagtcagggaggcggaactgaggcgagcgagaaattgcggcacgaggaacacgatgctgctccctagcactttgggtcgtatccgcataacttataagaaaagttctccgacatacctcactggtgattgcgggagctcggaacctcgagtggtctcaatcccatcctttgtga

SEQ ID NO: 35597 - DNA, 2093 bp, Zea Mays
tcgtcgtcttcggttcgtctcttctgttgctgggctcgtcgcgagggtagcagaggccagatgagggacagagcaagcgagagaagctgaagaaacaatttgttttttttctttcttatcgaaacagcacagaccagtgaaagagggagcgaattagcgaaaagaagaagacaatataaaaaataaataaataaataactacaccgaatgcagcgagcgaggtggaggtgggggaaaaagggcgaggtgacaccgtgacagagagaaggcgagggagggatcacgaggtgtgcttcctcctccgcccaatcctgcccaaccaaatccgccagcgccgcctcctttacactcccacctctgtcccggagcaaaaaaaggagggagaggctcgcttcttggatcgcggggtcacgggacgcgcgccgcgggccggtacgctgctgctggcggactgctcgacccttgcctaccagctgctgcctgctgctgcttccttggctggcgccggcgagagacggaggcgaggcgaggcgaggcgacgacgatggaccgggcggcgctcaccgtgggcccggggatggacatgcccataatgcacgacggcgaccgctacgagctcgtccgcgacatcggctccggcaacttcggcgtcgcgcgcctcatgcgcaaccgcgccgacggccagctcgtcgccgtcaagtacatcgagcgaggcgagaagattgacgagaacgtgcagcgggagatcatcaaccaccgctccctgcgccaccccaacatcatccgcttcaaggaggtcatcctcaccccgacgcacctcgccatcgtcatggagtacgcctccggcggggagctcttcgagcgcatctgcaacgctggcaggttcagcgaggacgaggcgcgtttctttttccagcaactcatatcaggggtcagctactgccattccatgtatgccatcgcgacttgaagctagagaacaccctgttggacgggagcaccgcgcctcgcctcaagatatgtgattttggctactcaaagtcatcagttctacactcgcagccgaaatctacagtgggaactcctgcatacattgctcctgaggttcttctgaagaaggaatacgatggaaaggtcgctgatgtgtggtcatgtggagtaacgctgtacgtgatgctggtcggtgcatatccatttgaggacccagatgagcctaagaatttcaggaagacaattcagagaatattgggtgtgcagtactcaattccagactatgtccacatatctccagagtgccaaaatcttgtctctaggattttcgtcgccgacccagccaccaggatcaccatccctgagataaggaaccatccatggttcttgaagaacctgccagctgacctaatggatgacagcacgatgagcaagcagtacgaggagcctgagcaaccgatgcagagcatggatgagatcatgcagatcctggctgaggcgaccattccagcagctggtccccatggactcaatcagttcctgaacgacggccttgacctcgacgatgacatggacgacctggactcagataccgatcttgacctggaaagcagtggggaaatcgtgtatgctatttgacagcagcgaggcaatgcgtatcatcagtcgtgctcagatcgtttgttgcgccgcaggttaccgagataattagagagacaggggggaggtatctgctggagatgctgctcgtgtctgatgccgtgatgcccccctttttttcatcctgttatgtttggctgttgtttggttgtggtgcacctccagtgttttacaacagtttggcccttcggaattggttgtgctagaacctcgtccatctgagaagaccctttgtttttgcatccccagctaagagagtgaagtacttgtataattatactgtttgtgtcatatgtatttggtgtaggaaaataaagaaactccattgcccgttcttgttccttccgtgtctcacgaattttttcagaaccctctcaattttagtgtctttttggctgctgtatctcacggctgaatcaccaaggcacaatattttaaacgac

SEQ ID NO: 35598 - DNA, 1739 bp, Zea Mays
gagcccaacaacccgccggcccttctcctcctctccggtttccgttttgattcctcccgattctctctcgcgtagtcgcgtaaatttcccagcccgaaaatggccatagccttgaggcactagtaggcacagtagcacccaaccgcggcccgctccagcagccccaccccatcgacgccgtcggcgagggcacccagtcctaggtatggcggcggtggcggagggatcggcgtctgctgcggcgaaggaggtggagtaccaggcgggcgtgcagaagcttgtggacctgctctccaatcttaacccggccgccaaggagttcgttccttcctcggctccggccgcggctgcgtcgccgcccaagaaagcgttgtcggcggatgcgccggtcttcgattaccgctccaccgcaggcggcaacggggccaccgacgatcccttttacgttgggtttgggaaccagcagcgcaagagagggaatggatacatcaaccaaggaaggaggaggacaaatgataggttgaggcgtgcagacagagaggacagcgttaggcgaactgtttatgtctctgaacttgatcatactgtgacagaggagagacttgctgatatctttgctacctgtgggcatgttgttgattgcagaatttgtggtgatccccactcagttcttaggtttgcatttattgagttctctgatgaagagggtgcaagaactgcacttaacctcggaggcacaatttttggtttctaccctgttagagttttgccttcaaagacagctatcttacccgttaatccaaagtttcttcccaggacggacgatgagaaggaaatggtcatgcgaactgtctattgtacaaacatagataagatggttactcaattagatgtaaagaaattctttgaagaactttgcggtgaggtctctcggttgagacttctaggagacaatgtacattccacaaggattgcttttgttgagtttgttcatgctgagggtgccatcatggctctgaattgcagcgggatgattttgggaactctgcctgtcagggtgagtccttctaagactccggtgaagccacgtgtaaatcgaatgggatctaactgactctgcctaagctcaaccggaaggcatggccataagctgaaggcttccgcggtcctgtgcatcatgatgcatctgcttacattcttacaaacactctgtttgtacccttttgcaaacctgttggaagggaactggttaggtcaggcccttttgccttgcatttcagacatgatggaaccattgagaatgactattcggcaatcaaccatcaagtaacttctgtcaatgctcctactgttaacgccttagatgtttggctgccggtttggattcagctgcagctgcaaatctgtactgttgctacagcatttgctttcttatgtaaccagccggcagcagcagctgcttctgcacaagcaagaatccaaacatgattgcaacgccgagttccctgtcctcgtctacgaaggaaaaatcccaaatgacaatttatgtggaaattctcaattggctaccaccacttgtctgacattgtagtcgttaaagtctgtaattttgctatgcatttatacgtctttaggggtctgattctattattctaaaatcagtatttcacgtttacgattctaagattaggatgttaactaaatgccgatcttgacgaccttattttccaagtgaaaat

SEQ ID NO: 35599 - DNA, 877 bp, Zea Mays
agttgaagctgaaattactgcaaataattcgatacaggacttggatgggattctaagctaaggactgtgattgcaagtgatgaatactggaagaaaaatacaaaggtatgccgtcacaaaagccttttgcattgcctttgtcatgaccttcttctctgtattcgacgttcctgtcttttggccaatacttctctgttattggattgtgctttttgtcctgacaatgaagcgacaaattgtgcatatgatcaagtacaagtatgtcccattcagcataggaaagcagaggtatggcggaaagaaaggccctgccgccagtgcatctaaggagtaaagacggagggagggtgtgggacctcgagagcagtgcatgtgctatctttgaggcatcctgctggcatggtggtattttgagtaccagggctactgatagtgaacgcacaccatattcgctagtggagagtggagattgcagagaagctgaccagacttttgcattggttgatgatttctgttttacgtgtcggtagtttatgtacaatggcatggagcatagctagtagatcaaatttccggatcctctgttgtactgtccctttgtggacaagttgtggacctgttggatccttgcaaacgcattgtgatccaggacctagaggacaaaatcaaactgtccagcgattgttacttggaccttccaacattgactgcatactagtaccagcgattcgtagctgctactgcctttctcatggttaccggcgaacgtttcagccattgtttatttgcatctagcaggcagttgtaagggagttattcgctattatattactcgtttgaagtggcttcttcgtaatagtattaacaactaaggcta

SEQ ID NO: 35600 - DNA, 2144 bp, Zea Mays
aactgggaaagatgctcctccccactctccgtcctgctccggcaagaggcggcacaccgcgcaaggatgccacctagggctgctccggcgctgcgggtgctcccgctcgcgctcgcagcggccatcttctcggggctcaccgccatcctcttctacctctccggcgtctcctcctcacatagcggctctcggctctcggaggcggacctggcggcgctcgccgcgctgcggggtggcttcagcaagtgcgtggtatggtcttgctcgtatgcctccctctgggctgattacggttcgatttgccttactggtgttcctgctcatctcgtgccgcattgtcgttttcgcctctgggtatgggggcactacttcgtcacaaccacgagctgtggcggattgggaacgtggttgcctcgagattcttggttccgtgcgccaattgttccgagtccgaggttcactgtttagtgtaggaggtagcactgtgacagtgaggtctttgttctggcgtgaaataagatttcatggattgtagcgtatctgtagttgaattggatgacagtggctgcatagatttgcagtgtcagcagcttcaggatcttctttgctgtcttggttcagacagacaaacctcacttgcttaaaagtaactgcaggatgcaaatgggctaggactgaaagccgtgaccggggaggactactgtcgtgttgtgatacaatacccaagtgacacagtttctaagtggagagatccaatcacccataaggctgaaagtctgtcgtttgagttcaatctgtgtgaagctgtggcctcatgggagcacgtccggaacagtacaacagtactcacaaaggagtacattgatgctttgccaaatggctgggaggaatatgcatggagaagaatcaacaaaggaatccttctgaataagtgccagaacagaagcctctgcatggaaaagctctcactagttctacctgagacatcaccatacgttcctcgccactttggtcgatgtgctgttgttgggaactcaggtgatcttctcaaaactaaatttggggatgaaattgattcttatgatgctgtcttcagagaaaatggtgcacccacccagaattacactgaatatgttggtagaaagagtacatttcgccttctgaatagaggatccgcaaaggcactagataaagttgttgagttagatgaaacaaaaaaagaggcactgatcgttaagacgacaatacatgatatcatgaaccaaatgattcgggaacttccaataaccaatccagtatacctcatgctaggcacatcatttggttcctcagctaaaggaaccgggcttaaagctcttgaatttgccctctccatctgtgacagtgttgatatgtatggcttcaccgtagacccaggttacaaggaatggacaaggtacttctcagagctggtgaaaatccattcaccgatgcgaggagatcctggcaggacagtgaggtggctgcctaccaaggctaccatcgaggctgctagagttgcttccgagaagttgttgaagagacctggtgctggaagtgatgatcctctggggacttgcaccatgataaagaagcgcaggaaagggaaggcgccaaacagatctggtctacgagatgctgccatgaagcacctcgaggacatgaaaggtgccgctaggtatcccttggagcggaatgcagggggtggttacctctgcatgatcaatgatagataggaccgcggctgattatggcatcagttgccccctcccccctcccctccacttgagtcgaagaaaggaatgcagtttgagggaacgaaaaggccgattctttgatttatgcagctggtgtacaacgtttgagtgtagagaaagttaggtgtaatgttttgagtgtagagaaagttatatgttgtggatggatacaaatggtcaaattgtagcacttttggtgcttataatactaatttccgctcgctctgttgggccacgaaaattagaccaactaggctgatcatagttgacagaaaatagcagtgctaatttttatgggctatttatagctgatggaaattagtctagctaatgggccgttgatggaaatttgataatttctgtgcatag

SEQ ID NO: 35601 - DNA, 1274 bp, Zea Mays
ttgactagcaatgagggagcaaatccttggaaggctttgatgggaggaggtcacctgtatagtcagacagaattaactgaagttgctgctgagaaagtgctgaatgcggactcatttgataacggccatgtggtgttactttctaacacttgtgcatcggctggaaagtatagtgatgctgaatctatccgatcctgttattcgaaacaaacacgaaagaaaattctagggcttagttccattgagattatgctatccagcacaagataggcactatatttctcacaatggaaggggaaagatgcatgagacaattgccatacactatctgtctatctcaaagtattggagatctgttttaggcatgaaagatggaattttactttgcagactgcaaggttcactgattaaaagagaaacctcaagaatgaggtttcagatagcacatttgatgcattgggaaattgcatcagtctttatattgtggtagactaagtttctagtaattcaggagccttatatcaattagaataatgtatgacaaaaactctggaaggtcaagaggctttggatttgttcatttctcaaatgataatgaagctaagtgtgccaaggatgctatggatgggaagggcggccattgcgaataagttttgcccttggaagagttcgtggcgcatcagttattgttcctcgactttctacggtgaaatgagcagaagcattggtcgtggcatactggcatggaccgatggacatatcaggagggttgcgaagtacccatataggctagtgtttttaatcttgcaaggtagggatcttagtcgaaggcgcctggcaatggcgtgaagggcagcgtggcaaagaagatgatggctatgtttgtcgccccaatttgctcgatgttgaagcatttcacgaggtgcattgtagctttgcagccacctcgtgtgaggccgccttttcgaatgtctcgtttgatgtgtgtgagtgagagagagagactcttcttgaattgattcatgtcaaatgtatccagtaggggcttttcgccccctcctgtttcataaaaaaaaatcatgtaaactgtaaatttgtggtggcaaccgtcactacgcactagtacaacgcagttaaactgtcttcgattcttcatgtcgaagtgaagcatagctacatccgatttttaggatgcagggataacctcctttctctttctggcggcacagcaaggggcggctgcctgcctttgttgcgtagtcgtgtcgtctagg

SEQ ID NO: 35602 - DNA, 4748 bp, Zea Mays
cgctccggcctgcccgcccccaccagtacagtaccacccgcgccccgtacggcctccccgtccgtccccgtcgtgggggtggggccggcgccggcggcaccaccacccaccgcacccgtccgggcccgcccccgtgcccggtcgctaattacgcgcacctgccatccggccgtccacgcacacggcgcacgccaccaggcccccgtccgtcgccgcgccaggacgcttacccacgcgggaggtcctcttcctcgcccgctttgcgctgctgccttctctccgctcgattccccgctgcctctctctctagtctctctacacacgccttcctcccagcgccgcaccacaccatcagggcgggcagcacattcctctctctctcccactcccacttcttcatcctccgccgattccagcactacgcaggtgggcagggaagggatattttctgctctggccctatttctggacggctggggaggcggcgaggtgacgtggactggcgccgaagacttgcgtgagagatccctgatcggttgccgcggctgagttgggaggcccggagaccttgaggagcgatgcagagggaggtggggccgcaggtggcccctccgctcttccttcaccagatccagccgatgcctccccacgccgccgccgccgcgaagaagcgcggccacccgtggcccgcggccggcgccgcggaggccggcgctgggaactggaaccccaggctgtgggactgggacagccgcgcgctcaccgccaggccgtcctccgatgcgctccgcctcgccggtggccagccccagccggctgctgaggcgcagcgccagggggccggcgcgctgaacctccagctcggcctgcaggaggactccacgaccccgatggacgccagcccgacggctcccgcggcggcggcggcggcgtccccgccagcttcggctgcggcggggcaggagccggtcgttaggccgagcaagcgggtgcggtctggatcgccggggggcgctgggggagggccgggcggcggtgggactgccaacggaggcgcgagctacccgatgtgccaggtggatgactgtcgagcggatctgaccagcgccaaggattaccaccggaggcacaaggtctgcgagacccacagcaagaccaccaaggcggtcgtcggcaaccaggctcagcgcttctgccagcagtgtagtagatttcacccactcgcggagtttgatgagggtaagaggagctgccggcggaggcttgctggccacaaccggcggagaagaaaatcccagccaacagatgttgcttcacagttgctgctacctgtaaaccaagaaaatgcagcaaatagaacacaagatattgtcaatctaattacagtgattgcgcgcttgcaaggctctaacgttggtaaagtgcctagcatccctcccataccagataaacagaatctggtggaaattataagcaaaataaattcattgaacaacgcaacctctccggcaaagtctccttcgccagaagtcgtcgttttgaatacttcacaagagcaacgagagcaaggacatgattctgtagacaagacgaccaacggaatcgacaagcaaactgtaccatcaaccatggatttgctaggagttttttcaactggcttcgcaacttcaacacctgtgacaaatacatctcagtcccaagggagcagcgacagcagtggtaataacaagagcaagagccattcaacggagccagcaactgttgtaaattcacacgatatatcaacccaagattttcctgctgctggtttcatgagaagcaacagcacacaagaaagccgacctcatatatacaagcagacagaacacgagacaagaccatacttgtcactacagctgtttggcagcagtgaggaggatattccacctaagatggactcattgaataagtacttatcttctgagagtagtaatcctctggatgagagatctccttcatcctctccgcccataactcgcaagtttttccccatacattcggttgatgaagaggttcgacaccctcatattacagattttggggaagatgctacaatgggtgaagttagcacaagtcaggcatggtgtgcaccaccacttgatctcttcaaggatttagagcgtcccctcgagaatggatctccaccaaatcctggttaccagtcctgctatgtttcaacatcttgttcagaccattcaccttcaacctcgaactccgatggacaggaccggactggtaggattatcttcaaactatttggcaaggaacctagtacaatacctgggaaccttcgtgacgatatagtaaattggctcaaacacagtcctactgaaatggagggttacatccgccccggttgccttgtactatccatgtacctatcaatgccggctattgcatgggatgagcttgaagaaaatctcctccagagagtcaactcattagttcaaagttctgatttggatttctggagaaaaggaaggtttttagttcgaaccggctccaagttggtatcttataaagcgggaatgacccgtttatcgaaatcgtggagaacatggaatactcctgaattgacctttgtgtcaccaattgctgttgttggtggacagaagatctccctcattcttaaaggccgcaatctatctattcctggcacacagatccattgtacaagtacaggaaagtacatatccaaagaagttctgtgctcagcatatccaggtaccatatatgatgattcaggtgtggagacttttgacttgccaggacaaccagattttattcttgggcgctgctttattgaggtggaaaacaggttcaggggtaacagcttccctgttattgttgcaagttcaagtgtttgccaggagttgagaagtctagaagtggagcttgaggattcacaggttcttgatgtttcttcggatggtcagattcatgactgtaggcagtcaaaaacgagggttcaagttctgcacttccttaatgaactcggctggctctttcagagggcttctgcctgtacattgtccaccagacctgatgtgtctgatttggatttgactcagttttcaatcacacggttcaaatatcttttactgttctctagcgagcgtgactggtgctctcttactaaaacacttctggatattcttgccaagagaagcttggtcagcgaggaattatcaaaggaaactatggagatgctggctgagattcaccttctgaacagagcagtaaaaagaaagagtaggagaatggtgcatttgcttgtacagtttgttgtactatgccttgataattccaaggtttaccccttcctcccaaactttcctggccctggtggtttaactccgttgcatcttgctgcatccattgagaatgcagaggatatagttgacgccttgacagatgatcctcaacaggttggtttgacctgttggcagtcagctttagacgaagatggccaatctcctgaaacatatgccaagttgaggaatcataattcatataatgagcttgtagcacaaaagctggtggacatgaagaacagccaggttactataacggtcaatggcgatgaaattcatatggatcagttagggaatgttgatgaccgtaaaaaatctggggttcaggcattgcaaataagatcttgctcccagtgtgccattttggagtctggtgtgttaaggcagcctatgcggtcaaggggactgcttgctcggccttatattcattcaatgcttgctatagcagcagtctgcgtatgcgtctgtgtattcatgcgagctttgctgcggatcaattctggaaaatccttcaagtgggagaggctggattacggtacaatataattgtggggacacacctgagccttgtggtattattaagttaacaagcagttgttatggagctattttggagccttgaagggtatggagattgtttcatgcttcctcgaaactcgcccatccgtatggctgagtggaataatgtaatatttttgctggacaattcctttacttcctgtgaaatagaagtgttaataggtgagcagccggagatgttaggggggtggcaaaacttggtaccaaatgtggagcttgagcagagttggaacatgtcatggcaagggccgtagcaactgcgctcccacaacatgatatgcatgcaatgcacaaaatgtcgatatggatgcaatccgcaagatggatgtaatcacagttcggggagaatgagcaatacgctagcatgaatgtaccctatatcgactttagatagtagcaggggtaaatgaaaagaggctttgcatatgtctgtgtcgaccattttgacttgtagctacatagaaatgaggcagatctgaagtgtacttggatctttcgttgttgttgttgttgttgacatccaccatatgttctcattctgatgaagcttagttacacctttgtcctatattgttctcttgatacctgccggctgctatcattatcttggttcactcgcactttccttctgacccaagttttcactgatcaaaatcctattgtatgacttgtttggaggctgaaattcatgttcgtttaagaactttgagcgcgttcggctgccctgcacggagcactgttgcagctgcaaatcactgttgcagctgcaatccctagagagaaaatactgtagaagccgcagccgcagtcggatta

SEQ ID NO: 35603 - DNA, 1598 bp, Zea Mays
ttcatacggagttacggaccataccgtttacaccgagggttctctctttgtctgttcactgttctactgggacgaccccaaatccccaaatcgaaaggggccgtccggctcagggtttctcgacggctccttgccctctccgccatggacgcacagcgagccctccttgacgagctcatgggcacagctcgcaacctaacggaggaggagaagaaggggcacaaagagctgaagtgggacgatccggacgtgtgcggcccttacatggttcggttctgtcctcacgaccttttcgtcaacaccaagagcaatatcgggccgtgctcgaggatccacgatccgaagctcaaggaaagctttgagaagtctcctaggcacgatacttatatgcaaaggtttgaggcagagcttgcacaacaatgtgagaaattggtaatggacttagatagaaagataaggcgtggtcgagaaaggctggctcacgattctgctgtgccaatgccaatccctggaaaattagctgagctgctttcagtgcgaaaagaacaggtgaagaagctgctggagcaaattgaggagcttggtgaggctggtaaagtggatgaagctgaggcacttatgagaagggttgacattttaaacgctgagaagacagctttagctaacgaagcagacaacaaagtagctatgcttgagaagaagatggaactttgtgaaacatgtggatcattcttagttgctgatgatgctcttgagagaacgcagtcccatgtgactgggaaacaacacattggttatggcatggttagggatttcctggcagaatacaaggcagcaaaagagaagacaaaagaggaagagcggcttgcaagggagcagaaagcagaggagcatcggaaacagaggggaaaagagtatgatagtgggggcagggatagagataccagaagggagaggtctggggagcgtgactttgaccgtgatcgtcagtatgagcgaagcagaggaagagatagggtttatgattacagggacagaggatcagaacaccgaagcaatcgctacagaaatgggagggattctgaaagaggtggacacagatacaggagtggtggtatgacaaatgaccgagggagaatgaggagcagatcacgttctccaaccaggcatggctatggaagatctagaagtccagatcattagctgcctagctggacatttagatagttttattcacagttgggactcatgagctctgttggaaccctacagtctccctattttgcatggggaaaaattcccagttaaatttagtaaggccggtactggatttcatatatggatgatgatgtttacagcttatagcagtgtacaagagatcaagctttggtttgtagacaatggtgccctggctagaaccgcgaggattgggcctatttcctgactgtctagttattgtctcagaagtctggtttagataaggttctgtttccgcggcaaactattagatacctttgcagttgcggagttctgtaattgatgtattatttatgcagatagtgtagtctaactatgcaaactaatatatgatctgtttc

SEQ ID NO: 35604 - DNA, 3863 bp, Zea Mays
aaatctgtttgggcgactgtggaattcagaaatcaggaggcgactgcgacatacgacgaagccggcacacgcagacgcaccggcctcctcttctcgctcgtctgcttctcttttgctcgttttaaccctcgctcgcgtcgcctcctcctccgccgcacccggctgctgcctctgagcctgcccccgccacctcggcgccctggtcgccgccggagcgccgcctcaacgtctcgatcccggtacttcctcccccgaatctcaccgagcccgccagatccgcccgcgccggcaggatccgatcgggaaacacgcggatcacgcgcacagaaagctcctgtctcatcgcgcttccgccgccgctcgattccgcaggttctacgtgatgcagccgccgatgggtaacgagaggccgccgcctcccggtcgcactgtctcagccttcgtgcccggcgccgctgtcccgcctccaccgtttgccgccggtggcccgttcgccccgccgccgtggcagggagtgccgcctcctcagtctggtgctgcggcgcctcatttcggggctgtgccacccgccgcaatgggtgggttcaggggtccaccgtcgtcacagggcccctttggtgctggcacaccgccccagcgccctttcacttccgcgccaccgcctcagagccctttcacctccgcgccaccgtctcagggcccctttgcctccgctccaccgtcgcaggtcccttttgcctccgctcaaccgtctcagagtccttttacgtctcctccacagtctcagggcccattcgctgctggaccgccgcctacgggcccttttgctgctacaccagcaccttttcgctctccgctgtcatcccttgcgcagccacaatctccaacgcaaggcgctttgcctccaccaccaacatatgcgaggccgctgtcacaaccactacaggcgcaagggtattaccctggtgcaccaccttcgaaccctcaatttccgatgtcaaggccagcatttcaacaacctgtgcagaatatgccacctcctccaatggggtcagctgccacatttggtaaccaggcagcttatcaaagtggcgggcctccagttggaggcacacttcagagtttagtggaggacttccagtcgttgtcactgagttctgtgcctgggtcacttgatcctggtgttgatgtaaaagggctgccaaggccattggatggtgatgaggagccagttaagcttatagagtcatacccatttaattgccacccaaggtacttcaggctgacaacccatgcgattccggcatctcagtcattggtctccaggtggcatttgcctcttggagctgtggtacatcctcttgcagaatcacctgacggggaggaagtgccagttatcaactttgggtccgccggtgtcattcgctgtcgaagatgtaggacgtatataaatccttatgcaacatttgcagatgctggaaggaaatggcgctgcaatctttgtacattgctcaatgacgttcctggagagtacttttgtgctcttgatgctagtggcaggaggtacgatactgatcaaagacctgaactctctaagggaactgtagagtttgttgctccaacagaatatatggtgcggccaccgatgccgccgtcctatttctttcttattgacgtgtcagtgtctgcagttcgaagcggattgcttgagattgttgcaaagaccataaaatcatgcctcgatgaacttccaggctttccgcgaacacagattggattcttaacatttgacagtaccttgcattttcataacttcaagtcttctttgtcacaacctcaaatgatggtggttgctgatttggatgatgtttttctgccattgcctgatgacctcttggttaatttggtcgactcaagacatgttgtggaatcatttcttgatagcttgccaaatatgttccatgacaatgtaaatgtggagtctgctcttggtccagcacttaaagcagctttcatggttatgagtcaaattggggggaagttgcttgtcttccagagtactttgccatctcttggtattggtcgtttgagacttcgaggagatgatgttcgtgcgtatggaacagacaaggagcatactctgagggtacctgaagatcccttctacaaacagatggctgctgaattcacaaaaaatcagatcgcagtggacatattttctttcagtgagaagtactctgatatagcttctttgggtgtaccattatccatcattccaggcacctacacatgaagacaaacttaaacttgagcttagtagggaccttacacgagagactgcctgggaatctgttatgcgtatcagatgtggaaaaggagtacggttcacaacctatcatggtcatttcatgctacgatccacagacctgttagcccttccagctgttgactctgataaagcttttgcaatgcaattgtcgctagaggagacattaatgaccacccaaactgtatacttccaagtggcattgctatacacatcatcctctggtgaaaggcgtatcagggtccacacagcagctgcacctgtggtcacagatcttagtgaaatgtaccgtcaagcagatacgggtgccattgtgtcattgttgggtagaattgcggttgaaaattcactgtctgataagctggacagtgtccggcagcagttacagttaaagcttgtcagaagtttgaaggaataccgcaatttatatgttgtacaacaccggataggcgggagactgatttttcctgaatccctaaagtttttgccattatacatcctggctatctgcaaaactcttgctcttcgtggaggttatgccgatgtttctcttgatgaacgatgtgctgctggttttagcatgatgatattgcctgtaaaaaggctgctcaattttatctatccttctttgtacagagtcgatgaagtattaacaatggaaccaaataagattgatggttggttgaaacgcttgccattaacgtttcagtgtttagatacgggaggtttgtacctccttgatgatggcttcactttcttagtgtggttaggaaggatgctcccacctgaacttgtgaacaacattcttggagtgagcttggcaaacttccctgacctatctaagattctattgagagagtgtgacaatgagttatcaagaaatttcatgaaaatactaagatacctgcgggagaaggatccttcttatcaccagctatcccttgtggtgcgacagggtgaacagccaagagaaagctatctgcttctatctaaccttgttgaggaccagatggctggaacaagtagttacgttgattggatacagcaaattcaccgtcaaacacaaagctaatgacgaaataccaacaggaagctatgcctgaaatttttgcctactgtaagctgctgcagggcgtagattcagttgctgccagttccaagtcaatctcgcaaccccttggagatcttattcacaacccagctgtccagtatgccaccatagtgggaatacagctgttgtattggaataagtaggcagcaaatgcggtgggtatattatacaactggggtcgtgtagtgtggcctgtgcgttctttcctgatgaattctagtcgggttcagttacatggcatttgggttataaaaagttcatcgtgtaaactaatttttggctattttagtctgtttgtaatgggagatctcatttaatttaatgtcattccgttattaaagttacttccgtatactgaatttttagaccgcatgatccttcatttgtggtttatataaccagtaaaacttgtagttttggtgaata

SEQ ID NO: 35605 - DNA, 2031 bp, Zea Mays
atgggctgctttccccttgcagtggcttcagtggtaggcgatggagtctcaacattattctggagagagagttggctgcaagaccgaaacttggagcaacttgcaactagcctttttggtagggttccagcgaggattaagaacaagaggacactgtgggatgtgttggcagtattcaaccttcaaccatggactgcagatcgacacatttggaggttatccaacactggacagtactccacaaagttagccaatgaagctctgttcaggggggctatccactttggagacaaacatgctacataccctcataagaatatgaatattgaggaggaacccacaaacaaagaagatcatatattgaatgtgtcacatacagaaggtcatgaaaaccttttgatttcgccaggagacaaacatggtacatcccttcgtgaggatgtgaatattgaggaggaacccacaatcaaagaagatcatatattgaatgtgtcacatatagacggtcataaaaaccttttgatttcgccaggagacaaatatgctacattccctcatgaggatgtgaatattgtggaggaacccacaagtaaataagatcgtatattgaatgtgtcacacacaaaggggctgtggaggatcgatcacaacataagaaccgagcgtctgctttatctcggcttcgaaccctgattgctcttaaagttaggaggccgataaacctggaagactacactccacctgttgagcttcttcagatattacccctgaagtccagcgttagaggaaatgatgttggcccccaaatcggtccaaataactcaaaattttctccaggaatgcaagcattattagacctgctgtttgctgttgaagattctgtatcagatgcagcaaagattttaggcctaagcaccggtgctttgtcaagattgattctgtcagatgattctctccgaacggccgcgaatgaactgcgagcttcgaagtgtttctttgattgcagggcaccggtgctgtactacgtgctcctgacgttgcaggacagcgtgcacaaggtcttctacgccgtcgtcgaggccgctgcagttcgcgcagacaacagccatcttggagggttggcgaggtatccggtctctgcaactcttccacagattggatccagattattccttacatggggtgtcttctggagttttcctgagatggccccattcacctctaccaacaggtatctaattccaatattgtatgtctcggttgaacttgtgaaggcgttgcaagcacatatcattaactgggatattcatatgtttgatgaggagatcggcaataccactcaggtgcacacatcaaacttgaatgagccaatgaggaccttggccgggttcatacaattttgtctgataaaaccgggtggcaagtttgaccatgcagatcgtttgttccaaagcattgagaacgcttacataaatagcttatcaaatacaagtgacgtcaaagagcttattccagaattcttttacatgcccgagtttcttgaaaattcaaattcatatcatcttggtgtcaagcaggatggggaacctataggcgatgttgctctccctccatgggcaaaggatgataactcaagtgacgagtttgacaaagattctattgagagtgatgatagatctcttgaagagctaagctgggagacactagaacttcttgtggtacctcatatattcagcatcagacgaagcacatggagatcaaccttcacttcgtccgtgagcgtgtcgccgacggtgatgttcgcattctcagcatcccgaccacttcgtagtttgccgacattttcaccaaggggctgccgtcgagtgtattcactgagtttcgatctagtctcaacatctgtacaggatagaattgagactgtaggaggtgttagactcctgctaagggttaggcctgggccttcttgtatttacctgattacccctatgtaatgggcttggcccacctaactgccatatataaattaat

SEQ ID NO: 35606 - DNA, 1658 bp, Zea Mays
taggttttgagagcgaggtgcccgtctgaataggttgcgcacgaggagagcccaccggccaccgcctaccgcaatggaagccgcaggcggcggagccgaggatgagcaggtgatgagcgaggtgcacttgggctgcccgccgcacttctctggcctcctcgtctcccatttcagcttctcctcacggcccctagggccatatggacacaaaggaggcggcggcggcggcggcgggagcgagctagtcgcagcaactagcggttctgtcgccgtggatgaggatggggatctcgttctggaccggaggagaagaaacaaatatgctagaggtgaccgccatctgttcactattcagcatggtgttaccagctcgcttaagagcgttgggcttcaggtttggaaagcggccttactattatctgactttattctgcacgaaagcttttcatcgccaaactttgatggtgttactgccattgagataggtgctggaacaggtttggtaggtttagcactagctcgagttgctagaaggatttttgttacagatagaggcactgatatccttgataattgcttggctaatctccatatcaactctggtatgctaaggttcgatgaagctaaagtctgtgtacgagaactggactggaaaatggcatggcctccacctgtgggtacatatgacccttctgatccaagtcggtatttatggtctgcaagtgaagttgaggaggctgagaaagcaacagtcctgtttgctgcagatgttatttacagtgatgatctcacaaatttgttcttcaacacggtgaagaaattgatgtcggtcggtgctaagaaggtgctatacttggccctggagaagagatacaacttcagtgtagacgaactagatgtcgtggccaatggttacacgcacttccgaagtttcttcacagcccaagatgagcacggtgatccgagcaacagatctggaccaggttttgttggaaagcagatagaccctgcagagattcctcagtacatcagagagtatgagaggggcaaggatttagagatgtggatgatcatgtacagtccggaggagaaacagcacagtaactctacaaaaaccgtcttttccttctaggaggacgaagagagcaatgagtgcttggtgcaaaaagacgaattccgttaaaaagacgggaccccctcccacgggcatccatactatcttgacaaaaatgaaaactgctgcttggtgcaagatccgtgtggtgtcgaagaatcgcagttcggcatcttctctgcggggaccgcgacagaaacgaggtcatcagaagagagaaataagttacacctaattgcggcagggcagggcagtggtggctggcatatattaagtggtggacaatcaagaacatgctctgcatgcttagcttaagtatatcatacgtatataataacgccgttgggactcgttttctttgtcgcccggaaacagcatctgtttggtccaagattcttggcacgccattgcgatccaaccctgtcgtgctcaaacatactctctccgtcggctggtgctctcgtttcatttcatcacaagttaattaattttaattttaactaaatatgtataaaaggacaaggccggccttcccagtcacagg

SEQ ID NO: 35607 - DNA, 2351 bp, Zea Mays
ccccatcccgcgcgtccatcttggtcaagaaaccccaacggcgcgtcgcccccaaaccttagaccccctgcggaaatctctagagccagggtctatccatgggccatcgctgtgcgccagctcttgctccatctctccgcggcggcagcgcaacagccgcccccatgaaagtcgccatcctcaccccccgcgagcctgccccatcccgcttagcgtcgtcccccgccgctgcgcagccgcgacccatctggataaggatgcatccgcttctcccatagccgccactacccctgcctgccctctgctacgaacacgaagataccctggatggaggtggagctctcagaggcttaagatctagaactctatcgcgtactacggattccacagggtgaggagagatacgagcaggtgtcccaccggcgatgcgggtccaatcttcggcattgggagcaatccgcctactcgaccacgaaggttctctgaggcggtgtagccagagatcatgcgggcaacagggaaggacgatagctacgcagcccacatcacgaaggcatataagtgggagttcgccgaaagggaaggtttgcaactggttgtgctaaatccagggactactctgggcccatttttcatgtcatcagtcaataccagcctgaataatctattgcaactcctaagagggtgggtctatcaaggaggacaaacaggttggttgatgagagcaaaggagctttccaagaagttgattgatctgggcatttgtttccttccgtttgatgtgaccatcagggagaccgtcgattgcttcagaagcaaagggctcatctagccctgtgaacatttccagatgttaaaagaacagattatccaacagctgatggaacctgcattagagatattatgttgatgtcacaaatttagttgatgctcatgtgaaagcgctcaacaaggcagacactagaaaagtcagtatttacaacgttggaacaggaagaggtttggtaacacgagaattgtttatttatttgtataactattatttattcatatggatagttgtaccctgcacaggttttaatcagtactttacttaatttacatggtaacaagatagagaggcccgcaaatagttaatctgggacaacatatctctgtactggccatagaggacaacaaaaaaatcaaaagttgaagaatcaccaacggtgcctcctttgcaccctccggctcaagaacctaggcccgagccagttcaacaagtcatgcccacagctgaagtgctgaaccaacagatttactgggaatcaatgaatcagcccgaggcacatctgaaatagatcaaaacaaggtagtcgccttggtcgtggttccacatgataatccgccaaaagcaccttcttctaccagtcctggaagcgtggtgactagctggagcaattcagattctgtgcgttgaaaaggaagtgaaagaggctattgttcaggtactaatttgccatagtgttggtctatgactgaatggtacaaaatgcatgcaatgaatggatgatactttccagttaaatcatgtaattggaatacagtggtgccgtcagtggtgcggattgggggcttctagagaaagggtctagcgtcgtgcccttcttgacgaacagtgtgttgatgtgtgccatcatcgcactgggaacgaacgtgatggctagcacggggagcatcttgagcatctgctttgtctccaccactcaccatgctctgagcctgtgttggtatgcagacttttccctttgtttcagaagaagatgcagttgcattgcacattgttagaacccacgatcaccacaaaattgagggaatatgtcataactcattagtcattaccttgtcaaggtttatgctttccatcacgaacggttggagttgcaacataacgatactttggtataccaaataaagttactctattcaccaaatcatgcagtgttagttttttgttgtgctaaatactgaatataatttgggtgtgttaatattttatttattgtctgcacatggttttctgatgatggctcatgaatcctgtaaaatacgtgttaggatttggagatccatgcgggcactaccacagtccatagggtgctcatctcttgtgttcttggctcttgcaagcattaggtcgtttctaaaatcacattggcacaatgaactctatggtgtttgaggttgctgaattggatggagcaacaatgatttgtcgcactaacagtaaaagaaacggttacttgttggttttaaatgttagtaattactacgaagtacaataatttgtatggagcatatccagtttagca

SEQ ID NO: 35608 - DNA, 2013 bp, Zea Mays
cagaccacgcaccagggacctcaccgagcacaggtagggtttcggccaccagccatggccgactccgcgccgtccatcccgggcgtcatcgcctccctccaggcctactccacggccctctccgcctttaccgccgcatggcgtgccgtcgagacccacgcctccaccctcgactccgccctcgccgcccgcctagccggcttctcggagctcgagctgatctgctcggcgatggacggagccggcctccgcgcgtacctcaccgagcacagggacgagctcaaggatcccacgcgcgccctcgacgcagccctccaagttgcgcccgacccggggcttctggtcctctccgcggcagcgagtttctgccgcacgctgccggaggtggccaagagcgacggtagcgtcaaggcgtcctgccgcctgctcatcgccttgctcgaccggctgcgcgcgattggtgtcaagccgtcgcctgaggcgcgcgaggaggccagagctgttgcgacggactggaagcgaggcaagcggatcgggacggagacgatgtttaagcaggagacgttcgccttcttgcatctcgtgggagtgtttgggctcgtggaggatgtgggcggtaccagcgaggtgcttgatcttgtcgtgtcgatctcaggtcgtgagcgcgccgttgatgcgttcgtcgtcctgggcctggacctcgaccagcatatgccaatcctcattcagaaaatggtaaacaaaaacaaacagctagaggcagtcaaattcattcaagctcttaatatagcgcacaaatacgctttgttgcctattatgagatcgtacattgatcatgccgcagttgctggtaagatgatccgcatcaggggagatgatcttgctactcagctgatgcaaaagagcgcacacttattggaacattgcagaagttcattaaggaacagaagctagaagaactgcccatttttgaagaagctaacaagcgaatggcacatttggatcagcaaagtgctgagagaaaaagaactgctgctgcagcggctgcggctgctcgaaaggttagtaagaacattgaggagcagcagaaaaggatacaggagctgatgcagcctgctaagagaccaaggtctgagaatgtggtgaaaggatcttcgggccagaacgtgaactttgctggaacctctactcaacagtttaagccacaacagagcattcataaagctggagtgtcaaatcagtatcaagctgctttaacccagaatgtactgccagcaatcgctcagatttcacagctagttgctgggagccatcgtccagttggcatcccaaatcaggcccttgctgttccgcctcaatatggtagtggtagtgcaaattattatggagtgacgtccaccaggccatacaggcccatcactctacctcctggacctggtgctttgaatggtccaagtgcgcaggcatcttcaagatcaaggctctattctggagatccccttgcggctgtctcccgatcatcagataagaagggatcgtcttacaagtattctttgtccagtatgtcaacttatgatcgtaaatgaggatttgttttatctgccagtggacgaacctagtgaaccttgaaagtttgggtttcagaccagagatttggtccctccgtagatgttaagtcattgtagctaacaatgggccttttttacagtaaaggatgtgggtttgtatctagaagagattctcctacagagtctaataaatattgtaggaattctaacttataaggacaagttaggtgtaatggtgagagttatcttaccgagccaccagatcctaggtttgaagtagcctcttcctattttcattgggtcatgaatttgtagtatctgtatttgcagcggaaagcttaccttgttttatgcctttgtcgtgtgagtcttcggtagtgagtctaccctttagggtttgttcgattatttccattccatatggattggaggggattgatatgga

SEQ ID NO: 35609 - DNA, 514 bp, Zea Mays
caaacatgtaaatgcacggcacaccacaccacagcccccctactttcctctaccttgcagactgcacactgcctcaagatggtttcctgttcctcatctccacggccacccatccctctcctgctcctcttcctcctccacttctcctctgtcctcgccgtatcagctccttcagcctcacaacaggctggtaccgacggcggcggcggcaatgtgtcggagacggcggcatggacgccgcggctgaggaagacgttcttggacggcggcatcgagcactggcacgggcggcggctggtggggcggttccaggtgtgcgcggtgtgcacctgctgcgggggcccgcacgggatgtgcatcccggcgccgtgctgctacgccatcaactgcaacatccccaaccgtccattcggcgtctgctccttcaccccgcgcacctgcaactgcctcaattgccacctctagcctagccttgccgccaaggatgccaagttgctgaaatatgaagaagccg

SEQ ID NO: 35610 - DNA, 1546 bp, Zea Mays
  misc_feature (1545)..(1546): n is a, c, g, or t
ctaatcataaaaatcgaagacgtttgattcccgcaccacgagtccacggcacaaggaaatgaaacaatccacgcggaacgccgccgccgccattcccatggttttccatgctcggttgcgagccagcaattccatttcagtgtcctccctcgtctcgagaccttgccccatccagcccaacgctccgtccatcaactgaatagcttggcggtgtaaccctgtcgtgtgcgatgagctcctcgccgttgatcaccgccgcggcgtcggctgccgtggtggcgctggctgtcgccaaccgcgtgctctacaagctcgcgcttgtgcctctcaaggcgtaccctttcttcctcgcccagctcaccaccttcgggtacgttgccgtgtacttctcgatgctctacacgaggtaccgcactgggttggtgactagagacatgctggcgctccccaagcaccggttcgtcgctatcggtttgctggaggcacttggagtctttgctggcatgtctgctggagctatgctaccagggcctgcgattcctatactgtcccagtcattcttggtctggcagcttatcttctctgccctgcttttagggaggacatattcggccagacaagtcattggttgcttcctagtagtttctggtgtgattcttgctgttgcaagtggagcggatgatggccagcttctttcagatgtaaagttaatttggccagcactcatgatcgcttcatcagcatttcacgctggtgcatctattctgaaggaagctgttttcattgatggtgcaaaacgtcttaaggggaagcggccagacatatttgtggtcaattcatttggatctggatttcaggctgtttttgtctttcttcttcttccattcctttctaatttgaggggaattaagtttgctgagcttcctgcttatttaaatggtggtgctgagtgcttcttaaatgtcgcagaaagtccaatcgactgcggaggagctccattcctgcctttgctgtttatagtggtgaatatggcattcaatgtctctctcctcaatttggtgaagatgtcatctgccattgtggcttcacttacagcaacatcagcagtgccaatatcgatctatattctttcacttcctttgccctacatccctcatggcacggaattaagcacgtctttcatcattggtgccgtgatattgctgatgggcctgattctgtataaccttcctcaatcgtcactgaaacaattgaaggctgattgaaggcgataaagcaccctagactgtcagggattaggttttagtggcggcgacggttcctcgaccgtgcgagcggcggcgatctcaggggcgagtgagggcaggggctccccccgaggcgcgtgatcggcggcggcaacgctcccccggatcgagcgacggcgatgccctcgaggcggatgagcagcgacgcaccctaggttcggtggtgacggtggttgcatgaagcgcggtaggcttcgacagtagcggtggcatccatgagagacatgggtggcttcgnn

SEQ ID NO: 35611 - DNA, 4193 bp, Zea Mays
aaagcggtcagtgggtggaggcagccaagagtcaccctgtcgccgttgccgtcgccgaggcaggcagagtctccctgtcgccgttgccgtcgccggcctcctcctcctctgccacttcctcccaactcccagccgcaggggccgacggcgacgggagggaagaggcggcagaggtactccgaggggcgcggagagaggctgtgccaggccacgccgtccagtgcctccgggtccgtcgccgcagcttccggccgcgtcggagaggtagcccccggagctcttcgcggaggctcgggaatggtgcactgggttagcgacagtgatggcagtgataacttcgaatgggacagtgatggtaacggggagcagacagtgagcttcaacgctgctggtgctggttcatcagctctggcagcgacgaacactgatgctcctggcccatcgacacgggttgctaatggcaatgggaaggctgggcgatctgcctctttggttcagaagtatgtggacatgggtttctcagaagagattgttctgaaggccatgaaggacaatggggataatggagcagattcattagttgagctccttcttacttaccaggaactaggcaatgacctcaaagtggataatgactttgcttctagttgtgcccccaaaactgctgacgatagtgatgatgatgacacactggaaatctgggatgatgaggatgctggagggagaagcaccagggttgctaactctgttgatgattctgatgacgaggatttcttacatgagatgtcacggaaggacgaaaaagttgattccttagttaaaatggggtttcctgaagacgaggctgcactggctattaccagatgcgggccggatgcatctatttctgttctggtggattcaatctatgcttcacagaccgcaggagatggttactgtggcaatctgtctgactatgaggataattcctatggagggagaagcacagggaacaagaaaaagagaaaaagatatggaggccaagcacagggaagtagaggcccattagatggtagctgtgatgaacccatgcctctcccacatccaatggttggatttaacttgccagaccagtggtcaagacgagtggacagatcgttgcctgcacaagctattggtccgccgtacttctactacgagaacgttgctcttgctccaaaaggtgtctggactaccatatcaagattcttgtatgatattcaaccagagtttgtggactcaaagtacttctgtgctgctgccaggaaaaggggttacatacacaacctgccacttgagaacaggtcacctctcctccccatacccccaaagacgatatcggaagcatttcctcggaccaagaggtggtggccttcatgggacccaagacgacagttcaattgcctccagacttgcgtgtctagtgcaaaattgttagagaggattcgcgtagccctcacaaacagttcagacccacctcctccaagagttcagaagtatgtgttggaggagtgtaggaaatggaacctggcatgggttggcttaaacaaggttgctcctctagagcctgacgagatggagtttctactcggctttccgaaggatcacacgagaggtatcagcaggacagagaggtatcgatctctaggaaattcatttcaggtcgatactgttgcttaccatctctcagttctgaaggatctgttcccacaaggcatgaatgtgctgtctttattctctggtattggaggagcagaggtggctctccacaggcttggcatacagatgaacacggttatttcagtggagaagtccgaggtcaaccggacgattctgaagagttggtgggatcagacgcagacgggtactctgattgagatcactgatgtgcagacactgtcatctgagaggatcgaggcgtatattagaagaattgggggcttcgatcttgtgattggtggaagtccctgtaacaacctcactgggagcaaccgtcaccacagagatggtttggagggcgagcattctgcattgttccatcattattttaggatcttacacgccgtcaagtccatcatggagcgtttgtagttcttagaatctttactgttgttttggttctagtagaatactttgtgaccgaacttgtaaatggtttgcaggttgactggtttagttctcttgccactctaatttaggctagttttttttttatttaatcttctttggtgatcttggtgcagttctgtggcactgttgggtattcaaatgcagattgatccgagaggctgccctgttgcattttctttttaaaatttgtatttgtcaatgagagatcaggtattctggttgccaaaaaaaaatctgaagttgtggagctgagaaaaggacggtgctaagctacaaccacccactgccacaccatgcgcacccccaacccaaaagatcctgcttttgctcacgcttatcaccactcccatctccatccaaaaccataaaaaaaaccagtgcgagctgaagcatccaggctctggaatcatcgtcgggatgtctgtgccagcatcagcccaggtgcctcacaccatacgatctgctgggagctgctgcttcaggtcgtcgcatcaactatctgcgcagaatctgggccgacgtgagttcccgatctcagctttgagtggccttctttttgaaagtgagcacaggttcttccaaagcccgttgtgttcgtgtagatcgcaggtggcgggggaccggaaagaagaagatcctttccacccgtggcgtgcttgagtccagaaacggcgcacatcctggtggccttatgaagagaagcgcacgccttgcaggaaggtcgtggagcacatcatcctgctcagagccaagcccaacatctcagacgctgaagagaaagacatgctggactacctatacacatcgcagtaccagatgcgagggatactcgcggtctcgctaggccgcatcgaggaccccaacagcgacaacttcacgcacgctgtgttcatgcgtttccagcagaagcaagacatcgcggagttccagagtaacgcgtactactccaaagttgtcgacgagcacgtaaagcccgtttcctatatttcgagtccgaggtggaagacgacattatacctctctttcgcaggggagagactgcgtctagagaggcaacggaggacgcattagcgtctcttgacaagttgatcagccaatgcagcgcttctattgtgcaggcaacatgtggctgctgtttggatcgtccggataacgggtacagtcatgctgcagtaatccgtttcccatcatggagagcgaggagtacaaggatatgtgggcgtccaagttccgcccgatcgtggagagatccctgcacctgcacttcaccgttgaccccgtggggaaccagctgatgtagaccaaccgagtggtcatccctatacatgggaccaagagcatctgtactgtacagtgtaaaacagagagatggggtaatatagaggataccgatagggtcaacaagtgccagtgctcggttacattacatcacggcaaaaaaaaaacaaaaaaaacaagagaaaatagcctcccttgtcgctcaggagctcagatagatagatagacagatagatgctgagcaccgaccgagttgaggtccctcttgagagttcagttgtgcagcgggtttgacccctgcggcacccttctcttagcctcggacagatcctgcacctgcacgactcgcctccagccaagtttctgttgaccgtgctgcctgaaagacgacgtcccctcggcgtcggattccggaacccgtcggccgtggcagaagaggcctctctgctctgctcccaggagcgagactgtgagcactactactaccatgagcctgaccaagctttgttgcggcaatcccatgctttttcaggcagggtttcaacagcacaagttggagatggcaagggacggtagtttgtaatacatcacgcacaagcaacggaataaagattttatatacgcagacaacaagggcggcacagaaagtaaatccagctcggccatctggagacccgtggcggtgataccagacaccggggcaggcgtgcgcttgcctcaccaattttggtttggtgcggcggacagcgatgcatgcattttcatca

SEQ ID NO: 35612 - DNA, 719 bp, Zea Mays
agcaaatctcgtgggcgtgtagcgtacgccacctgcgtccgcgccttttccatttccaccccgatcgcattttaccctactccccgccgcctgtccctgcgctagtcgacactcgacaggctcggtttccgccctcctctcccaccgccgcgcaccgagaagatggggaagcggtggatcccgctggaggccaacccggacgtcctgaaccagttcatatgggggctgggagtccacgaggaggatgtgcagttctgcgacgtctacggccttgacgatgagctgctcgctatggtgccccagcccgttctcgccgtcctcttcctctacccgctcacctccctggacgaggagaaagaagaatcaagtgtttctgctgccacatcgacctcagcgggcaaggaattgagcaagaaagtatactttacgaagcagactgttggtaatgcttgtggaacagttggtgttattcatgcaataggaaatgcaacatctcaaatcaagctagttgaggggtcctattttgagaagttctataagcaaacggctgatatggatccagctcagcgtgctgcctttctcgaggaagatgatgagatggaagatgcacattctgttgctgcatctgctggtgacactgatgtgaactttatgagcttgatggacgaaaatcacaacccacatcccatggcccttcatcacctgaaaccttgttgcag

SEQ ID NO: 35613 - DNA, 1071 bp, Zea Mays
aactgccccgctccgatcctgtcgacggcggcggccacctgttcgaaccgcgcgctcctgctgccgtcgcccctcgctgcggcggcgaccttggcatcggccgcggggcgcggcggcggcgggtacacgtccggagcgccgacgacgccgaggtggaagcgaaacagaccccacgctgccgcggcgggctgcgcggacccggtgctgcggcgcgggcgcgccgagcgcagccgcgacgacgggctcggatgcgcgtagaacaggctgctcgacagcgagcgccgcggcggaggcgccccggcgccgtggtcggaggaggcgctcttggacgactggctccggctcacgcacccgctgctgctgctgctcgagctcgagctcgcgctgcggctgccggaccgtgacaccaggcccacggtggaggccactgactccgacctcggtagcgtggcgacgttggcatcgtcggcggccgcaaccgaggaggcgcggagcgggaggagcttgccctagcagaagacctcgtcggccgcgcacatgtccgtccccgcgctctctccggctggtacgatgtcgccggacgacaggatgcagaactcgaagtcgtcggccgagtccgaggcgcgacactctcagatcccgtgctcatcaccatcctgcccctcgctcgccgcccccacctcaccaagagccttagccgtccctagagaagacacggaggtgcagtgccagtgctttcctcaagtgcacctcggattttcggtaccggccagattgggacgaattcaacattcatcggctccaccaaaacactgccactatgatgtgtatgcttgcgtcaggacaggagacccaaaagtacttcacagatgaatgtgacattttccacaagaacgagatacgaaatggccaaggactgctgacgatgatgacgacatggccaccatcgctgccctcagattcggatatgaggccttggaattgaggaatggtggatctgattattttggcaaaggtgttcttaagattcggaggcatcgtactgcaacggatgcttcctcgaactcttca

SEQ ID NO: 35614 - DNA, 8755 bp, Zea Mays
tgttggatcttgaggacccgctgtatccaccgttccaccgtccacgcggcgcttggcttggacgcggcgctgtgcgcggtacgggcgtacgcccgtgccagttccgggtatgttttttatggaattttgactcggacgtgggtaaccgccgcgccactccgcccgcaccttttttcctccccacccggaccggccacccccttcgcttcccccggaaatggcgcgccacctcttccccactccgctcctggccaccctctcctctccattactccagtccgcgattccgcaccatctccgctcagccccgcgcttcccctcaactttccacaacctcgaccaatcggatcccgcacggagcgcgcgccgcgattgctcgccgtcgtggcgacctcgcattcttctgcaaggaagggtttgatgccatgacggagtgctagaggccgaggaggagagtcgaagatgatgcttgggctagtgcagctgctggtggggttcgtcgtcgcctgggaagccgtcgagctcgtcctccgccacggcctcctcctctccgtcttcaagctcgccatcctcgccgccctcgccgctgcggccggatgcgtcgctatcatcttcttcgccagggcggtagcctgggtactccaacgcgcggccaagctctccatcggttgccgctcctacggcttcaattacctgagggacatcaccatttcatcaccgaagggcgctgttgagtctatctgcattggtgaaattagacttggcctgcggaaaccgatcacccagctgggatttacagtactaacccatggcccaatcctgcaactgcaaatctctgatttggatgttgtcctcaggcaacctgtgaaatccactaacaagaagaaacccgcccctcgcaaaccgatctcaaccacaacagctaaagcaaaaggaaaatccaaaggacaagtaaaatggaggctcataacaagcatggccagtctgttgtcattatccatagtggagctgaggcttaaggctccaaaagctgctcttggtatcaaggacctcaagactgatatatctaaaactggaggactggatccagttcttaatgttcaagttaatatcatacctttatttgtgcaagcactggattcagacagcattggaaacaacacattggtgtttagtaaattggattggtgggttagtggacaatattgttcagccatggacacttcagaccatagctctttcctgtttgaggatatatcactctcatgtgatcttcatcagagggataaagcaattagagtaaaaaatttggacttgatgcttggtccaattgttgtgaatttggaagagaaattactagcaaaaaagaaaccatctgcctctactgttgctgagcaaaaggatgaaccttctgtggataataaatcagcagccagatctgaagggggcaaacttgcatcactaaataagaagatcagtatgtttccagaaaagcttcaatatgtccaaacttgttctgaagtttttgcctaaagatcatggcctctcaatcaacaatgaaattggtagcatatctttgagatgtacaaggttacaaccacaagacttcggagaggtcacaacacatattcggttggaaactgatgtaacggagattcatcttctaatggatggcgctacctccgtattagaggttgtaaaagtttcaacagttgtttcagctaacattccgtctcagccagcattaccagttcaagctgaagtagatatcaagattagtggattccaatgtaacctcattgtaagcagaattaagcctctgattagaataaactcagataaaaagaagcctcttgttcttcatgaaaatcctcagcaaaagaaggcacccaaagaaaaattagcattgtctttggcatgtactatgtcagttcccgagttgactcttgtgcttcatagtcttgatgacgtaccactttaccattgtatttttcaatcagctaatgtttctgccagtaagatgatagaccgaggaactcaattgcatggcaagcttggtgacttaaaatttcttgttcctagtaaacaccaacagtcaatgaaagaaggtgcttcaggcaccttactacacattagccattcaactcttgacttggaacaaaatgatccaggccaagataatgatgaggaccatgctaaatctgctatctctgttaatatatctggaatcagaatgcacttctgtttttcctatcttgagtcactctgtgcaactgcaatgtcatacaaagtgtttatgaaaagcattttgcctcctaagaaacgatctgtccaggagaatgcttctcaaaaatctaccaagaaagccaaaagagcactgcttctcaaaatcaatgttgcacagtgctctattgtgtatgatggtgaaatgaggctggaagatatgagtattgctgatccaaagcgtgtaaattttggttctcagggtggtcgtgttgtaatcatcaacgaagctaatggttccccaaggatggcttatgtaaattctaccagtcttccagatcataagaatgtccacttctccacttctcttgagatctatcagtttggtgtatccttgaataaggcaaagcacaccatgcaggttgaacttgagaacttcagattgacgcataaagaggaccagcttgataataaacctgtagaggaaaccaagctttttgatgtgcgtaaagcaaagtttgtccagcgttctggtgggttaaatgatattgcagcctgctctctcatcaatgtgactgacattgcagtaaggtgggaacctgatccctatctggaattgcttgaagtagctacacggcttaaatctgttctgcatagaatgaaactccagaattctgttaccgaggtaaaagatgaaacattgaacatggatattctttccaaaaaggaatcaccctcagaccatggtcagcaagaaaaggcacaaaagaagcgagaatcagtgattgccattgatttggaatcactgaaaatttcaggtgaacttgctgatggggtggaggcaatgattactgttggctacatattttctgagaatgcaaagataggtgttttggttgagggaatatcagtcagcttttgtggtgcgtggatattaaaaagcagtcggatgcagttatctcgtatcccaatttctgtttctgatagcaattctgataagaaattacaatctgcagctgcatgtgattgggttattcaatgccgtgatgttaatatttgcttgccttttaggttgcaactgagagctattgatgatgctgtagaagacacattgagggcctttaaacttatttctgcagcaaaaacatctgtgttgtttcctgagaagaaatctagtaccaccagcagcaaaaagagcaaaccaaaatcaacggcatttcggtatgtgcggatcatcgtacgtgacctgatagcagaaattgaggaagagcccatgcaaggatggcttgacgaacatatgattttaatgaagaatgtattttgtgagtccacagttaggttgaatctgcttgatgagctttcttcaggtaaaaataaggattcccccaaggcaaaactggatagttctgaaaagaacagtggttgccctgatgttgatgcatatgttcctggcacacactccattgaaaaactccgggaagagatctatagacaagcatttcagtcatattaccaagcatgccagaaattgccagtatcagaagggtcaggtgcttgttcaagtggcttccagtcaggattcaagatgagtactcgtagagcatcagttatgtcagtatgtgcaaaagatgttgatgtgagcttatcaaagatcgatggcggtgatgaaggaatgattagttttattaaatctctagatccagtttgtgacaaagatgacatcccgttttcccgattgtatggtagcaattttagtttgaaaactagatccttatctgcgtacttgagagattacacatttccactcttttccggaaccaatggcaaatgtgatggacgccttgtgctgggtcagcaggcaacctgttttcagccccaagcacgacaggatgtctatgttggcaaatggtggagagtaaatctgctacgctctgcaactggttataccccaccaatgaaaacatatgctgacataccactgtattttaaaaaggcggaagtatcatttggagttggttatgagccagtttttgctgatgtgagctatgcttttacttgtgcacttaggagggcaaatttagcaaagaggtggtattttgagcgtcctgagccccctagaagagagcgcagcttaccctggtgggacgatatgaggaactatattcatggaaaatttaaattgtgttttaatgagacaaagtggcatctccctgcttcgacaagtccttatgagaagcttgatgagctgttaatcataactgacttcatggaaatacattatgtggatggttatgtcagtctttcttcgaagtatctgagggtgtacctaactagcttagagagtctagcaaagaagtccagcttggaaattccacaccatccagctatacctttccttgaaaccccctcctttttcatggatatttcaatagaatggggttgtgattcaggtaatcctatggatcattttatatttgctcttcctgcagagggaaaaccacgggataaagtttttgatgcatttcgctcaacttctctgtcactgaagtggagtttctcacttaagccttatactactgaacccatagaacaccaaaagaagagtaatttgaatacaactgctccaactgtgaatgtgggggtgcatgatttggcgtggctaatgaagtggtggaacttggtttttcttcctccccataaactaagactgttttccaggtttccgcgttttggagttcccagatttgtacggtctggaaacctcccacttgacagagttatgacagaacagtgcattcgttttgatgccatgcaattacaaattaacaacatgcctctacaggcggatgatcctgcaaaaggtttgacactacacttcacaaagtttaggtacgaaatagctttcagccgtgggaagcagatattcacctttgattgcaagcgcgaacctcttgatcttgtctaccagggcatagacctgcacttgttgaaggtatttattaacagaattcctgaatcatcaacttctatggattctaagatagaaaataaggttctgcagacaaaagataaagatagtcttggttgtgaaaaaggaaaaaagaaaactagtccaaccgagaaaagccgagatgatggattctttctttattctgattatttcacaatacggaaacaaactcccaaggctgatgctgctagattatcagcatggcaggaagatggcagaaaaaaaactgaaatgccattgatcaagtctgagtttgatgggggggatgaaagtgatcatgatcaatcaggtagtgatgatgagggatttaatgttgtggttgctgatagttgccagagagtttttgtctatggactaaagattctctggaatttagaaaaccgggctgctgtcctctcttgggttggtggtttaactcaggcatttcagcctccaaaaccatctccttctcgccaatacactcaaacaaagattctcgagaagaaacagttaattaaagaagctgagatgtccaaggatggggctctcagctctgtatcctcaacatcacagccttctgaacctcaacaaatcaagagttcagagtcaccaccttccaatggatctggcaagccagatctgacatcaagtagtgaaaatgcacttaagcgttcaaataatagtgattcagaagaggaaggtaccaggcatttcatggttaacgttgtccaacctcagttcaatttgcattcagaagaagcaaatggtaggtttctgctagctgctggtagtgggcgggtcatggttcgttcatttcattcaattgtgcaagttggtcaagagatgtttgagaaagcaattggttccagtaatgatgctactggtgggactgggccagaaatgacctggtcacgtgttgagctctctgtcatgttggagcatgttcaggctcatgttgctcccacagatgttgatccaggtgctggtattcagtggttgccaaaaatacaccggcgatcatctgaagttaagagaacgggtgctttacttgaaagggtatttatgccatgccaaatgtatttccgctacacgaggcataagggaggaacccctgaactaaaggttaaaccactgaaagagctgacatttaactcaccagacataactgctggtatgacatcacgccaatttcaagttatgatggacgtattgactaaccttctctttgcaagaactcccaagaaaccgaagagtaatctaagctatcccctggacaatgatgatgacaacattgaagaagcatctgatgcagttgtacctgatggagttgaggaggtagtattagctaagattggtgttgaggtaaaagaaagagctcggaagctactgcttgatgatatccgggccttatctatctgtggtgaaacatctcatggtcagagtcagtcaccaaaggctaatgacattgcatggattgttactggttcaaggttaatgctggtcaaacaactgaagaaacgactcgtgaatgtccgcaatggtaggaaagaagcatattctatgctaagaaccgctatgcagaaagctgcacagttgaggttgatggaaaaagaaaagaacaaaagcccttcatttgccatgagaatttctgtgaggataaaaaagatcgtgtggagcatgttagcagatggaaaatccttttctgaggccgagataaacgatatgatttttgaattcgaccgagattacaaagatattggcatcgcccagttgacaaccaagctgtttgtcctaaaaaatggacttgctaatgcaaaatcagatactgttgtatcaccctggaatccacctgctgaatggggcaagaatgcaatgcttcgtgttaatgcctggcagggagctccaactggtgggaatccagttatcgagagtttcttagtagacatctatccactaaaaatttatctgactgaagcaatgtacagaatgatgtggggatattttttccctggagatgaacagcaaccacaaaagcgacaggagcttttcaaggtctccactacagcaggaacaagacgaaagaaaaacacttctgttgcagagacaaacagtcccaataaccagtcatcaaaagaaactacatttgcacagaagcctgaacttcgaaggacatcttcatttgacaggacatgggaggaaacagttgctgagtctgtagctaacgaacttgtttcacaaatggagggtcaaacaaatacccaatatgaacctcaagatgctgctaaggattccaagttattacgtcctgtccgctctacccgcgaggataagaaaattgtagagcccaatgagttgaaacaatctagacctcaaaaaatgatggacttccgcaatataaaaataagccaggttgaactgcagctcacatatgaaggattgccatttgctgttagtgatgtaaggctacttatggataccttccatcgtgaggattttacaggaacatgggcaagactgttttctcgagtaaagaaacatattgtatggggtgtattgaagtctgttacaggcatgcagggtaaaaagtttaaagctaaatctagcagccaaaaagaaccatctacagctttaatcagtgccgctgattttaatttaagtgacagtgatggtgatgaagctggcagttctgatcaacttccagcatttctaaaaaaacctagtgatggagctggtgatggatttgcaacctccgttaagggcttgttcagtacacagaaaaagaaagctatggcatttgttttgaagacaatgaaaggagacgctgatcatgatttccatggtgaacggagtgagaacgaaattgagttctctccatttgctcggcagttgactataacaaaaacgaagaagcttatacggcggcacacaaagaagttaaacaagtctaaggttcataaagttacagctactgagctagaagtggcagagctgccaccgcgtgctcctgggtacaacacggactcctcctccgactcgtcatcggcggaaacaagcccaaaagattagcctgtgccccatgtgaaaggttgattcagagggatgcttcgaagtcgtcctgagccctggagtgatgtccaagttggttctttacaaattctggttttgatcgatacatcgttgatcctcaagatggttttgcagccatccgaatagatatagatagtgtttcaacattccctcctcatcggatgtggtgttgtctgagctgaagtttttagttgtgacgatgaattcagtgctctgcagacaacaactattatcataacctgagggtagagtgaattattcattgtatttttcttgagttgagggtagtgtttgagacatcattctcggctttgtagtactcacagtggacagtataaaatcaagtgcgacagcaaatatcgtattttaaatattgtacttaataaaatatttaatatatactagtatatatgcagcagagataagaagctttgctgttgaaggttctgactctgt

SEQ ID NO: 35615 - DNA, 2783 bp, Zea Mays
gcaagccgagcggcgccaattctgcgctgccatcgtcttcctccgtcacacccggctcgcaaaccctagctcgccccggccccacctccggccccgttcgtcggtgctatgtcgaagcggccgaagctcgagggtttcagcatcccgcggcccacctcctacaacttcgagcgctcgcagtccgtgcagcggctctaccgtccgaccgatgacccagacctcgacgacatcgccttctccgacgacgccccctcagatgcccaagccagcaccgcggtagaaggaaaggccgagaatgaggaggagatggacccgctcgacgccttcatggccgagatccaggaggagatccgtgcgccgcccccgccgcccaagcccgaggcgcttcgccgcacggattccgacgatgacgaggatgaccccgtcgagagcttcctgcgggccaagaaggacgctggcctcacgctggccgccgacgtcatgcgcgctggttacgactccgatgaggaggtctacgccgctgccaaggccgtcgacgccggcatgatggaatacgactctgatgacaaccccatagtcatcgacaagaagaaaatagagcccataccagcactcgatcactcgaccattgagtatgacgccttcacaaaagatttctacgaggagaagccatcgatttcagggagagatatcattggtattgcaaaaactggctctggtaaaactgcagcttttgtgctccctatgattgttcatattatggatcagcctgagcttgagaaagaagaaggtccaataggagtcatttgtgctccaacaagagaattggcacatcagatatatctcgaagctaagaagtttgcaaagccttacaaccttcgagttgctgctatatatggtggtgtttccaaatttgaccagtttaaagaactgaaagcaggttgtgaaatagtcattgcaactccagggagattaatagacttgctgaagatgaaggcattgaagatgttcagggcaacttatctggttcttgatgaagctgatcgaatgttcgatcttggatttgagccacaaatacgatccattgttggtcaaattagaccagatcgacaaactttacttttttctgcaacaatgccatacaaagtagagcgtttggcaagagaaatattaactgatcctattagagttacagttggtcaagttggcggtgctaatgaagacattaaacaagttgttaatgtactcccttctgatgttgagaaaatgccttggcttttggggaaattgcctggaatgattgatgatggagatgttcttgtatttgcatctaaaaaggctagagtggacgagatagagaaagagttgaatcagagaggattcagaattgctgcgcttcatggcgacaaggatcaagcttctcgtatggagaccctgcagaagttcaaatctgggacatttcatgttctggttgcaactgatgttgctgcacgaggtcttgacatcaaatcgattaaaacagttgtcaactttgatattgcaaaagagatggatatgcatattcaccgaattggaagaactggtcgtgctggcgataaagatggcactgcatatactctgattacacagaaggaggcacattttgctggtgaactggttcacagtttgattgctgctggccaggatgtacccaatgaactcatggatctggctatgaaggatggaagattcagagcaaaacgagactccaggaaaggtgggaagaaaggtggcaaaggaaaaggtggtgttggcggtgctgggcgcgggcgcggtgtgcgtggagttgattttggcctcggcataggttacaatgccgaatctggttcacaagtgcctgctgcaagatctgctgctgtaaattctctgaagacagggatgttgcaacgatttaagagcagctttgtctctggatcttcaaatacaccaagcagcagtgcaccttcctttgtaagaccagcactccgtggctttgtgtctggcggcaccattggaggagacacacggcctgcacaggcagcccccactttcatccctgcatcccggcctgcacagcctgcccccgcggtccctgcatcccagcctgcaggaaataacaacgaaaatgggaacccgaatccagaaagttcacgggatcagttcagggagagaaaacgaccatcaggttgggatcgctagtccctgctaactggtatgcccaattgtgattccttccccgctttgttatattgatgtagtctcttgggagacatcctataaaaaagcactgtagattacatgatgtcaggtaagtgttgttttagttagtttggcctttattctttatccttcaactactgttgtatctggccgttgtttcacatttttcatcagagcaaaatttaccatttgtattcgaagttggcaccgaggcctcctttggttcatagaaaaaacagaggaaaaacttagttcatgcttttagttcatagaaatggagtatgtgaatagtgtatgaagttttccagtgtagcactagtgtttgatgggatcctgagagatagggaaggccagagttgacatgaaaatgaagacatccagatagttgacatgaaaatgaagttctccagaggcatcatggatcctggtaagagaagtaggaaaagttgacgttgacatgagaagatgcaatataagcagacttgaaaagatgaaatatacaaaacattcttcaaagtcactatgtgacatctctatatgtgatt

SEQ ID NO: 35616 - DNA, 4218 bp, Zea Mays
caaccaccctgcatctggtgttcgtctcgctgtgtgcgctctctgtcactcccccacggcccacctcacccctcccgccccctccctcctcagatccggccatctcctgcccgcctcgccgccggtcccgcggcccggaaccctaaagctcacccccgtggcggtgcccccggtcgcgtggggagaatggaggcggcgctggaggcggcgcgcgccaaggacaccaaggagcgcctggccggggtcgagcggctgcacgaggcgctcgacgccgcggcgcgccgcgggctgaccgcggccgaggtcaccgcgctcgtggacacctgcatggatctgacgcgggacgccaacttccgcatcgcccagggcggcctccaggcgctctccgccgccgccgtcgtcgccggcgaccacttcaagatccatctcaacgccctcgtcccggccgccgtcgaacgcctcggcgacggcaagcagcccgttcgcgacgccgcgcggcagctcctcattactctgatggaggcatgccacctacttaatatactatccaaagaactgctcggtgattttgagccatgtgctgaactattcatcccgatgctttttaagcttgttgtcataaccgtgcttgtgatcgctgaatctgcagatacatgcataaaaactattctgcggaattgcaaggttgctaggattcttcctcgcatagttgacacagcaaagaatgaccggagtgcaatcctccgtgcaaggtgctgtgagtatgcacttctgatactggagtattgggctgatgcctcagaaatacaacgttcagctgatttatatgaggatatgataaaatgctgtgtcgcagatgcgatgagcgaggttagggcaactgcaagaacttgctatagaatgtttgcaaagacatggcctgagcgttcacgccgtctttttatgttatttgatcctgcgatacagaggataataaacgatgaagatggtggtgtgcataaaagatatgcttctccctcattgcgtgatagggttgtgcaaccttcacgtgcttcctctcattcaagtggtacatatgtacctggatatggcacttcagctattgttgcaatggacaagagtgcagctatttcttcagattcatcttttccatcaaccaatcttcggttatcacagtcaaagacgattggcagaagttctgagagaagcctggagagcgtgcttagctccagtaaagaaaaagtttctgccattgaaagtttgctgaaaggtgtcagcatgtcagggcaaaatttctctgctgcacgctcaacaagtttggatcttggagttgatcctccatcatctcgtgatcctcctgtgctgcttgcagcaccagcatcaaatgttctatcattgcagaactcagcactgttggactcatcccttcctaccatcccacctagttcgcgaaatggaggttcccgcttattggaaacgatgacaacacacttgcccaccaaagaaagatcaaggtcaccatacttgagtaatatgtcatctgagtccatgtctggcttatcactgccttactcaagaagatcttcggagaggcttcaagaaggaggccgcatggatgagagctatgatatccgttcaactaggcgaatgcctcaaatgcacttcgacagaaactatgttgatatgccttacagggatgccagccacagagattcacataacaacaatgtcccaaattttcagagacctcttctaaggaaacaagtaatgtcaagggcttctgcaagtggcagacacagctttgatgatagtcatgtaccatcaggtgacgtgcctagctatacagattctctggcttctctaaatgatgcactttctgagggtctcagccctagttctgactgggtagcaagagtttcagctttcgagtttattagaaatttattgaaacaaggccagaaaggcattcaagaaattactcagaattttgagaaggttatgaagctgtttttccgtcatttggatgatcctcaccataaggttgcacaggcagctttctctacacttgcagagattatcccagcttccaagaagccatttgaaagttatgtagagcgaattctaccttatgtattttcacggcttattgatccaaaagagttggtgaaaaaaccatgctccataacattggaggttgttggtcgaacatatgctattgatatgttactacctgcactagtacgctcattagatgaacagagatctccaaaggcaaaattggccgttcttgagtttgcaaataaatcattcagcaagtacactgtggactctgatggttatagtaacagtggcttccttaaactatggctttcaaaattggcacctttggtaaatgaaaagaatgcaaaattaaaggaggcatctatttctggtatcatatccgtttattctcattttgattcaacagcagtgctaaattttattctcagtttgtcagttgaagatcaaaacctcttgaggagagctctgaagatcaaaacccctcgtatcgaggttgatctggtgaactacttgcagagcaagaaagaacgtccacgccccaaatcttatgaccaggtggattttggaacttcggaggatggctatgcactgacatccaagaagagctatccatttggacggttttcttctagttcccttgatgctgaagggggaaagatgatcagttcgatgcacgaaccagtgctgcataatgtttctataggtcgaacaacttctgatatgagcatggatcatgctattcaaagtttggagtcatctacaggagctgaagttcatttaactaggagtagggaaccaaagaataacattaactcagttgtggaagctgctcgctcttggacaaactacactgaaaaaactgatgcctctttagatggtgaaactgctaccagtactcctcggttagatgtcagccggtttgtaacttctgatgggcataatactgttggctcaaccactgaagaaagtgttcaagagggtgatatgattgtgaatcttagttctataaagaccagccttcaaatggacaacggtctgagcgtaccacaacttctctatcagataagcaatgacactgaagtttcaagctcagaaaagcgggaagcactacaacaattggtcgatgcttccctcgataacaacagctccatttgggcaaagtacttcaatcaaatcttaaaggttgtgcttgaagtattagatgactctgattcatccatgagggagcttgctttatctttgattactgagatgctcaactaccagaaagatgcaattgaagactctatggagattgtttttgaaaaactcctgcatgtgaccaaagatgctgtggccaagatttcaaatgaggcaaaccaatgcttaaatgttctattggcaaaatacaaccctttcacatgtcttgctattactgtacctttattggtcagtgatgatgagaagatgcttgttgtgtgtatcaactgcttgacaaagcttgttggacgcctttctcaagaggaattgattgttcaattgcctacatttctgccagcattatttgatgcttttaacaaccaaagtccagatgtccgaaagactgttgtgttctgtctggtggatatctacatcatgcttgggaaagcatttgctccatacttggaagggcttagcagcacgcagctccgcctagtaaccatctacgctaaccggatttcacaggcgaggtccggcaagccaatcgattctaaccaatgaggttgtaacattgttattatttgtggtctatatgagcatttctccggtagggtggttttcttgtcatttgtttgtgtatgtgtatagtataaacaagcgcctcccatctgttaagagctcctggtttttgccctgtgtgattatgcattccctctttacgccttttcctctcttttccccctttggtagcttgtggagagtgctaatgagtgtggcttcatttgtactacttggtacatactctgtacaaagaaaggaaagtgtagtttcgtggagaacagttatgcaagtgatttttttgacgccattttccttggcgggatgacagtttgccggcctgtttgtggtgaaatatggcaaaactgttatgtattctcttcttcagctcgatcacttctcttcgtattacgtctgtta

SEQ ID NO: 35617 - DNA, 1990 bp, Zea Mays
agatgtgagattttatttcatttgggagctgctctcacgtgatcgtttctgtgaactgtgtgtaatgttgcacgtcgtcaagatcggcaaggaacttcagacttaggggatgaaaccttttcttgagagcttctgagaagtgttcctggcttacagcttagtcagatccttgggcacaaggatatgtggtccaagaaactacatggcgtgtttacccttcttatgctcatggttttcaatgtttcaggggcatttgttggtatcactattggcaatgacatgtcgaacataccaccagcaacagatatagtgtctatcctcaaagcaaagaagattcagcatgttcgcctgcttgattcagaccatcagatgttgactgcccttgcaaatactggaatagaagtgatggttggggttccaaatgatcagctacttcgtgtgggccaatctcgttccacagctgctgattggattaataagaatgtcaatgcttacattccggccactaacatcacatatattgctgtgggtaatgaggtccttactaccattcccaatgcagcacttgttctcatacctgcactgcaattcctccagtcagcacttttggctgcaaacctcgatactcaagtgaaaatttcgagtcctcattcaatggatgtgatctcgaaggcgtttcctccctctgctgccactttcaattcgacatggagctcaataatgtctcagtatcttcagtttctcaagaataccgaatcttcgtttatgctgaatgcccaaccatactatggctatgtcggaggacaaggcgtattccccttggagtatgcactgttccgctcacttaatccgaacagtcaaatttcagatcctaacaccaatctcttttataccaatatgtttgatgctataattgatgctacctacaactcaattcaagcaataaatttcacggggattcctgttttagttacagcttctggctggccatggcgtggtgggccaagtgagaaggctgctactgttgataatgctttggcctacaatacaaacctcatacatcatgtactgaacaattctggtactcccagccaaccgaataatcagtcgagcacctacatctttgagctgttcaacgaggataatcggtcagggcctgtatcagagcaaaattgggggatcatgtttcccaatgcaaccactatatactctctatcatttgaggacgtggccacaactattcctgaatcaccagctttacgtggggtgttttgtgttgcaaatccaagtgcaccccatagtgcactgaagcatagtttggattgggcatgtggccctggttctgcaaactgcagtgcaattcaacctgggaaaccatgctatgcatcagatgatattgtagctgttgcttcttatgctttcaatgattattaccatagaacacagtctagtggcggtacatgcaacttcaacggcaccgcaatgataacatcaactgatccaagccatggttcatgcgttttcgctggaagcactggcgccaacggcggaacggcctctgggcctgtaagcccagacagttttgcttcaaaatccaaaacctgctggttgactcacctagtagccacattgttgctgcccattctatttgtagtgatgtaaaacattgtaaccatgtcacattttggatgagatgcccgcaatttatcgtggatcttgtcattagatactgtagtgactagtgacccatttgggtctgctgtattcaggtagatgccatgtaatcttatcccaagatttgttggcctaggaatcagtatttcgtcaaatcatcaattttgactgtcaactcggaaaattgagctgtgacaatccgagacctctctgaaatgttgaaacttggaagttccaaatgatttgtacacctgcatagtatttagattttcagccgtatgcatatggtttaagtgaactgctggttggatatttt

SEQ ID NO: 35618 - DNA, 253 bp, Zea Mays
gaagtgaggagccctgacgacgactcgcggcggtcccggcgtgcagcagctacgtcggcgaggaattgtgcccgaatcgatcccccatattgcttggcgttgacgcaaacttcaccaccgtgcacccgcgacacgccccaaactccaaaataggtccagcgtggatacaccgggatcctggacggcggcggctccttacttgccccaaacccggtgtgcatagccctctgctcacgcagctttctctctaaag

SEQ ID NO: 35619 - DNA, 1195 bp, Zea Mays
ctaaaacttccacttgttctagccgtcacggcgctaccagttctctgccgcatctctctgttcctctgtttcttcctcttctctaatacattccactagtaatctgttaacacttcgtcatgaagttcggcggctcgtcgctcgcgtcagccgagcggatgcaggaggtggccgacctcatccttagcttcctcggcgagatgcccgtcgtcgtcctctccgccatggggaagaccaccaataacctcctcctaggaccctccatttctagctctcagcgcctgggccggagagaaggcagtgagctgcggtggaggaggggcgtccgaaatccctgagctcgctgtcatcagggagctgaatcttaggacaattgatgagctcggtttagataagtcgatagtttcaggtatgttgttgtttgctccactctgctcttggaacgcctcagctgttcctcttgctctatcatgaatgcttctgttatacaatgggatgtcgttctcttggatgtgccaaagttttctctccccttagtctgaataacaattcctggtggatgtatgtatgtatgtattctcttggatgtgcgaaagttttccccttggatgtgcgaaacacatttactcctcactgcaatccacgcctccactctcgacccctcctccttcctcctctccctagggaccgttctccccaacacgcaggggtagcgtaggaggtgttgtggcggcattatctaggaagcggtctgtggacgtgaggcggatcaacccgaaggtgcctaaggaggaggctgtcaccatctccggtcgactcgtccagatcctctccgaccatgggcccctcaccatcggcaacacctggaacaacaccaaggtacccaatcaaccagtcagtcaagcagagtggcaaaagccggggagcgatgcaggcgtcggagcagcaacaacggaggactctgctggtgtagatgagaaggaaacacacaaagagcatcaaaagcaagttcaacgatcttatgtcaacccatccacctctgaatgaggcatattcagatgtgtgtgtattcagcactcatgctgccttcagtttacggagctcaatatgttacatcgacctttccaacctgccggcagaactcaagaagctcaagcacaagaagtgcctcgtccagtccccccaactccttcat

SEQ ID NO: 35620 - DNA, 1181 bp, Zea Mays
gttcgatttgttattcatcacagccttagcaagtctatggagacatactaccaggagagtggtcgggccggacgggatggattaccttcagaatgtattttgtattatcggcctggtgatgttccacggcagagttcaatggtgttctatgaaaactgtggcctgcaaaatctttatgacatcgtgcggtattgtcagtctaagaggagttgtcgtcatggtgcattctttcgccattttggagaggtccctcaggactgcaacggaatgtgcgacaattgtgcttccactattgagcagaaggatattgatgtcacctgtagtttcaatgaagctgttgatcttagaaaagaagaagttgagcagttgatagttaaccttatactcgacaatgttttgaaagaagaatttcagcacacagcatattcaaccaacgcttatgttaccttaggagcattgtggaagccagcactacaaggaaacagagtagtcaagcttgagattgctattgcttctaaagatagagatgttagatccaagggcgcaaaacgaggtcgcatgagtgatttggaagccaaactagatgaactgcgtagggatctgtcatccacgggtagcgatgccatatttccccatgcagttcttactgcgcaacaaatttcactactgagcagccagaagccaaccactccagctgagctagaaaaggttatagggaaggtgaagacaaggaagtacggcagcaagatcattgagctgatgaggtcacatgacaattcaggaagtggccgaggcaaggaggctggcgatgaacacagagctaagaagatcaaaacgaaggatgaggatgttgtttgtgttgagagtagcgaggaagaatagaatatgcccttcacatacttggctttttagtctatcatctcatggttaattattttgccaatcatttcctccgacgtcatctttctgtaatttagactttcacggattaatgcacagtcatatttcttacagagaaagcctcgagcatccttttgaccggttcatagtcttttgcttcggtagctttgtatcttgttgatgatcggattaatgtgcgaatacttgggattaatgtgcgaaaactttgtgccaagtgtttgaatgtactatacacatgctgaggaatatggtaatcggta

SEQ ID NO: 35621 - DNA, 3769 bp, Zea Mays
gcttggacacctgggcccactcagcagaaaaaacggaatgcgcgcgcggtgtggtgttgcatcgagtccctgtgctacgggcccgcatgtcagtgcctgctgaggaggggagagctgcccccacatgctggtgccagggattgttatgggccggtggctgaggtttcgacccagatttcaaggtgctggtgaatctggcttggccacatagatcttttttattgttgtcctcagaagacaggtttgctgagactgctttctgtctactgtaaattgatgaaattttggtgatcatatactatggaaaaaaagacagttcacgttctggctgagggtaatggtgagattgaaaatggtacgagctctagtcagaatcctgagacccttgagcatccagttttgctgtctgcatctcaaactgtgccaaataacttggggataaggaaaaactataaaagggcagcaaacagaggtaaaaagggttcccaaggactaacaggtcaggcatatactttgaggtcatctgatattgatgtcagggtgcttcgctctacatcaggttcaaagacaacatctactgagcatgtgcagcctccaggacaaccagctgccaagagaagaaaaaggagcagagcctcaaacaaaaattcgacagatgagttctcacaaattcgtaaacgggttagatacattttgaaccgaatgaattatgagcaaagcctaattgaagcttatgctagtgaaggctggaaaaatcaaagtttggataagataagacctgagaaggagcttgaacgagccaaatcagaaatcttacgatgcaaattgagaatacgggaagtcttccaaaatattgattctcttctatccaaggggaaaattgacgaatctttatttgattctgaaggagaaatatcttgtgaagatatcttttgtgctacttgtggttcgaaaaatgctacattgggtaatgatatcattctctgtgatggagcttgtgacagagggttccaccagaactgtctaaatcctcctctgcgtactgaagatattcccatgggagatgaaggatggctctgcccagcatgtgattgcaagttagactgtatagatctaataaatgaactccagggcagtgacatctccattgaggacccttgggagaaagtttttccagaggcagctgctatgaccaatggctctaagcaagatgaagcatttgatcttccatctgatgattcggatgacaatgattttgaccccaatatgcctgaagagcatgtggctagtaaggaagaaggatcttctgaagaggaagaggatgatgacggaggatcagactctgacgactctgacttcttaacctgttctgatgatttggaacctttgatagataaaaagaaggttgatgacctgggattaccttctgaagattcagaggatgatgactatgatccagcaggtcctgattcggataaagatgtcgaaaagaagtcaaattctgatgagtctgatttcacgtctgactcggatgatttttgtaaggagattaaaaaatctggtggacatgatgaagtttcatcgcctccattacccgatgtcagggtgggtgatatggaaaagaacactgctcagtctaacacaacaagttctgctgacgaccctatggagattgaaatagaccagagtgtggttttaccagcttccacttctcctcctcccgctcccgtttccgctcccgtcacccttgctgcaccagcttccactgcccctcctcccgctcccgttttcgctcctcttatcccacctgctcgcttccgggagcgcgatgagactgaggtgcgacctctagctgcagatcctaggttgtttgaccttcagcgtgctacagcagcacgggtacgtcggttcagatatgtacccgtggagtcttggttaccggctcagagggaccctgctgcagttgacctctttagcacccgtattcaggagtcctttttcagagcccagatgtctgcacagattgctctgcgagtgcaccggcttttggaccttcccgcttttctgctagccgccggtgctgactctgaggtgcacctctcttatctgcctggccttcttactcttttgactactagcggcaggtatgttgaggaatgggtccgagttttctacgcgactgtatggatcgaccctaatcaccactggatgaggtttcgttttgagcgagaggatgtcactatttatgccagccagattcgccagctatttggatttcacgagtcatcgactcgtcttcacagcttatgctatggcacctctgaccctcctcgtcgccctcacggcggtgttgctccgggtacagcttacgtcgcggctctgttccgaccgcccttctcagatgggtcgcgacgctcaccggcagatttcaccacaacagcaaagtttctctatcagcttatgagacggacacttctgccgcggatagggtccagggaggccaccactcatatccagctctggctccaagaagccaagatatctcactcagagttcgatgttgtggatttccttatttgtgagatcgaggacaccattctggatggtctgcgtgcacgacgacagctgccatatgctcactatctatgtcacatttttgctcagctgattcgacctccacagttccagggcacacttgaggtctcacgcctcgtctttgggtcctaccgtccagcgcctgaggatcctgtgccagcacctgctccagtatttgacactcaggccgaggatactgcccttcatcagttcgaagctcaggacacagcagttgataataatgattttgggattccgcctcctatgcctccacgctcacatgatcatgaggttgagagttctcgtgctacccctgctgcccctcctgccattgaccctgcttttgcttcgattctccagacacttactcagcaacaggctcacttggcagccgagcagacccgccaggcagcagcccatcagcagttgaccgagagaatgctctcgatgtttcagacaatacaggacaagcatgattctcttatgcagcagcttcttcaggatcgggctgagagaagggcattaatgactcttatgctacatcattctggtatattgattcccccggttcagtcagtcctgcctccacctcttcaggctcctgttgtgccaacgattcagccaggaccctctcttcctacagttggtccttcttcctctccgctccggtcggttaccctggctttcacgtcaccggtttttagctctgtctgccctcagccgtcagtgccaccagcttctgctgttcccactactgctatggcggtgtctgtgaccacttcagatccggcagcccctgcagcgcagcctcagtccgagtcagtatcagctctagcttctacagcagatcctggatccgagactgactctgaccctcagctagcgttcgctctactgcctcgaccgcgaccggatgtgcccccgccgcctcctccaacttctgatgcgtaggctcgggtacccttttggtgtttgacgccaaagggggagagatatgagttgtgagagctagggggagttagttagttagtagagagttattttgatgtaatatatgtgcttgcaattctctgtactagtttggtgcttttggctcacaaactctatatatactctcgatgcttatgttgactgtgtgtgtatattatgttttcaccttatatattatcaccag

SEQ ID NO: 35622 - DNA, 1597 bp, Zea Mays
ggaaacacgaacacggtcacgcactccgccgatcccgccaccgcggcgcggggacgcgcacatgctgccacgaatactcctccagtcctcccccgtggtgccggcccccacctgacccccgatccccgcaaccttctatccagaggggaaaaaaagaagacaaaaaccgccggcgagcatgggcacgcaacccggctcggcggttcgtgtcgctgcggatgagagctcgctccctggactttacttaactctactctgagtctcggatgctccagagtccagacttccgggattagaaatccacgcacatcgccgtgcacgcacgcgacggcggagatgtccgtggccgtggggaagcgggtgctcgatacgggctggctcgccgcgcgctccaccgaggtcgcgctcaccggcgtccagctcaccaccacgcacccgccggcagctgaccccgccccagccgcgccctggatgagcgccgccgtccccggcaccgtgctggggacgctgctcaagaacaagctgatccccgaccccttctacgggctgaacaaccaggccatcatcgacatcgccgacgccgggagggagtactacaccttttggttcttcaccacgttccagtgtgccctgtcaggaaatcagcatgcgactttaaacttccggggaataaactactcagctgaaatgtatttaaatgggcacaaggaggtactaccaaaaggaatgttccgaaggcacaacattgatattactgatatcctccatcctgatggtaacaatctgcttgctgtccttgttcatcctcctgatcaccctggcaaaattcctcctcaggggggccagggtggtgatcatgagattggaaaagatgttgctacacaatatgttgaaggatgggattggatgtgcccaataagggatcgaaatactggtatctgggatgaggtatcaatttccatatctgggcctgtgaatataacagacccccatctggtttcaacttttcatgatgattttaagaggtcatacctacattgtacacttcagttggagaacaaaagttcttggattgcagattgtaccttgaaaatacaagtttcaactgaacttgaagggaacatttgtttggtggaacaccttcaaagttatgcaataacagttcctcctcaatcagatatagagtacaccattccttctttattcttctataagcccaacttgtggtggccaaatggcatgggaaagcaatccttatacaacattgagattagtgtggatgtaaaagggtttggagaatctgattcctggagccattattttggattccgcaagattgagagtacaattgatgattctacgggtgggaggatcttcaaggtaaatggtgaacctatttttatccgaggagggaactggatattgtcagatggccttcttagattaacaaagaagcgatatatgaccgacatcaagttccatgctgacatgaacttcaatatgcttagatgttggggtggtgggctagcagagaggcctgacttttatcatttttgcgatgtctatggtctgatgctataagagatgttgagactgg

SEQ ID NO: 35623 - DNA, 4757 bp, Zea Mays
attccgaaaaaaatcactaacagaaggacggttcaggaagcattgacagatagaagatggattgctgatatcacaggatcactctcggtgggagtattattggattatcttcatctttggaatttaatttcagattttgagctgctgccagatatagaagataaacatacttttagtattgctgcaaatgggacttattctgctaaggctgcatatgatgggttgttcatcggggctgtgcatttcggtcactatgaaagagtttggaaaacttgggccccctctaaatgccacttcttcctctggttatcggtgctaaataaatgctggacaacagataggttggcaaagagaggacttgatcatccggagaagtgtccgctttgtgaccaagagtctgaatctttggatcatattttggtttcttgtgtttttgcgagagaattctggttccggctgaaggttgatgtgcattttcagactacaaaatctggctcctacacctagtacggtgtcttttacgggttggtgggagatgatagacaatggctccggagatatgattatgaagggtgtcaactcccttattgccttgggagcctggattatttggaatcatcggaatcaaattgtctttgatggaatctcccctagtgtttctgcagctctttgtcaggcaagggaggaacaacagttgtgggaaatggcaggagctaagggtctctcctttcttgccgcaaccatcaggggcacctagctgcctggtttatcgctgatgggctggttttgtttttcaggatctgtttgttctttttttgtttttttctcttcttttttctttggtttttttatcccctccggggaggtcttttgtactttggtctattttggaccctcttttccttctacttaatataatgatgtgcagttctcctgcgctttcgagaaaaaaaaacgtcatccgcggcctcaacgaatgctttgccaacattggtcttcacctttgacgtgggcgcctttccccacctttttcgatgcttgctctgagctccttcttgaagtgctcaggccatcagggcacctccattgacccctactgcccttgcggcctctatcattccgcctgctcccgctagtgcgcccttggtcttcggggcctgacctctggcttcctctcgtagtcttgtgtgctttgtggagcgtcggggggctcaggcctagggcctttaggtcccgtaggtcatgagtgggactcaggcctaggactcgactcgtcggtcgtgggtgggaggcggactggctccttcctacaccgcggctcggtgctgggcgcagttaatgtggcgtgcgtagtattgatggtgagagcagccctagggccagatgtggaatccactcgagtggctctctggcggttcgtctgatctccttgccaggcttcgcctcgtccgacctctggcgcggtgcataggggtcatctgggtgcagattcacataggcgagcttctccctatcttatctctcactcgtggtctcgtgggggcccggggatccgatccccgacactcgggatatggatcgccgacgtggggaaaggaggcgctggggtggcagctacacccgcgggaggctagggaggcgtaggccgagcgccgatggccgggtgtagggggatgccgccgaccgcaaccgagaaggggaggtctgtcaccggaggaggaggtgcggcagcggccgtaatcgcaatcgtccgcgcgatggctgcagcggtggttggtgcagtggacgttcgtgccgcttgcgtggggagggaggcgagcacatgaaaaggagaaagggagggaggcagtcgtggacgccgagaaggtgcgggcggacgcggtgacgatcgctctgggagatgcaggggaaggagagggaggggttgccggaggactgctccatgacggtggcgatggccgggggtgcgccgacggctagagtgcctggtggttagggaatgtagaggcttgataccatgttggaatagaaaaccctaaccagagttgatagtgcattaatataatagagttaggtgggtctgaggcccattacaatagaggcattacaatagagcatacagttacgctaacagtatcaaatgcctttgaaatctctagcttcaaaaggatgtatggttctttacttttatgtagggtctgagcaagctgctgcacaagtaagaaattgttgtgaatattcctcctaacaaaggcgctctggttgttagaccagcttaggcagcagggtgccaagcgataagcaaaaatcttggttaccaactttgcaaagcttgagttttaggacttgagctttacaagatgagtttacagcttggacttgatcagatcccatctgaggaaaaggatctccagttttggcacttgaattatcaccattgtcgaatagccaccctaaaatcaaagtatttaatttcttctgtgactgctaaaaggttgaaataacttttctaaaagaaaattgcttgtccatgggagacccctgggcattttttagtttataagttagcaaattacatcctgattggtgattggctaggaaaactagctaaatcagtttccagggaggtaaccacaaattgctgagtcctggatttgagcacaggtggccttcctctcaactgggaagtactttctaatttccttttcagatgtagatgtaatatttccaagaagtacaacccttttccttttttccttgcaccaaaccttttgtaactttgttcccagataccgggttctcggtcttgttagaagtatattactaaacaatctatctgcctacactgcattgttcagcagatgctggattagataaaatgtgattttaacaagtactccctatgttccagtttattaggtggtagtgcatttttgagaaagggcagattgttaggcggcatacatagcaaggcattgcattataaattcctgtggaagaaacacagccgttttatccgacccgatccaacaagtgaatgcaatgcaccagatcagtgtggcacctggcgtgaattaaatcttgctcacactctggtgtgtgtactcttagcgcctttaaattgggtgtggagggagtgtatatgggtgcaaaaataacatagctttgtacaagtaaacaaacatggttggacatcacttttacctaagatttttattgaggactaactgtctctgcttcttacatcctagactgaaaattttccattagatgtccacattgccttggaatgtattgattgtgctatctctttcagcatcaacatgggaaataaggactttgtatacatcaggatcatcgagtccaaaatgtgttgttactcttatgttggagattgctccaagtttttggggcagatggaagagaaggcactcaaattttgacaaaagcatcccttttgctttgctcagccaagtagcagagtgaacatgaagattctgaacttggtgatgaattttatgatgcacttactagaggtgaatccttcgaagatggggatagtgatgatgatgatgatgccacaactccaaaggctagaaaagtaaagttgaagaatgtgtcatgggctattgcaggcttggctttaaagacaactaaagctttggttgagacaagtgaattggttacaaattctagtccagttactgttgaccccagccacttccatggcacccttcatagagcgaaaactcaaaatgatcaaaattcttggagtgcacctggtggggagaagtttatgatcagagggaagacttacttaacagattatcacaaggttgttggcggtgatccacttctagagctacttgcggtcgattggttcaaagttaatgaacgctttgattcagttgccttacatcccaaaagccttgtgcaatcagaagctgcaaagaaacttcctttcatattggttataaatttgcaggtgccagcgaaaccaaattataacttggttatgtactacgctgcagagagaccagtgaacaaagattctttgttgggtagattcattgatggaactgatgcataccgagatgccagatttaaacttataccaagcattgttgagggttattggatggttaagcgtgctgtaggaacaaaagcttgccttctgggcaaagcagtaacgtgcaattatcttcgccaggataactttctggagatagatgttgacatcggttcatcatccgttgcccggagcattattggtctagtattgggatatgtcacaagcatagttgttgatcttgctattcttattgaggccaaggaagagaaagagctccccgagtacattctgggcactgttcgtctgaaccgtgtgaatcccgacagtgctgtatcaatctaattacgtttctagccgatctatgcaaatttactcttatcctcttttattctgagagaaacagcgtggcattttgaaaatgtgaaatagcattactatttgctgatccccaatcgagggtaacatatgtaaattggcatgaggcatgactacgtgacgcctttcgtaaatagaataaatcaatggttatgtaatattaatatcccatatacgcgtgtcataatctatgtggcttaaaagtggcatcaagtcatctagtttcctgtgttaacttcttattccttaggtagtcagacattaacagtgtgtttggtttgaggaatgaagtgatccatctttttctcac

SEQ ID NO: 35624 - DNA, 2750 bp, Zea Mays
gcgtgcggccgtgcgtcctctctttctttctcggcgcctctgtttctggcggccgcgactggcccagcgccaccgccgacctagccaggtgaccaggtcttcgtcaggaccatagccagcgaagaacacccaagtacccaacagatgagttcgaagaaggttccgtaccacaagcatagggaggctgaggaggcgaggaagaagagggaggaagatgaagcagcacgtgtatatgcggaatttgttgagtccttcaaaggtgatagttcatctggggctaagtttatccgaggtggtgtgattgaccccaatgcaaagctgaagactgactcggaaggtatgttccatccttcttgccaccatcatttgcaaaagagcctgagaaaaagaaggaaggggagaggccaaaggaaaaggaaaaggaaaagggaaagccacgagtaatagatagattcttggaggaaatcaagcttgaacaagagcagcgagagaagcgccatcaggatcgagatcaccgccgtgaaggtcgccatggcgatagctccatgtcctcgagccggtttgatgaactaccagatgaatttgatccgactgggagatttccaggatcatttgatgatggtgatcctcaaaccaccaacttatatgttggcaatctatctcccaaggtcgatgagaattttcttttgaggacatttggtcggtttggacctattgctagtgtcaagattatgtggcctagaacagaagaggaacgcagaaggcaaagaaattgtggttttgttgccttcatgaatagaacagatggacaagcagcaaaggatgaaatgcaaggtgttattgtgtatgactatgaactgaagattgggtggggtaaatctgttgctcttccgtcacaggctttgcctgctcctcctccaggacacatggcaatcagaaataaggagggtggtacagctacagtcatactttctggtcctggcggccctgctgttgcatctattaaaccacaaacctcagagctggtccttacaccaaatgttcctgatattgtggttgctccacctgatgatgggcatcttcggcatgtgattgacacaatggctctgcacgtacttgatggtggatgtgcttttgaacaagctgtaatggagagagggcgaggaaatcctttatttgatttcttgttcaatcttaaatctaaagagcacacatattatgtttggaggctatactcatttgcccagggtgatactctacaacgatggagaacagaaccctacatcatgatcacaggaagtggaagatgggtcccacctcccttgtcgtccaacagaagccctgaacgtgaaaaggaatctacatttgctgctggtagaagcaggcgtgttgaagtggagcgtacattgactgactcacagcgtgatgaatttgaggacatgctgcgagctttgacattagagaggagccaaataaaagacgccatgggatttgccttggataatgctgatgcagctggcgagattgttgaggttcttacagaatccttgacactcaaggagacgtctattccaacaaaggttgctcggcttatgctagtgtctgacatccttcataacagtagcgctcctgtgaagaacgcatctgcattccgaacgaagtttgaagcttctttgccagatgttatggagagctttaatgacttgtatcgcagtatcactggaaggattactgctgaagctctgaaggagagggttatgaaagttctacaagtttgggcagactggttcctgttttctgatgcatttcttaatgggctgagggctacttttcttagatcaggcaactctggtgttgttccgtttcactcgttatgtggtgatgcacccgaaattgaaaagaaaggtagctctgaggacggaaatgatggatttaagcttaatgaagacggtgccttggctactggaaaggcagcagcgacaaaggagctattagggctcccgctagctgaacttgagcgccgctgtagacataatggcctctctctgtgcggtggtaaagaaatgatggtcgccaggctgcttaacttggaagaggctgagaaggaacgaatttacgagaaggatgttgacgtgaaatatgtgcagggtgaacagcatgtggttggaagagaggacagtggtgtgaatgctcatagtacttcaaggtttggtgaaggttctaatggtgatgaattagatgtctctcggaacagtatgagagctggtaaaggacgttctggaggatctgcttctgccgaacttgaatcatttccaagcaagaagccgaaatacgatcctgttttgccagcttctaaatggagtcgagaggatgacatcagtgacgatgaagataggaaaggtggccgaggcttgggattaagctattcgtccggaagcgatattgctgatggtctcggaaaggtcgatacaacagaagctagtactgaccacacaagtcatcatcatgatacgattgttgatgaagagcacaggtgcttgtccgttttcaatatttttttaccattgccatgctagtttttgtaagtgtctgccacagtgttattaaaactacgtttaaacgatgtttaaactacgtttaaacgtcaaaactctaattagagattgaaaccgcgttttagcgttttggcgttctaaactgtaaaacgtagtgctttatccattttagaccataagctacttttgggctca

SEQ ID NO: 35625 - DNA, 535 bp, Zea Mays
tacctgatagtttatatgagcagacctaaaattcagatttgataatgttatggtgttgcttatgatagacaagacaatgctgcgaacgtaatatggcagggccatgtgtgagaaaggttggcacatagatgaatgatggatcgtctcgtgttttaaacatgggtaaaagatggattattacccattgctacttataagatatatttttctccattatataacgaaatatctacaaaattgcaagccaatatatccggatttagaaaactggctatgttatttccttcgaaccacaggctatctagcttagaacatcactcaggtttctatgcacaacatctaataattaaatctggtagcatgcttctcaaagggtaagtaggttccatacggaatacgtgacttcaagatgtctaatgctgatgaaatgttttcttgaactagctgcttcgcgtgctcacggaacatctcagcagcaatctgcaagaaatttagaatgtcacttaaaaacaaaaacatgcttacattgactcta

SEQ ID NO: 35626 - DNA, 2070 bp, Zea Mays
ccaaaactaagagttaaaatacctgactatggttttcaaatgtggttttgtagatatatatgatgttccccacttcatcaacacattgaaatatgatgttcgaattgtcatgagcattccaaaaatcactgcacaaggaaagaccaagaagctcaaagcatataagattttacctcctagagatgcacccgttacttggtacagaacaactgctttggagagactaaggaagtatggtgcaatatatttaactccattttcacaccgtttggcagaaaaaattgatgatccagagttccagagattgagatgcagggtgaattatcacgcactacgatttaagccaagtatcatgaaaacaagtagtgatatagcgaataagctccattcagaaggccatttcatgtcaattcatcttcggtttgagctggatgtgcttgcatatgctgggtgcttcgacatattcacacctgaagaacaggaaatcctgttgaggcatcggaacaaatattttccattgctgttgaggtattggggcaaatattttccaggaaacacacctgactacagggaaagaaggctcattggaaagtgccctttaactccagaagagattctggctcaagggtattgccaagcttggccctgcatctcagagaggcgatcgtaggtcttattctacgtgctacgggatttgataactcaacatggatttaccttgctcctggcaagctctttggtgggaaacacttcatgaagccattcaaggctatgtttccacgtcttaaaaaccatagtatgatcagaagtggaaagctggaagaaaatatccgagggctagcagggtcagcagttgattacatggtctgtctcctgtcggacatttttatatatgatggtccgagcaacttcgcagacaatctcatgggtcatcgtctatactatggtttccgaaccacgatcacaccaaacaagaaggcccttgctcggatattcatggacagggaggaagggcacacatctgcatttgaggagagggtcaggcaggtcatgctcacccattttggcgccccccacaagcgcatccatccagagtctttctacacaaacccatggccagagtgcttctgccagacgaaagctaggaatcatgctgaccggtgcccacacaacagtgtaaatgatgtccttgaaagttggttccataataaagaagatgtagaagtggaagctactaatcaaactgactccaccagctaaaccgagagttggctggtggaactgagttatcaaaggtttattgattgagaacagattgtttgtcacagacctgcgaatgacatcattggaggaaggattgatggctccagatctctgtaggcgattatgttcgactcaagatttagttgttgagattcttagtctgggagggtcagaaccagattttggataggtttacattgtcatgtagagttctgtggaagaaaaatcatacgaacgtcatgaactatgtggctactacaattggagatctttaccccatatgctatagctgagtgtttggtggcttcagttctgttggagttatttgctgttcctcactatacatatctggttgaattcatgcgttcctggtcctggaactggaacttccccagttttgatttttgcaattcaccgtaatgctaaaaagtcgactatctccaggctccctatcccactccctatttcaaagttctctctgcaacaatacatctatagtgcaaaacagtgttatacacgcctgcatgcacgacgttgctggagttggcctaattccgggttgctggagttggcctaattccgggctccttcgaggtccatggcagcatgtaactgtattgatttgttctccttgtttgtagcctcacacttggttgaatatttcgaaaaatctagaattccaatattttttcttatttttattttgtttttttagtttctttagaaagagataacagtcctttgtacttgtatatatgtacacaacacatattaatgcaaaccatgtattgtgtcagtcgtttgaac

SEQ ID NO: 35627 - DNA, 2081 bp, Zea Mays
gttttaggaacatccctagtaatctgtctaggtctctttgacctggacttatttcttcttcttaatatattgaggcgcaattcttctgcgttttccaaaaaaagtagtgtcatcctcttgatgagagtaagagtcccgttgcctaaatcctcaacccgggctaaggtgacagcttcgaccatggataggagagaacgagagaggagatgagctcgaagctgctcgaagtccaaacggagacaccagagaaactcatggaggcaaagaacatcgttgtgccccctgtcggaggacacaccagggataggaggaacaccatcgacactgaccatgggttcaataggacgctccgggacaggaggagacaaaccagtaaggtgaccccatatgcgctagctgttgagacacacgcggagcatggtggaccactcccagaagttggtgccatcgaagttgctcttacattaattggtggagtgcagcgtgttgatgcttctggaacaaaggttcgtggagaatcccatatgcttcttgttggtgatccaggtattggtaaatcccaatttttgaagtttgctgctaaattgagcaaccgatctgtgatcacaactggtctcggaagcaccagtgctggtttaactgtcacagctgtaaaggatggtggggagtggatgcttgaggctggtgctcttgttttggctgatggtggcttatgctgcatagatgaattcgacagcatgcgagagcatgacagaacaacaatacatgaagccatggagcaacagacaattagcattgcgaaggctggattagttacaacactcagtacaaggactactgtctttggtgccacgaatccaaaagggcaatatgaccctaatgaaagtttgtctgtgaatacaacactttcaggaccactgttgagtagatttgatatagttcttgttcttctggatacacaaaatactggttgggatgaaatagtttcatctcatatactgaaggagaattctgatgaaaagaaagacaaggcagatgcttctgatataaagtggatgctcccccagttgagaaggtacatcaattatgtaaggaggaagtttaaaccagtgctgacaaaggaggctgaaagagttatctcaagctattatcatctacagagaaaatcaggaacacataatgcagcaaggacaacagtgcgcatgcttgaaagtttgataaggctagcacaagcacatgcacgattaatgttcagaaatgaggttagacaacttgatgccattgctgccatattatgcatggaatcctccatgacaacatctcctatagtggacatcgttggaaatgctttgcactcaaattttacagttgaccctgatgaagaatataaaacacaggagaagaagattctcaagaaactcggaataactcaaggatccccataattcaatacaaacatcagttgctgcatcctgtagatttattaacgcatggacttacatgctattctgcatattgaatcagtgatacatgaagtctcttggtggaacaaggcctgcctttgcagttcatggtgtatatacttcttttgggcatgtaatttgtccaaatttgcaatatgtatcagattggtcttttttgtgagctctttgatgatgggaatgttgtctactgctgaaagtacaacgtcattaaatcctgtaatattcgctcccattggagtcgagtccaggacctaagatgctactaaggcttttataacccctaggctatagttccttttgctgtatcagattggctttgtaatgtgtaacaatttcttgtcacttagtttattacttatgacatctatctgttcacttagtttatatcttatggtatctatctgttcaaattgaaagaaattaagttattgaatgagtgtcgtctgtcatttgttgtgctattgttcagtaaaacattttgatgatgtgaagaggggactaaggaggatctggagtttcagttttgtggagtgaatataaatgataaatacaccagtgtttctatgaatgtatgtgggttccaataacatggtgttg

SEQ ID NO: 35628 - DNA, 2631 bp, Zea Mays
tccctgaaaacatgctgtgtttgagcaacctcacgcggtttcaaacaaagaaaggaaaacacaaacgatcttaagtctctatatatataggtggttcgaggtgatcggcagaaccacacaggcaaagatggcgagcgtgcacaaggccaccacccttgttctcatgttctgcctgctagcgctggggagagcggagtacctcaagtacaaggacccaaagcagcccgtcgctgttcgcatcaaggacctgctgggtcggatgactctcgccgaaaagatcggccagatgacgcagatcgagagggaaaacgccacggccgacgcgctggccaaatacttcataggtagcgtgctgagcggcggaggcagcgtgcctgctcctcaggcgtctgctcaggcttgggccgccatggtgaccgagatgcagaagggcgctctttctacgcgtctgggtataccgatcatctacggtatcgatgcagtgcatgggcacaacaacgtctacaaagctactattttccctcacaacgtcgggcttggagctaccagggaccctgacctcgttaagagaattggagaagcaactgctcttgaagttagagctactggaattccttacgcctttgctccctgtatagcggtctgtagagatccaagatggggacgttgctatgagagctacagtgaggatccaaaggttgtccagtcactgacttcactcatctctggcctgcaaggtgacgctcctgcggattccgcgggaaggccgtatgttgggggaagtaagaaggttgctgcatgcgcgaagcactatgtcggtgatggtggaacgcataacggaatcaacgagaacaacacgatcatcgacacacacgggctgctgagcatccatatgcctccttactacaactctatcatccgaggtgtctccacggtcatggtctcctactccagctggaacggagtgaagatgcacgcgaaccatttcctggtcacggattttctcaagaacaagctcaagtttaggggttttgtgatttccgactgggagggcattgatcggatcactactcctcctcacgccaactactcttactcaattgaggctggtgttggtgctggaattgacatgatcatggttccattcagatacacagaattcatcgacgatctgacgacacaagttcagaacaaggtcatccccatgagcagaatcgacgacgccgtctacaggatccttcgtgtcaagttcaccatgggtctgttcgagaacccttaccccgactctagcctcgccggcgagctcgggaagcaagaacaccgggaactggcgcgcgaagccgtcaggaaatcccttgttctcctgaagaacggcaagtcctcctacgctccgttgctgcccctcccgaagaaggccggcaagatcctggtcgccggcagccacgccaacgacctgggcaaccagtgcggggggtggacgatcacgtggcaaggaagcagcggcaacaccactgccggcacgacgatcctctccgggatcgaggccaccgtggaccccagcacgcaggtggtgtactcggagagcccggacagcggcgtgctggccgacaagtacgactacgcgatcgtggtggtcggtgagccgccatacgcggagacgttcggcgacaacctgaacctgacgatcccggcgcccgggccgagcgtgatccagtcggtgtgcggggccgccaagtgcgtagtggtcctcatctccggcaggccgctggtggtggagccgtacctgggcgacatggacgcgctggtggcggcgtggctgccggggtcggaggggcagggcgtggcggacgtgctgttcggcgactacgggttcacggggaagctgccgcggacgtggttcaagtcggtggaccagctgcccatgaacgtgggcgacgcgcactacgacccgctcttcccgttcggcttcggactcaccaccaagggcacgaagtgagtgagtgtgaggcgctctgatgggatgtggcctgtgagtgagctgtgtattcgtgggcgggcgtgaggctctttggctttcgaattggttgggggtgacgggcggcgagtcgtgtacgccgcacacattgcgcagcgtacgttgggttgggatgtttgcgtctgggtaataacagtgatgcattcttgagatggttgctgttagtgtgggttgtttggaatgaacaataagatcaggcgcgttacattggcacgctactacctctcctgctgagaccagagatggcgatgtgcatttacccatcggcccgtgctattccataccctatttagccgtgtactgataaaagaatttgtcaaaccgtgtacgggtaaaatcatgtatccatgtactgctcactataccgtatacgccagctacttctactaccaatattactcgtatctagtgtaaaaatgattagggtgctaatattagggcctgtttggcatggctccagagcaaaactccaaggaggagctggccagagcatgccaaacaccctaactccagagttgtaaactctatgaagtttttggagctgcagtacaattttttggagtacctcttttgctgctctgaaaactccaaaaaag

SEQ ID NO: 35629 - DNA, 1631 bp, Zea Mays
ctttctccatccacttgtgtactttcgacgtcgtcttcctcagtagcgcccccttctttctccacccgccgtcgacgcagctgccttccagccatctccatatccgtttcgccgtccccttcctcctcatcagtggctcgtcaagcgcgtcgtcgggatgcatgggggctccgtcacctaccttgtcgaccccggcaacaacgactcctcctccagaaccgtcgtgataaactacgcctatgctcgagacaatgaaacactatttgatattattagtgtgaagttctttcgttgcggagatggcagcggcggcggggccgtacaaagagatgctggaagtggtgaacgcgtgcgcgacccggatccggtggcgcctcagtccagcttccaagcgccgcctcctcaacggtcagtgcccactcgcttgctgctttctcttagtagttgtagtcgttttttaacgggaaatacaacagggaagccaccagcccaccactatgtaggattttattaattgaaaaatagtgttgtagttgttattatctctatttaggacttgttgttggcaattgtcctatttcttgcttaattcgctaccgccatgctgtctttctgttctactgctaaaacacttattttttgtggtcgttgaatgaattgttaaccaaactcaattgcagaagacattcatccactaatcgtcacatgatccaccttagttcataagtttataccaccgtagttataggtcacttggtcagtagctgcaacttgcaagtgatttagggtttaataaaaaatttctggtagtaaagttgaaaggtatggtttgaggagagtgaatggtatcatgtcgaattacagtacattacaatttacaagtaaattgattagtcctctggtcttttgattggtagcatgtttttcctatgtaattgcctctgttcttctttaggggctaggttcgttgtaatcatttgaccgtggggatgtttgtactaaattcttatttctcttaaggaaaatcatgctaatgcacgaccacgaagaaaaagtaaattcatgaacaaatctacctaacttatgatttctgttggattttaactctagtctacctctttgaaattaaaaggttgtgctgtggttgttgatgaacaaacccagttgttgccaaatatcctgtttctctgcactaggttgcgtcctgtggtactggtcgactatggtggcacaatgcctcagctacaagaaaatctttgtggcctgctatatcttgcccgacagttcaagctctacaaggttaggtctgttcagtttggctagaaaggcatcccctacctgaacacctacgacgaccgcaccatccgctaccccgaccctctcatcaaggccaacgacaccatcaagatcgatctggagaccaacaagatcatggacttcatcaagttgtatttgccctttcatggacttcatcaagttatatacttagttaggctcaatgttagcacaaacagttgatgagcaagtttaaatttagagtacacttatgtatgagttatttgacaatgcttatttatgagatattgaatattatttatctatattatattaattatagtgttattaaatat

SEQ ID NO: 35630 - DNA, 696 bp, Zea Mays
aaccaacttgccgaccgcaggaatccagccgacccagcacttccccggttcctcccagcagagtcttcttctctgcatccgttccgttccccggcctctcgcacatccaccgccaccgagccgcgtgcgtcttccatgaaggacccgttcgaggcggacgtcgaggagcaggactcgccgccggagtcgccggcgccgcccgaggatgaacccggcgccgcgggccctgcggaggaccccgaggactacgacggcggcccgcccccgcgccagccgtctgccccggcgtctcacgcagccggtgccaaggccaaggcccgtgtccatagggagcagcaggaggatgacgacgaggacgaggaccagattgaggtcgacctcgagaagcttcccagcagcactggcgacccagacaagctcgctaagatgaactgttggcaagcatcactggaagtcagaagatttctatccctacttcaattgtggtatcgggaatcgccaaaatatttgttggtgagctaattgaaacagcaagagtggtcatgagcgagaggaaggattcaggacccattaggccttgccacatcagggaggcatacagaagattgaagcttgaaagggatgatcccacggcgatctgttcctaggcttttccgtttgtttgaagcatgtatattacacatgtgtctggagtcc

SEQ ID NO: 35631 - DNA, 3311 bp, Zea Mays
caagttcgtcgagccgaacagcgacctgcactcgtaggctcaggcgcggtttaccctgacccacatacgatagttgatgtgggtgaaatggactttttaagtccaaaataagcgtactaacaccggcagccgccccaaatctcagtcgggtcattccaatcgaaaccctagaagcgctccgccgagctccaggttcccgagctcgccgctttctcgcggagtaaaaaggccgaggccgggacaacctacttgtgctacctcaacggttcagccatggatctggagatcgttgggcggcatgccttactgttcgacgacgacgcgacggcggagctcgtcaactccggcgtctcccttgtcccctgggcggccgtcggcgcggcagacctcctcctcgaccgccacgacgtccgccacctccttgaccgcgtgccccctcgcccgcaccgcgcctactcgatggccctcctctccgcgccctcccctgacggcgtctctgagaccgagctcgatcgcgagcgctaccttgacctcccggctggcgacggcgaatacgagggttctggggatgcggctccttcaggaaatgggtcagatactggacagactgattataatgttgttcctttctcgtatggatatcccgctggttcagatgaaccaaattcttcgaacttgtgctatcgcccatcattttatgtgccagaaagcttgttgaataagctgatggttggagcagagatgaagttcctactagtgatgcacattgtttccttgcaatgtatcttgacgtaaggaatataggcagcctccttctgagaaggtgcatcagataattgcaaggacagccttatttgtcagcgagcatgggggacaatcagagattgtattgagggtgaaacaaggagataatccaacatttggattcttgatgcctgatcatcatctccacagctacttccgctaccttgttgatcatcctcaactgctgaaggatggtgctgatgctgttggcacgaataaaggcaatactgagaatgagcatgcttcatctggcggggctttatcattgcttgggaccacatatgactcaggagacgagaatgaaggcacactcccgcgtagttcggaaggcatgaatcctgaaaatagcatgactcttgatgtgcagggccatgtaaaatctgcatcaattatgcctgacaaaaaagaaataggcaaaaatcagaatgctcctcctgcagttaaaagaaaaacaatattgatgaagaagaatcagattcttactggcaacagcatggttgctgttcagcatgaaaaggttaatgacgcaattatagcatcaagtacttccaaatcacataccaattcaggcttatcagaaataaaagaaatgatccttgaaccaccatctttcatgaaacgcacaatggagaaaataattgagttcattctgacaaatgggaaggagttcgagaaaaaactgattgagcaagacagaacaactgggaggtttccatttcttctgtcttctaatccataccactcatattatctaaagtttctccaggaaactgaagagtccaattcacatggtagaagtcctaataacaaggacagaagaggttcttctgaccggaggggcagaaactctcgtgagcgcgccgacagaagctcctgtgagcgcgctgacagaagctctcgtgaacgcgccgacagaaggtgctcaatggagcgcaaagacatcaattatagcatggaatccagtgcttctgatagaagctcatctgggccatcagagaagcagctgtatgacaaacaagggaagggtatattccatcctgtttgtggggtcaagactcggaaagttactgcagatgaagctgctgctatagtaatggcagctactcgaggactgggtgctgcaaatgactcacttaacaccatgaaaggaaccaaggacaatgttcgcacccatgttagtaatgatccttcttccagctttggaagtttctcatctttacaggaccgaaatgcactgtccaaacacatttcaaatagtgatgttgatgcttcacttacaagtagtggacagccccaaagggaaggttttggaatcattgatgatgattggattgcaaacactattgcaaaagctgctgctgcagcagcttccaaagaggcaggttctttggaagctaccatgacaaaggaacagaagctgaaagctgataggcttcgccgtgcgaagatgtttgctgcaatcattaagagtggagacaacaagatgaatgatttagctgcagcatcgaacccaactagtgaagctgccaaggccattcctgatatgaatgcctctggacttgatctgcaatctgtggctaaggaacgtgaaggtagtagctctgttctgtttgaccatgaggggccaaacttgacaaaacatagtaaagactctgatgatgaacagaacagagtgcggaagtatagaaagaaacaccaagaatccgacgaggaaaaagatgaatctgaggatagctataagcactcaaggaagaagcatcgcccagagcattcaagagaccagagcaaggatgttcacaaacataagaacaagagtcactccaaggacagggaatccagacatcatagacaccattgtagctcttcggaagatgagcatgagcatgaacgttggagttccaaatcaaggcataggcatagagatgatcaccgctactctgacgaggaacactctgatgaggaacacaggaggtcacacaagcatcggagggagcatcactccagttctaaaaggaagcacgaggaagactgataccaggttcgccggaagtgtctgtctagatcaggtgccaagtttgaatcagacaagctgtctgatgacactgcacaaatcaactcagggaacaactgaagcgccgagtaaactgagagcaaaaatcagagcaacatactgtaatattttgtatcacagcagtaacattatgtccttaggcctctgttttgtagccaattgctctttcgatttctgtatttgtttcgaacgttctaactaggtgtctgtccatcttatttgaaatcagtgacctgctcgccaagttctaactacatgctggcgtttctgatgcatgcatagctttattatttcaagtggtctacatgtagcgtcatactccgtcccaaaattcgttttagttaactaatggttgatatgtgttttaagtatgtgtctagattcattttcatgtatttgaatatagatataaaaattaatagctaatcaatggcta

SEQ ID NO: 35632 - DNA, 893 bp, Zea Mays
  misc_feature (1)..(2): n is a, c, g, or t
nnatcgttgagaagtattccaactccaacattgaaattcatactttcaatcagagccagtatcctcgcattgttaccgaggacttcttgccacttccaagcaaagggaaatctgggaaggatggctggtatcctccaggccatggtgatgtgttcccctctttgaataacagtggaaaactcgacatcttattggctcagggcaaggacacagagatcctgaaccatctgatcaataaccagaatgaatactgcatggaggttactccaaaaacattggctgatgttaaaggcggtactctcatctcttacgaaggaagagttcagcttttggagattgcccaagtacctgatgagcatgtgaatgagtttaaatcaatcgagaagtttaagatattcaacactaacaacttgtgggtgaaccttaaagctgtcaagagactagtagaggctgaggcacttaagatggaaattattccaaaccccaaggaagttgatggtgtgaaagtccttcaacttgaaactgcagctggtgcagctattcgtttctttgacaaagcgattggaattaatgttccccgctcaagatttctcccggtgaaggctacatctgatttattgcttgtgcagtctgatctttacaccttggttgatggctttgtcatccgcaatccatccagagcgaatccagctaacccttcgattgagcttggacctgagttcaagaaggttgccaatttccttgctcggttcaagtccatccccagcatcgtcgagcttgacagcttgaaggtttctggtgatgtctggtttggttctggaattacgctcaagcctcgttgagttgtggcatctgtgttgctgaatagtgcctgattcatatcgttggtgcta

SEQ ID NO: 35633 - DNA, 2064 bp, Zea Mays
cgcgccaccacccaagtgagtgacccatcccctccatcggactctccactcccaccgtctcacgaccacgaataccgccgcccccggccctttcctcgtctcctcctcctttcatcgccaccatcgccgtcggtgcgccttgcaggaggtgcgagaggtcggtcgaaaagcacagccatggcggcggtcaaggtggacaaggccaccaacgagctgctgctgggccccgactggaccctcaacatcgatatctgcgacgccgtcaactccgatcacgggcaaggaaaggaggtgattaaagctttgaaaaaacgtattcaacacaagaatgcaaatgttcagtttcttgctttgacgctattagagactctaataaagaactgtggggatcatgtacattatcaagttgtagagcgcaatatactggaggaaatgatgaagattgtgaagaaaaagcgatctggtgttgaatttccaaagcggtcacctgatgctgcatcgatgtttatttctccggtcacacagccagaatctttgccaacatatcttcaagcagggtatggaatgccagttgattcttcctcaaggcttgatgaggcaatgtcatcaaatggagctcctctgagcatctcagacttggaacgaatgctgggggctgtggaactattaaatgagatgttgagagctgtcaatccaaatgaaaaagatgctgccaatgatgaaattattacagaacttgtgacccaatgccggtcataccagaaaaagatcatgagttcagtaagcttagtaagggacgaggacctcttgggccaagctcttgatttaaacgatagattacaaattctgcttgagaaacacgattcaatcgcatcgtgttctccttcatctgctgacgtgatagacgtggtgtgtgaagtgccatcgggaacagctccaaaccaaggaacaaatttccctccacaagctgcacttcgtacagccatagtaccgaccaatgttttggacgacgaagatgaggaaaacgaagacgacgagttctctatgctagctcgaaggaactcaagattccagcccacaaacacccagagcacctcttcaccaaccgtccatgatgaaacagcaagctctacagcctctgttccctatacagcatcgccatcagttgcgaacaacgcattgcctccgcacgatcctccagccccgccagtgagggtctctccagaagagcaggtcatgagtgaccttctcgcactcaccgtgtcatcaaacccgtcaccatcctcctacaccccggtaacacctgaaccaggccgcctgaatcaaagcagcgcaccaacaggtgagcttccgcgggcttatcatggagaccaaggacacgtgtctgcaccttacgtcgctccgtgggctcagccgcagtcccagaccgcaggaagtcagcaaccgacacgcactcaggcacaggtatcttacagctcgtatgcttacccaccgccgccatgggcgtcacaggacagcaccgaatcgaacccttttgtagcggcagcatcgtcatctcagcaataccagtccacttcgagaacccctaccatgccaccgaacttgaggcctctactacagcagtcgcattcttttggagtaccacttccaaccgcgagtctggactcgccaataaatgggaacctgaagcaaccgctgtctgctggggctcgcaggccatcttatgtttcttccaacaagttcttcgacgacttgtttgagaggaactcggatggtagcctgaaagtaggcagcacaaggcacagtgatgtctatggaaaataaatgtcgttctcttgtcctgcctgcgtttgatgttatcagctgcctgcatattagaacgatttagttgatgcttctggcgaacttgcttgcctttccataaataattttgccaaaccaaactatgtggaagcttcagcctatgagctgtccactgtccagacattttgaatggcaaaaggcgattcttcctaaattgtgtaatgaaacgggtttgcttctaaatatagtgttctttagagc

SEQ ID NO: 35634 - DNA, 1227 bp, Zea Mays
agccgtcgcctctccttgctctgctcctctctctcccaagcggctctccctctatctcctcgtttctctcccctcctcttctacagccgctgccaggcaaccgaccgccgagcagcgcagccacccgagccccacgcccgccgcgccaggaaccagcgcccctgctctcgccaggacgccaggaattgctctttctatagcaagtttatgagttcagtttatattccattgaatatttgttgcagtgaagagaaatgagagaaagccttcggttgtagccttcagtttatattccattgaatatttgttgcatccgactcatctctgtttcgattccatccggtttggctcattttttaatcgagtgtgttgtagttttgtaccctaatgtcgtgggagtgctaccgaagtactgatagcatcactttaatttcattagctccgtcctggcaatcactttgggaaggtggtcagtggaataactttgcttaaaaagcttgaagcagttggtagtgaaactggaaatccttcttatcaagtgaaaattgtagactgtggtgaagtttccaacacaaattctcaggatccgctaaagggagataaagtaagctcaaagacagataacagcagttcagacagtgaaaagggtggccatcgtaccaagcgttccttgacgaaaggtgagctctagaatgttgagccttggcgctctcaccacatttgattacttggggattgagtaaccgggaaaggcgtattgcacttgttgctgctggcgctgctgctggcattgcttcaggcttcaatgcagcagttgctgggtgcttctttgccattgaaactgtattaagacctcttaaagcagaaaattcacctccatttacgactgcaatgataatattggcatctgttatatcatctactgtttcaaatgttttacttggagccagaccagcttttatagtgccagcctatgagctaaaatctgctgccggtagctgttctgatcttttcttacagtaacgttagtagctatccttctttttatggagcttcggggcacttcttgtaaaatggttttctaagttcattaagcccagatacgtgattccatttgtttaggttatgagcataatggccgtaactgttttcttttttgttagttaggattgacctttttggtataaattttaagttccctttggaaaactcatttcaatgatgttg

SEQ ID NO: 35635 - DNA, 1852 bp, Zea Mays
aaattaaattaattacataatcaaattccagacgtcagatataacaagctaaacaatattgaacatacaaaaattttaatactgaaaaaagacaactagaaaataatatgtacatttacaaaattatactaaaaattaaaaatactcacttagcggctcggcggtagggtggacgcgcggcatgggcggggcggggccggcgagggacgagtcggggcaggtgccggggtgggggcagttggcagcggccatggccgcggcgagcagggcgacggcggtgggcaggacggcggcggtgctctgggcgcgatggacaagttggaaatggaacggcgcggtccggtcccacgtgttaaaatcacttatgtccgtcggaacggcttccatagcgctgaagcgaggcgtgccgcattgggttgttcgagagctcctagtgttgccctactacatgatggagggcgatctccccacgcccgcgaacgctagggttgttgccgtggtcaccggcggcaacaaggggatcgggctggaggtgtgccggcagctggcctgcagcggcgtcaccgtcgtcttgacagccagggacgacgcgaggggcgcggcggccgtggagaacctcagaggcctggggctctccgatgtcctcttccaccgactggacgttaccgacgctccgagcatcgctcgactcgctggtttcctcgagacccgtttcgggaagctagacatcctggtaaataatgccgcgattggcggggttgagtatgttcatgaccaagattgtggctcagtaacgagcgaggaaaaggcaaagttgagcggcatggacatggatcagaggcttggatggctgtgggagaattgccgggagacctacgacgatgcaaagacaggcctacgaacaaactactacggcacaaagcaagtaatcgagactttactgcctctactgcaagcctcctccgatgggaggatcgttaacgtctcctcccacttcggccagctaagggtaagatctgctcatcactttgtgcaagtctaatggcaacgcattgtgcgtgcgtaaaaaaagagaggtcaggtctggaaattttcttctaaactttaccaaggccaccgaagctcatgttcgaaggatgatcctgttcagttatctagacgacagtagaacttccaaattaaagcatgagacagtaacaaaagctccctcccaaaataatgcagcttttccgaaacgaggagctgaagcgggagctgaacgacattgacaacctcaccccggagaggctggatggcctgctggacatgttcttaaatgacttggaggccggcgaggtggagtcgtcgaacggctggccgatgtatttctcggcgtacaaggtggccaaggcggccatgaacgcgtactcgaggatcctggcgaggcggcaccccgagctgcgcgtcaactgcgtgcaccccggctatgtcaggaccgacatgaccatacactcggggctgttgacaccggaggaaggtggcagcagggtggccatggtggcgctgctgccgggaggcgggccaaccggcgcgttctttgaagattttcaacagtcgtcgttcgtgtgatgttgaacatgcagctgcatctcatatgtattctatagatattatttatgtgaaagatgctacagtacgctccccctgcgtttacattcagcgcacctctgaactcttaaacttcaagtcttcaacgacaaatctagacatgatgctgcaaaacatttttaatgtctcctctttcaaaacacgagtttcgtgcgtcatgcacgaagcacaaagagttttttttctcttccatatcatatctcgt

SEQ ID NO: 35636 - DNA, 3580 bp, Zea Mays
agtctctctctactcccccactcttcccccactcccccagcacgccactgctcacacagaccaccccccactcggaggcggagtggagctcctccaatccgtcccgaatccggacgccgctcgcaccgcccgcaccgcccgcagatggacgcccgccccccgatccgcccgctctgaccagacgaacccggtccccgcccccgccgccgccgctggagcgcggtaatggcgggcttctagcgcgtcggacttaaagatctagcctttctattttgtttcctctctgcctcttttctttcgctggcaccgatggtcaccgagatggcggcgcgcggcggcgaggcggcggcgttcggcgcggaggccgaccgcggcgacttcgaggtcttccgcagcggctccgcgccgcccaccgtcgagggcgccctgggcgccgccgcggccgctgccgacctgctcgtggatgacgacctccgcgccgacccggcgtaccagagctactactactccaatgcgcacctcaacccccgcctcccgccgccgctcctgtccaaggaggactggcgctcctcgcaccaccgcctccgctccgcggccttcggcgggatcggggacggcaggaggcagcagcagccggctgcccaagggacggtcggcctgcccgggatcgatcttgcccgccagaggagcttctccaccgtctttcaggaggattcgtatcagcgtgatatggataggcagactgccagccacaatagtagtgaatcattatgttcttctggaatacagtatggtctaaatcgtggacctggaactattggaggcctgcactctagcaatagtttacgaagcttggatgaaattccgaacaatgatctgccatcaaatacatttgcttctcttttagggtcatctctttctaggagtgcatctccagatcctgagcttgtgaggagggcccctagtccatcccttcctccaatcggtgtgaaagttggcaacactgataagatgaatggtggttcctcttctttccgtcgtagttcatccgcaatcggtggatctgatgatctggtggctgccttatctgggatgaacttatcatctagggcaatgagtgggcaaactatggaccagtctcagctctatcaggatgttgataacgtccagaagtttctttttgatcgacagggtgaccaaccaaatggcaatcagcagcactacatgaggcgtcctgagcatggacaatctaagttatctgatggatattctgccaatttggccaattcatccacgatgagaaaccagattaattctggcagtttcacatcttttgacagtttgtctcttggatctggctttccttcccctaggattggttctagatcccctggagggactgtatcttctcgacaaaatttagctggtatgtctaacatgctaaactataatggaattggaagtccaactgcgtcaccttctcttcagacttctattgatccagcgtatatccagtaccttgctcaaattgcagctacctgggatgatcctctaatggacaggagccatctgggaagttcttacatggacttacttggtacacagaaagctaaccttggccctttacttcagtcacaaaagcaatatggttactgtggcaatcttggatttaaccttggtggttatgctggaagtccattgacaagtcctgttcttccctcttcacctattgcaccaggcagtccacttaggcatggtgaccgcaacatgcgctttccaccaggcatgagaaacttcggtaattcctttggttcatggaattcaggcatgagtggaaagatggatgctaatttgatgccctctctcctggaggaattcaagagcaacaaaagtaaatcatatgagctctccgaaatagctggccatgttgttgagtttagtgctgatcaatatggaagccggttcatacaacagaagctagaaacagccagtactgaagaaaaggacatggttttttcagaaattatgcctcaagctctcacattaatgactgatgtatttggaaattatgttgtccaaaagttttttgagcatggaagcactgcccagataaaggaattggctggtcagcttattggacgtgtccttgctcttagtcttcagatgtatgggtgccgggttatacagaaggctatagaagttgttgatttggatctgcagactaaaatggttgcggagctggagggtcatgtcatgcgctgtgtacgtgatcaaaatgggaaccatgttatacagaaatgcatagagtgcattcctcagcatgctatcgagttcattgtctcgacattctatggccaagttgtaatgttatccactcatccatatggttgccgagttattcagagggttctagagcattgtgatgatcctaagacacagcaaataatgatggatgagattctccagtctgtttgcttgctagctcaggaccagtatggcaactatgtggttcagcatgttctggaacatggcaagccccatgagagatcagccattattgagaagctaattggccaagttgtgcaaatgagccagcaaaagtttgcctctaatgtcattgagaagtgcttagcctttggaaatcctgtagaacgtcaggttctgatcggtgagatgcttggatccactagcgaaagcgaacctcttgagttcgcaaactatgtggtgcagaaggtgctagaaacttgtgacgatcagcagagggagatgatcttaacaaggataaagacacacttgaacacactcaagaagtacacatacgggaagcacatagtagcgcgtgtagagaagcttgttgctgctggagagaagcgccttgggcttcaaccagcatgcaccgccgcctgaagggcaaactctctaagttgtacagctaacagttgctaggtttgcctcatgtttttttctctactaaaaaccttatatgaaggccccttttggcctcgccaggaaaaaaaataaatactgtatgtttgcggggaagagtgtacattaattctgtagcagaaagaccccctacccatgtggcggaatcaagggaggagtgatgcgtgtgagtccgatcgatctgaaggctgctgtaaagaggaagatggaaggggaaggagtgagaagcatgtcagttactctgctgctgtacaaattaaacttagctcttagagtgaggagaaagtaagctgttagctgtctgcctaaaggaaagaaaggaaaaaaaaaagaagctggaggccattggcaccctgtttcatgtgttggtatagctgctgtggctctcctgttgtctgtctggcctttgttgtaacataaagctgaggcgcactagcctgccttcgttttcacagttaagctgaagttattagtatcagctttcctgaactgcttggtatgtaatgtgactctgtttcttccttgtactaatgcttgtctcatgtaatccaggcccctaatgtctgaatgttttaatctcatttttcacctctgataaacgttgtttttttgtttggttttgttgctgctgagg

SEQ ID NO: 35637 - DNA, 3220 bp, Zea Mays
cactcttctcttgggttccctcccattcccccccccccccccccccaatccgccggtctctatggcgcccaaggttctcatggtcgcggagaagcccagcatcgctctttccatcgcctccgccctctccggcggccgcatgtctacaagaaaaggaagcacagatgtccatgagtttgatggaacatttcagggttcttatgcgaacttcaaagtgacatcagtcattggacatgtcttaagtgtagatttcccccctgcatatcagaactgggaaggaactgatccaatggacctatttgaggctccagttctgagatctgaatgcaacccaaagttatcgattgcactgggattcctgaaaatgaggctggcagaagaatttttcgtgctagattttcatctgttactgagaaggacatatcgagcgccatggataatcttgttctgccaaacaaagatgaatcactatctgtggatgctcgccaagaaattgacttaaaggttggagtagcatttactcgatttcagacccgatatttccaaggaaaatatggaaaccttgattcaagagtgatttcgtatggtccatgccaaacacctacacttggattctgtgtacaacgccatcagcaaatcaccacatttaaaccagagaaattctggtccttgaaaacgtatattatcaaagatagtgatgaaatacagctagaatgggaccggaagaaactttttgattttgatgttactgtaatgtttcagaagatggtcatcagtgatgggactctaaaagtagcagatatatctgtgaaggaagaatgcaaaacccgtccatctggccttaatacagttaatatgcttaaggttgcatcaagtgcacttggtattgggcctcagacagccatgcacttggctgagcggctttacactcaaggattcatcagttatcctcgtacagagagcactgcatatccgtcatcatttgattttcgaggtgcacttgctgcactattaaataatcctctatggtccaatgatgtccggaaattactggatgctggttttgttaagcctcgtcaaggtcatgatgctggggaccatcctccaatcactccaatgaggtcagcaacagaagcatctttgggaactgatgcttggaggctgtaccaatacatatgccagcacttcattggaactgttagtcctgattgtagatatacaaggactgccattgagttcacttcaggtggtgaaacattccactgtgttgggtatcgagtcacttctaaaggatttacatctatcatgccatggctggctgtcagcgagaacagtcttcctgcatttaaaaagggagactctgttagtattcataaggctgacatatatgagggaagcactacaccacctgattacctcactgaaagtgaattgatttccctcatggagaagaatggcataggtacagatgcatcaattcctgtacatataaacaacatttgtgaacgtaattatgttcaggtgaattctggaagaaggttagtaccaacacccctgggaactacgttgataagagggtatcagtgtattgatgctgatctctgcttgccagatatcagaagctttattgagcaacagattactctaattgcaaaaggaaaagctgatcatcttcgagttgttcaacatgtcattcagcaatttatgaaaaagtactcttactttgtgaaaaagattgaaaacatggatgctctgttcgaggcacagttttcacctttggcagactctgggcgcctactaagcaagtgtggaaaatgtggtcggtatatgaagtacatttccactcagccaatgaggttgtactgtataacttgtgaggatgtctattatcttcctcagaacggttcaattaagctttacaaggaaatcgtatgccctcttgatggttttgagttgcttttgttctcgatggtgggacctgatgcaaaatctttcccactgtgccctttttgctataattgtcctccatttgaaggcatcgacaaactctttggtgctctcaagctcgatgacaccggcaaggttgggaaaggggccggcatgccatgcttcctttgtcctcacccgacatgcaagcaatctatgatcactcagggagtttgtgcttgtcctgagtgtagtggtaccctgattcttgatccagttagtgcacccaaatggcggctttactgcaacatgtgtaattgcattgtattgctcccacatgctgctcacaggatcaccactacagataagaagtgcctaacatgtgaatctactatcattgaagttgatttcaacaagaaaaccacccctcttcaagatggagctacattgcatgagggatgtatcttatgtgatgatctgttgcattcactcattgaaatgaagcatggtaagtcattctttattcggagagggagaggaagaggcagagggagaggtcggggcagaggaagcagccggggtagaggaagacgagggaactcaaggtatgatgatcctaaaatgagtttccgggatttttgaagattttggacaaccaacattcggtcactactcactactttttccgtagccggttttttcggacgttttctaggatctgaaggaaccgctataatgaccaccacgtgcgtttcatttgagtttggattaggaagaacaaggtctgcttcttcgtgactgctgccaagactgccccggctttggaacacaggaatttcacaggaattagttcaaaaacataggaaaaacacatgattcaggaaattttgtttattccaaaggagctgtaagccatgcttaggcaggaaactgaccatcatctgcaactttgtcttgcgttcagttaccccccagaatggagtcaatatattactagaaagtgacttaagagttaattgctgccccatgtctgtattgacacacactgaatctgtagtttgatttcaaatttttgatagaacaaggatcaactcaattgtattactcagtagtgtttctgtaatactcaatcattgacagaagagctcaggtaggtgagaattgagaactagctcaatatgacaaaggcaccagtcaacagattgaaagctcaacaaactcctctctttgcaatatttggttgcacctaaatagcttcttctgagctgttacgattcttctagatggattctcg

SEQ ID NO: 35638 - DNA, 2913 bp, Zea Mays
atggaccgtcggagctggctgtggcggcgcaagtcgacggacaagagccccggggagaccgagacctcggcgtccgagaagattactgatgaacagattaggcaaaacgatacatacacagtatcaggcaagagaaaaagcaaatcattattttctatgttcctgtccgagacagtccagcctgtgtttaaaatagggaatgaaatagatgacagtacaatgggtagaggacgaggccggcagtgtgactgtcctggtggtttccataccaggtctgcagtctccaatggcaatgtggcacagtcagaccaggattctgccaagagctctccaaactcgactcggtcgccggagatcacgtcgaaggaactggaggacgataacgacgtgaaggtgaaggtattgagtgagaggctatcatccgtagttctggatgtccgtgcgaaggatgatctcgtgaagcagcattccaaagttgcagaggaggctgttctaggatgggagaaggccgagaaggagatctcatcgctgaaggcgcagctgagcgctgcaacggccaagaactccgcgctggaggaccggctcgtccacctggacggcgccctcaaggaatgcgtccggcagctccggcgcgccaaggacgagcaggaccagacggtgcaggacgcgctggcacggcaagcgcggcagtgggagtcccacaaggccgacctcgagctgcgcatcgttgagctcacggcgaggctggaggccaagtccgagcgctcggtggtgggcgccaccgacggcgacacccgttccagcaggctagccgccctggagaaggagaactcggcgctgaagttgcagctgctcgccaagacggaggaactggagctcaggacgatagagaaggagctcaaccggcgggcggcggagacggcgagcaagcagcagctggagggcatcaggaaggtggccaagctccaagctgagtgcaggaggctgcaggccgcggcacaacggagggcgtcctccgtgaacgtcgagctccggcgttctccgagctcggcctgcgtcgagtcgctcacggattgccagtcggactgctccgactcatgggcctcggccctcgtcacggagctcgaccagttcaagaaggacaagagcggcgcgagcaccaggacagcgagcctcgtggccgcggacatcgacgtgatggacgacttcctcgagatggagaagctcgcctccgcgaacggctcgtcgaaaggcgacgccgtcgaggacgcgagcgggcaggtggagaaggcgctgcacgaggctcagcgcgagctgaggacttgccgccgccgggtaatggtggcagaggagagatcagctgagctacagcggcagctgaaccatgccaatggcgacaaacacgccatggaggcggaggcggaagctgctgaggcgaagggaagggagcttgagggcaagctcgagctcgcccgtgccgatatcgcgggcttgctggacaaggggcgcatcctggaggaacggctcgagtctgagaaggcgctgacacttgagctcgcagccaagtaccaggacatggagacgctggaggcagagaagagggagctgaacgctcagctggagacgtcacggtccgaagccaagaagctcagcgacaagatcgccctgatggagaggaagctggaggtggagaaggccctgtcgatccgactggcgacgaaatgccatggcgttgatgctctggaagcaaagaagaagggcgtcgagctcgagctggagtcggcacgcgaggaaatcgcttccctgcgaaacaaggctagtagcttggaactgcaagtcatggaagagaaagcgtcgtccgctggactcgcaatgcggtgccaagaactggaggagcttagatcccagcttgtgtcttcaaactcacggatcgttgagctgaacgagaaggttaaaacgctcgaggatgtgatcgagaaacagaggccagtgacggcggaattggagtctcagctccagtcgagacacgacgaaatcagcagcttgaaggaggacataagcctgttgcagaagaagctggagtcccagaagaacctgtcgtcagcttacatatctgcgctgggcgcttctgaaaccgagaagaaagaactggctacccggtttgaactcggagagaaagaggccgaggaattgcgcgggaagacgagtttgctggaggaacagatccacgaagagagggcacggtcatctgagtttgcggtaaaatgtcggaagatggaggaacagttctcccgcagatctcttcttggccaccaaccagtgaaatcttcggcgatcaaagatattcagataagaaaggagacagagctggccaaggctgccgggaaactggccgactgccagaagacgatagcttcactgagcagccagctgaaatcgttggccgatttcgacgagttcctccctgaaaccgagactagtggcgccgactcagccgacgcctgggacggcgacctgaagctgctccaccctgcaagctatcccacgcagattggctgtttggcagtcacatgagtcacgatcctcgttggcaggtgggcggagaaactgtttttgttcgggttccaccgcatgattgctgtggtgagattgccatgatcttccaccacatgccatatagagttaagtttataatagtctataggtgagaaaatgttcatatgaaagctgtttatagagttggttggtgaagcttcaaaggaactcataaactttgatctcccattcttcctgtcccttggaaacggcttttaaccaccagcatgtgttccatcttgattgtcttccggctattttatattctgcaggagttcattgtgcaatgaaatgaatggaatattcagttagatctga

SEQ ID NO: 35639 - DNA, 2011 bp, Zea Mays
attgggtcccctcccgccccagacgtattactgggctggatgtgggctgtactgcaagcttagcgtgtactcatgggctcgctcgccctagacgaactccggcgaggccccgccgccaacgccggccatggcacgacgcgcgagcgccgggatcccgagggcgtcacggccaggcggcggggtgtcacgcgcgcctcataagggcgcgggcgtctgctgccttgctgtcggaggacctggtggagacggagtgccagaggtggaagagcaaaggcgtgaacataaagtacgaggactatcccgttcctcgtgcacaacccggagatcgccctcgtccaggctcgctggaagtttgttaattctgacgagtgtctgctgacaagattccaagagatgtcgttggactaccatttcaagtatgagcaagaggccggctcctcggtgtattcattctttggcttcaatgggacagctggtgtctggaggatctcagcgatcgatgatgctgggggctggaaggaccggacgacagtggaagatatggacctggctgtccgtgcgatgctgcagggatggaagttcctttacgtcggcgacattaaggtcaagagcgaactgcctagcacattcaaggcgtaccggtttcagcagcacaggtggtcatgtgggccggcgaacctgttcaagaaaatgatggtagagattttagaaaacaagagagtgtcgctgtggagtaaaatccacctatggtacgatttcttcttcgtcgggaaagtcgctgctcatacggtgacattcatctactactgcttcgcgatccctgtgtctgttctgttccctgagatccagatccctctctggggagttgtctatgtcccgacagtcataaccctcttgaaggctcttggcacaccgagttcctttcacctggtgatcctctgggtcctgtttgagaatgtcatgtcgttgcaccggattaaggctgcagtaagtggtcttctggatgctggtgggcgagtcaatgagtgggttgtcactgagaagttgggcgacaccagcaaggcaaagcctggcaccaatggatcagacactgctgtaaaggtgatagatgtgaagctaacagaaccgcttgttccgaagctagtgaagaggcgagcaagattttgggagaggtaccactgctcagaacttttcgttggaacctgcataatcctgtgtggtttctatgacctgctttttgcaaataagggatactacatttttctcttccttcaaggcacggcgttccttgttgttggttttgggtatgtcggcacactacctccttgcactgcataagctgtcatggacaactgatattacctgctcaccagaaactgagcaagcaaagctcctctctcctgcacatatcaaactcttgaattcaatgatagttgagcaatgttcccccatcagtcttggcctgacatgatccaccgccgagaaggttgttcagatatcgccgtcgttctcctgtcagtgttggtcagatttgagccaaaccattctttattgtcagaaggccattcaaatagtgtcaccattgcaaattttataataacggtgtttaccgaagcatcatgaaaagaaaaatgattggtgcagcagcatttcgttcgcattccatagagatgcagttcacatccagtatttttttttggaaatctagtgttattactcagagttcagatccataatggaagattgttggcttcctcagttcataacctgtgtaggcttaaaacttgtagatgtaaattgttattaacactaatattttttattgaatccgggtattattgaaatgcaagtgtagcatgcatttcttttcctgtaagaagccaaagatgacttctgagtaacacgtctaatcagacattttacttgatgtggcacatggaatagtggatctattttaactatgtagcagcaaccatttggtcatactggtcacgcatgattgaagttgtga

SEQ ID NO: 35640 - DNA, 726 bp, Zea Mays
ttcgcatacttagtaccttgcttcgtccattctgctggtgaataatatcgggtggtatttgtcaaatcaatcaccagacctatctgaaatgtgaaaactagaagttaatacagaatgtatgttctgtcagcctaagtaaacggctgctttgcacaatatttgcataaacaatgtgtgaccgattttttagcatttaggagcactggtgcatacaaatacacataagaaatggcataacaaagaaaaatgatgatgaaacaatattttaactctatatggaattccacaaaccccacctaatgatgccataagcctaatacctcgtttggatgtagatattggagcacagaattgggaattggaatcagctttactaaattctgttgtttggttgctcgtggaattaagatttaaaatcagaggctcaattccctggaattggactataactagaaacctcctcacccaatacaaagcatcgcccctcggtattgcgtggaattagacaacacaattccaaactccaattcagtggcatccaaacaatagaattggaattacatctcatttcaataccatgccagatttgctattcagcacaattcaattccatcctctccaatatcgacatccaaacggagcataagtgatttgtcatttatgtgcatatggaatagtgaatacatgccactatttatgcagggtgtctactctctaggcaaagag

SEQ ID NO: 35641 - DNA, 1705 bp, Zea Mays
aaatcttaaatcaacagtctatttaggtggctatgataaagaggagaaagctgctagggcttatgatcttgctgctctgaagtactggggtgccacaacaacaacaaattttccagtgagtaactacgaaaaggagctcgaggacatgaagcacatgacaaggcaggagtttgtagcgtctctgagaaggaagagcagtggtttctccagaggtgcatccatttacaggggagtgactaggcatcaccaacatggaagatggcaagcacggattggacgagttgcagggaacaaggatctttacttgggcaccttcagcacccaggaggaggcagcggaggcgtacgacatcgcggcgatcaagttccgcggcctcaacgccgtcaccaacttcgacatgagccgctacgacgtgaagagcatcctggacagcagcgccctccccatcggcagcgccgccaagcgtctcaaggaggccgaggccgcagcgtccgcgcagcaccaccacgccggcgtggtgagctacgacgtcggccgcatcgcctcgcagctcggcgacggcggagccctagcggcggcgtacggcgcgcactaccacggcgccgcctggccgaccatcgcgttccagccgggcgccgccaccacaggcctgtaccacccgtacgcgcagcagccaatgcgcggcggcgggtggtgcaagcaggagcaggaccacgcggtgatcgcggccgcgcacagcctgcaggacctccaccacttgaacctgggcgcggccggcgcgcacgactttttctcggcagggcagcaggccgccgccgcagctgcgatgcacggcctggctagcatcgacagtgcgtcgctcgagcacagcaccggctccaactccgtcgtctacaacggcggggtcggcgatagcaacggcgccagcgccgttggcagcggcggtggctacatgatgccgatgagcgctgccggagcaaccactacatcggcaatggtgagccacgagcagatgcatgcacgggcctacgacgaagccaagcaggctgctcagatggggtacgagagctacctggtgaacgcggagaacaatggtggcggaaggatgtctgcatgggggaccgtcgtctctgcagccgcggcggcagcagcaagcagcaacgacaacattgccgccgacgtcggccatggcggcgcgcagctcttcagtgtctggaacgacacttaagctacgcgggccggcctggctctccgaatccgaaccgatcgatgcgtcgtaaaacgtacactgacataagtaacaacacttagggttcttcatggagttgttaccagtaagttgttacttgtcatatgttttaagttctcaatttgtagctggaaggaaagctagggtttcttctgaagggtagggtgatggcttgtgaagagtgccacgcatgcacggggttttctccatgatgacggtaccttcacttgctgccattttggggttcaggttcagaagatggataccgagtagcagtattaaccaaaagccatgtttaaatgggatgggtaggaaattgaaccggcaagcttgcttgtaaatggtagctagggtggatgagctgacacgaggtgaaaatgatggcaccttaatggtctagtgtttccattctagagatcaaactgaagcagggagatgcgcaatagttcattcatt

SEQ ID NO: 35642 - DNA, 2252 bp, Zea Mays
ttcgcttttgttttttcctggtccccacccatgggttctcgacactgaggaattagccattgtaaacagcacctatcgtaaggcccaaggttccaggctgcctggaatcattgaggaaacgaggagatcaggggagtcaacaacctcaactctggaaagtgaaacctgggcgatggaaagccttgagactgaactatttgataatgtccgtgcttcgatccagagatctcttggcaaacctgataaactttcaggtcggcccgttgctgcctcaaaccccccaaaggccacagcaaatgcacctcgtgttgcagctagaaaaggtgttgatcggatgccacagtcaaagatgagggcccctgtttcaacaagccaaggagctgttagcagacaaaggccccaagtcaccatcaacgagcctgtggctgcaagagataagaatttaacaggagctgcagaagcaaagatatcctcaaagcctcctagggctttgccaagagttgctatgatgagatcatcaactaatacaactgtcacctctagggcttcagacaaaagaaacagcactgggggtgctgtcaacaggcaggcagttggtaaaactgccagtacttcagctgtcctgcgatctggcaggggtacaaattccagttcaatcttgaaatcaggtttcttcacatcagcagcaacttcttcccattgtatgttgatggacactaagccagaagccaaaactaaatcagcaacactaagcatcaagaatagacctgctcagagggtccctgttcgtccgtcatcaaaatctgatatcagcaaaactataccctcaagatcatcagggaacaggatcccagctaagggccatgctgaccgtgcatcaccaagcatttcacctagcagctccatggacagcatgagctctgtgatatctggggcttcaactgcttccaccgtagggaagatgagtcatacatccgataatttgaatgcactgtccccctccctcaggaagagcaatgactgccatccgaatccaaagtttaggcctcctattgtcacagagggacattcttctggaacagcagcatctagagataatttaaaagctactgcagaaataaccaaccagggaaaaggccttaagccatcggggcttcggagacccacacccaagattggttattttgatgctgagaattatattgaccaaaacatcggtgcacaagtgcaaccacaactttcaaatatccagtgtctacctactcagaacatgaatctgaatgccgcaccatctacctacggccaacaggaatcaaaattgacagcagcacctcatgaggaaagctgtgtttccaaaagtaagctgatgacgccactgtctcttatggtggaagtagagccttttaaggtggccgaactagcttgcacaaacctgactgatccagttgtggtcagacctgaatctgtgcaaccgcaatccatggagatccagtgcttgctacctgccacaccaaaccctcagccaacctttcatcaacaagtattaaaacctatagcagcacctcttgaagctgtgcaaatggaagtagaagcttttaaggtggacaaacctgaagcgtgcatacacctgtccagtccagttgtcgtgaagcccgaaaacaaatccattgaccaaaacgctggagcactgctgcaactgcaacttgtcgccgaacctgaatcatgcacgcgcaagtctaagacagtggtggctgcagactattccaaggagaatattccggctttgaatcagaacatacaagctaatggcgatgcgaattcgttagttgagttacttacccagaagctatcctccatttcccttggggaggctgcccctaacgtggcccctaggtcctgctgggaataaggtttggacactatgctgttggttgtttctgattaccctctttgttatctgtaggcaaaggcaaccgccgctgaggaacctgatttctttctctgcttgtggtgtaaaatgcttgtacacagggctttatagaatttcacttttctattgtatgcataaacacatgatctttgtctattgccggtttgcaagtagcgtgttattggtataacattagtttagtctctcgattctacgatattacttcgatgtacttgtatagcacgatctgtttgtactactttgagtcccaaaaaaatatataattttgagtttggactaatgcaagcttattaagttccac

SEQ ID NO: 35643 - DNA, 3170 bp, Zea Mays
atggcaagagggtccacaccggaccaatcccggcagatggcggtcagccggtcgccgttgaactgcaaaatcgaagaaaaggaggggctgcaaccagcaggattgaaaggaaggggaggaggacggaaatagtgcaagaccggattggaagggaaggggaggagctacaagctgcaagagaacgaggagccgccaacactcatctcactgccgccgccagcactcagctcgcagccgccaaatctgctatgggtatgcgccccctctcctccagcactcagatcttgcctggagagctcacggaggggaggggccggtgcagagccgccaggagaccaacactgccgccggtgcagatccgccaggagactaacggcaagtcagcaacgctgcagaccttcaaggcgtcttcaaagtgacgcattagcaagcttcaaggcgccatggcgacgccttagtctctgttctaaggcgagagcgacgccttgccgctgctgcacgccttagcgcctaagcgtcgcctaagcgacgctttaaggacgcattaacaactatgggcaggtggccggagaggggcgtgtggtggcaggagaagagaggtcgccgagcagaagagaggacagcagatcttggcggcgaaggctccagattaaatataagtccatgtgtccataaacttaaatggaaagtaaatgaaaaggaaaaataacataagcatctctcagcaaaaaacaggtagctgttttccaaataagaaataataatgatctcaatttatagtatcacacaaaaaacatgactggaaatatactaaagcgttgatcacaagggtggatcaggaaactatgtgctgataaatatgcacagtaaacagcctacatgcatgatgcaataatgacaaattctaatgacagttaaaggaggaacaacaaatcggtccacaagagggtcaggtgtacatatctatgatgccttagcaaattcaccattctaaaaaataataattatccaatcaaaagtaccatttaagtcaaagtatgcagcatagttcctcgttgctacttgcacacattaataatgaacactgaaacagacaagtctaactgggccccttaatacaaaatataaagaatgctatcataaagttatttcccccaaaaaaaaactattacgcttataatatcccttgttaatttacacccaaaacagtatttttttacaataaatactgatttgtgcatgtaccttttttatggaaagtaagatgtctaaatgtcaccacattttcactatacctgaatcgctcgagttgacttttttagtttttttttatgattacccttgtctttaatggtagatggcagtagttgtttttcattatagggaaagagttttatatgcaataacttcgagggggggcaaatccaggcactaaaggcacacacaaacccgagtaaactagattacaagggacaaaagcccagcaccgaactactaaggagattgtggtatgttatccctttatacaagactaggttctctttgatccgttcagctctttccagaggtttcacatggtttagatagctaggccattgaacgttcgctgcgctcttttgggattgaactcaggatgtgctcccaacattctccaagagctgtgaagtttggctgttgagtcccattaacatttattaagtgtccggaagaagtgatgtgacaccggacctcttgcgcaaagagataggcaaggtggtaactgttttctactgggcagttacgaggcgcagaggtgtcctgatgtggccaatcatggaggattttgttttggatgaggatctaggtgaatattttgcatttgttctatgtgtgaacccaccaaatgatgtccgttctaaaccggttgtagatgactagaaattgtgccctgtaggccgatttagtgctgtactgtccatttccaaataattttgtcctcgatctctgtaccgtactaaaccaaggcaagccttacggctacattttgcagatgctgcgtccaacccaggaccttttgtcatagtgggaaggctctcaccgctgtgctaggccagtcttctaatcctatttctataacaatataaaaacaaataacatagttttgcaagcatcagaacactgaaccaaatatgcagcatgcttctcggtgcaaacccaatgcaaaggcatgaaaagatttgcagatatagcaagcaaacgtttctatgcattcatggagcccgagaaatcaacaagcgttcatagttcgaaaatccaaaacggtgaactgctaatatccacatggtggaattgactacatagtgtgagcttttaatatactacacaaaaatagccacctccaattaacagaaaacaaaactgtagcagatttaatgatctagcttagtgggtgtttacagtatcatcatgcaaaatttgttgatccctgattaattgaaaccaaagccaacatgaaagaacaactgataagaacaatctaaaacagccctgatgtgcccaaatgagtcttagttcctgtgcaaaattagaaatcagatagtatgcataattagaaaatccaaatgcaaacttcttatatatagtggcagtttatgcaccacaggtggaactgcctacttagtgggtgctttcagtatacaatgaaaaaaacttgtcgcttctaattaaaagtaaccaaaacagtactggatttacagctgcagcctagtgggcgttattcttaccgccatgctaaatttgtcgatttctgatttaactgagactaaagccattacagaatttcagctcgaacctacagctctgaagacatgctccaaaagacaacttccaacggatagctaaagaattgcataacagaatgctcccccaagattggacatgaaagattaaccgacaggaacaagctaaaacagccacgaggtaccagacgagtctcggttcctgtggcacccaaatatcttaacgccccatgaatttctacggttccacctgcacaattccgaatcaaactaccttcaagcaagtaacgaccacacagcaagcaccaaatgagcaacagataagagaaggggtcagaggctcagagctgagagctgggaatctcaccaccgtcccacggcgtatcatccggc

SEQ ID NO: 35644 - DNA, 310 bp, Zea Mays
gaaaatcattttagatttttatttcctgaaattcccagactctggacggcgaccactattttcgaaaactcgggggctaacacgtgaaatcacccagacacagagaactccgcacaggatggcgggttgattccccataacccaaggggctcttaagcaaaaagccaacggcgaagaggtaaggaacaaccagagccgttggattaaaaggatacggtccagattagatttttacaactctgaaccggtacgcagccctggccctcggatttggatctaacgatgtaaattttaagtaccaagatctaat

SEQ ID NO: 35645 - DNA, 3260 bp, Zea Mays
tcacaattcacaggctgcacagcacacaaaccccgcgtaggggtagagatcacctcacccctcccgactccggcgcatccattcggtcgctgccggatgcgtgcttgacccggccatggatgactctgtccctttcaatgacctcggtccctccaagcccccgtcggcctctttctacgacgatatgttcgagtcctacttcaatcgcgcggccgaggcccccgagcccgcgcctaaggcttcttcctcgccgtcgacgccgccgcccgtgttcgacaagccagtcttcgacgacgatccttacacggccgatccattcgacgcgatccccttgtttggaggcggtggtggaggggaagaggaagacttgcacggtggcgtccggagtgcggcaaagccggagaggacggagttggaggtggtgggttttgatgaagatttgttccctgggttggctgggagcaccaattttcccatggagaagccggccagggaggtggagcgggaccgtcaaccagtggggttcgacgacgagttgatccctggattcgatggaagcatgaagccagcgccgcaaatggagcctgagacagtggcgtttgatgatgatgtgatccctgactgcagtggaggcacgagctatccctcttcggcaagggaggaacctataacgagacaagaaagtgaatcaatttcctctagcaaaattagcatgagcatgccagaagatcctttcgttactttaggtggtacacacaaatcgggatattcatctttagggttgttttcaaatcttctgaataacattggcatgcctagaaaggaagcggacacaacgcctgataataccagtgggatatttcagggttctgatatctttactgagtttccaaaagccatgccacccttttcgtttacatctgaaaaccagagtgatagaactgaaaggagatatactgaaaacataatcagcacgagtcactccgatcggctgcctcaggagaagacagtccaacaagcatcaacagaagcacctgccaatacattgactgagatgaacttccctgaagcatctgttgtccatgaagtacctgttaccactagttttcagacattgaacccatttgttgaggaagacgatttgttagaggtgaatcaatcttcacaaacgactaatgatgtgtggctaactgttttagatattgctttagtgacactacctacaagtgcgccacctccttcaaggcctccacctccacttgctgctaagaaaccacctactgaatctgtaactagtgaagcatatgcccatcattgtaatcaacgctaccatcactccatatgttcttcaaacacctctaaaacatcccaaattgatgaattggaagattttttcttgacaaagcctgcaaattctgccattggtcatccacaagttctaaagcatgaaggaaatgggcattatccatctgcagctactgcaagtttcatggactggactgagatgggacactgtaaaagggggaaccaaggggcatttgattctatgttcactagcagtcaatatcgacagccagaaatagatgagaaagcagaggtatgtgctcatgaaacagaaagtacagatgaagaaaagagattagagaatgaacaaatacaaagagaacataaagaagagcaaataagagcagaaagggagatggaagaagagcttgagagggaaagagaaaatgtgagacaaagggaacaagaggagcagaggaggcgtgaaaaagaaagagtggccaggcaggctgtagataaggctatacgggaggcacgcgaaagatcagctgctgaagcacgcatgcaagctgagaaggaggctcgtcaaagagcagagcgagctgcagtatggaaagcagcaacagaagctcgtgagagagctgcagtggaggcaaaggaaagagctgcgaaggctgctgcagaagctaaggaaagagaagcagcagaggctagagaaagggctgcaacagaatcaagggaaagggatgccaaagttgccgcagatgcaagggaaagagctgctagggctgctgctgaagctagggaaaaggaaacagcagaatttcaggagaaagctactgcagaagctcgggcaaaggctgagcgagctgctgttgagaaagctgcagcagaagcacggtggagggctgaaagagcagctttcgagagggttgctactgaagttaagcaaagggcttttaatgatgctagagaaagggctgccgctgcagctgcagctgaagcactggcaagagaaaatcagcaaaggagagcaacaacagaacctgaccttgagtcattctttggcatgccttctcgatcaagtagtctaccgagatcatacaacaacacaacaacgaatcctttcgatgttcaacctggcaatgctggttctggtggtgtaaggaggacaccttctggttcaggttttccctttactcagccttcatcaagcaatcttatggatggcctatcttctatatttggagcacctttaccatctgctgtatttcaagaagtggatggagagagtgaagagagaaggaaggcaagattggaacgacaccaaagaacaatggagcgtgcggcaaaagctcttgctgagaagaatgagcgtgacttgcaagctcagcaggagcaagaagagcgacatagaattggtgaatcacttgattttgagataaagaggtgggctgctggcaaagaaggcaacctacgggccttgctaacaacgttgcaatatattctttggcctgaatgtggctggcgacctgtatcattgactgatctgattacagcagcatctgtcaagaaagaatacaggaaagcaacattgtgtatccatcctgataaggtgcagcagaagggtgcaaatcttcaacagaaatacattgcagaaaaggtatttgaccttctgaaggaagcctggaaaaaattcaactcagaagaactcttctaacaacttgtttaggaaaatgttgatcgcaaaacaagtattgggaaggacagggacatactggtccctgtagtaatgaagaaagggagagtagcaggggccctgtttgggtatgtagaagcaggcaccagctcgaggggcgattccggttagctcaaggccagatatgcaggctagtcgctcgtccaatctggagaagcagccgccagctcaaggacgtttcttgctagctctaggctagggaaaatttaactatttg

SEQ ID NO: 35646 - DNA, 1943 bp, Zea Mays
agcgaatcctaagtttcataatggcataaatccaattttctctacaggaaacacggcatcctcgctgacgccggagaagccgaagctacaagttcgcccgtcggagccgcagcacaggcgcttgcaaacgcgatggggagcgcggacctggtgctcaagatggcttgcgagggctgcggcaacacgtcggatctctacggcacggggtgcaagcacaccactctctgcagtgactgcgggaagtccatggcacgctcccgtgcccgctgcctcgtctgctccgcgcccatcaccaggctcatccgggaatataataagaatgccgagaacaagtggtctctccataaggagggtctgcaaggccgtcagatagccgagaatatgcgggaaaaatacaacaagaaaccatggattttggaagacgaaacaggccaatatcagtatcaaggtcaaatggaaggatcacagtcagctacagctacatattatttgttaatgaggcacggcaaggaatttaatgcatatcctgctggctcttggtttaatttcagtaaaattgcacagtacaaacaattgacactggaggaggctgaagaaaagatgaataagaggaagaccagtgcaactggttatgaacgctggatgatgaaagcagcggcaaatggaccagctgcctttggttcagacatgaagaagcttgaggccacaaatggtggggaaaaagaaagtgctcgtcctaagaaaggaaaaaataatgaagagggtaataattctgataagggtgaggaggatgaagaagaggaagcaacacgcaagaatagacttggactaactaaaaagggcatggatgatgatgaggaaggtggaaaagatctagatttcgatttggatgatgaaattgagaaaggtgatgactgggagcatgaagaaacattcactgacgatgatgaggctgtagacattgatccagaggaacgggcagatttagctcctgaaattcctgctccacctgaaatcaagcaggatgatgaagagaacgaagaagaagggggcctgagcaagtctggcaaggaactaaaaaagttgcttgggcgcgctgctggactaaatgagtcagatgcggatgaggatgaagaagacgaagatcaagaagatgattcatcgccagtgcttgctccaaaacagaaggatcaagttaaagatgaacctgtggatagcagcccatctaaaccagcaccatcaggacatgctcgaggcacacctccggcatccaaatccaagcaaaagagaaaatcaggtgttgatgatgcaaaaacttctagtggtgcagcttcaaagaaagcaaaggatgcgaaagcatcaggcctcaaagaggaggcatcatctttggcaaaacctgcatcaaagacctctgctgcatcaaaaagtgggacaagcgtatcacctgtcacagaggatgaaatcaggagtgttcttcttgcagtggctccagtcaccacacaagatctggtatccagattcaagtctaggcttcgaggtgcagaggacaagaatgcatttgctgaaattctgaagaaaatttcgaagatacagaagacgaacggccacaactacgttgtcctcagagatgacaagaagtaaataaccgaacaaaggcgctgacatcgcaaccgttggctgtactgagataatatgtttatgtaacatgctgccttgaagataaacaagtctgtaacactagaattgtcttctaacccttgtgtacttgaattttattttactattccagattttatttatgcggctttgcactacacacctgttataaatggaaatccattgggagttcatctcgtgaattttggtagattgacataatttctctcgcttaaaataattattagcttatggggaacccagtgcagttgtgaattttgcgttgt

SEQ ID NO: 35647 - DNA, 335 bp, Zea Mays
accttgctcgtcggtcggccgtgctggtgctagtcgcctcgctcaccgatgactccccagctagacgcatgagcttgctcatgcgtcaacctcatcatcgtctcggacatcgcatcgctgtggtgcatcagcaggacgccggagcagtatatgtgtccttgcctcgccggtccgctcttcgctatcgtcgggtgttcggtaaaaatcttgaagcaggaagtcatcatcgttcgcatgaaatttctaattgcttggatggtggtgagttaggtcgctactcctgccttttttggataagtagaacggttaaatatattagttgcgataatttcctt

SEQ ID NO: 35648 - DNA, 3372 bp, Zea Mays
ccctttggaccctttccagttgtccacgctcccatctttttcaccaccccttctccttctctctctcccccccaccctcgcccttctcccaccgcgcgcttgccctccggccgggcgcccgtcccgtccttccctacttgtaccagcccctcttttccaatttcatcctctccctccaattccaccatccctctctctctctctcgctcgccacccgcaccactctcgctcggtgtgtgggagagagaggaggggagggagctaggctggcatggccggccgcttgagctgcgcatgcctacaattcagtaccagtactagcaaagcaagctaggtaggagtaacacctccccaattgctacttctactgagttagccatcccgtcgtcccggcagtcacttctacaagtacgcacgcagctacccagcagggcggctatactaatccctccctgcctctgccttccttccgaggaccgccgcggcgggccggggtgcgcgcacccgccatgcagcagcagcaccagggtggcggcggcggcggtggcggaggctcacagttcggggccccgccgccggacatgggccccttctcgccgacgccggctgctaccggtcccatgccgctgagcagcaggcctccgtcggcgcagccgcagcagcaaccgaggaccagctacgaagaattggcgcccatggtgcctggggccgccgctgccagtggcttcgacgacgagacgatgggtagtggcggcggcggcggcgggtcgtcgggcgcgtccagcaaccggtggccgcgggaggagacgcaggcgctcatcaggatccggtcggagatggacgcaaccttccgcgacgcgacgctcaaaggccccctatgggaggacgtctccaggaagcttgccgacctgggctacaagaggagcgccaagaagtgcaaggagaagtttgagaacgtgcacaagtactacaagcgcacaaaggaaggccgcgccggcaggcaggacggcaagagctaccgcttcttcgaggagctggaggcgttgcacgcagccgcgccgcagccgccaccacagcacttgccggcagccagcaccgccccgcagttgcacgccctcgccgcgccagtatccccgacgccccagcagcagttgccggcatccagcgccgccccgccgttgcacgccttccccgcgccagtatccgcgccgccgccgttgagttcaatgccactgctgacagggccgatgcagccagcgcccatatcatcggcggccccagccccggcaccggtggatctgctcgtggcccaccagcccctcaacctgcaaggcttcagcttctcttccatgtcggactcggagtccgacgacgagtccgaggacgacgacatgacggcggagacaggcggaaaccaggaccgcctcggcaagcggaagcgcggcgacggcggcggcagcagcagcaacaagatgatgtctttcttcgaggggctcatgcagcaggtcgtcgacaggcaggaggaaatgcagcggcggttcctggagaccatggagaagcgggaggccgagcgcacggctcgggaggaggcgtggcgcaggcaggaggtcgcccgcctcaaccgcgagcaggagcagctcgctcaggagcgcgccgccgcggcctccagggacgccgccatcatcgccttcctccagcgcatcggcgggcagtccgtgcagccccctgctaccgccgttgttgtcccaatgccagcaccggtgtcagtccataccacgccgccgaaacaaccttctcgccagcagcagcaaccgccgccgccgtcgccccaggccggccaggcgacaccgcagtcgaagccaatctcagccgcgccgctccagcagcaaccgccacagcagcaaccgaaggatacgtcgcagcaggacgccggcacgccgcgcagcttgcccccggcgtctagccagtcactcgagctggtgcccgtcgccgccacggagcaccacgtcgattccgggctaggaggaggggatggaggtgcggcgtcgtcatcgcggtggcccaagaccgaggtgcacgcgctcatccagctgcgcatggacctggacatgcgctaccaggagacaggtcccaagggtcctctctgggaggatatttcgtccgggatgcggcggctgggatacaaccggagctccaagcggtgcaaggagaagtgggagaacatcaacaagtactacaagaaggtgaaggagagcaacaagaagcggcccgaggactccaagacctgcccatacttccaccagctcgaggccatctacaacagaaagcacctccgcagcctcacaaccgcggccacatcgtccgccgccgccgctcctcgtcccgcctacccagatcagctgaacccgagcaggcaagagatagaggggaagaacatcaacgatgacaagaggaacaacggtggatcaggtggaggcacgcaggtgccgaccagcaatggcgagacagcgacgacgacgacgacgacgacgctcgtcgcgttcgacgccgacaccggcatgaagaagccagaagacatcgtcagggagttgaacgagcacccgcgtcgggagttcacgacggaggacgagacggacagcgacgacatgggcgacgagtacaccgacgacggcgaggaaggcgaagacgacggcaaaatgcagtacaggatacagttccagaggccgaacccgggcggcaccaacaccgcgccagcaccggcagcagcgacgacggctgcgccagcggtgccgacttcggctccgaccagcaccttcctcgccatggttcaataggggcgcgggcggcacccctctcaaaccgtacgtacgtatatgcgtccaaaccaaaaacctgcgcgcatcaccgtcaccgtcacctcctcctttactttaccagtccaccaagcatgcaccatcagtccatcacactgttctcttgttcatcctgtaatcccccgtgccattccattatttattgatttgtttcgtgtataataagatccccaccgttgcggaggatgcagagtgaggctgtggtggtagagcaaaaaggaagagtccagtccctcagtaataacttatttataggtcatcgtcgatcgcgttaaacgagaactgtacatcgatgtaacagtcagtccatgatgtttttcctccctttttttttagttactcccttcccgggacggcagtatacaagtttgtataagagtatacaagaattacagacagttcaagcaacctggagcttgcggagtgtacattaatcgtgttgttattccagtactctgccctttgtggcaaatatacatgagcagttttaccgttgcca

SEQ ID NO: 35649 - DNA, 1382 bp, Zea Mays
gtcgcctttgagcccctgtctttttgcattggtgatggatgaggtcacaagagacatacaagcagacaatgtagcttcaggcgggagtaaataggggttcgagccccagcctcttcatattatgcgggctgtactgaagatcatcaagcactgtgaggagtttgcgccagctttagttacaggtcaattgcttggtttggatgttggtagtgttctggaagtgaccaactgttttccgttccctatcagggaagaggatgatgaagcagatgcagatggtgccaattatcagcttgagatgatgaggtgtttgagggaagttaatgttgacaacaatactattggatggtatcagtcttgcttgcttggatcttttcaaactgtggaactgattgaaacatttatgaactatcaggagagcatcaggagatgtgtgtgcattgtctatgacccatctagatctagtcaaggcgtgctagctctcaaagccttaaagcttacagactcgtttatggatctttaccgtaacaatggtttaactggggagaagttaagggagaagaaattgtcctgggttgatatttttgaggagataccaataaaagtttccaactcagcgcttgtcagtgcctttatgaaggagctggaacctgagtcacctgttacccagtgtgacctggaccgacttaaattgtcaaccgccccctttatggaaaggaacttggaatttctgattgggtgcatggatgatctttcatcagagcagaacaagttccaatattataaccgcaatctctcaagacaacagtcacagcagcaggcatggcttcaaaagagaaggcaggagaacatggcgaggaaagcagctggtgaggagccactaccagaagaagatccatccaatcctatatttaagcctattcctgagccctcacgattggagggctatctagtaactaatcagatctccagttactgcaaccatatcaacggggttgctggtcagaatttcgacaggctatacctgatgaaggccttgcatgaggattagaagactgggctgtgatgaatgctgttagaattagcttgtgatactgctcaaaatcgtaattttgtgatgtacctttacatggggcgtgcctgtcctctacttaatgtttccatggaccagatggttagctcgtgatacttaatgtacttgcatatgtatgcgttgccgtataaaccaattttctccattagtatttttgtgacgctcagtttgaagtccatagtgtagcttgttttcgttctcgatttgggctgttgtcaaatggtaggtactgttggagttatctatctcgtcttatcagtttaaaggttttaggtttaacaggtagtgc

SEQ ID NO: 35650 - DNA, 2097 bp, Zea Mays
attttgttttttattaaaaaagggttccccacagcaccaagcgcgacgtgagcgaggaggcaggcgcgcacggcgtctcggcgtcgcaccgaacccgacacggctcggcctacggcccccacacatccggctgggccgttccgttccgtttcgttcccttcccattcttctcgtacgcggccgattgcgaccctcgctcgccctcgcttccccaccacagcaccgaaactgccccgcctccgcagccgccgcccgcgcccgctcgtcctccccgcgccgcctcggggacgccccggtcggcgatgtggcgggagcatgctaggcccgctcctcaggctcctctcggcgtgcggcggggtctggcccacctcgccggcccccggcgccgcggcctcctcttccgcctcctccggggacgactctgagggccgcgacggccttctctggtggcgcgacctcgcgcgctgccacgccggcgacgtctccgtcgccgtcgcccaggccaaccaggtgctcgaggaccagtgccgcctcgactccgccccgtccatcggcaccgtcgtcggcgtcttcgacggccacggcggccccgacgccgcccgcttcgcctgcgaccaccttgtccccaacctccgagacgccatcagggaggccttcctggccacggaggaaggattcctcgcgctcgtgtcaagcctctgggaggcccagccggacatcgccacggccgggacatgctgccttgtcggcgtcgtgcacaacaggacccttttcgtcgccaacctcggcgactcccgggccgtcctcgggaagaaggcgggccgcgctggccagatcgccgcggagcagttgtccagcgagcacaatgccaaccaggaggctgtcaggcaggagctcatggcgcaacacccagatgatgctcagattgttgcgctcaagcatggggtctggagagtgaggggcctcatacaggtgtctagatcaatcggtgatgtatacctgaaacatgcaaagtataacacagaccagatcaaacccaagttcaggcttcccgaatcattcagcaagccactattgagtgccgatccatctatcatctcccgcgatcttgaaccaaatgactgtttcatcatattcgcatcagatggattgtgggagcacctcagcaatcaagaagccgttgagattgttcacagccatcaacgtgctggaagcgcaagaagactcattaaagccgctctacaagaagcagcgcggaagcgtgagatgcgttactcggatcttacaaagatcgataagaaagttcgcaggcatttccatgatgacattactgtcatcgtcttatttataaactatgacctattattgaaaggtgctccgcagggacaacccctctccatcagatgtgccctagattattgacagtgagctagttcacccactggtattcaagctcctgcgggcagccatatccagagtcagctgacatggtcaaccggttgtgaaaagcgcacaacctccggcaccagtttccttttcgtttccccttttttgcacataaaattgacaagtcgctgaaattgccagttttcccctcttggattatgtcggataaaatgcgtatactcttcggttttggagatatatgtctagactctagagcgtgagggaaggttataaagtcttgtatgtctttgttctcttgcagtcttgcttacagttacagctagctctttttgtatgtaacaattgtcagcaatcagcatgtttaaccacctccgtgacgttttacagcgacctggtcacggtactccacaccgtcatgagcataaattctttacgacttcaaggcttgaaagcaaacagctggtgggcttgtgccagtgaggatctgcagaattctctcctttttttcataaaatgtccaattgttctaccagaattctcaaactagacagttaccgaatgtttcttttgtttaattcactgccttttgcattcattcacacacatcacagtcctccaaccagccatggttttcaacgtgcccatgaaatgaaaagaaacggaaccggaaaagccacagtttccagctct

SEQ ID NO: 35651 - DNA, 2085 bp, Zea Mays
gcctgcaactctctcgtcccggcaaaggtcacaccttcctccctcgtccacatccgtgcctccagccaccggccgcctagggcggcgctcttgccaccggctgtcgagcccgccgaccttgccgccgtttccacgccgcctgacctgcccccacgacctgctgccgtcacgccatccgacctgccccaggacagcccaagcccccgcgaggccgcgacctgctggggaggagattgataggagaggtggtcggcggcgtggataccaacgacggagacatagtgattgccgcccgtcgtcccctgtttccgacacgctgaagcctcacgccacgagcgagcagagggccccaactgccagcagcaaccttaggcactggttgcttgaaggcaagcgcgtctaaccaaacattcggacgcgcataaaatcgccacgcacgcatcgctggttttgccgtcgcagagcagaaggcactccgggacggcagcgtgctctgcagacgctgaaggcaggatgtggctggaagaggtgaggcggagggagcgtggagagcttcgcgctcggcggtttgaggccgccgcccgagcgtgccgcacggcttcgctcgcgctctccaatcgcaaggagtttgtcaccccacatcacggcgccgtcaactcgctccagaggggaggtacctgctctccggggcatcggatgggtcggccgctgtgttcgatgtgtggaacgcgactgaatacgaaaccgggttcatagcaaagcacaggaacatactgcttgtggacaagcaacaccagaatggccacaagttcgccatctcggcggccgtttggtatcctgtggatacggggctgtttgtcacagcatcctttgaccagtttgtcaaagtttgggatacaaattcgactcaagtcgtcatggaatttaagatgcctggaaaagtgtacactgcagccatgtctccaatcgcaacaacgcacgtgctcattgctactgggagtgcagatgttcagatggtatcatgtctttggagtggtctgcctcaagtgagtggattttgatgagtggtggctgtgacggggcaatacgtttttgggacattagaagagctggatgctttcgggttctggaccaatcaaggtctcaacttggaaaaaggccccttgttaaaagtgctctatataaggatcacacagattccttaggaccttcaccttccgcaaggagaaggacaggcatttctaagaagagttcatcagctttgcgcaaaattcaaaacccgacacatggacacatgcaacagagattgcatcctggtttgtcatctagtcaaaaccgtgctactgctcattatggtgctgttactggtttacgaacaactgcagatgggatgtaccttcttagctcaggatctgattctcgcttaagactatgggacatcgattcaggctgcaatacgctggtcaattttgaagctatgcgattgcagacaggcaagccattacaattagctgtcactgaggatccttcacttgtatttgttccatgtatggcaagcatcaaggcatacaatttatggtctggtaaaacatttcaaacattccgggggcactatgaacttgtgagttgctgctactatagtgaacaggaccaagaactttatactggcagcaacgacaggcaaattcttgtgtggtctccatcaactccagcttttactaaaatggaagatgatgacaagatcctttctgcagctgatgaggataactggagcgactgagaaaccctggagccgggaggagtgtgtcttgtatctactgacatcgatgttactgatgttaacaaataacatgtcgaggttgttaggtcttgttagcagcccctaaatgatgatattgtcttggtgtattttcaaaaatatgtacattaccatgtgaaaatttgacagatcattgaataatttgtagatttatctcaggaggatagagggatgtttgacgttcgccaaaatgttgtttagccctggagccttgttttcttcactgtgtattaatgctttacccaaaaataagaatttttctgagc

SEQ ID NO: 35652 - DNA, 3166 bp, Zea Mays
gttagatatttcctcaagccccagtcagccgcctcctctccctcccacagctcctgccgccgcctctccctccgtcggtatctcccacctcgcaatccactcccacctcccccctcgcccctaaaaccctagctaaacccaagccgaaagaaacaatggctctcctcgcctaagcgagctcgcgcccgccccttgctggccatggcgctccagctccgccgcttcctcccgcacggctacggccagcgacaccgcgctgtcacccacgtgctatcaccgccgccgccactcgcgatgcttcagttcgaggtgtttcagagatattcttccgcaccctggcccttgtcacctttccgcccttgtgaaatgtgtggggttgcattcaggagcaattcaacaaggaaaatgtgctcgagaaatatttttggggttgcatcacagcccaaaagtagcaccttttttactactggactctctggcaaccgtagctctgtatgtttcagagcgagggacagccgtggaattgctttaaagactaataatattgttaattcacgaccattctcaactatatacagtaaaaagctaaggtttcttattaaaaataagacttcatgcaataatctaaatgtgagaagggaagatggaagtgttgcacatagtttgttttgtagatctgagaaacgccaaagcacagttgctacgtgtagcaccattgctgacgaggcttcaacatctactagtaacagcagcaagagtgttactgattctaagactgacactgccaagatgaggcgttcaagaggaagcaaaaaagaagttgatggagttatgaaagataaggaagtacataccaagaaaaagagaatatcttctagaacttgtatagctgcaacaaagacgactgagagttctagtgcgaagcaagaaaacaagaagactgataattgtaaactgaaaaagggtactgatagtcctaaagagaaaaaagtgaataataggtcaaagtcaaaagcaaaggtttctgcttcttctgtatcttctgaagctgagatttgtatgaaatcctctatcgatggttctggtattgagaaaaagccactggtgccattgtatcctccgagagccaaatcagtcgtggttgtggaatcagccacgaaagcaaaagttattcagaattatcttggggacatgtatgaagtgttaccaagctatggtcatgtgagagatttagcaggtagatcaaaatctgtccgccctaatgatgacttcagcatggtctgggaggtgcctgctgctgcctggacacaccttaagagcattaaagttgcactgaaaggaaaatttaattcttgcatctgatcctgatcgtgaaggtgaagcgattgcttggcacatcaaagaaatgcttgaacaacaaggtgcattgggctgtgatgtgactgttgcaagagttgttttccatgaaataactgagaatgcaataaaaaaggctttaatgtccccaaggtatattgatatggacttggtcaatgcttatcttgcacgccgttcccttgattatgtaattgggtttggcatatcaccacttctgtggaggaagttgcctggttgccaatcagctggacgggtccaatctgctgctttggcccttgtgtgcgatcgagaatctgaaatagaacagtttaagccacaggaatactggacagtacgggcagacttcaaaatgcaatttgcagatctgtcaaatggcacatgtattccatttcatataaagcatttgaattcaaaaaagctgggtcaactttccataccctctcaagaagaagcgcaagctatagaaaaaaggattcattcttctaagtttgaagttttaggtgttaaaagaagtaaaattcacaagaatcctccaatgccatatattacatccagccttcagcaggatgcagcaaacaaacttcattttactgcagggtataccatgaagattgcccaaaagctttatgagggtatcaatctttcctcagaagaaacaactgggttaataacatacataagaactgatgggtttcatatttctgatggagccgcagaagacatccgttcattagtcaaagaaagatacggccagaagtacgttttagaggacactaggaagtatttaaagaaggtgaaaaatgctcaagaagcccacgaagcaattaggcccaccagtataaggaggttgccatcatctttggttggaatacttgacgatgattctctaaaactgtacactctaatatggaaaaggacaatggcttgccaaatggaagcttctagaactcagatgattcaagtggatgttggcactcctgaaggagagatgatttttcattcagctgcatcaaagctagacttcaagggataccaatctgtttatgaggacactgagggagattctgtgcatgaggataactttgaggccttgtcaaaattaatggttaaggacttggtgtcccctgttaacgtgcatcttggacagcactttactaagccaccatcacgttattctgagggtgcattgattaaaaagctagaagaacttggaattggaaggccatctacttatgcatctataatgaaagtattacaggataggaagtacgtgacagcaaaaagtcgagttctacaccctgagttccgtggtcgaatggtctcggcattccttttgcaccatttctctgaggttgctgattacagctttacagctaacatggagacagagctagataatgtctctgctgggctaactgaatggaagggtcttctaaaaggctactgggaacgattcagcaaatattgtgcagatgcgagtaatctggatggcagaaaggtagagagaatgctcgaagaaaaatttggtcctatcctcttccctaatgttgacacagacaatagaatttgccctagttgttctgaaggaaccttgagattcaaagttagtaggtatggtgaaggctattttataggctgtgatcgacatccaaaatgcaagtacattgctcgctcattatcacaacaagaagatgaaaccgaacccaccgaagaatgtcaaaaaacttttacacccagattacttggtgtcatgcctgattctgatgaaaaggattggtgttgccaatga

SEQ ID NO: 35653 - DNA, 3265 bp, Zea Mays
cggcagggcgcgtatccctctatcccactgcgcgcccgtgagcccaacccaaccatgagtccacgaccacgaccactcctgtagtctagatgaaaagggagggcctgccgcctgcgcggctgcgcccggcacgcgcaaagcgaaaaagcgccggcgagcaaaggagagcgagggaatcgggttggcgtcgggtgggcagcctggcatcccattcctgccttcctccccgaagagccggacggacttcgttttctcccccctcacccacactgccactgactgcatgctctccgattccgctcccgcggtcccgaccccgcctcctccttcgtcgggctcgatgcggcggcgcctcgcgccggtgcttcttctcgccgccgcgctgctgctggcggcgcgcccgtggccagcggtgatcgcagcagattgtcctttggatttgagttggcccaactacggactgatagcttccgtgtgctcggaccaaaatggacactcaaagtgttgccgctacatcaatgctgttcttgcggtctcgtctgccatgtatgcaaacacaacaggcactcttggggttccggctcaattttctgattcctgcattgccaatatctctgatacattggtgtcaaaggggatactgcctactgccgcttcgttttgtggtcttgggatcaaaattcaagtgtcctatcagtgtgatgggatgaccaccatccttgagatgttgcagtctccgaatttcattgatatcacaagaagctgtgcaactacactttcagatgatatcacctgcaagaggtgcttaaactctggtctgtcgtacctccgccatcttgtcggggaacaagataatgtcaccttgaatacctgccgtgatgctgcttttgttgcactttgaacatatctggaccagctccaactggacttgttgcgccagatatttctcctagtccacttacggtgcaagttcctgtagtgccacccaagcatcatcgcagttacaagcttgttctgttcccagctattggagttttagtcactggtgtagcaattctactaatgatagtactgattttcctaatccgtagaaagaataaagaactcaaaaagatggaaggaaataaccctctggatgcatggagtttttcctgtgtcaagaaaggccaagaaggcaattccaccatttttggcagatttagttacaaagaaatgaagaatgcaacaaggaacttcagcacagtgttaggaggaggtgaaaatggtacagtattcagaggacaactaaatgatggatctgtggttgctatcagacgcgttgagagttcaccaaaacaaagtcacaatgaattttgtaaagaaatggaatttcttgggcggttgcatcatcgacatcttgttggactaaaagggttttgttcaacaagatttgagaggtgtatgaatacatggaaaatggaagccttcaagatcacctacattcgccaagtaaacatctgctaccatggaaaaatagggtccaaattgccatcgatgttgccaatgctctggagtaccttcatttttattgtgatcctccactataccatggagatgttaagcctagcaatgtcttcttggacaagaattaccttgcaaagcttgctggttgcggtcttgcacaccactctagtagtggcaatacaactcccagttgcacaccagtaaatgtcaaggcccaagcaactcctggctacgtagaccccgagtacatggtgacccaggagttgaccccgaagagcgacgtgtacagctacggcgtgctgttgctggagctggtgacggggaagccggtgatccaggacaacaagagtctggtggagtggtcccgcgagctgatcggcacggactaccggctccacgagctggtcgacccgtctgtggcggacgcgttcgacctggacgagttgcaggtggtggcggacgtgattcactggtgcacgcaccgggacggcgcagcgcggccgtccatgaagcaggtgctccgcatcctgtatgagcggctggacccgctgtccgggcggttcgcgcgcgccgtggagggcgaggaggggtactactactgccacggtggcgggcgggtgaaggggaagcaggcgggcgacggcgtgatccagttcagcggcgacgcggcgcggtcttggctgccgtcgtcgagcagcacgtccaggtcgcactgcagccgcagcgtgctgctggagtgcaactcgcccgagccgcagtcgtccccggcccacggcaacggagcgttcctggcttgatagcaccggtccgtcacccgtgttgcgtccgtttcatggtctgcactgcaccgcaggtctggcttgatggctctgccagctgccattttttgagaggaccttgtgataatggtagggatcgatccgtgcaccgttcatggtggttcgtgatgactgacgagtgacgactgacggatcctgctacgggatcgggagcccgtgcatggctgcatgagagtcatgtggagccagaggcagagagtgatgggagcacaactgtgctctgtgcaagaggtacactgacactgactgctgtttttcggttcgcttccctaggtgttggtggttgtttttcattgatctatgcattgatgtgcttcgggaacatggctacgcattcgaagtcgtgacagggatttcactgatactcctacttccattgttccgtactatactctgttctggcttcatcgtgggcagctgggctctggacttgtgggagagccggagaggcttgctcaagtttcctctgcgagaattttggctactgctccagttctacttgtacgtttcacttctgctttgctgatgcttgcatgatgtcacctgcttgaacgtccttgcctccttggggggtccattctcagtatctgtcaagtgagtccttggaactctgttatagactcttttgtgggccggcaatatgccaggcgccagaataattagacccagctatttgttagatggtggctgagtgttagagaagttttaggaggcttatcctccctggagcttatctccttaataatctcctaagttgttctctggagcttatctcttaataatctcctaagttgttaggccccggagctataagggtgcctcagattgtaatagggttttttatcaaaagaagtcgcacctgcgtgggcggttgcttgatcacaatggcgacccacacgcgccctggtgatcgtgttcctcag

SEQ ID NO: 35654 - DNA, 2883 bp, Zea Mays
cttggcttggccgctgctgcccgtgcgcgcaccggccgccccacctccatcttcccatggtggtggtgtcatcccccttcctcttcctcccctcgtgcaagtgcaaccacccacccgctctcccaccgccctcctcgcctatccctgccgccactgcggccgtcgatgagccccatgcccaccgcgccgtacacctccgcgacctcgctgctgctgggcagccgcaggctcccgcggttccagttccagtccctccgcacccccaccaagccccccttccgccgcccggcctcctcttcgtccacacctctccctcgatgccgcgccagcgcgaccccccgccctctggcccccgtctgcgcttccgccctcgcgctgcccgtgtcggtggcggccgctcccccaccgcaggtggacggtggctgggtgggagggacggcagcagccgtgaggagagtagctgtggcggttgcgtgcggggctctcgcggcggcgtggtgccgccgggcgatggctgtgggggctgccgcggcggcgggagccggggccggggcgccggggacggtggaggctgctgcagggattggatggatggcgctgcgcgggggctggcccagggtgctacagattctgcagctgctcagggagcacggcttgattctggccgcgctgcttagcctctctgcgttcttctccatggcagaaacttctatcacgacgctttggccttggaaggttcgtgaactagctgagaaggaacctgagaatggtgttttcaaaatgctccgaagtgacgtcacccgtttcttgaccaccattctcattggcacaacagtggtcaacattggtgcaacagcaattgttactgaggcagcaacagcaatgttcggtgaagcaggcgttagtgcagcaacaggtgtcatgacagttgccatcttacttcttacagaaatcactcccaaaagtgttgcagtccataatgccaccgaggtcgctaggtttgtggtaagaccggtcgcatggctttcactgatcctctatccagttgggcggattgttacttttctgtcaatggggatgctaaagattctaggcctgaaagggagaagtgaaccatatgttactgaagatgaactgaagttaatgttacgaggagcagagttgagtggtgcaattgcagaagatgaacaggatatgatcgagaatgtcctggaaattaaagatacacatgtgagggaagtaatgacgcctttggtggacgtagtagcaattgatgctatcgcaacacttattgatttcaaaaacttgtgggaaactcatcagtactctagagttcctgtatttgaggagcgcatagataatattgttggaattgcttatgcaatggacatgcttgaatatgttgaagaggttgagaaattgaatgcaatcactgtgaaggaaatcgcacatatgcctacatactttgttccagattcaatgtctgtttggaacctattaagagagttccggatcaggcaggttcatatggcagtggtcctcaatgaatatggtggaactattggtgaggaaatccagaagaaaacaggctatatagtaaggcggggggatggaacatttgatgttgatgcaaacacatcgatagatcacctatctgaagagcttggtatcaaaataccagagggacatcagtatgagacggtgtctggttttgtctgtgcatcttttggctatattccagaagaaggtgggaaaatgcttgtgattcttgaaaagaatttcagagaagaaaacggtgaatatcaggaggaaggtcctgatcgccaagatgatagagaaaaaactcaagcttatgaactcgagatagtggaagctaatgcaaggaaggtgggcaaagttctattcaagccaataagcagtgaatgtgttgatgtcgacaacaagggtgtgaaccgcctcatttccaagaagatcatcaagcggaagaagaaaggctctgatgattcctccaatgatgacgagtgtccagacgtaacagagaatggttgccctgcagagttactctcatactcggatgataacagtgccttgttggaagatgcaagcagttctagtgccaaaagatgacaagaaaggaactgcaagaccatcgtactactggtaataattacagcacaccgtcacccctcctaataccccttgttacaacagaagaagagaacatagtagtaggctaccaaaaaaaaaactgcgagagcaacaccaagtggttaacagaagtttatagggcattggaacatttttttagtagcagtagcagtctagaggtgcagcgaggtgtcgacgtcgacttcaccagagacatgtttgtagttgtaagtcttactgggccacagctccaccgtgatggggtcgttatcgccgtggagctggaagcttttgcattcacaggccgggaataaggaggcggcagcggtgtcccgcagtggcctgcacgggtagagcagctccggatggaagaaccacttcacgggcatctccctcggggaggtggtggccacagggcgcggggcgagcacgtggagtagcctctcctcccgcttctccctgatcctctccagctccctgaacctctgctgcagcagggcgatggaggagaacatcatctggccctcgctgctctgtacccccatgatgaacaaaaactcctcgttttcagttgatgtgtgtgtgtgtgtgtatctcagccagcgtctgtctacttcgctcgctcgctgtgtggggttttgctgcttgaggtggtggtggtcttgggcatgcgcctacttataagctgcaaagttttgtcacggcgcagggcgtcgtcttgtggtcgtcttgcaa

SEQ ID NO: 35655 - DNA, 6371 bp, Zea Mays
cccttaccgcttgcaaaatcacttttcacctctcacattctcatcctctcctcgctgcggttagccgggtcaccaaccaccgactcaactgaaccacgcccctcgctgccgcggcgccgcgctatggacgttgaaatgctgccgtacgggattatttcgacgtttcattgcttgagtgtccgtacttcgccgctaaacatggcgttgttaccgtgcgtgtacatgcagatggacggcgtcactctgcgccacctgctccgccccttcgccgcgcaggaggccgcggcggccggccgagtggcagcagcgccagagcagctgttcgcaagtcattcgaccctgcaatccgggccgcctccgagagtggggccgagcaatgagttgcttactcaagttccggggaactattgcactttcgatcttgcgccggacctcactcgggcaaatgcgagcaatgctgctggtaccattgattttactcgggctggtccctccagcagtgctgccactctgcccaagtatccgagacatggattgccagctagcagtagcaatgagcagtcctcttttggagcgcttttcccgaacagaagtgctaatggaatgggtatttttacttgtcaaagttcggctaacgaaggaatagcaaatgttggtgtgcagtttcaggactcaagtgtccatggactgcagaaattgccattcaaatcgatgactcatcagcatcctacactgcctggtgatcgaatccgtgtcacctgcggagagttttttgtgggcgaagctgggctttttggagttatctgcttgtgtcatcggttgcgaatgtctgtagctaaattctgcgagcatgctggaggaattccagaaaaagctggtgaaattgtctgcttggagaatggcatgagtattgcacaatggttcaaattctgcataggggtcggaggatctattgctaacaccaggtgggattggccggaatgggcacatatgaaaagttctccagaagagcacatattgaaaagtcttgcatcaagaaacagtggaacaggaaaaatggggttgttaagtagatatggaaaaatcactggacatatgaacaaaccggcttattccaatgatctgtccgttgagggtggagggcacactaatgttgagaagctagtaaacaggacagatgaaacatattacagaaagagtgttgatgtgcatgaaacttttacaaagaactctgctttacttcagaattccgctgtggtgaatttagggcccgctaaaaaccatccagttcatgcattcgacttgaacccacttaccactcctagtggaagcccacactttgaagcaagcatgggaagacattacaatggaaatcatttggcccatagtcatggaatccatttggagaaaaactttgatgcgtcattttgtaatcctatgccacgttttacaggagttatgaaccatgatagtagggcgtgcagaccaaatttctccaataaaacattccaggacactttgagcaatgcttcaaacactgaattaaagcttgggcaatcttcttatcatcaatctatgactactctttccccattggggcaatcaacgatgattgaatttcagaaaccccaaacacataggcctccgataaatcaaaatccttctccaaagcaagcaacaaagatcagcaaaagtctatccgaacataatgaaccatccattagtaccggaaataagaagcaaccacttgaagttgttaatggcatgaagcgttctgaaggtgatgagcttacagatgatacatccaagaattcatttatctcattatttctttcacaccttgagaggaataatacacccgaacccatcgatgacattctcaacagtaatgagcactatcttcctaaggccctggatgttgcatgtggttctgatcatccagaaagtgccactagacagattgaaacaagggtgcctaatgataagcactcaaagttggcctcagccattgttcatacgaaaaggagatcagagggcatttctctttcagtggcttcttctggatataatcctcaagatgcatcccatgctaatagtcaggaacacttgattcatggtgattccttgtcacatttgctgcctagtcaacctaacaccggaatctcgaaaatttctgcaagggtttcatgtcatgcaaattgcatgagctgcattcacgtgggtaataaatcccatcaggttgcacatggtgagattggggttccctgtttctatgataaaatggccaggggccatggtacttttgagcgagttgatgactgcacacatagaagtttgagagctttcacaaaaatcagttgcgataatgggaaatcttgttgttcttctcgtgagcttctacctagcttttgccaaaatgatcagccaacattgggaaaatcgatttgtggatgctgttgcaaaattcaggaagatgcttccaagcttggttttatacctggtcacatgtgcagaactcatttttctagtgatgttggtccagttctagccaataagcctactattgaagggctagatgaattttgtgcttgcagttgctccacttttacacaacgatcatcattatgttctcgggaatacgtcttgcagtcttcctgtgactcatgtcccattaatggactgcactgcagaagttgtatgggacatgcagcagatagcttaacaaaacactctctgtttgatcctcttaatacaaaagaacgaggttcttgttgcaatggaagatgctgctactctgtagtcccaaaatgtttgtctagttgtgactttacaaaacactgtgatgtcataattgaccaaataggtcatgctgcacctaaagataaccatcagctgcaaatgcctaccagatgctgcacactgggggagaatgagaagttaatatgccaatgcttaagcaataaaatagctgtaagaaacttgcctcaaacttctcattgtaaagatgtctctgagaaagtaatgaaccagccttctattgctataacggagagactggagaatgtatcagaaccttcagtggctgatgacagttcatccaaagctgtagcagagaaaaaggatgcttatagagattctgcagtatctaaaggacagccaaattttggtttctcatctgggtcgtccagcattatagtgacaaagttccagaaatcacctgaatttaacaatgtatcctctactgctaaacatagcaaacataaaaatctgtgtgatgaaggatcaagaattgagaaaagttcagcatccagctatgtgcctaccagtacaggatgtgaagaacccctaaatagttctgccaaatctgagctgggtccatcaagagtgaagcgcaaatgtaatcagatttctgagggaaggagactggaagaaacagataatgaggaacattgttctgaactgctaaaaaagactagaacactgaggtgctctgttaaaggttctgaatcagatgattgtactagggctagttcccagtcgtcccagaagggggtttatcaaccacaaaatgaggttaactcattttcttgcagggtgttgagaaccaagcgaaaacatcctattatgcatctaaataagcatgtgaaacagcttcacagacagaccaagttttttgaaggtgatgagcaaccagatgccaagggcaattttcttggtggattagattcctatgatagaaagaggcaagtagaggatatgagcactctggataaaacaagacatcaccaggaagggagtcgagcatttgtccgcaaacttcctaaatatgtgtctctgaattgcattgttaatgaaccgaatactaacagtgaaggtgcttgcagtgggagtggtgggattgattctagtttaattgctacagggattacaaacgataacaggaaatctcccaaaattgttcctctcaatctggttcttaaaaaggctaagagatgcaatgctgttaaactccgtaagacagaaagcacccacttgtatgaggagaaaagctcagattgttctgtgaacagctcagattattctatagaaaagtattccgttgatgatgaaaattgcagcccacaagctgaatatgaactgcaggattccaaaaggagtaggtattcatctaatgatctgaggtcacatgtggctctccacaaaagaacatctggtgtcattggagaagatgactctcttggtctaacagatgtggaaataaattgcctgtcaatatcatcatcaagtaatggaaccaagaatcgaagaacaagtgtatcccttgccaggattaagaaattcgggagcaaatcagtatgctattctggcagtgacaaagacaatgctgtgctagcccatgaagtgaatgctaggagatacagtggaagactcagctcaaattctccatgctgtgtttgtgggatctcagacctggagccttgcaatcgattaatagagtgcagcaagtgctatatcaaagtatttcatactactctgtacatgtgccctactattactgcatatttacagtggcctgtattttgtgtaggtgcaccaagcctgctatggtgtactaaaagttcctaggggtcaatggttttgcagaccgtgcaagaataataccatggatacagtctgtgtgctgtgtggttatggaggtggagctatgacaagggcactgaaaaccaagaatattttgaaaagtttgctccaaggtttgatgaatttagaaaggtcagaatattatgttgattccttaggaaatgcaagcagtgagtgtacaagcttgcaaaatccagtagacagtgcacatggggataacattatgaatgcgaagaacatcaccagcaattcctggacctctggaaaatactattcgagtttacttggaccacaaccaatgcagtgggttcacatggtctgtgggctgtggacacctggcacaaaatgcccaaatgacaccacaatgagcgcttttgatgtttcaggtgcttcacctgccaagagaaatactgcatgttcaatatgtgacagaactgggggctcatttgtcaagtgccgagctgtaaattgtttggtattctttcatgcttggtgtgcacatcagaggggtttgctgcaaagtgagcctgaaggcgagcacaatgaaaatattggcttttatgggcgatgcgtgtctcacgccattgttttttctagtcacgttaatcctaagaaagaatactttagaaacaacaattggacatgtgcacgtacagagggttttaaaggccgaaagggagaaggcttttctgatagtagccataaaaaatatgaagagtacagtggcgagttcggtgtttcccaagaacagataaatgcttggttacgcataaatggttcaaagccctgcggacgaggacagaaggagtacatccattacaagcagttaaaagggtggaagcatttggttgtttacaaatctggcatacatggacttggtctctacacatcagtctttattccacgcggctctatggttgtagaatatgtgggtgaaattgttgggcaacgggttgctgacagaagagagatcgaataccagtccgggaaacggcaacaatataagagtgcatgttatttctttaagattgacagggagcatattattgatgccacccgcaaaggtgggattgcaagattcgtcaatcattcatgccagccaaactgcgttgcgaaaataatctcagtcaggaatgagaagaaggtaatgttctttgcagaacggcacataaacccaggggaggaaattacgtacgattaccacttcaaccgggaagatgaaggccagaggatcctttgcttttgtagatcaagatactgcaggcggtacctcaattagtttccggtgggcgtaacatgtctatatataacttatatatctatatgtatatcttatatatttacaaattacaattgcgattcatgcctgctgtatatgtaggaacttgcatctagaactgcctgtttatcttttgtgaagtcaaatgagttatcagctgttcatgtgacactgaataacaaaagcataaaaagtgtcactatctcgtttatgagaaatcatgcgcctaatctgaatgatggatgatccagtgatctactttggcaagaagggcttgaggtcagacttgtccacctgaagctttgttgagatggcctcgatctgctgattcctgcaaatccaagagccatccatctttgggaaacagaatatataaaaaaaaatgaccaataacagagttctttctttgtgttttccaccaggaccttcacttcagtaattccagatgaaa

SEQ ID NO: 35656 - DNA, 8208 bp, Zea Mays
tacatagagcctatccattccaccgagggagaaatggaccaactcataggttttcgatccgacgaccacgtccttcacacggagttgcttcgccttgacgcaccctccgcgatcacgctgcgtgccgcagccagttccctccggaaccgccaccgccgagttttgaggcccaaactctggtgggtttgaggcccaaaccaccaaacctgccgtgagcaccgcacttcgtgcacgtcctccacgatcagacgcgtgtcccgccagtccctgaccacaccggcaacatggtccattccaccacgtcctcgcataagtgtgtgtcacaggtgtcagccaccacgattggtcaattgactgctttgatccgccagtcaagacccatcactcgtcccttcaccgctccgggtccatcagtacgagcccgcatgactttcacctcagtcgtcgaccaccgttcctgtgctccacacctgcacaccacaagtcgaccgacatggttgcacaagcataatctcacactctggactaacatgcaaatacggcgcaaatctatggtgcaatgtggaaaagcgttggtcggtaagggcccgataaaatgagacctcctctcctccgggagagggatagagtgcgtccgtcttcgttccttgccccccttccttcagaagagcgaggccgcggtcgcggaggaggctttacgaacaaacgagccattagtccccaaaagccaacacacaaacccaggcgatagcgagcgcgcccgcgaaggctacgacgcgagagcgcgcgaggtgtggagcccccaatcccggaagcttccttggccgcgcgcagggcgcgggagtgggagctcgccgccggttaccgagccctctccgccgcggatctcccgatctgagacgccactcgtcaattccccgcagggttttgcggtgccagcgacggacatgagcgtggagagcccaggggagctagggttctgaagcgcaccgtggggcacagcgtggcgaacgacggcccccgacatcctgctaggttttccatgggagatgggggagtcgcgtgcgccgtccgctcagtcgagagcttccgtgccggcgccctcgtgaggagaggaggagcgggagaagcgatgccggacaagggggagagggcccatggccaccgccaccagcaccagcactggaagaaccagcagtcggcgacagctgctgacctggaggagggggagctgcttaatggggaggccgggaccaatgggttgcccgagaggagcatgccacctaagaagtggaggaaggtgctggcagcctccgcagctgctgtggaggtggagcctggggagattgtgagtacaaagcaagcagtgccattgaagaaggaaagaagaaacggggacgttgagaaggtagagctgctgccagagaggcagaggaaggaaaagtcttctgggaagagcaccaggaagtctatcaaggatgatgtggagccaggggagattgcactgccaggaaaaaggcgggatgccaagtcccaactggcccatgataacagcaggaggccaagttcgtctgcccagaaaggctccttgcgggattctgatgaagaacctggtgaaattaagccagagagcggcatcagtggcagtgtaaggaagaaccggccaacagagcctcatagcagtaaccacaagcaccacactgacacctctgaccagtcaggatcaaaacatcgcaggaagggagaaggaaagagttcatctgctgccagacatttgtctgggagaattcgtgaggtctcgccaccaacacgggatcggcgtgataagcacgagaggagcccaggcatcttgggccgttttcctcatgaccgttttcgtcatgacaggtatgacaggagcccgagccgcttggagcgttccccacatcgcactcgccactatgatagcagagaccgcagtccatatatttcacctcgacatagagctcgtccgccccaattcagggataacacaccaagtcgtgttgataattcccctcgtgggagggtccagcatgaagatatcagagaccgtagcccatttcgtcatgacaggtcgccttctgaacgttgtcgtcctactgacacgcatgaagcaagcaagaagagcagaagtagcaacaactcagagaagtcacatcacaaaagcaaatcagcgaagcaatcttcaaaaatcaagagtggtagcaatgggaagaatgaggagaaaatctccaaagaaaagcacactgaaagcagtcagtacactgaactgccaccaccacctcctcttcctctaccaccgccaccaccaccgccgccgccaccgccacccctgccgcctgctgtaccacctccattgcctccatcaccagaacctgagccacctggagttctagccgaggatatgatagaagacatggatatctgtgacaccccacctcacactagtgcagtacctgaacccacagaaccaatttgtgatatagggaggtggttttaccttgatcacttcggtatcgagcaaggaccttccaaacttgctgagctgaagaagctggtgcaagatggatatcttctttctgaccatctgataaaacatgctgatagcaaccgatgggtgactgtagagaatgcagcttcaccactggtgccatctgatttcccctctttatattcggacacttcaacacagttggtcaacccaccagaagccccaggaaatttgctcgatgaagctctagaggaggcttctaacttggcatcaggagctgaggataaacaaatggaggaaacgtctgcagaagatagtgaagaattctgcattgatgatagggttgaagcactgatggatggatcaattttggtgcatggccaggagctcgagatcattggagagcttttaggtgcagattttcagcctgctgattggcaaagatggagtcgtcgtgaagattttactaggctcaatgtgcacactgaagtaaacaatgaaatcaatggaggcacagaaaatagagcaacagatgcttatggtcttgtttctgtggagaagaactttcatcataacgctgagtctagcgaatggttttctggtagatggtcttgcaaaggtggtgactggaggagaaatgacgaactaagccaagatactccattcaggaaaaaacttgttctcaatgaagggtatcctctgtgtcaaatgccaaaaggtagctgtgaggatccacgccggccctgcaaggatgagttgtactaccctgtacgtgctaaaaagtatgaactgccattgtgggcattctcattgacagaagaagatattgatagtgttaatgacaccactaaaagcggtgttgtgcctgggaggccaggtcagaccagacagccttctaggggagtgaagggcatgatgctttcagtggttaggataaattctcgtgttgttaaagatcaatcatctgttgaaccccatacaaaacccagaggaactgatcgaccactgtcgaggtcttcacgctcccattcaattggagctgagagaagttctgtccatgaaggttcgtctcatttcaggaagcaccatgaccatgattcacaaagttcgcacaagtccaagcctgttccaaacattccaaaggaccgtgtatgcactgttgatgagctgtcagtttatcggggtgactggtattaccttgatggcactgggcatgagcatggtccattttcttattctgaattgcaagaattagttaaaaatggcactatcattgaacaaagtagtgtgttccgtaagattgataacacatggtttccagttcttaaggatttaaaacctggaagctctgttcccagtgcagcacgaagctcaagttttactgctgctcttatgctcccagaccaatataattttggtgtgaaccaaggatcaggtagcttcaatcagttgcacccccagtttgtgggttatacacgtggtaaattacatgaactagtcatgaaatatttcaagagcagggaacttactttagctataaatgaggtcttggatccctggatctcagcaaagcagccaaaaaaagagtttgaagcatacttctcccacaattcagcatctagaaatttgctgccagatggtgggtctgcaaaaaaggcaaagttgctacctgatcagagtgatgaagatattcatttgtcacaagacattcttgccagtcggaaggaggacatctgttttgacgagctatgtgatgcagaaccttctgttgataatgattctctgaatcccggagcaggaaatgaaacctggggtctactaaacggccatgtgttagcaagaatcttccattttatgagggcagatgtgaaagcacttatttcttctgcagctacctgtaggagctggaatgctgctgtgaagtattacagaaacatgtgtagattcattgatctgtcttctgttggccctctttgcactgattctgtgttttgtgatattatggctggttatgagaagcaaaatattaggacccttattttagctggttgttcgaatcttagttcgcatgcccttggcagagtacttgagcagcttccacaaatatcttatgttgacatccatggttgcggtcatctaggggatctgaaaaataaatttcagcatgtaaaatggatcaggagctcattgaatccagaggagtcatatcggaaaattaaaaccttgaagcagataggtgatgggaacaactacgcatccaaagttgcaaggaacttcaccaatcatctggatggttctgatgagcttgatgggtattttgctgatatttcaaatagagagaatgctaacctttcatttggacaaggtttctataaacgatcaaaattgcttgatgctagaaagtcctctgcggttttgtcgagggatgcagaaatgaggcggttgatgcagagacaggcagagaccagttacagaaagatggaagagttcatcataaacagactgagagaaattatgaggagcaacagatttgattttttcattccaaaggtttccaagattgaaggtaggctaaaaaacgggtattatgctcgccatggctttcgtaccatcaagcatgacatccgtaccatgtgccaagatgcattgagatataaagatggcaatgattcgggagatataaagcaaattgttgtctccttcatacagctagcaaagagactagggaacccaaggtacatttctgatagatatggagcaggagcccaggacagcctggacattaatcaatattcatttgatactaaactcaaaaagaagcaaaataaaataagaggagcaaattcattggctgctggagcagataattcatctcgtgcatttgaccttgaaatcaaaagaagcctatctaaattaaagaaaaaggatgtctactctggtagcgaaacatctgatgatgatgatggctactctgaagttgatgaaactgagagcgaaactactgtttctgatactgagagtgaccttgatgtaaattctggagcctgggatttaaaaggaaacagtctaaagttaattgaacctggggaatctgtgaccgatgatcgtatattgggtgcccgcatgacaaaggccagccttgttcctccagttactaggaagtatgaagttatcgaggagtaccttattgtagcagatttggaggaagtacagcgaaaaatgagagttgctttacctgatgactattctgagaagttgctgtcacagaagaatggcaccgaaaacttggaacttccagaggttaaggattatcaaccccgaaaagtagcaggagatgaaattcttgagcaagaagtatatggcatagatccatacacacacaatctactgagtgacattatgcctgctgatcttgagttgtcacctactgacaagcatatctttattgaggagttgcttctgaatacattgaataagcaagttaggcatttcactggttcgggaaatacccctatgacttacaaccttaggcctgtcattgaagagatccaaaggtctgcagaggataatggtgatagacgaacttcaaagatgtgcttggggatgctaaagaccatgagaaatcgctctgaacagaacttcgttgcttatagaaagggtctcggtgttgtttgcaacaaaaaaggtggatttggtgtagatgactttgttgtagagttctttggggaggtttacccttcttggagatggtatgaaaagcaagatggtattaaacatatacaaaacaacagtgaagatcaagctcctgagttttacaacattatgttagaaaggccaaagggagacggagatggatatgacttggtttttgttgatgcgatgcacaaggccaactacgctagtagaatctgccactcctgcaacccaaactgcgaagcaaaagtgacagcagtgaatggtaaataccagattggagtttacacacttcgaccaattgcagaaggcgaggaaatcacttttgattacaattctgtaactgagagcatgaagcatcagtctgcctctgtggaagtcaagtatgccgtggcagctatttgaatttttctggtgaaggagcctttgagaaggtattaatggaattccatggtgtgctcgataggcatagcctgctgctacaggcttgtgaaacagactctgtctctcaacaagacttaattgacttgggtagagctggtcttggtacctgtttgcttgctggtttgcctggatggcttgttgcttacacagctcacctggtgcggtttatataccttgagagacagaaactccctgatgagatcttaaggcacaatgtggatgagaagcgccagttccttatagaaataaacatggattctgagaagaatgatgctgaggttcaggcagagggagtattaaattcaagattacaacaaatagtgcatacacttgacaaggtgagatatgttatgagatgcatatttggagacccaaagaatgctcctcctcctcttgtaaggttgtctgggaaaagtctggtatctgccatctggaaaggggacagttcaatagttgctgaactcattcagtcgatggaacctcatgttgaagaagaggtacttagtgatctgaaggccaaaatccgtgctcatgatccgtcagagtctgaagatattgagggaggcatccggaattctctcttgtggctgcgtgatgaattgcgaactctttcatgcacttacaagtgccgtcatgatgctgctgcagatttgattcatttgtatgcttatacaaagtgcttcttccgagtccgggattataagacagtaaaatctccaccagttcatatcagtccgcttgacttaggccccaaatatgctgataaactgggaccaggctttcaggagtactgcaagacatacccagaaaattattgcttagcccagcttatctattggtatagccagaattcagaacctgaatctagattaacaagagctagaaaaggttgcatgtcgttgccagatgtctcatccttctatgtgaagtctgcaaaaccatcacaagagcgagcttatggaaacagaactgtgagattcatgttatcgcgcatggaaaagcaggcacaaagaccatggccaaaggataggatatgggtgttcaagagtgatccgagattctttggtagtccaatgatggacaccgtgttgaataattccccgcttgacaaggagatggtgcactggctcaagactagaccaaatgttttcctaggctagtaaaaaaggtttgtaggcagataaggtggtatttggttctttctcctttttggagattttagtctacatgattctttttccgactcacaccttggctacctgatcatggggagtttagcttttagatagcagggtagtctcaccacccccatctgtacattcctctctccctactttccttgtagagatgtatctggttaataactgatagattcgtcattgatttgatgtagtgaattttccccataggaatgctccctcttttgtttcatgtaaatgcagaacaatttcaatcttgaattcagtaatgtgttacaggcatgttgcatttctgtggttcagttcgttgtttcaatcaataaaatgttttaggggcttataggtttcattcataggaaa

SEQ ID NO: 35657 - DNA, 2525 bp, Zea Mays
cccgaccgttggagaccccaacccctaaatgcagtaatgctcacccgcaacgttcttctcccaatcggttccacctgatgcatcccccgccgacttccttcttcttcatcatcgtctcttcatcgcttcaggaggccgccgcataattagagataggacttagagatataataacccccagctcctgatccccaagccctaggcgtaggattccacgtccatcgatggcgctggacacggggacggcggcgggtatcgacgaggcgtacgagttctccgcgcccaggttcttcgacttcgtcgtcgaggaaacggaggaggccgtacgtgccgccgagagctggttcgaggctgcccgcagccacgccccctcgccgttcaacccaaggatcaaggaatcgagggcggaggtcaagctcgcggtcctctgtgatttcgcgcaagccgaggagccggctccagaggtaaataaacagaaggagccagctgacgaaatgtcggggccgcctgcggctcaagaagagagagatgaatcgcccccgtctctggagttcctctcggcgacggacctttctgtaaaatcagcagatggtggttctaccagcacgcttaagatgcagacgcgttatcctgcccctcctaccaatgttgcccctgcgagttcgacatgtgacagctcttcagtgaatactgatgcgcgcacgccgaagatgcaggtaaacatgtgcagagcaggtcctacggctgcttcgacgaatgtcaagaggagcgtgatgatcaagggtggccgtgatttggtggggactggaaaggcagccactgctggcgctgaaattgctcaagagaaccaagcggtgaagaggcagaagctcgatgatgggagagccagacagatactcaatgtcaagactaaggtgctgcctcataaggcgagagctgatttagctggaagcgaaatgaggaggtcccatgaggatatgcgctctgcgaaggaagcagatccatatgtatcagctgcagaattggttaagaagtttgaatcagggaccagagagcttagcatcactcacagtagatgtcgttctcatgaggatgctgcatcacagcgaagcctgcgaaggcctaagcttatgttaactagacctaaggaacctgacttccagacttcccagagagttcgaacagtaaaagtgaagagctctgcagagatagaggaggaaatgttggcaaagatacccaagttcagggcacggccattcaacaaaacgattgctgaagccccttcgttccctccacttccaaggagaaccccacagatacctgaattcaatgaattccatcttaaaacaatggagagagcaagtcgatatgcggacacctgttcagaagtttcttgtgcagatactatccagagtcaaaataagacactgaaatcgagacaagcaaagccaccacaacttcatacagcaatgagagctcggccaccaagtgtgaaaagttttcaggaacttgaactggaggagctggagaaggcccccaagttcaaggccaagccattaaacaaaaggattcttgagagcaagggagacattggtgtatttttccatccaaagtctcaggtcacagctcccaaaaaattccatttttctaccgatgttcgcttgggccctccatcagttgctgacttatttgacaagctctctcttcactctgaatgttcttcaaacagcaacagacaagatgtgcccagacgcaccataccaaaccctttcaatctacaaacagaggaaagaggtcatttaaaagagaggcagctagaagcacatctcttacaaaagaagatggaggaggaaaaggccagggttcacaaagctaatccttacccatacaccacggactacccgacgatgccaccgaaacctgagccgaagccctgtacaaggccagaaggctttcaactagagagttcggtgagacatgaactagagcagcgaaggctgatggaagaaaaacagagaatggagagtgaagaggctcagaggagaatcttcaaagctcaacctgtaatgaaagaggatcctttcccacttccggagaaagagcggaaacctctcaccgaagttgaacagtttgtgttgcatgttgatgagagggcagtgcagagatcagaatttgatacattgataaaagagaaagaaaagacttacaaaaggttgagagaggagaacgaattcgcgcacaagatcgaggaagagaaggcattgaagcagctgaggagaaccatggtgccacatgctcggccgctccccaagtttgacaggccattccgaccacagaagtcacctgatgatcaatatgagcccccaaagggcaaattttgtaggggcaagcagcaaccattaaacctcttgtccatcccttccactaatctttaccaccttcttccgtacaatgtcaagctgcaataccagcaacaagatgtaaaaggaaaaacattcactacacagtgactcattttctagttg

SEQ ID NO: 35658 - DNA, 1076 bp, Zea Mays
ggatttggatccactttgccatcaggcgcgcctcgttctttcttctccgccggctgcatccacaccagacaccacaccacgttgctctcaccggtggaaggaagtggaagtagaaggctggaagcggaagcattcgatttccatcgtggggcatggcggcggaggggaagaggaagggcgtcccggcgctagggtggtggctgatgctagtcggctccctccgcctcgcctccgtttggttcggcttcttcgacatctgggcgctccgcgttgccgtcttctcgcagacggagatgactgatgttcatggccgtacttttggtgtctggactcttttgacctgcaccctgtgcttcctttgcgcactgaacctggaaaataggcctctgtacctggccaccttcctatcattcatctacgctctcggtcatttcctcacggaatacttgatataccacaccatggctgcagcaaatctgagcacagttggcttctttgcagtggaattctcatgggaacccccggggttcctatgctgggaagcagtcatgactgatgctcgggttgttcgcttgatgtggtctgggcccgctaggggaagaaggatggttgaagaaagctcgctggaaagccgcctgatgatggctctgcgtcatttgtacttcagttttcaacttttcatcatgttatttcgttgcatgagacgttcgtccgactgagcagggagatttccgaacagttatgccactggctgggaatgagaatttttgaacactgaactccggctgaatcatgtagtcaggagctgtaatagcattcagatagtcaccggttgggagctgagatgccaataaggcggcgggtatagaaaagaggtgggcgtatcatgtgctttcgttgcagccaaagggtgtatgtactctgaaacttttgttgtactgatgctgcatcttttgttcttgaaataaaccgtacattagtacagtagagtcgataaagtttttatgtattgcgatgattgttcaatcactttatttttttttacctcatgttcagttactttttttatctccatg

SEQ ID NO: 35659 - DNA, 277 bp, Zea Mays
gcgatgtcttgctataggtgtttaattcgtggacatgtagtaatatttagtctcgcactattcttatttatatgcattcatatgcataatgcatttcattcaggtacgttaattaatcgcgtgatgcggaagacgagccaagtcgaccccaagcgcgggctaatccgcaggatgaaactgatgaactaatctgaagatgaatggacaaaacaagtatcaaaacaaggatggtcgtcaagcggacgtcacctaacaacactaacctagtgttacccag

SEQ ID NO: 35660 - DNA, 1580 bp, Zea Mays
caaccacggcccgatccgcagcaaaaccttgccgcctccgcgggccgcggcactccaaagccgccatcttctcacgcacacggcacaccgcgcatcccctgctctcggcagtctccgcgggctccctcctccgccgccgcttccatggactccacgccggcacccgaggcagcccccggcgcgtcctcttcctctcccgccgctgccgcggccgccgagggtcttgcggggggcgtggcggcgatgaccctggatgagcggttcgaaatgctgcggggcatcggggaggagtgcatccaggaggacgagctcaggcgactgcttgagaacaagcccgtacccatctgctacgacggcttcgagccctctggacgcatgcacatcgctcagggcgttgtgaagaccatcaacgtgaacaagatggtcaacgccgggtgcaaggtgaaaatttggatcgccgactggttcgcgcagctcaacaacaagatgggaggcgacctgaagaagatccagacggtagggcgctacatgatcgagatttggaaagcggctgggatgaaccttgacggggtggagttcctgtggtcctccgaggagatcaacaagcgcgcacacgagtactggccaattgtgatggacattgcccggaaaaacaacgtcaaaaggataatgagatgctgccagattatgggcagaagtgatcaggacgacttgactgctgcccagattttttacccttgcatgcaatgtgctgatatatttttcttaaaggctgacatatgccagttggggatggaccaaaggaaggtcaacgtgctagctagggagtactgcgatgacatcaaacggaagaacaaaccaattattctttcgcatcaaggccaggagaaaatgtcaaagagtgatccatcctcagctatctttatggaagatgatgaggcccaagttaatgtgaagataaagcaagccttttgccctcccaaaattgttgaggggaatccttgtttggagtatattaaatacattgttttcccttggtttggaagatttgaggtcatccgtaaggaaagcaatggtggtaacaagacatttacatgcatgaatgaactaatttctgattacgagactggtgctttgcatcctgccgatgtcaaacctgcactggcaaaagcaataaatgaaattttgcagcctgttcgtgatcatttcaacaacaacaacgaagccaaagttcttcttaacactgtcaagaagtacagagtaaccaattgaggagtggaagctgtccatctttagggcatgtttacattagggtggatatcgccgtttgaaattcttgtatgctattctgttactagttgcataggtagctcaaaagtttcatgtttctagatatataaaaagaatactttacttgttgactacttgatgtgcatcatagggctcaacctaaacagtgttgcactgtaagtattcgataaaagataaacaaagccaatatccaggagagacatgagatggcatgtagatttaaaaatgtcttttggccatgtccaatggagctaaatagcaagcgttgg

SEQ ID NO: 35661 - DNA, 3231 bp, Zea Mays
gcccactcatgtgggagcaggcagcactagttaactaaacaatgaggcagcagactggtaagcgtccctcccaacacagggaatatgaaagagaagaaaggaaggaccaacacaagaggccgtttccccgtgctcaggaaagctctaataatgatgggctggttctttaccgtatactctgtccagacagtttgattggtagtgtcataggaaagcatggcaatgtgataaatgctatcaggcatcagacaagtgccaaagtcaaggttgttgacccgtaccccggtgcagacaaaagggttatcttggtatattgctacgtcaagcatagagaccttgatgctgagggtgatgacaatgagcctgtttgtgcagctcaagatgcattacttagggtgcataatgcaattgttgatgcactgcagacattacataagaatcataaagactctgataagaagagcacagaggaagctaacattcttgtgccagctagtcaggcatcaaatgttataggaaaatctggtgctgtcatcaagcatcttcggtcaacatcaagagcattcattaaagtgagcccaaaagatccaagtgaccctacacattcatgtgctatgagttttgataattttgttcagataactggtggtgctgaagctgttaaaaaagcactgtttggagtatcaaccatcatttacaagcacccatcaaaagagaacattcctcttgaaacttcaattcctgatcctactccaagcattataatcccttcagaacttcctgtctatcctgctagtaacttttactcggccccagatgctgctataccttctgtacatccaagcatgtctgtcttagggtcaacacgtcatgttcccgaacttgctgtacctgccgatgatcatggtcggctgcctatttatcaatctattcttccagttattcctacttatagtgccccaaaatgttcaggagaacttgagtttcgtgttttatgccctggtggaaaaattggcttggttattggaagaggtggggctaccataaagaatataaggcaagagagtggtgcaaggatagatgttgatgatgcaaagaatgacaaggaggaaagtatcattaccattatatccactgagtccaccgatgatgttaagtctgccgctgtggaagctgttttgctgcttcaagccaagatcaatgattctgaggatgatagaatgaatcttcgccttcttgtgccaaataaggttataggctgtcttattggcaggggtggttcaatagtcaatgacatgaggaagaagactaaggcaaacatcctcatttcgaagggcgataagccccggagagcatcttccagtgatgaacttgttgaggtatctggagaagcagacaagctgcgtgatgctcttgttcagataattttaagacttagggaagccgttctgaaagagagtgttgaaagccaaaattctgacagggatggccaactaactgttgctgcctctgattccttatatggaagcagtcttcctttgcctgcattattacctcacaaccaacaaattgcccccttgggctatgatagaagaggtgaacctgagcgagctctggaagtattccctcgtaccagttcgtatgggtatagttccatgcaggtcacggatgatggctatggaggacttccatcctatgcatcaaaggcatatgaagaacatgtaccacgtttggaaatgactgtacctgctagtggcatctcaaaagtaatgggaaaacatggcacaaacttggacaacattagaaagatttctggagctcacattgaaattattgaaccaaaatcctctcgtcatgagcatattgcttacatatctggaacctctgaacagaggcattcggctgagaatttgatcaaagctttcataatgtctacctaagattccttctgtggtctgagaacaccatttcatcaatttgatctcttttgacttctgctatccatagtttccctgggtttgtgaacatcaaacgtagtgttttctcccacctgtccgagttcccaatgaatactgggcatatctgagcaaggtgtactccagtggtagacaaggcactctatgttccttagatcttcaactgttacctatttatgttggcatacttatcataattcgcgtgtcttactctaaattatctcaatgactggaccagttgctgcttactgatatctctttctattgtcctgccaatactgagttgattattccttcacaactacagtagaggggcctgtttctcaacctcaacgtctgattcactttctgcttagtgtagctcttataatttcatcccatcagactgctatctgattcattaggttagtagtaccaatgccctatttggaatttggaatgcgagaatgaacctttcacgaaaggcttgtccaaaactccttgagattcctgtgtttcaaacactctttggaattcccagtgaatgctgttggctgattcatttggtgcttattgagtttttgtatctctactctgcctatgctgctagctgtgaccttagagaggatcttgttccttgtcaatctgactagttcacccattgcttgcttcggtagttcggttcttatatctttgtcatgtcattaccttactctttcatcatcggttccaaagagttgcttgtttttctgctaactctgctgaggaaccataagttctttgtaaacttgcctgaaaaccctagaggcctagacttttaggagcaaccatgtacataagcttagtcacgttcttggatcacaatatgcagatcaattttttagcattctgcaagtgttttgtgatcatgattggtgggcgtctagaaaactattctaacgtttcagttgtctgaaaaactatcttatctttgttgtagccctgcctatgctactaccagcttggatggggcttcttcctgctcagtctgtgactggttcacccattgtgctttgtcctgtcagtaatcgtctaattctttggttattgggttccaaagagtttcatgtttttctgcagtaattaattctactgtggaaccatatattaataagttctttcggaacctggattatagccatacattattcagaagcatccatattccataatcttattcaagcccccctccgtaaaaatctcttaagccctctatcaaactaaatccactccatcc

SEQ ID NO: 35662 - DNA, 3348 bp, Zea Mays
gcacgttttagtgaaaaaaaagtaaaaataggaacacatggagggagaaaaattaggtggaacatggtcacagaaaaatctagaggtagtccgggagaaaatctggaggtataatgtaaaaaaagtccaggtcacatgtgggatgtaagggcgcgaggacactttaggaaggaagaaaagacggagtggggagttgaccctaccaaagagataccttcaagtgcagctacaaccaagtacactgatttcctacttgcaactgcggctggaaaagttgatggcacaaaaggttctgacaaaatggttactccatttgagaagactaaaattgctgcatacattgttggggccataactccatgcatgaggctttatgcatatctaggcaaagaactcatggctttccttaaacaagatgaaaatcatccatataagaaatggattaacacatatgcatccagtgattttgagaacaatgcactccaaatagaagaattgctggacaaactgagtgtatcattaactggtgaggaacttgagattattggcaagctctaccagcaagctatgaaactggaagtggagttcttttctgctaagcttgtagaccaacctgttgtagctccactttcaagatattgtgatccaaaatataaactcttgatcttctctgattttgatttgacatgcactgttgttgattcgtctgccattttggcggagatcgcaattttgtcattccaaaaggcaagtcaaagtgggattgataataacctcgaccgtgcaaaatcgggagaactgagaaatttgtggaacatgctctctaagcaatacatggaagagtatgaggaatgcatggaaagactacttcctccagaagaatcaaagtcactagattatgataaactgtataaaggcctggaggtgcttgctgagtttgagaaggctgcaaattctagggttgtcgactctggtgtcctgaggggaatgaatttagaagacatcaggaaagctggggagcggcttattcttcagggtggctgtaaaaatttctttcagaagattgtaaaaacaagggagatcctcaatttggatatccatattctttcctactgctggtgtgcagagcttataagatccgccttctcatcagccggctgtctagatggtttgaacatacatgcgaacgagttcgcctttgaggaatctgtttcaactggtgagattgacagaaagatccagtccccgctagacaaggttgagaagttcaagagcatcagaagcgacgcggacagcacggtgccattcctgtctgtttacatcggagactcggccggtgatttgctctgcttattggaggcagatatcggtatcgtcgttgggtcaagcacaagcttgcgtagagtgggcagacagttcggtgtttcctttgtcccgttgtttctcggtctagtggagaagcagaggcaactgatggatgaagatgcgtccgtgttcaagccgcggtctggagtcctttatacggtctctagctggtcagaaatacacgccttcgtgctgggaagcgatttcagctgatggatctgctgcttcttttctccatctttttccccttgagaagcaaaaaagcttttgccggttgattctgatgcatacgatgcgtgaatcctaatgtggtcattttatgaaagccacatgtcgattctggctaccactatgtatgaatgaatacctgtagtttgtggtgtggaatgggttaagtttgtgcccgtgaattgtgatcaatgtatcattgattcatccttgttccatttgggactaatttctgggtgttgctggcagcaactacagtatactggatgaatgatgaagtacaactcgtttttatttcagattctcagcaggaagcgtactagtactagccactagggcgaaatgcatgctactagatgtatgatgtgtcatatcggagtacaaatactgatgaactgccagcctggggttcggatgggtgcataatatatgatagaatatgaatgtggtctgttttcatatgctgtatcgtgttttagctagttgaaggtggcggcggcgcgggcgtcgacggcgaggatggtgctgaggttgagcgggtgcatgtactcctgtgggccgtccatgaactggctgacgatgatgcggttggccttctccgtggggtggaagttgtcccagaaggcgtagacgctgcggtccgggcagacgctggacgcggcggtgcagagccccacgccgttgtatggtccctggccgcagcacgcgaccttggaggtgacgaagccgtaggccgccgggtcggagatgaagtccatgtgcatccggtaggcgttgacggcgacgaagacgtcggcgccgagctccgcgttgacgcccttgatcatgtccaccagctgcgggttgtagagcgcggcggcgcgctgcagctcggcgtcgcactccccgtcgcggctgccccgcagcgccagctcggctggggcgcaccccagcgggcccgaccccgtgaccagcacccggcgcgcgcccagcgagtagagctgccgcagcaccttggcgtactcggacacgacgtagcgcacgtagtccggcagcgcgaactcgcgggaccgcgccgagaagggcaccaggtagtagttgttgatgaagtcgttgccgcccagggtgacgagcacgagcgctccgcggacgaggcgcgcggcggcgtcctcgccgacgaggcggctcaagcggtcctggtactgccggaagtagcgcagctgcttctggacgcggatgatgttggcgaactggacccccgtgtcgttgagcacgcccacgcccgccgacgcgaagttggcgcccaccagcagcttccgcccgtccaggtgcgggctcaggtacggcagcgccggctccgcgcccaggtactcgctgatgatgtccggcacgttcttgccgttggagaagcggcccgtcgcgcggtgcgtcgggtagtcgaggccgtacggcggcgagtcggcgcgcgccgtcgtggccaggtagttgttgttgccgctgtccaccagcgagtcgccgaagacgaagaaggcgcggggcggggtcggggtggccgtggctgggcgcacctgcagcagcaggaggacgaggaggaagcacgcagtggctgcgacgagcctgccacggctacctgctgctcctggaacggaaagcattctgctgctgcttcttcgccgctgctctgctcagctgctgctgcgggacgcctatataacaggaagaagataacggggagagtgggatgatcaatagtatacgggctgatggagctgctgc

SEQ ID NO: 35663 - DNA, 1440 bp, Zea Mays
gtctgacctccctcctctcctgctggcgccctcgctttgcttccaatgggacggaaaggaaggaaacggtttgtgtttggcgtaaacggcgacgtggaaagctcacccgtatactacagtagcagaataacgcaatgcgatggaatccatctactctcaccaatgcccaatcacatctcgacttgatgctgccaccttttcctaatccagctgctccagcctagctcacgtcgcttccaacagacgccaccagccaccgcgccatcgtctcagtgtcacagcaggaagccgcgctcccgccagccgttagctgctcccaacagcggcgggatcagggcttgcgatttggcagacgcgagtccccccacccccccggccgcttacttcatgcctccatggatccggtcgcggacccgtcgccgtcgcggcggtccctgaagcggaggccgccggcgcggtcgccggagctgtcgcccaagtcgggtccgggggcaggagaggcggcggcggaggggctgatccggcgggtagaggagctggaggcggcggcggcgcggctgcgcggggagaaggaggcggcggaggacgcggcgcggggcctgcggcaggagctcgacgccgagcgggcctccgcggagacggcggccagcgaggccatgctcatgatcgagcgcctgcagcgggagaaggccgccgcgcagatggaggcccgccagttcaagcgctacgccgagagccgcgaggacagggagcgcgaggtccaggaggagctcgcctcgctctccgacctcgccgcctcctaccactcccgcctccagtcccacggcatcgacccggactccttcaccgacgacgacgatgacgagtcgtactcgtacgaggaggtgggcgccgaagacgtggagcagatcggcatggccgcgctgcaggtggagcggaacgttcgcgactcgggcagtggcatggaggtgaaagccatggtcgttggcaatgaccgcggggaggacgaggaggatgccgacgccgacgccgacgacgcggaggagccgtcgtcccccgtggagaaggaattcgagtatacggtggatgttacctgcgcgagtacaacgaagccagctacgtctgtggttgcacagtacgtgggggacggcaactcgggggggctgtatgcaagggtcgaggcgctggaggcggacagggcggccctgcggagggagatcttcgctctgcgggcggagagggcacagctggtgatggccagggagatggcgcggcggctctgctgggagatggttgctgagcagagagccattgtgaagaaagcgctagtgcctgcgagcagtttctcagtgatcaggatatgcaagtgtcctgaaatagccgcataattcggtgatctcttgctgtggcttggaggaaatagttttttaggatcaggtg

SEQ ID NO: 35664 - DNA, 3165 bp, Zea Mays
actggcagtcataaacaagagattagagacggcttcctgcactattacctgtaccacacgtttaacacaataggcagaaaatgataatgggatgacggttcgccgttggcatttgtattcaaggttgacagacacacacaccaggcgcggtatccactggtggtgttggtcttcgtcgccgtcaaggtcgtagcactcgcgtttcacatgacggcctggtgcgaccgcgaccgccttgagacacccgcgttctgtgccatttccgccccttcaccgtaccatttcgtcccgattccgcggataaatgcttgcccctatttgctcagcccgctctcggacgaacccattcacccgtccggccgtccgtgcgcggcgcacccacccggcaccggcaccagcatcaccgcccgcccggcgcccgtcacgctcgagaggaggaggaagaagaagggactgggcgacagcgcgcgatggccgccgtcgtgtgcgtcaccggcgccggcggcttcatcggctcgtggatcgtcaagatcctcctcgcccgcgggtacgccgtccggggcacctcccgccgcgaagctgctgaccccaagaacgcgcacctgtgggcgctcgacggcgcggcggagcgcctcaccatgctgcaggtggacctgctcgaccgcgccagcctccgcgccgccttccgcggctgcgacggcgtcatccacaccgcctcgccgatgcacgacaaccccgaggagatcatcgagccgattatcgccgggacgcggaacgtcgtggaggcggcggcggacgccggcgtgcggcgcctggtgctgtcctccaccatcggcaccatgtacatggacccgcgccgcgaccccgacgccccgctcggcgactccagctggagcgacctcgagtactgcaagagcaccgagaactggtactgctacgcaaagacggtggcggagcagggcgcgtgggaggcggcgcgggcgcgggggctggacctggcggtggtcatcccggtggtggtgctcggcgagctgctgcagcccagtatgaacaccagcaccctgcacatcctcaagtacctcacgggacagacaaaggagtacgtcaacgagtcgcacgcctacgtgcacgtcagggacgccgccgaggcgcacgtcagggtgctggaggcgcccggagccggcggccgccggtacgtctgcgccgagcgcaccctgcaccgcggcgagctctgccgcatcctcgccggactcttcccggagtaccctattccgacaaggtgcaaggatcaggtgaacccactgaagaagggctacaagtttacgaaccaacctctgaaggaccttggcgtcaagttcacgccagtgcatgggtacctgtacgaagcagtgaagtcccttcaagacaaggggttcctcccgaagacatctggcgccaaggtgcctgaacgacgcagctgcctgcctcaaacgacatcacagccaccacccgaaatcgtttcgaaactttgaggtggatctgcacacgtgctcaaactggccatgtgtttttttgtcagaacaagccgttcatttgattggttattaaaagattttgggcagtctgttcttacatagcaaaaatgtcttgtctctgtctatggtgcatcctgttgcttttgcactacaactatacacatccttgtctgggtagtctgttctttacatagcaaaatgcgaagtctgcagggtgatttcagcgatgatggaagcatgcccgcccacctcttgactgcatgcgctggtcagctgcggcttattctacacatcttgcttgtctgtactagccttccttgctaaatatggctcgtctccgtgctccattttcgacccaacaacaagaacttgatcgaccccacccaccaccatgagtcgtcctcgtccatgacctgcacacagaaagaacaaagaaaccttgaaactagcagagagagagagggagaaggtagagagagagaaggagcgcgccaacgtagtttgtactcctttgggaacctctcagtgttgcagtgtactggccggccggccggcagcatctccccatgctttcagctcccaaggcgaagggtaccactgcaagatgaaaaatttggggataggggaaaaaactagtagcgccaatcatttactccggtactacaaggccaatagctagcttctcatgaccagcagcagcatcggtagcagtcccagccagcatgactgaaaagaccacagaacaaaatagggaaaaaaaaccatgggtgtgaagatctaggagataaggaggcggcagtgtgtaaagcaggaaaaaaagccacggccatggaggcatgccgcatgcatgctctgtctcttgtgataagaaaaaaaaaggtactacaaccccatcaaattaaaccggttcagttgaatcgaaatcaaacctggacatcaaatcaggctaattgaatcgaaaccaactaggacaccaaagcagcctttaattgaattgaaatcaaacacggattttgcccggccccccaccagactaagagactaagactaacaacggatctagacgggagataagccatcgagagaaagaggctgacagaaagagaagtgagcacgcggcgaggacggcatacatgctatgtcgttcgtcgcgccgtgtgctcactctcttctgtcaatctctcgagagcctctccgcatctacagaaacgccgccgtcgtcgtcgtcgtcgtcgtctaaccagcgacaacacaaaatcagggttcagaagttgcggaaccaccaaagcgaagagggacaaaccaaccctccaagcacgaatgaagacagaagaacaagaaagagagagatagagggggcttcgttgttcttggatccggtgagcgctcgtcgccgtacagggaacgaaaggaggaggtgctgctgagactgtcctttctttctttctttctctccctccctccttccctgcctgtgcgtgtgtgtgcgccctcttggtgattggtttttggagcagaggagatggatgggatagataggcggtcgtaccttgcccctctcagtagtgctgtaacctcacaagtcacaaggttaaaaagtactactggtggtgatagtagtagtactctgcacctgccgagtagtagttcc

SEQ ID NO: 35665 - DNA, 7506 bp, Zea Mays
cctgaccgcccacccctgatcggggcccctcgccggagctctccacctgccagcgccggtgctcgagcgtgcgggcgagagagagagatagacggcgctcactcgttctgggggattttcccttcgagacagggccaaagggtaccggttaccaaacgaaaccgctccgtcctgtccgtcgcccctcggtccctctcccttcggttcgaccaaagtcaccaaacgtatcgcaaacaagctcctcgacccgagttcgagctcaactcggcggagatctccactcttcagcaaggcgcgggatgccggcgatggcaccggaggacgatgaagcactgtacgagatccaccggcacgcgtcgggatcccaccaagaagaataccaaggtgctgcgacaagttgtggtagctcagatgctggaggaggaggtgtcctctcctatctctccttgcaaggtgtgagcaaacttaaggaaaagtgggataggtacagggtgctggggaagagtaggcagaggaagaagggggatggcgtcgcactgtttgtctcaccaaatgcagaatatgtgtctgtaactgttgggaatcacatcatcatcttgaggaaagccgatggctatgcatcaccttgtggtgtttacacaaataatgaccgaatagcatttttcacaaatggggcttggctggaggctcaaggcgtttttggtgtggtggatgacctaagcacactttacttgatcaaagaaaatggggagttactagcaaggaggacatgtgatcagttgaagctatcttcttccattattgatctggttttgcaggatggtacaagcttacttaggccaggtttctacatttttacaagtgactgcttggttcatagatttgattacactgaagaacctgaggcatgtttatgcgaagttcccatatcaactaaagatgcaatgtcagctaggactatccagttacctcgaagtttatcgtgcattgattaccatcaacgtcactcgctatttgtcctagttggagattccaatgtttcatttagctccaatagttattctggaacctattttatgtatctattacacttcaacaaaaatctggaacttagtctttcatttaaaagcatgcagttggaaggggtattttgtcccctgaaggatcaaagaacctttgtttcatccccgaaaatcaggatctcgcctcagggaaagtatattgctacgttggatttgactggttttgtaaactttttttcacttgatggtgacttgcgcactgttccacttcaaactcttggaaaggctagacacctaattgatgttaaggacatcagttggtggacagataatgttcttatgttggtaagaaaagatggtagcattagcatgtacagcatcactgaagacaagatagtttccaatgatgacccggttttatctacaccaatattggagaaggcaaaggctactgaaggacatgcttttgttttgcaatctaggagatatggaacaaacactccagttaataagcggatggatagtgactcggaaccttgtctgctgagtggttctggggagcaccaacaaacagaaggggatgaaatgtcctggagtctgatatcattctccaaagttacagtagcagaaatgtactctgttctgataagagagaaacgatacaaggacgctttagattttgcttctagatacaatctagataaggatgaagttcttaaagcatgctggttgcactctgatgccaatactcatgagatagactcgtacttagcaaaaattaaagaccaagtatttgtattatcagaatgtgtaaacaaagttgggcctacagaagcagatttaagggctctactttcttttggactttgtataactgattgttacagattttctgagttagataacagcagtaagggctcaacatgggacagtcgcaccattaggcttcgtttattgcggcacatagacatgttagagacattcttgggcattaatatgggaaggtatgcagcaggagaatatagcaaattccgttcaatgccattggtggaaacagccatagcattagccgaaagtggcaaaattggggctttaaatcttatattcaagcgtcatccatatactgtctcttcagatattttacgtgttttgtctgctatcccagaaacccttgctgttcagacttatagtcagttgctgccagggaaatcccttcccagtgttgtcatattaagagctggtgattgggttgaatgtgaacagatggcttcatatataaacaattgccctgccgagttggacaaggtcgaagagatcaaaacggaaatacttgtaaagcactcaaaaggcttttcatggccttcagttgctgaactttgtgagtggtataagaacagagcaagggacattgactgcttaagtggacagctggaaaactctctggccatgatagagcttgcatgtcagaagggcattgtagagttgcagccattctttgatgatattaaatgcctctaccaggttgtatattctaatgaattgaatgagtttacaatgaatcttttgacatgggaagatctgcctgattatgaaaagttcaaaatcattctcaaaggagtcaaagaagatacagttgttcaacggctagaagaaaatgctatccgttttatgaagaaattatatgaacacaaacaagaatcctaccttgttagttggctgaaagaggtagctgctaaaaatgagcttttgatttgcttagctgtcattgaaaatggttgtggggaatcaccaatatatggtctcttcaaggatcttgctgagatgatagaaacctctgttcactgcatttatatgtgcagtgcaactaaccagtggaataccatgtcatcaatattatcaaagtcactctataaaacaaagagggagaaatcgttagtggctagtgaagaagactgcaatctgaaagatgctaagcatgctcttggttcttctatggtttcttatgaggagatgcaatgtgtctgtgctgatatcttatctggtctgggcaatgctccagaagatttttatcactatgattcagtacctgacaaacctaatgatgtcaaatatcttgatatattggagaagaggctaaaagttgctgaaggccatgtagaagtaggacggctctttgcttattatcagccaggaattatcttggaggaaccagtgcagtttctttatccacagagaaggctgaaaatcttgtgatacaagctgcaagggagtatttcttctcggcttcaactttatctgggaatgaaatttggaaagccagggaatgcctaaatttgttacctaatagcaaaaatgttcaagcagaaactgatataattgatgctcttactgttagacttccttatctaggggtgactatccttcctcttcagttcaggcaggtaaaggatcctatggatatcatccgcatggtgataacatgtcaagcaggtgcataccttcattttgaagagatcattgatgtcgctaaacttctgggattaagaagtgaagaggaagtagcggatgtggaggaggctattgccagagaagctgtggtaaatggtgatcttcaacttgcccttgatatctgtttaaatttaacaaaaaagagtcatggtgcagtgtgggatttatgtgctgcaattgctagaggccctccacttgacaatttggatactggtacccgtgaaaagctattgggtttcgctctcagccattgtgatgacgattctgttggggaattgttgaatgcttggaaggagcttcatgctcagggtacttttgagaaattaatgattacaaccgcaacaaatcctcccaatttcttgattgatggatcttcaatcacaccacttcctgtacaaagtgtgcaagacatacttgacctgagagatgacaatggccatgatagacgtagcgaccttgtgggaattgttaaagacatgctgtcaaaagtttgcttggacttttctaatggagacacacataattgggagtctatgttggaagaaaaccggaaattgttgtgctttggagcactggtattaccatggcttttgaaattgttcagtaatgaagcatgtgatggtgaaataatggatcatctcactaggagatgtcgattttcaacaaaagtaaaagcagcaaccagtatcatatattggttagttataaatggtttggcccccaatgataatataatcatgattcttgcaaagtctataatggagcctcccattgatgaagagtttgatgtacttggctgctcggttcttttgaatctcatggaccctttcaatggagtgaaaataatagaggaagagctaaaaagacgagaatcttatcaagaaattagcagcataatgagtgtaggaatgttatatagttccctcaataattctaagaaagagtgctccactcctgaacagaggagaaacctgttgcttcacaaatttcatgagaagttcacctcagccgataccgatgatttagaccaggttgatatggcaaatacaaccttctggagagaatggaaatcaaagttagaagaggataaacaactggctgatcaagcgcggatgctcaagcagatattacctgatatagacacatctcgattcttgtctggtgatgttaattatatcaaaatagtagtttactcctttgttaattctgtaaagatggagaaaaaacacatactcaaggaagcagtgcggatagctgaggcatatgggttgcaacgaactgaggtgcttttacgatttctcgcctgcagtcttgtgtctgaatactgggataacaatgatattctgaacgaaatttctgaattccgggaggatattgtcagctcagctaagggtgtgatcgatatgatatattcagatgtctatctggagatagatgggtataataaacaacgtctttcttacatttacggcattctttcagcatgtcattcatatctgaagaggaccaatgagatagaattgagatacccagtgcatgtgcatacccataagcttgaaccatttcagtactataaggtacttgaggaagagtgcaagaaagtctgcttcattgatggcttgaactttaaaaacattgctggactggataatctgaactttgagcatttcaatgacgaagtatgcaagaatatccatgcctccaccgtcactgctatagccgatatggtacagtctcttgtgagtatgtatgttgatgtactggccaagggactcatatcacaacaaggtgtttacaagcactatgttctggggttgctggcatcacttgaaggccgcagtgaagcacaatcgaacaacacagattatgaaaagttgcaggcttccctatgcgaatttgagttgaactatgatagttgcagggagtacatccaagctcttccagccacagatatttcatatattgtaagaaggtattgcaccctttgctttccatctaacttagcacgaagccatccacaggaaccttcatggaggaaacctcttgccacgctactagaattttggtctaaagttgttgatgacataccgggggattcaattgatgcttgctcatatggaagaacagactacttaaattcaaataggttatctctgtgcatgagagctttcaggcagctattaataattgatgagatagcactgcaccaaggttgggatgccatttccatgtatgtaaaagattgccttagaaatggaaagatgatggaaacaccatgcttttgtcgagctatgattctatcaggctgcagttttgaatctgtagttgaagtatactttggaggacaaggacagttagggagtgagaatgcagatccaagcaattatttggacctcttagaactttataatgctgctacagaaaagtgtttgtcggatttgagtgaggaatcttgcgaatatcgaatattgcttcataatttgctgtcatctttgagccggtcaacgggaaaacatgctggtgctctagaaatggtcagatctggtgtttgggggaagttaatccgctattcggaagacatgcagctagagagccaattacgagtctatgcactacagctgatgcaatgtatcacaggaagaaaccttaaatctcttccaaatgaaatggtgtgtcaggttgagccatgggaatcatggtatgagcatggagcgggtgctgccatagctgatgagagtatcaactcctctagcagcatcacagggactcttgtcgcacttagatctactcagatggtcgctgcagttctgcctgacgctaatatcactccagaaaacctagcaactcttgactctgcagtatcttgttttttaaaattgtcagaacgtgcttctggtgtgagcgttgctgtttttgaagcagtgctagaagagtgggagcaattgttctcccccaaagaagagcatgttgcacctcatgaatcaccaaaagaaacaagtgactggagtgatggatgggatgatggctgggaggcgctaccggaagagttggagagtccaaagaataaacaagagggtgtgttgttatctgtgcatcccctccacagttgctggatggagattatcagaaaacgtgttgaacttggtgagctgcacaaggtacttgaacttctagaccgagcatctttgaaacacagcgtgttcctagaggaagaagaagcacacagcttggttgaacttgtatctgctctggactgcttcatggcccttaaaactgtgttgctactcccatatgaatctctgagactgcagtgcctgcagatggtggaggtgaaaatgagggaaggaatcgtgtccacctcatcaaatgctgatgatcaggagctccttgccttggttctttcctctggaactatgcagaagatcatcacagaagaggcatactctaaatttttctcttacatatgccatcttgtcgggcaccttgcaaggtcattccagactgatctcctcgtacaatggaacgaagcaacatctaagatcaacagatctttactgttcgctagagttctgtttccatgttttgtatctgaactggtcctcggagggcagtatcttctggctgggttcgtcatctcgagatggatgcacacacatccatctctgggcctgatggatatcaccgagaccagtgtgcgatgcttccttcaaggccaggttgcccaacttgatgaggtgggagggagcgatgctgctctcactgacggtgaagtttgtgtaaggcacacaatctccaccctacagccgaaacttgtttctcttctgcagtctgcattagctctttcgaacaaagagttgtaggcaaagtcctgtgtagttaacttttacactcttgctgtactaccggtgtacctgtaacataaaatgtttttttagataatggtaaaagtgaatggtggaagatttcatattgttat

SEQ ID NO: 35666 - DNA, 1176 bp, Zea Mays
ggagatagaaaggcacgcgtaccgcacgtcggcgtctatattctcggcccacctcgagttgacaagctcacaaaaggccacgcggacacaggagaggggagagcccgagagcttcccttgccggcgagatccagtccggctcacgcgatctgactttcccggagcagatccaggttaagcagatggctgacaacagcattgagcaagcattgatagagaatcctcctaatgtgctgaaatggaagccatcagaaagagctaaacggtttcgacgatgcaggaatggcgatcattgctctcttcatcagtaaagcggcagattaccttgttgagaaacaggaggtgttgttcttcaaagcactgcacatgaatatgaagggcagcgaggccaaaatgctaggagcaatggaaacaaataggataaagtacaaattctacactgtcgctctgcttcttgcaatggttattgttgctgggactgtatttctgtggaaggttgagaagctcagccttgttgattccttctactgtgtctgtgccacgatcactaccctgggttatggggataaaagcttctcgtccaaactggggcgtgtttttgcagtgttttggataaccacaagtactctcatcatggctcagttcttcatgtaccttgctgagctctacactgagcgccggcagaaaatcctgaccaaatgggtgatcaacaggaggataaccaccatggatcttgaggcagctgatatagatgacgaccgacaagttggtgctgctgaatttgtactttacaagctaaaagagctcggcaagatcagccaagaggagatatcttgttttctcgaggagtttgacaagcttgatgttgaccagtctggcacactctcaacttacgaccttactctaggacaaacaattcaatgactgatgatgcatatgtgattttgctgactgaatgattttgtttgatgtcgttagcatttctgttgtccatatgtaacgctgtaatgttgtaaagatgtaaattgagatgattgagaaattgtgccccgccttttctccaaagcaacttgaatcaaggctgtaaagaacaaatacttgctggagacagacgacatacctgcaaatttatgattggcttagctctgcccctcatgccgtgtccgtgtttccagc

SEQ ID NO: 35667 - DNA, 6031 bp, Zea Mays
ttctcatcctctcctcgctgcggttagccgggtcaccaaccaccgactcaactgaaccacgcccctcgctgccgcggcgccgcgctatggacgttgaaatgctgccgtacgggattatttcgacgtttcattgcttgagtgtccgtacttcgccgctaaacatggcgttgttaccgtgcgtgtacatgcagatggacggcgtcactctgcgccacctgctccgccccttcgccgcgcaggaggccgcggcggccggccgagtggcagcagcgccagagcagctgttcgcaagtcattcgaccctgcaatccgggccgcctccgagagtggggccgagcaatgagttgcttactcaagttccggggaactattgcactttcgatcttgcgccggacctcactcgggcaaatgcgagcaatgctgctggtaccattgattttactcgggctggtccctccagcagtgctgccactctgcccaagtatccgagacatggattgccagctagcagtagcaatgagcagtcctcttttggagcgcttttcccgaacagaagtgctaatggaatgggtatttttacttgtcaaagttcggctaacgaaggaatagcaaatgttggtgtgcagtttcaggactcaagtgtccatggactgcagaaattgccattcaaatcgatgactcatcagcatcctacactgcctggtgatcgaatccgtgtcacctgtatgaatgttggcggagagttttttgtgggcgaagctgggctttttggagttatctgcttgtgtcatcggttgcgaatgtctgtagctaaattctgcgagcatgctggaggaattccagaaaaagctggtgaaattgtctgcttggagaatggcatgagtattgcacaatggttcaaattctgcatagggctttttctttgtcggaggatctattgctaacaccaggtgggattggccggaatgggcacatatgaaaagttctccagaagagcacatattgaaaagtcttgcatcaagaaacagtggaacaggaaaaatggggttgttaagtagatatggaaaaatcactggacatatgaacaaaccggcttattccaatgatctgtccgttgagggtggagggcacactaatgttgagaagctagtaaacaggacagatgaaacatattacagaaagagtgttgatgtgcatgaaacttttacaaagaactctgctttacttcagaattccgctgtggtgaatttagggcccgctaaaaaccatccagttcatgcattcgacttgaacccacttaccactcctagtggaagcccacactttgaagcaagcatgggaagacattacaatggaaatcatttggcccatagtcatggaatccatttggagaaaaactttgatgcgtcattttgtaatcctatgccacgttttacaggagttatgaaccatgatagtagggcgtgcagaccaaatttctccaataaaacattccaggacacttcaacgatgattgaatttcagaaaccccaaacacataggcctccgataaatcaaaatccttctccaaagcaagcaacaaagatcagcaaaagtctatccgaacataatgaaccatccattagtaccggaaataagaagcaaccacttgaagttgttaatggcatgaagcgttctgaaggtgatgagcttacagatgatacatccaagaattcatttatctcattatttctttcacaccttgagaggaataatacacccgaacccatcgatgacattctcaacagtaatgagcactatcttcctaaggccctggatgttgcatgtggttctgatcatccagaaagtgccactagacagattgaaacaagggtgcctaatgataagcactcaaagttggcctcagccattgttcatacgaaaaggagatcagagggcatttctctttcagtggcttcttctggatataatcctcaagatgcatcccatgctaatagtcaggaacacttgattcatggtgattccttgtcacatttgctgcctagtcaacctaacaccggaatctcgaaaatttctgcaagggtttcatgtcatgcaaattgcatgagctgcattcacgtgggtaataaatcccatcaggttgcacatggtgagattggggttccctgtttctatgataaaatggccaggggccatggtacttttgagcgagttgatgactgcacacatagaagtttgagagctttcacaaaaatcagttgcgataatgggaaatcttgttgttcttctcgtgagcttctacctagcttttgccaaaatgatcagccaacattgggaaaatcgatttgtggatgctgttgcaaaattcaggaagatgcttccaagcttggttttatacctggtcacatgtgcagaactcatttttctagtgatgttggtccagttctagccaataagcctactattgaagggctagatgaattttgtgcttgcagttgctccacttttacacaacgatcatcattatgttctcgggaatacgtcttgcagtcttcctgtgactcatgtcccattaatggactgcactgcagaagttgtatgggacatgcagcagatagcttaacaaaacactctctgtttgatcctcttaatacaaaagaacgaggttcttgttgcaatggaagatgctgctactctgtagtcccaaaatgtttgtctagttgtgactttacaaaacactgtgatgtcataattgaccaaataggtcatgctgcacctaaagataaccatcagctgcaaatgcctaccagatgctgcacactgggggagaatgagaagttaatatgccaatgcttaagcaataaaatagctgtaagaaacttgcctcaaacttctcattgtaaagatgtctctgagaaagtaatgaaccagccttctattgctataacggagagactggagaatgtatcagaaccttcagtggctgatgacagttcatccaaagctgtagcagagaaaaaggatgcttatagagattctgcagtatctaaaggacagccaaattttggtttctcatctgggtcgtccagcattatagtgacaaagttccagaaatcacctgaatttaacaatgtatcctctactgctaaacatagcaaacataaaaatctgtgtgatgaaggatcaagaattgagaaaagttcagcatccagctatgtgcctaccagtacaggatgtgaagaacccctaaatagttctgccaaatctgagctgggtccatcaagagtgaagcgcaaatgtaatcagatttctgagggaaggagactggaagaaacagataatgaggaacattgttctgaactgctaaaaaagactagaacactgaggtgctctgttaaaggttctgaatcagatgattgtactagggctagttcccagtcgtcccagaagggggtttatcaaccacaaaatgaggttaactcattttcttgcagggtgttgagaaccaagcgaaaacatcctattatgcatctaaataagcatgtgaaacagcttcacagacagaccaagttttttgaaggtgatgagcaaccagatgccaagggcaattttcttggtggattagattcctatgatagaaagaggcaagtagaggatatgagcactctggataaaacaagacatcaccaggaagggagtcgagcatttgtccgcaaacttcctaaatatgtgtctctgaattgcattgttaatgaaccgaatactaacagtgaaggtgcttgcagtgggagtggtgggattgattctagtttaattgctacagggattacaaacgataacaggaaatctcccaaaattgttcctctcaatctggttcttaaaaaggctaagagatgcaatgctgttaaactccgtaagacagaaagcacccacttgtatgaggagaaaagctcagattgttctgtgaacagctcagattattctatagaaaagtattccgttgatgatgaaaattgcagcccacaagctgaatatgaactgcaggattccaaaaggagtaggtattcatctaatgatctgaggtcacatgtggctctccacaaaagaacatctggtggaaccaagaatcgaagaacaagtgtatcccttgccaggattaagaaattcgggagcaaatcagtatgctattctggcagtgacaaagacaatgctgtgctagcccatgaagtgaatgctaggagatacagtggaagactcagctcaaattctccatgctgtgtttgtgggatctcagacctggagccttgcaatcgattaatagagtgcagcaagtgctatatcaaagtgcaccaagcctgctatggtgtactaaaagttcctaggggtcaatggttttgcagaccgtgcaagaataataccatggatacagtctgtgtgctgtgtggttatggaggtggagctatgacaagggcactgaaaaccaagaatattttgaaaagtttgctccaaggtttgatgaatttagaaaggtcagaatattatgttgattccttaggaaatgcaagcagtgagtgtacaagcttgcaaaatccagtagacagtgcacatggggataacattatgaatgcgaagaacatcaccagcaattcctggacctctggaaaatactattcgagtttacttggaccacaaccaatgcagtgggttcacatggtctgtgggctgtggacacctggcacaaaatgcccaaatgacaccacaatgagcgcttttgatgtttcaggtgcttcacctgccaagagaaatactgcatgttcaatatgtgacagaactgggggctcatttgtcaagtgccgagctgtaaattgtttggtattctttcatgcttggtgtgcacatcagaggggtttgctgcaaagtgagcctgaaggcgagcacaatgaaaatattggcttttatgggcgatgcgtgtctcacgccattgttttttctagtcacgttaatcctaagaaagaatactttagaaacaacaattggacatgtgcacgtacagagggttttaaaggccgaaagggagaaggcttttctgatagtagccataaaaaatatgaagagtacagtggcgagttcggtgtttcccaagaacagataaatgcttggttacgcataaatggttcaaagccctgcggacgaggacagaaggagtacatccattacaagcagttaaaagggtggaagcatttggttgtttacaaatctggcatacatggacttggtctctacacatcagtctttattccacgcggctctatggttgtagaatatgtgggtgaaattgttgggcaacgggttgctgacagaagagagatcgaataccagtccgggaaacggcaacaatataagagtgcatgttatttctttaagattgacagggagcatattattgatgccacccgcaaaggtgggattgcaagattcgtcaatcattcatgccagccaaactgcgttgcgaaaataatctcagtcaggaatgagaagaaggtaatgttctttgcagaacggcacataaacccaggggaggaaattacgtacgattaccacttcaaccgggaagatgaaggccagaggatcctttgcttttgtagatcaagatactgcaggcggtacctcaattagtttccggaacttgcatctagaactgcctgtttatcttttgtgaagtcaaatgagttatcagctgttcatgtgacactgaataacaaaagcataaaaagtgtcactatctcgtttatgagaaatcatgcgcctaatctgaatgatggatgatccagtgatctactttggcaagaagggcttgaggtcagacttgtccacctgaagctttgttgagatggcctcgatctgctgattcctgcaaatccaagagccatccatctttgggaaacagaatatataaaaaaaaatgaccaataacagagttctttctttgtgttttccaccaggaccttcacttcagtaattccagatgaaa

SEQ ID NO: 35668 - DNA, 1614 bp, Zea Mays
ctgcaatcccgtgaccatacgtgttggcctttagggtttgaaccccgccctccaccgccaccatcagctcgcatcgtcgtcttcgcagagacagtcctggcggcgctgaaggaggagacgcagcagcggatggatgacgcatcgattggaggtcattggtggccactcacgcctcctcagacctcaccctcacttcgtcgtcagcgcaggtttggccaacggcccccgaccggatcgcaggtcctcctcacggtgaggcacagagtcgagccggacatcacaaccatgaccatgaggcatcgtcgcagcagtcggagtcatttttgctgccccctcccgacacctgtaaattttgtatgccttcacgccgtgaagccacatttgcggccattggcaatggctgtatccactgtttcgatccatatatttggtgatgtcccttcttcacctcttgttgggctgcttcaggacaaaatcaataactggagggagacatctcttatattgacatccatccttttcgctgcagttgtgttctggttcattggtgtgtctgaggctgcacaagatgctcttgatcatcttttcaaccaaggccacaatctcgtaacagaaaatgagatttctgatacctttactaggctggttgaaaggctaccacaagtggtacttggaagcgaggagacaaccacactttcacatgctaggatgttgttggctctgaccttttatgctggtccctagtttctgataaatcatcttcactgttctcctgtattgctgctcgtttctttgattgtttgggtttatgcataggtcatagctcacagttttctggttccatggacaagctaattgtatcaaagccactatctatcgggtatctttattcagttgctgagttgaagagtggcgcctattctaaagatacaactaacatatctctgcatgccacgtcaacatttgcagcctccaaaatatctgttatccatgataatgctttgccaaattcattacttggtacagttgaatatgagttgccccatgtgcctccatggtttattcatgctggtatccagaagctttatggggttcttgctggaataattagacttgttggcctatcaacagtgtcaggaaccgggccatgttgatgttcaaaagagttgtcagaagttcatgacatctggtatttattatatcttcttttgtagtgggctggtgtggtctgcttagcagcaggtagcactacaaccagcaatgtatggatgaattgaaggtagtaaagaacgcatgcaatcttatagaaactctacatcttgaaactggcatgattgacaaagaagctggatgcatcctttggattggtgtcttcttatcatcaagcagtaatgtgaagcaagttcatttgttgactaagaacagatgagcacaaatcagtgaagagttcattgcactagagatggaggatggataggtggtagatttcaatatggctttgatactattgtttctctttacaatctttgtacataacaagaaaaatgacgttgtatgtggatactattgtaattcaagaatttatttctgaataataaatatatttgtttataa

SEQ ID NO: 35669 - DNA, 4583 bp, Zea Mays
cggactccgagtcccatctggccatcacgccgtatcacgcgttcctctcctttttcttttccttattacagacaaagacttttcccactcccgttctctgtctctctcctgctcgttccccctttgtctagcccgtacgaaaccctaggctccgccgcccaaaacctcgccgccgcgccgccgtacggcggcgccccatggccccggccttctccgtccctgacgcagaagacctcccagcccgcagatccgacgcctccgacgtcgcaggcaacgtctgggacctcgccaccctccccacgccccccgccggcggcggccgcgaaatatacatctaccgcaacacgtttaacctcgtcccgcgctccatcggcggcagagcccgcggtctcaggtcgcttaagttcttcggcaacgatgtggaggtgctacccgcggattccggggacgagctggacgggctcgaaagcctccaggtcaaggtgtccgcgcccagggtctcaggggcgccgctccgtcggatgcaggctctcaaggagctcgagctctcaatggtgccgcccaggccatcctcgtgctccatactggcggaggttgcccggctcaagtgcctcaccaagctcaccatttgccacttctcgattaggtacctccctcctgagattggttccctcaagaagctccaagaacttgacctctctttcaacaaattgaaaaactttcctaactgtataattgagttgagtgcattgaagtttctcaaagtgaccaataataagttggtggatgtaccctcgggaatctcctctttgagatgtcttgaaagccttgacttatcaaacaacagattgacttctcttggttcagttaaacttatttctatgcttacgctgcagtatttaaaccttcagtttaataggctctcccattcctatgtaattccttcatggatatgctgtgacatgaggggaaatgttgaaaatactatgaagggttgcaagttaaagtacacaggtgtagcaaccatgaacagtttagcagaacctagtacatcgagtcatgcttgtgacagcgcccttttatgcgtgcaatcagaatcttcgccaaatttgaaacaccatgctccacataaaattaagaagggctggaggagacgggattgcttgcaacaacgagctcgtcaggaacgtctggagtcgagcaggagcaagctgaatgaaaaatacatagatgaaatggctgtgaacatggctgaagatgaatgcccttctagtttgcatgatatggaaaataagctaggcatcagaacaattgatgaagaaacttcagtacaggattcgttgaaagaaacaagttctatatctgaagatctattttcaatagttgacgatgacttggatgggcttacgaaggattgtggcacgatggtacaggatcactatgatgaggagaaacctggattcaatatgagaggttacaatgatgacaattcttgtatcagtggggagcctgcttgtttcagcagaagcagggtttgcagtgttgaaaaggaactagatgatactgcttcatccgtccatgatgttggtgagattgctcgagacaattcttcagtgacacccaagtttgctttaaaatctaaaaggcaccctgatatggacagcaatcctaaaccaagcaaatgccctcgaccaattgatgaacgctcaaaactttcatataaatacagtgtggaatcattttgcagcatagatgaccatctaccagatggtttttatgatgcaggccgagatatgccattcatgtcattagaggagtatgaaaggagtcttgggctgtatgcacgggaggttattctcttggacagagaacaagatgaagaattggatacaattgcttcttcagcacaattactgctatctagtttgacaaggccaagctcttgtgaaatggaggaagatgcaggccatgatttactgagggcatcagtgctcgctttgtttgtttctgactgctttggtggttgtgaccgaagcgcttctcttgggagaacacgtagagctattgttagcttgaggaaggagcagccttttgtttgtacttgttctgctgggaacttgggcgacaacaatgaagctaagcagaccaatattctttctgggcactttgattttgctggtttgtgtaatagatcaatacatctcatcaaggaaagaagaaattcgggtattgtacctataggttcactgcaattaggtgtttgtaggcaccgagctgtcctaatgaagtatttgtgtgaccgggcggatcctccaattccttgtgagcttgtgaggggccatcttgactatacacctcatgcttggaacattgttcctgttaaaaagaggaatggctgggtaaggatgattgttgatgcttgttaccccaccaacataaaggaagagacagatccagagtacttttgcaggaactgatggttattgctggtagatactcttttaatcctttattattttggtcagcttatggtaggggtctgatgatctagtgttgcatgcacattagtcttgctgtttcagggaggcgcggacacaagtatataccactcagtcgacttcaaattgtgctcgatgatgagggctatactcctcggtgctctttcccatctgtgtcatcatgcaaagaaattgaagttacaccttctagttctgtctatcactgtaaaattggtgctgttgatgctgctgcaaagatacgatatctggatactcgtagggtctcaaatgatgaagttaaactttttgaatacaagcttctgggggaagtaaggatgctgggtgcgctaaggaagcacagatccatagtggacatatatggacaccaactttcatctaaatgggttcaagtcgatggtgataaagaatataggatattgcagtctataattttaatggaatatgtaaatggaggttctcttaagggatatttgacaaagctactgaaggagggcaagaagtgtgtccccattgatctgtcagtttacattgctcgggaagttgcttgtgcattgttggagatgcacaagaagctagttattcacagggacataaaaagtgagaatgttttgattgatttggaccccaagaggaatgctggtgcacccattgtcaaactatctgattttgacagatccgttcctttgtattctttgtcccatacatgctgtatatctcagcttggtacacacccacctgatgtttgtgttggaacaccttgttggatggctccagaggttgttaaggccatgcatgaaaaacaccactatggactggaaatagatatctggtcatttggatgttttttattggagatgcttacgcttcagatgccttaccagggactttctgacactgaaatatatgatctgatactgaggaagaaacagaggccaaggctaactcaggaactagaagcattctggacaatggatgagccagctacgagactcaagttagggatcacatctgatgctcatgcagataaattgagacacctgatagatctcttctaccagtgtaccagaggacatgcatccaggcggcccaaagctgtgcaaatttacaactcactgtgctccttgcccacatgttacgacatgaggtgaacgttctgatactgtatgaacgcgaaacttgatgcagaagtgcaggggaaggtcaaggcaggacatctagccagcctcagagggtttggtgctctaacccgaacatttcaccgtgagttggccttcaggtgctgccaggcagaacatgagaagtgggaccaaggctagcggctgtggtcgccagagctcctcctgagttggtcagttttgtagcggcacggcatctgcgtccacttgtagtcatcatcagttggtcagttttgtagtggcacggcatctgcgtccacctgtagtcatcatcatgtatgtgttatcacatccattgtttccccttttcatggttgctgccatcacaatggggtttaagttatcaaattaggtcattggtgccccaggggcatttgtctgctagaccgctgcatttacttctctatgtgtattgtattgtttatatctgtttagaaaaaaatgactgttgtccatgtaacaattgatgacatctgctatgtgttattgcgaggttatttgtttatgctgattttaccagccattttcgggcatgagctcttgggaaacctgtatcgtgtacagtctcgacagacaagaatatactgatgaatcttgatttatgtgtcagtcttttcaccatttattatatatatgctcgcctacatttaaaacttagtttgttactttcttttttattaaggtcgacacaaattgattaaattcgttaagatgcgcttgaatacatataacttccggcatacgaatagtataagacgttatttgagacagagcttattagtaagactcttggtcatatataacttcttttttttccacaattttaccgcagactttatattcattacttcacgcaaaacatcaaaagataaacggatctgtaatgtgg

SEQ ID NO: 35670 - DNA, 1462 bp, Zea Mays
ccacgatgcactcttagttatctgtacattttataatagtatatccactcaaatcaatgacatatttcaaatggattggagtttattaagaacatcctctttttcctttaactcctacacgttagagattatgaatgccagccaacccaatgggcttgtcgttcctgatgcaacggtgcatcctgttaattcaacatccgatgttattgagttaatgagaataggacatgcaaacagagcagtgggttcgacaatgttgaatgaaagaagcagcagatctcacagtattgttaccatacacattcgaggtgtagatttgaaaacaggagctactctgtgtggtgcactacatcttgttgatcttgctgggagtgagagagtggaccgatcttctgttacaggcaatagacttaaagaagcacaacacataaacaaatctttgtccgctcttggagacgtcatattttctctaccgcagaagaatgctcatgtaccctaccggaacagcaaacttacacaagtcctacagagttctttgggcggccatgcaaaaaccttgatgtttgtgcagatcaacccagatgtctcatcttattcggagactttaagtactttgaagtttgctgaaagggtttctggagtggagctaggtgcctcaaaggcgaataaagaaggcaaagatattagagaatttatggaacagctctcactgctcaaacataaaatggcaaagaaagatgacgaaattaacagattacaacaactcaagacgcaaactccaagggtcaggactgcaaaacgtgcagattccccattgaaacattcgtcgtcgtccccaggcatatctaatttaggaagcaaaatccaacatagaaggacagtatcaagtggaaaggcaatgagcattgccagtagagctgggtctgataccttctctgacaccagtgacaggcactctgaatctggttctatgcagtctgttgatgatatcctaccacgtagggggattatgggtcttccgaagctctctattggtgaaatgggtcagaattctgctgaccctgagcttgtttgctttgactatgctgattcagaagagagattaagtgatatatcagatagtggtctttccatgggtacagagacggatgtttcagtaagcagtatagttgagttgacacgttttcaggagcaggaaaacatacctagcactctgaaagaacaagagagtgcacgaaaaattccaaatgatcagttgtccaaggtggccacccgagttcagaagacaacagtacccaaactagctcaaacttccttgtggcctaaactaagagatcctccagcccttagatccccagtttgatgcagcaactcgatcacctcgtcttgggtcatgtcaatgttcgaacttgacaaagacatctcaacactgttttacttgaatgaaaggaggggagtggag

SEQ ID NO: 35671 - DNA, 2770 bp, Zea Mays
ttcgacgcggcgtggtggaagatggcgaagttgggtacggacagacggttccttagccaagttgctcacgcccgcacgactgctcacaacatgcacgcgtcgtcgtcacgggtgtttccttcccctctcccccctttctcatctcgcggttcttctccaaatctcggagagttttgatcagaaacttcacgtcgcttccatgacgcgtgcagtgcatgagatcggcatggccaactcaactagctaggacggacgacacggagaagaaaacagatcgcgccaacacgcataagatggaaaaaagtgtatggatagatagatagatactcgtcacaccgcatgcgcacttgcgcagcatctgctcctgaattcctccgttcctgaaccagtagatcattttgtttaacagcagggtgcagggcccgtttctgttgctcggcacccgtcccatcccacccacctgctcacgacgacaggccagcacgacacggagggaggaagtagccaggccacctcgcctcgcctctactctcccgcggtcccgccccataccatgtccgactacaaccgctacggccacagctacagctacggcggcgggtacggccaagggccagcgccctcggccccgccggcaccgcacatgcccaccgctacatccgccgccccgccctcctcctcctcatacggcgcgtacgccgggtacccgcccgcctaccctccgccgccctcgcaggcggcgggcggattcggtcccgctggctccggctacggcttcgtccccgtcgcgttcccgccggggacgcacccggacgtcgagcgcgccttccgggccgccgaccgcgactgcagcggcgccatcgacgagcgcgagctgcagggagcgctctcctccgcctaccaccgcttcagcgtccgcaccgttcgcctcctcatgttcctcttcaacgacccctcctcctccacgccgtcacggatgggtaactaaccccctccccccctgcctcctcgaatcgatctccccttctcttcttgcacgttgcatcgaggattcccgataattcggcctctgcaaaatttgatgccgctaccataatattaattgatatagaggttcaggttcgcaatgatgcatgcctgccacccatcattcttctggttgcacagtgatagttgaatttgtttcatttctaatcgttctcttcatactgcaacttagaatatgtgctcaaacctggaatcgcacggtgctagttgctgctgctccttcagataatatgaatgctcagtgatgctaatttagaatatgcgtaacttagaatatgtgctcataagcagcagttggcgctgcacgccatcctttctaatttagcggaattgttctttctgttaaggtaaaagattctgaaaagtagcattcatctcatccctttattcgggacctctgttgcattttatttatttattttcttcaaagcggctataacatttcccttgtcagaatggttggtatacacaagctgctgacttgatgatgcttccacgttgcagggccaacacagttcgtatccctctgggattgccttgggcaatggcggggaatttttgacaggtacgacagggaccggagcggcaaaatcgactcccgtgagctgaccgaggctctccggagccttggatatgctgttccaccttctgtcatcgagcttcttatagcgaattacagcaatggtgtgcccagcaatggcgcgctagactttgacaactttgtggaatgtgggatgattgtgaagggtttaaccgagaaattcaaggagaaggatacgcgctacaccggctcggctactcttacatacgatggtttcttgtcaatggtgatccccttcatcgtcccttagctgtgctgtatgtagttcggtaacttgatagtagtcatcaaccatggttctagtaggagtgctctcccctagtctgtgcgaaaggttttttttttctcttcttcgtttctgagtcttgtctaccttgttcgttttgtacattaataacctcgatttgtttgtttcatgggatttacatcgttttggactatgaaatcttccaaggattgaaagtcatatgccatccttcagtattcctggatgggtccccgttggggctgcattgctaacaattctggcgactcgaatacacattttttggtgcggagcccattcgcagttatacaatatgcaactgcatatttcatccgaagagctagacagtttttggctgaagttgattgatttctgcaaacggccattgaggctgaaggagcgctgggagaagagccaaaccgtgagcagcgaagcgagagccacacctggcggctagaggagctggttaaagaccgaaaatcgatcgagacccaaaaaactgaagacgggagacaccaaatacctgaaaattcggtccttggttttttgtacgagtatatcgatcggtctcaagtctggagacaccgattttcattgcgtctacgaggtaggttgtcgtgcttcgctccacatgctccagcacacttgtgctcgaggacgaagtgtggtggtttgcattcatgctgctttacaagtgtaaatcaaagaaaggtcaagcagagacgatttgtcgtggccagagaccacgcccgtgttagcgcgtgcagtagatcgcacgcagccaacagaaggcccgcatgtacactgtactacgacttgattatgttgagcaccatttatagcacaggtcacgatcg

SEQ ID NO: 35672 - DNA, 2933 bp, Zea Mays
atgcagattgactgggagaaaaaacaatgcagccacaatgctgttattttatatgcctgtaaatgttgccatgaaattttgtcccaagagattttccacggccttctgatttggggccagcttttgtctttggagcaatgtggttttagagatgatcttcgtactgcactttgtaatgtcgggcctaacgagcgagcaaggccatgtcctcttccgccaggtggagcaggcattcctcttccacctggaggaggaggagggccaccaggcattccaggaggcattggaggagatggaggaggaggaggtgctggagctccacctcgaaaccctgctggaggtggaggcggtggagttcctcctagtcctccaaagggtggtggaggaggaggaacacctccaattcctccatatggaagcggtggtggagctcctatgtatcctccaggaggtggcggtggcgatggagctcctacatatcctccgggaggtggcggtggtggtggagcccctacacttgctttgggatgtggcagagctaatgcacattcccctggaggtggcggtggcggtggagctcctacatatcctccgggaggtggcggtggtggtggagcccctacacttgctttgggatgtggcagagctaatgcacattcccctggaggtggaggtggcggtggagactctacatgtcctccaggaggaggcggtggtggtggagcccctacacttgctttgggatgtggcagagctaatgcacattcccctggaggtggcggtggcggtggagactctacatgtcctccaggaggaggcggtggtggtggagcccctacacttgctctgggatgtggcagagctaatgcacattcccctggaggtggcggtggtggtggagactctacatgtcctccaggaggaggcggtggtggtggagcccctacacttgctttgggatgtggcagagctaatgcacattcccctggaggtggcggtggtggtggagactctacatgtcctccaggaggaggcggtggtggtggagcccctacacttgctttgggatgtggcagagctaatgcacattcccctggaggtggcggtggaaactctacatgtcctccaggagatggtggcggtggtgtaaagggtggtggaggtgggatggccccagatcctttaggagttgatagtggaacttctccatgtcctccaggaagtggaggtggaggtggaggtggaggtaatggaatattcacaattccaccacaaagagtagacaatggagatctcctttgtactttagggggaaggggaggaggaggtgggatttctttagtaacttcaagaagagaagctggcagtgctgattgtccaccctcaagaggttgagacaaaatttcactcattctacgaggaggtggtggtggcaatggaactatattaacctccgttgaatgtgaaggtgaaactattacaatatcctctgaaaagatattgaacctgaggaattatatgttacaatatgaaatattgggtacggaggtgctgcagtgcttccaaacacatgctgaactgtatactcagaatgttttgatgaagataattcaacaagtaggtggaacagcagatttgtgttctggtagcattgctgcttctttatatggacaatctgaagatggatttgagtgtaccagtggaactgatccactatcactgcatatagttggcactggtaattctggtggtggtgttactggaggaaaaggtggcagcggcagtggtggttcaccatgttgtaatgttttgggaggtgaagaacaagtcaacatgtgcaacagagaatttggatcttcattagtaattgggaaatccatgccagttactatattaggtctacttgttacttcctcatctatgaaatcagagattcctaaggaactttctgctgcagctatactacctttagagggtgaagttactgaggaatcatctaagtggagaacagtttgtctacaacctggactaaaggaacaagacccatcagctcttatttgttcatgttcagatattagggtgctcgaacaattttgggtgcaagaatcatgtggaggtggcagtggaggtgggtatgggggttgaggggcatatttgttagaagcaagcaaagttagactacctgaatgtagatacttttcctctgtcattgatgggtgaagatattgatgtggtggtattaggggaggtttaacatgctcttcatgtttggacgatcgtgaagaatacattgacatatctatgtattcatcaaatgataatgaaggtagagatgaaactgttcttattggtcgtagaggaggatgtactagagaaattttgggtgatgatctcaggggtatgtagagatgagatggtggaagcacagaagatatagctggatcatcccttccacttgtagaagtaacagagttctgtttagattctgtttgtgatggagaaaaaaacgacaaatctgtggatgcaccacgaagcagattgcgcctgggagatgatggagcaaaaagactagatgtcaacaatggttgaaaaggttttttctttagcaccaatcgagatgaatctgttgtatctgtatttgcattcatggaagttgaagcatggtttattgtcaagctagattcttctggtagaatgttcacacaagacatattagaagagtggctcctggagtcaattcccgccccttgttctgcagtgccattactactgcaagcatgaagctgatcgatatttttcttggcagaacttagccccgaagaagtgcttgaacagtgaagatatggtattcctgataatgaaagttcaaacccattattctcatctgtgggctcagtcacttctgaatttgtgtctctgatggtaaggttttc

SEQ ID NO: 35673 - DNA, 1661 bp, Zea Mays
cccccacacccctacctcctccgcgctagatttggcactgttgaacggaggaacagggcgcgcgccgtagaaatgtggtatttacctgacttcgaacatggttcaatcaaggatgattattgtgggggaagctcaggatacaactcggaattactgaagatcatggaaactaaccaatctcccccttgcaagcgaccgcggagagatcgaaaccgtgaaaaggcaccctcctcaaacaaaattgaagtcatggaacaagagatatggagagatttccctgaagatcttttcgaaactgtcatagcaaggcttcctgttgctgcaatttttcgattccgcactgtctgccgaaggtggtcttcccttttgggctcagacagtttctctcgtcagtactctgaagctccacatggactgccatggttctatacaatcactcatgagaattcaaacaacaatgttgcgatgtatgatcctttgctgaagaaatggcaccaccaatctgttcctctcaatcatacgaagatagttattccagtggcatccgtgggtggccttgtatgtttattggatctgagccacaggaatttttacatctgcaaccctcttacgcaatcactgaaggagatcccaccaagatcagtccatggttggtcaagagtcgttgtagggatggtgttgaatggaagaagttctagtgatggctacaaagtaatgtggttagatattgatgggacttgcgaagtttatgactctacaaagaacgtgtggtcttgccctggaacttttcctccaagcatcaaacttccacttgctctaaatttgaggtcacaaccagtggcggttggcagcatgatatacttcatgtgcgcagaaccagatggtgttttgtcatatgatgtaagcaccgggatttggaggcaatttgccatcccactgccactgcatctgactgatcacacacttgccgagttccagggaagggttatgctggtgggtctgctgtgcaaaaatgcagcgacctgcatctgcatatgggagttgcagaagatgactctcctctggaaggaggtggacagaatgccaaatctctggtgcttagagttctacggtaagcacatgaagatgaaatgcctgggcaacagtggtttgctcatgctctccttgaaggcgaagcatatgaaccgccttgttacatacaaccttttgaaaagggagtggcagaaggttcctgattgcatgctaccatggagtcgaaaaaggcaatggataacatgtggcacagcatttgatccggtcccctgcgccttggtctgacatggaattttaccttctttgtctgagcactataatattttagtcctttcatatcattggcctatctttagatctttctatgttgttgtgacaagttctgcgaaaacgcattactgtggtttgctttgtataacgccgccgaaacaatcgaacggtttcctttatcacctgctgttctgttaagcttgtaatctttctgaacgtgcagttacctgcccagagctgagttcattatacaataaataccgggatgttaatgtttggactctggtgcatggagatgcagtggtgcttgttattaccatgaaaataatgtttttaattattgtgcatggagatgtacg

SEQ ID NO: 35674 - DNA, 617 bp, Zea Mays
aacagacacaactgcatctgcatacagctgctgggtgctgctaactgcatcaccggcctcacctcacataccttcccctcccttcaccaccaccacctttaatacctcaccctcctctcctcttccccttcccggcctgctcctccccggccctcacatcctctttcagttccctctctggatctcttcctgaagagaggcactgccacaccaccacgccacccatgctcaacatgatgaccgatctgagctgcgggccgtcgtccaaggcgaaaggagggcagccggcggcggcgccgggctccggcggcgacaggcaggggaggggcaagatcgagatcaagcgcatcgagaacacgacgaaccggcaggtcaccttctgcaagcgccgcaacggcctgctcaagaaggcgtacgagctctcggtgctctgcgacgccgaggtcgcgctcgtcgtcttctccagccgcggccgcctctacgatgtgaagtccaccattgagaggtacaagaaggccaacagtgacacctccaactctggcacagttgcagaagtcaatgctcaggcgagaacttcagagcaggaagtgcgggcaattgcacaatgggtactagct

SEQ ID NO: 35675 - DNA, 1868 bp, Zea Mays
agcagcgacgcgaaaaggagcagagtacgtatggaaacccgtccagtctcccaagaccccaagtgagacggacgactcgacccagtcacaatccggtccctagtagaaacggcgagatcgtcagcgagaattttccgatgaccggcggcggcagcagcacccgccgtccggccgccgtggccaggagccgcgggaggccctctgaggcttctgaaccagatcccggcgctcgacgagccgcggccgcagcggcgcagcgccgtggccgcggcaaccctggccccttgcgcctgatggacgtgaggccccgaaccctcgcgtacttcgtggttgcttccttcgccctcgtgtcagtcacattcgtggtgtatactggtgggtggtgggaggaggtggaaggagagggcgcggcgacgctgcgaaaggtcatgcgctccgtaacgccgctgccggcgcccaggatgatggatctgcctcagtttcaaaataaccacaaggaaagtttgtattggggcacttatagaccaaatgtgtacctcggaattcgtgcaagaacccctctgtctctaattgctggattaatgtggattggcttgaaaaatggtcaatattttcttcgtcatgtttgccaagattctgatgagctgagaacatttgggtggacagctcacaatggtagggattatgggcgtcaagtgctggttgatcatggtcttttcctaactactagttttctgaaagagaaaggagagagcagtggttatggtggagactgggccgttcgattggatgctaacaatgagaggtcaggtttaagtgatgctgaagaaagcaccacacatctttttttctatattgctgatgaaactggaaatccgatcactatgggttcatatgaaccttcatcaagaggctctgttcttttggcatctgggttgcatgaggagattggtggttgggaattgtacttgagatctgaggacaatttggaaattcacagagctggattcaaatcaatgagtatgcataatctgagcgacttagtgcaacaagccgttgctactaatgcaatgcaatctggaaaccttaacctaccagacattactgaagattcttcaaatataatggtctatcagggtccgcctcaaagtctccagtgattgaagagcggattagcaagctaacaggtcccatgctgagtgaccgtcttgaaacaaaacaaaaggaatttgaagagagatatgatcaaatctttaatgtgaacaataaggttgattccaaagagttatctgttggtagagctgccttatcaagtcttctgggtggtgttggctacttctatgggcagtccaaaattgcactcccgaaaggttttacacaaaaaaatggggataagtacatttcatattggcctgctgcattatatacagctgtccccagccgctctttcttcccaaggggatttctgtgggatgagggcttccatcagttagtcatttggcgttgggatgtgcatatatctatggatatcattggacattggttagatctgcttaattcagatggatggattcctagggagcaaatcttaggagctgaagctttaagtaaagttcccgaggagtttgttctgcagtatccttccaatggaaatcctcctactttatttcttgcgatacgtgatttagcaagtggaatacatgcacagcagttttcagatgaggaagcggaaaagatttcaagttttcttgaaagggcttatatacggctaaatgcttggtttcagtggttcaacagtacacaatcaggtaagtatgaaggcaccttctattggcatgaaaacgaatcaagctgattcatcaacgtag

SEQ ID NO: 35676 - DNA, 2221 bp, Zea Mays
ctctgacccatcaactgcgaaaagactactcacacacgtcaaactgtcccccccgacgcaccgccccccgacgcaaccgcgtccgcgtcggaccactgccgccgaaaccctacacgcccccgccacgccgcggcatggcggatccgccgcccgtggccgcctccgcctcgccggcgcagcccgaccagctcgccgccgcggcctccgtgtccaccccgcagaaccccaaccccctcctctcccctcaaattcccccgtccccgaccgtctccgacctctccgcgcacatctcgtccccgcagcagctcgaccaggcggctgcggcagctgacgcttcgggcggcggaggatccatggattacctcccgcgcccgccgcagctgcaggcgccttcgcccacgcaggcaggggtcggcgccgcggggtttgcccagatcccccgctcggggtcgacctcacgcctctccacggccacccagctccagcagtacgcggctaggatgtacggcgggcagatgagcttctcgggtggcggagggctcgtgggccagcagcagctggcggggcgcgcccccatgcttgggcagggccagctggggatgctgcaaggccagggtaacgcggcatctgcggcacattttgggcttcagtcgcagatgttggcgcaggctaggcaaaaggtcatggcacaaaacacccaattgaataatgctaatacagctcaagtgctgcaagggatgcagcccatgggtgtcatgggtgctatggggatgaaccagacgagaccgaatgtaactattccctatggtgctcaacaaaggtttgcccaggcacaaatgaggccacaagcatctcaacaacctgcactgtctccacagaaggtacctggtcaaggtttgtcgaggacagcatcaattaccgcattaaattcacaactgtctggatcatcacaaaatggacagatggtggcaatgtctatgcctcagcaacagcaacagcagcagcaatggttgaagcaaatgcaaccatccatgggctcaccactttccccacagcaacaatatcagaaccagcagaggctcctgttgatgcagcatcttcagcagaagacaggattgaaccaacaacaacttctccaaatccaacaacagcatccacatctcaatgtccaacagctgattaagcagcaacaatttctgaagcagtttcagcagcagcaaccgctacaatctcctcgtgttttagcatctggttcacagaaatctgcgaatcttacaggctcgcagccgggtacaccattgtcaggtggaactatgactggtggaagtggaagtcagggagctgaaggaactagccaacttcttgggaaaaggaaaatacaagatctggttgcacaggtagatcccttaggcaaggttgacccagaagtggaggatttacttctagaaatcgctgatgacttcattggctcggtgactgcatttgcgtgtaccttggcaaagcacaggaaatcatcagttgtcgaagccaaggatgtgttgctgcacttagaaaaaaattggaatttatctattcctggtttctcacggggggataagaatcctcaaagaaattctgcaaagcaactggtagatccccaacattcagaaagtgatgttactggtatcagaggcacaagcaataaacttggtgctaataactcggttggaaatcatcaaatacgacctccgatggcagaaccttcagcaatgccaacaatgggccctctatcaaaagcccctcgcttctagtggttatgcttctcttccctatcgaaggaaaaattcctgacaatctacctggaaaacaacccgtaggctctaactcaaggattgctagcaagtggaagcacaataaatccacgagcatctgtggcaaactgcagatgcttgtcttacagttacaggaaagcagttgctgacttaccaatcctctacatggggtcatatgtaactttattttattttattttatttttgtgcccgtaaatgcccccatccgttgtatataaatgtttttttttttggcaatggggcattatcgtcaccagttttgatgttgctaggtaggtgaacaaatactaaagtggatgcaacttatataatttaatgaaatgtaagattgatgtcatttttcgttactgagcagctgtgccttatctaaggctggttttgggactttc

SEQ ID NO: 35677 - DNA, 2106 bp, Zea Mays
atgcggcacgatctcgttgccctgttactccgcgccagctccatctccgtctccggcggcgctcgcgcagcacagacgctccacccgctggcgctcaagtccgggcgcgcctcggaggctcgcgtggcgaccgcgctggccgtggcgtacgcgcggtggggcctcgtcgcgcacgcacgccgcgtgttcgacgaagcgccgcgcagggacctggtcctctacaacgccatggtctcctgctatgcctcccacggtctcgcgcgcgaggcctgggcgctctttgccgccgcgcggcgctccgggatcgcccccgacgggttcaccttcagcgccctgctccgtccgccgccgcgccgtggccgccacccaaccgccggcgccgtcgatgacgggctgctgctcaggatgggagccctggcgcacagcctcgtgctcaggctgggtctcctcgcagacgtggtggttgccaccgcgctgctcgacatgtacgccaagtgcggccgggttgacgaggcgcgctgggtgttcgacgctatggcggtcaggaacgtcgtctcatggaacgcgatcgtagtctgctatggtcgggttggtggaggcaaggacgctgttgagctgttccggtggatgctgagagacgggagctgctgcccggatgagctcacgcttgccagtgtgctaagctcgtgcgccagcgtggcggcagcaaacgaggctactcaggttcatgcttatgccataaagagggggtttcacaggtttctgcaggtggccaatgctgttatcacagcgtacggcaagaccggttttgctcgagaggcggggcaaatgtttgctatgatctgcgacccagatgtagttacgtggtcctgtatggtttcgtctttggcgtaccttggactatgcaaggatgcagttcatgtgtttgagagaatgctccaacaaggcgtacagcctgacagcgtcgccttccttggggttctttctgcctgcagccatgccgggctcgttgaagaaggcctgcactatttccttatgatggcgaggggctacaacatcgatccaaattcacagcaccttgcttgtctggttgatctcttggggagagctggtaggattcaagatgcttacaacattgttatcaagctttcttgcgagaacaatgctgatatcgttggagctttccttggtgcctgtaagctgcggggcaaaattgagttggcaaagtgggctgccgataggcttttatgcctggaaccaagtgaggcagtaaattatctgcttatgtctaacgcatttgctgctgcaggagcttggaacgagcttgcagaagtaagaagtgtgatgagacataggtgtggcagcaaggttcctggttgtagttggatagaggtaggtggaacagttcagacatttgtctccaacgatgtggtgctccatcagtcgattgaaatgcaacaaatggtgcaacttactatttcggaagcacaaaaagagtgcaacgaagacacaacttgtggtgatccaattttggttcaagaatgattagtttggcatctacaatcgtcccagagcttaccaatgtgatgtttctcatgtgcctagactcataaaggaatacgttgaggaagtatctactcaactgaaaatggtctgtgattctgattcagacgagttgcctcttgaagagaaactcgcatttatgcatgagacaagacatgcctttggtagaacagccttgctgctaagtggaggtgcttcattatgatcctttaatgtgggtgttgttaaaacattggtagaacataaacttttgccaaggataatttcaggatcaagtgttagctaaataatgtgttctatagtagcaacaagatcatggcctgagctggagagctttttttgaagaatggcattccttgagatcagggcttctggaggcagctttgctgtcatctgccaaggtatgtcaaataatttctcgttgtattctttttattaagtttggcttatttccacttagaatggtgatacactttttattggacatgcttccagtccatgtaaaacataaatatatttcttatttttgcctacagttgtcat

SEQ ID NO: 35678 - DNA, 2083 bp, Zea Mays
gcagacggcacaacctaccggcttcgcggtttcccttttgttccgtttcgtgcacttaagccgtccgcacgccgtcttccccatctcgcgcagcgctactgccggctgtccggagtcccgaccaccgtcctcggctccccgccgtgaatccatcatcccgtaatggagacctgcccctcggtgaagaacatcctcttgctggactcggagggaaagcgcgtcgccgtaaagtactacagcgatgactggcctactctatccgcgaagctggccttcgagaagtcggtatttaccaaaacccagaaagcgaatgctggaacggaaggtaatttacatatgctttctcttatgcggaagtagttgtgtgagccacggcgagcgttgctgtgctcgattgaggtagtacagagtagttgattagcattatcatctcataatgaactcacgtgtgtcagtgtgtgatgtattgttataatccgttctatatatgctgatgttgggcaagaatgcttctttatagggtagaatcacttcttcgatattaaattacaccattcttgttttgattcttttgctgtgctacatgttaatttattggtgcctatgccattttattcattgcttatttgacatggcttatatacaaattatctactctactccctccattccaaattgcaagatgttttagcttttctagacatcttttgctatgtacttagatatacattatatttaaatacattatatttatatacattatatgtttttcatgtccagctgtttatcatctattaacctcagtcataacactgtttgtacgagctcccactcatgccacaaatctgtaaatgagccagggctagttttccatctgactgaccttgatttctccttaaacatgcagatatgactgtttgagtttttgttcttctcttcaagtatttcatatttttctttgtttctctttaacagttgagattgtaatgtttgacggtcaaattgtggtatacaagttcatccaagacctgcacttttttgttactggaggagaagaagagaatgagcttattttagcatcagttcttcagggattctctgatgctgtcgaacgacttctcaaaaacatggttgacaaaaggacagcactcgagaatttggatatgatcctattgtgccttgatgaaattgttgatggagggattgtacttgaaacagaaggaagagagatagctgaaaaggtgtctggacatggattggagggtgcttcatcagctgagcagactttagtcaacgccctaacgcaagcaagagagcattttgcgaagtctcttctcatgtgatgctatgctttatatattagggcgacgatggagtatctattactgtgtctggataacacagtttttttttttggttagcagtggaccaaaaaaaaaaaaggtctgaaatctttgaatgtgtagaatggcatgttgtgtccaaaattttcatttgtaagccttcaaagttgtgtagcatgtttttttcttctaattttgactggtttcgttatcggtcgttttgtttaatctcttcctgttgtaaacggtaaaatagcatgcttgatggcatgttgtaacttaacaaattagggctacactttgtttaagatggtaatgtctccctgaaaccaaaacattattggaatctgccaaaaattcaccttacaattttgtatccatgttttttatattaatgggtgcaaaaagcaaagggtgacggtgagtgtttactcgccggcggtgacatggtgagacagatcgtctctccgcttgattgcattgtcgacatgtcgagacaggtcgtctctctgcttgattgcattgtcatctgcggcgtcactgaactgctgcttgtagccaaggtcatggttgcctgaaaccagttcgtctctgcttggagtcccttccatgtcgatgatgatgttggttatcaagcagcagacaaagatgatccgtggcagccggtgtttgtcaggcctccacagctctccctgaatgacacgccacctccctttgagcgtcgccaatgcggtctgcac

SEQ ID NO: 35679 - DNA, 3078 bp, Zea Mays
gaaatgtaacgtaaatagattacatgggttacgatgaaaaaatgatgacaaagggtattctcgaaaagatgaagcttgaaaattttcaacttggtaaaacaaaggtgttccttagggctggtcaaattgcgattttagatatgcgccgtgctgagattttggacaacgctgcacggcacattcaaggccgtttcagaacatttatcacacgcaaagaatttgtgaaaacaagggaggcttcaatttctatacaagcatactgcagaggctgtttggcaaggaagatgttcgcaaacagacgagaaacagcagcagctgtaattgttcagaagtatgtccgaagatggctgctacgtagagctcacctgcaagcatgtttggcagctctccttattcagtcttacattcgagggttcatcgctcgccgctatttctctgtcattagggaacataaagctgctacagtgatacagtccacatggagaagacggaagtttgtcatacttttccagaattaccggcaagccactgtggcaattcagtgttcttggagacagaagcttgcaagaaaggagctaaggaaactcaaaatggctgcaaatgaagctggtgcactgcgtgaggcaaagaataagcttgagaaaaagatggatgatcttgctttaagacttacccttgaaaggagactgcgggcttccagtgaagagtcaaaatcagtagaaatattgaagcgtgacaaaataattgaatcattaagtgcagaatgtgctgccgctaagtcagctgctcaaaatgaacatgccaaaaaattgctgctccaaaagcagttggatgattctttgagagagattactatgttgcagagtaaaaagattatgtcagcagaagcagcagaagaaaactccaacctaaagaacttagttgaatcattatctacgaagaactcaatactggagaatgaacttattgtgactcgcaaaagtagtgatgatacaatggaaaaattgaaggaagtcgaggggaaatgcaaccatctacagcaaaacttggacaaattgcaggagaaacttacaaacttggaaaatgaaaatcatgtcttaagacagaaggcatttaatatgccgacaatgaacaatctgtctgtagctccaaagacattatctgagaaattttctgcatcaattgggcttcccaacagtgagccaaagcatatatatgaaagcccaacacctacaaaatatctggcttctcttccacagactttgagtacatcaaggagatcgaggttgcctgttgaaaggcatgagcaaaatcatgaaattttattgagatgcatcaaagaaaatttaggatataaggatggcaaaccagttgcagcatgtatcatttacaaatgtcttttgcactggcgtgcttttgaatcagagcgaactgctatttttgatcacgtgattgaggccataaatgatgtcctaaaggggaacgaagctgatggtagattaccttattggttgtccaatacctctgcattgctatgccttctccaaagaaatctgcggtcaaatggattattcactaccccgtctcgtcgttctggtggagctctagggaagatagcacaaacattgaggtctccttcaaagtttataggccgcagtgatactctaccacatgttgatgcacggtatccagccatactattcaaacagcagcttactgcatgtgtcgaaaagatatttgggcagctcagagataatctaaaaaaggaaatatcacctcttcttaatgtttgcattcaggctccaaagtcaacacgtgggcaatctggaaaagcatccaagtcatctggagttggtgcccacccagcatcgaactccaactgggacaatatcgtcaatttccttgacttacttatggatacattgcgcgaaaattatgtgccatccttctttatacgtaaacttatcacacaattattctccttcatcaatatacagttgtttaacagtcttcttctccgacgtgaatgttgtacattctccaatggggaatacgtgaaagctgggctatcgttgttggagaaatggattactgatgtcacagatgagtttgcgggtacatcttggcacgagctcaattatatcagacaagctgttggatttttggtaattgattctgcaagctgcccgtctttctgtttctgttcattgtttgtcttttaggctattttcacaaaattcgttatacacaggttatacaccaaaaaagaaaaaagacgcttgaggagatcaagcaagatctttgcccgtccttgagtgttcgccaaatctatagaatatgctcgatgtattgggatgacaaatacggtacccaaggcatttcaaccgaggtggttgctgcaatgcgggagatggtcaacaaagatacccagaatcttgtgtcaaattccttcttgttggatgatgacttaagtataccattctctaccgaggatctatcaatggcaatcccgtcaatagattatgctgacgtcgatcttccagaatctcttcagcactatacatcagtacagtttctactaaggcagcaggatccacagcctgcccaatagaatgaatgtggtcagcctgccctgaagatctgtctgtcccctggttgtttctaccaaggcagcaggatccacagcctgcggcctgcccaatagaatggatgtggtcagcctgccctgaagatctgtctgtcccctggttttattggggtaacatccatctgcgatgttgtattgatgtttagagagtacctagtttggtggagtggacacaatttaaaagcaaccattgttgctagatgccaattcattggtgttcactccccaagtatttttcattgtacaggaaatgttgtaagtctgttgactagcgcaaaattagttatatcagtggtaaattgggcaatgcgcatcagtgcatcaccgatggtatcttctacacatgaatcgttagccagttaaccgctaggtcgggcgatcataagctccaggctgtctgatatgggttcgtgtgggtctgtcgcgggacg

SEQ ID NO: 35680 - DNA, 1487 bp, Zea Mays
ctcatgtcggtacagccgagaaccgggaccggtgattttcccctcccccttgtcttgctgcttccaattgacccgtcaattgctcaggcgatagtggctgcagtgcatttctgggatggggctgctcttccttgagcggctcgagggggagggcgtgttcaggtgccggcgctgccgcgtggacgccgcctccaaggacgccatcatctccagggacttctacggccgcagcggccgcgcctacctcttcgaccacgttgtgaacatatgcctaggccctaatgaggatcggtatcttgtaaccgggctccatactgtgaatgacatctactgtagctgctgccaacagattcttggctggagatatgtgagtacaaacataattggcttatcttgtgataatgaattgtcttatttccattggatcatgcttggcagtagacacagtagcgaaattacttttttattaaaaaggaaaaaaaatagtctgcaacaatttgttgagatgagaacaaaactgaagaaatacttatcatttcttcaaaaagcgctgaatatcaaatgggcggctatgcacaataaatgaaaactaatgctttattcatttctcaactgctacatgcatataagcgttttcctcgaaccatttaggtaacaatgaatccaattctgcttcagtttctgggcttaatcattggattgcacaatgatttaaaagctgtttatctggagatgtaaacaccattttgctgttcatatgcggttgttttccctgttcttgaaagttcagctctgaattttgtgttgtagttgcagaaatcatatgtgcatttttaacagcaaattggaaggaacataatctcccatgtatctgtatccttttttatttcaattcttttttttttgaaagaaatggcaggagctctgcctaatcattaaaaggagagtccagaaaacacactgtacaggtccgaggaccgagacaagacaagacagactagcaaacacgacgtgaggaacgctcctaacagacccgtacaaagcagctaaaccactgcagcagccctaatactggggaacgtagctctcttgaaagagaaagcctacgagcaaagccagaaatacaaggaagggaagtacatcctcgagagagctagaatggtgaaggatgggtgacgatcatttggatgctcttacttctaacaccccagaagcgcaatcttcttgaactctggaaagattcagaactatccctcaatttgcatgcctcagaacatttgacacctaattggcatcccagttagctaggaagatcactggttgcagattctttgatttgtagaatattactgactctgaatacccttagcttgttagtaatggtaacatttggtgaaatattgatgattaggtgaattgaagtgaagctgatgatttatctgtagtaaccattattattcaggcgccctgtggacttgtctggttcg

SEQ ID NO: 35681 - DNA, 3122 bp, Zea Mays
ctagatctatttcggcgttttgcgtgtccatttacctagagaaagccaagtaccaaaacctcttcccggcggccaaatctgatgttcccgattcaaattcccaccccggcggccgccggccttgttcgcacccttacaacgccgccgtcagctttccaatctaccacccacgcgccgtttctcagcggtgtcattaacagcgctgcagcccgcagctgccgcaagcgccgctacgccgatgcccacgagggcgcctcctcacctcgccgccgccgccgccgccgcttcctcctcgtccccaactcgttcctggccggccggtccttcgctctccgtactctcgctagcgccctccacaagcgccgccacgacgccgccacctcctcggctcgcccctccagtcgccgcctccgccttctaagccccgtccttttccccgccctccggccgcttagcccccgcgtttcgctagccaccgccccgcgtagccaccgcaagattcacgtcgacgacgcccgccgcgccgtctctactccctgtcgccgccgcagacgtagcagtctgcttcccagggtcagacacttccgcccattcgcactccgtttcctcctcacgcccggtgcattaagccctcaccgtcgccggaaacccgccgaggtagacatgggcaacctcatctcacagttactgtggaagagcaccagggacggtgtatcagaggcgcacacgaagcggctcgatgggtcgccggaagtggtggatctcacagtggagccagagcttgaaaataacgatgccgtggggaggatgtttggagaccggagcgtccctgcactggggtcatcaaagtcgccggagaagaaggcaacgttctacgaggagccgcacggtagaagattacaggagtcaggattcaagaagctcaagcttgccgagctgcctgatccgctggacaatacgtctaaggaggatctatctgaactattcacacctctaagtgacaaagacgaaagagaagtcaatgctctgttgtgtagtagtgatgacagtgatacatacgccttctaacatcgagattactaaagagaaacttcaatgcttgaggcctcgtgggtggttgaatgatgaggtcattaatctgtacattgaactgttaaaggagagggaaaaaagggaacccaacaggtttttgaaatgccatttcttcaatacattcttctacaagagggtattggattttcgcttcacatactgcatgcataaatatcctttgaaatgctggtcctattatatcatatttgagacttatggttttatactgcataggaagcagaagcattgccatttgggatttgatatttggttaatgaatggttcagtattgccaaagatggatgttatctgatagcagcaattttgatattagaaatttacttgcaaacatataagatattaagatcatataattacttatgaagaagcatctcctatatattacttggcctcctgtcagtttaatcgattcaaatactgtgattccagacccttgccttgaatgccaggcaatgcatgagtttggtcttcttatgttaaattgaacatttttcttattcttctggagttctcagaagctaattttgatgaattagtgtcctcattcctcttttggtctctaaattcactttctttttttaacacctagtttacaagcaaaggatgataaatttgtatcctagtatccccctgagcccacttagagcacctgcatttttctggaggctaactcttccttaaagtcataataagttatttttttctcatattttctatcatatggctagcacccagcactagcagacctcatcacttctgaattattgctcagcttacttgcggaatagctggttatgattaccagtctgttaggagatggacaacattcaagaggctgggttatggacttgtcgagtgtgagaaaatctttgttccagtgcatagaaatgcacattggtgtttggcactaataaacatgaaggataaaacattgcagtatcttgaatctcttgttggttggggccgtgatgtactggacatactggtaggcttatctgaccaaactgaaagttacactattcttagactagagtgcctgaattgcatggggttgcctttgcaaattattcatgtaatacttgtatatgttttttttgaaaggtatatataattgatattcattatcaagaaagcaaaattacaaagtacgatgttcttcataaaaggacccagcacaaaattaaagggcctgcaagatttctctattgttggattgaagcactacagttaaattttctgtctggcaggctagatacatcgtggatgaattgaaggacaagagtaacatagaggtagaacctagttcgtggactgtagtgtcagagtctttgcccttgcagcagaacgggaacacatgatgtattttaggaaacgaatagcaaaagagatcatggcattaagagccgactgaagaacaccattctgacattgtctcaagtcagatggataaacaactgtgaacctaggagcaacttcaaacttttcaggttcaaatcataaagctgtaccgagctggacacatgtctgcacttgaacaacaaaccaccaaccactacagtttctctatttctctagttagctaggagcacaaggcagaacattgaatgctgatagagggtagatcaccccatttcacaaaaacttgtggcaaaccaatagcaatcttaacaaatcgaatcatcttcccaccagtagaaatgtgactgactggctacttagatgcctaaaaatgctctgcacagtgactcccaatgctccttagccaggcgaacacgttcaactcgctccaaccgcgttctcttctaagggcttgtgcttacctgtgtctcagcagcatgttgagtgcatccaggtgcatagcgtcagaaaagaccccttgctgaacatcaactggtgtgacggatgcagcagaacagcagcataggtagcagaatatgtggccacatgaaagagagaccggatcaaacattgtgtcctgtaaataaataaaacatggaaggatgaagagt

SEQ ID NO: 35682 - DNA, 2691 bp, Zea Mays
aaacggactaggatttttttactctaccttgctgcaagttgtgccgctgaaaatccaaactttgggattgatgcgactgtagtaacttgttgctcagtggatggtcttgagcttttctgttccagccaggagtcaagatcaaccgagtactgtgctgaagatgaaggtgggtgcagacccaagtacccaagatgtgatggaggaggcagccctcaaagcaaagcatgtagcagagcgcaagttccacgcacgtaacaccaagggtgcccggaggtcagcgctcaaggctcatagcttgtgcccatcacttgagggcatatctcagatgatctccacacttgatgttcaccttgcactgaatcgaagattgatggggagagtgactggtacaggatactgtctctcaatgccatggctgatgaagaggaggtgaagaaacagtacaggaagctaactctccagttgcacccagacaagaacaagtcggttggtgcagaggttgccttcagacttatctcggaggcatggagtgtattgtctgacaagagtagaaagatgctttatgatcagaagaggagagaccattgtgtggcgagtgtgtccaacggtttgtatgcttatgattatgatacaaagctcagtaagcgagcacgaaaaaatgccgttgcctctgcctcagcagctgttgaggctactactcgtcttgcaggggctgacacattctggacatcatgcaacagctgcaggatgcagtatgagtacttgagagtttatctgaaccacaaccttctgtgcccaaactgtcaccatgcattcatggctgtggaaactggatttccctgcaatggaaccagttcttcattcacgtggacaaccaagtcacagcagcagcagaaccacgatactgttgctgaccattcatatcaatcagcaagcagaacatcaagcattccagacaccggacatggagcataccagcaagagaacacttacgagttgtacaaaaaccaaagtttccagttcactcagtaccccaagacaacatgtgttgctgctacaaatggttacagtacacatgcctcagagaaatcgaagagaaaacatgaagaaaactacatatacaattatatttcaagtggcaagagcaatgagtatccatcagggcgtggacgacattcaaaaaggaggcagaatttcagtaatggctgtgcatctgtggaagttaatggtcagaatctggctgcaactgcaggtatgtctgggattgccgatggaggaagatttaatggtacatcaggggagaagttcaggtctgcagtgaatgcaagaaaagctaatgtcttgagggagatcttccaacttgacacccgtggtcttcttcttgagaaagccaaagcagaagttcgtgaaaaactacaagtctggaatattttgacatctagccagtttgtcgagaaaaggaaatcagatagaagagagaagcatattcaaaacaatattaaggctaatggcattctctctgacaatccaaccaataaatgcaagaaatgcatttcaaaagatgcagataccgagatccctgtgactgatgtaatgaatccagaacagatgcgtgtacctatgtccattgatgtccctgacccagatttccatgattttgataaagatcgaacagaaagagcctttggcaatgaccagatctgggctacatatgatagtgaagatggtatgcctcgcctatatgcaatggtacagaaagctatttcaatgaaacctttcaggatacgaatgagcttcctcaattctaagtccaacaatgaactggcaccaataaattggatcgcatcaggttttacgaagacatgtggtgattttaggattggaagataccagattactgaaacagtcaacatcttttcccacagagtttgctggagtaaaggtcctcggggaattatcaggattattccccaaaaaggcgatacatgggctgtgtaccggaactggtctcctgattggaatgaacttacaccagatgatgtgatatataaatatgagatagtagaagtgatcgatgatttcactgaagagcaaggtgtgactgttgtcccattgttgaaggtagctggtttcagggcagttttccacaggctcacgggctccagtgtggtcagaagaataccgaaggaagagcttttccgcttctctcatcgggttccttcttgcctgctcactggtgaggaaagaaataatgctccaaaaggttgccatgagctggaccctgctgcaactccagttgaccttctcaagattattacagatgttaaggatgacaccacacgttgaggctccaagtagaaactctacttgtctgtcctacagacttgcaactgcgagctagcatggctgaagtctcaatatgtgcttcactcactcctcagcatcatttggctcacttgccttaatctatcattgaacttctggatgacgatgaggacttaattaggcatttataacatttaattttattgtgatatcgatattgtatagagataagggttattgacaggctgcatattgtgctgagaccagttctccaaaggcaacgtatcttatgcatatgggtatggctgtgcacgtatgcacatctttaatcccatcccttcaatcaagatccagtggctactgtcg

SEQ ID NO: 35683 - DNA, 704 bp, Zea Mays
  misc_feature (703)..(704): n is a, c, g, or t
gagaaatccaagcgaaaccccgcgagagcgaggcgacggcagacggaggcgagtgggtgagccgcgggcgagagacgaggtagcgggctagcgggatggcgtcgccggttgtagtggccgcgacgctgctggtggtagcactggcggcattctgcggcacggacccgctccgaacggacaacatggtggacttcccggggtttgagtcccacctcgtcgacctccctgatcccgccgagatgccgacgcacgcggatgaatgggagcgactctgtggagccgatgtgcggttctgcggcgaggtgcaggggcccgagagcatcgccttcgaccagcagggccatacacgggcgtcgccgacggccgggtcgtcttctgggacagtgagcgaagctccgcggcgggccgaaggcctcgccgctggagtatctcccagcgagcacatctgcaacagcccgctcgggctctgtttcgataagactggggacctgtacatcgccgacgcctacttcggcttgctcaaagtccgccccgagggcgggctggccacgctgctcgcaacggaggccgagggcgtgcgcttcaacttcaccaacgacctcgacctcgacgacgagggcaacatctacttcactgactccagcattcactaccagagacggtactgatcagagggccagctgctatccacgaacgatagtgnn

SEQ ID NO: 35684 - DNA, 2461 bp, Zea Mays
caacggtaaacgttaccctttcggagaagaaaaaaatagcggtagcgctcggatcccttcttcctccagatcacaccaccgtcgcctccgcctgcaaatccattcctagactcgagctgttgctgcgagcgagctcgggttggggctcaggtctctagggtttcgcctccctgctcctggtgctcatcgccttggaccttggtctgtcgggttagggttgtcgcggctgcgggagccgtgggtcggcgggtgcggccgatgcggcgatcgccggagatagggaggctgtagcggcggcggggcaggggatctcctgggtggattctccggcgatggccgcagacgcactatccatcatcccgggcgccgtgcttcggaacctttctgacaagctctacgagaagaggaaaaacgccgcgctcgagattgaggggattgtgaagcagcttgcaatggctggggagcatgagaggatatcagcagttatctcgctgctcaccaacgatttcacatactcgccacaaacgaaccatcggaagggtgggttgattggtcttgcagcagttactgttggactcaccagtgaggcagctcagcatcttgagcaaatcgtgcctcctgtgcttaattctttcctggaccaagatagcagagtgcgttactatgcttgtgaagcgctatacaacatagcaaaggttgtaagaggggatttcatcatctacttcaacaaaatttttgatgctttatgcaagctttctgcagattccgatgctaatgttcaaagtgcagctcaccttcttgacaggcttgtcaaggatatcgtaaccgagagtgaccagttcagcatagaagaattcataccgcttttgagagagcgcatgaatgtgctgaatccttatgtaagacaatttttggtggggtggataacagtgttagacagtgttcctgatattgacatgcttggtttccttcctgattttctcgatggtttattcaatatgctgagtgattccagccatgagataaggcagcaagctgatgcagcactttctgagtttctgcaggagataaagaactcaccaaatgtagattatggtcgtatggctgaaatacttgttcggagggcaggctctactgatgaattcactcggttgacgtctatcacatggatcaacgagtttgtgaagcttggtggggaacaacttgttccttactatgcagatatactgggtgctatcttaccatgcatatctgacgaggaggagaaaatccgagtggttgcacgtgaaacaaatgaggaactacgtgctataaaagctgatccaactgagggatttgatattggagcaatcctttcaatcgcaaaaagagaattaaacagtgagcatgaggccacacgaactgaagcattgcattggttcttcactttgctggatcaatatcgtgctgagttcttggcgtacctgaacgatatttttgatccactccttaatgcactttctgatccttcagacgtggttgtcctattagtattggaagttcatgcacgtatagctgaagagtctcaccacttccatcatcttgtatcctacctaatctgcaccttccacaacaaccattttctactggagaagcgtggtgctttgatagtccgtcgcctctgcgttcttctgggtgctgaaaaagtatatcgtgagttctccactattcttgagagtgaagttgaccttgattttgcatccgtcatggttcaggctttgaatttgattttgctcacatcaactgaacttggtgagctccgctctcttcttaagaagtcgttagtggattcctgtggcaaggacttgtttcagtcattatatgcttcgtggcgccactctccgatggctacaataagtttgtgtttacttgctcaggcatacagtcatgcgagctgtgttattcagtcgctgggagaagaagacataaatgtgaaatttttggttcagttagataaattgatccgtctcttagagactccagtatttgcttacttgcgtttgcagcttcttgagcctggaaagcacacctggcttctgaaaactctttatggtctcctgatgctgttgcctcagcaaagtgcggccttcaagatcttgaggactcgactgaaaactgtgccattcagtgaaaatattaagcgcacatcttcagcaaatccatactcccagattctgcaagtgacagaagatggcaatagaaaccaagatacacagaactatagtgcaatcaatttcccgtcccttctccagcaatttgagcacatgcagctgcagcaccgtaaccatttgaaggatcaactgcaatcccgcaaatctgcttcagctctaacgttatctcaggaactttgttaaacaatgttttcttgatgtaaagatgcttatcgccgaagcagaagattaatatctgactttcaacgtac

SEQ ID NO: 35685 - DNA, 315 bp, Zea Mays
cttccctctgcaccgtcaccagaacgcctgcgtgtggcgagggagattgccgccattgacaatctcgacgcgcgtcgtccacctgggctcgtgaagcaatccgagcgaaaggaggaggatctggcggggtgttaccctcgcaattggtgtgcgcagctagcttggagcccggtaatcgctcgccggagggcgtgcgcaggcctggtccacgaccgaccgtcgaccaaccggggtgagtcatccgcgcccgtaaaatcacccacctctgattcgcagacaaccccattacgcataaaaccccaggattccgctatt

SEQ ID NO: 35686 - DNA, 2389 bp, Zea Mays
cactaatgtattcacctattttgataccacaataagttcgttaccgcgctgtgctccatcatattcatgaccacctgaaccatcagcaagggcagaagcacatgggaaaactatcattattaagtcaataccaatcttcacagcagttagagaaagtcagcgataccttctgggtcttcccacaaccaatcttgcgcacacactaatccttgaaccgttaaagggtccatagtactgagatactgatttggttcggtgtcaacgaggaatgggatgggatcaatcctgtgttgacctcgtcccttattttttgagggattgtatcatccactatttttaaagaatattccttgatcctgactctggacctccaaaccaaacataggtcaagttagaatgatctcactccatccctcttcatccttcctcattcatccatccaaacactatcttaatgtaccggcttcactgtccaaagggatgatggatacagcgatggctaaaatatcacgagccatttgcgcaagtacaggatacttgttggctgcaaaggacttccaccatccaaggacatcaaaattatcattatttccttctttttgagttagaacttggcgagcaggtcactgatttcaaataagatggacagacacctagttagaacgttcgaaacaaatacagaaatcgaaagagcaattggctacaaaacagaggcctaaggacataatgttactgctgtgatacaaaatattacagtatgttgctctgatttttgctctcagtttactcggcgcttcagttgttccctgagttgatttgtgcagtgtcatcagacagcttgtctgattcaaacttggcacctgatctagacagacacttccggcgaacctggtatcagtcttcctcgtgcttccttttagaactggagtgatgctccctccgatgcttgtgtgacctcctgtgttcctcatcagagtgttcctcgtcagagtagcggtgatcatctctatgcctatgccttgatttggaactccaacgttcatgctcatgctcatcttccgaagagctacaatggtgtctatgatgtctggattccctgtccttggagtgactcttgttcttatgtttgtgaacatccttgctctggtctcttgaatgctctgggcgatgcttcttccttgagtgcttatagctatcctcagattcatctttttcctcgtcggattcttggtgtttctttctatacttccgcactctgttctgttcatcatcagagtctttactatgttttgtcaagtttggcccctcatggtcaaacagaacagagctactaccttcacgttccttagccacagattgcagatcaagtccagaggcattcatatcaggaatggccttggcagcttcactagttgggttcgatgctgcagctaaatcattcatcttgttgtctccactcttaatgattgcagcaaacatcttcgcacggcgaagcctatcagctttcagcttctgttcctttgtcatggtagcttccaaagaacctgcctctttggaagctgctgcagcagcagcttttgcaatagtgtttgcaatccaatcatcatcaatgattccaaaaccttccctttggggctgtccactacttgtaagtgaagcatcaacatcactatttgaaatgtgtttggacagtgcatttcggtcctgtaaagatgagaaacttccaaagctggaagaaggatcattactaacatgggtgcgaacattgtccttggttcctttcatggtgttaagtgagtcatttgcagcacccagtcctcgagtagctgccattactatagcagcagcttcatctgcagtaactttccgagtcttgaccccacaaacaggatggaatatacccttcccttgtttgtcatacagctgcttctctgatggcccagatgagcttctatcagaagcactggattccatgctataattgatgtctttgcgctccattgagcaccttctgtcggcgcgttcacgagagcttctgtcagcgcgctcacaggagcttctgtcggcgcgctcacgagagtttctgcccctccggtcagaagaacctcttctgtccttgttattaggacttctaccatgtgaattggactgcaaaatcaataaaagaaatagaaacaaaccataattaaatttttccaatggatcgtaggaaaaaaggataacattgactaagtaaagaagctagtgtaatgcttagagcatgaagattctgatcaaacagtgggaattaaagtatttcttgtgaaatcctgcattgaaaaggtgggccaaagtctacaacacaacctttgtattcccagggtataaactaataaaagagaagcatcaa

SEQ ID NO: 35687 - DNA, 6496 bp, Zea Mays
ggccacctttctccccccttcgcgctcggcctcgcgccgacccatctgggctggggcacgcggcgacatttcactcgtcggcctagggaccccccggtctcgaaacgccgacaagcatatatcatgaaatagcacatcaaacaaccagataatatcacacatagtccaaatccaagtatgtagcacaaataatacaaatcacagttcaaaacacaaaataatccaaatcattgtgcgtagtacatagtccaattcatagccatatcagaaatagtccataccatagcccaaataagaagacatgcaccacctcacttcctcctagtcttacccttgcccttggccctaagagagtcggtgcatgtagtgtaagatcacgtggtcgtcgtctgcgtggcattggctgtgatggctatgtgcctagagcatcctgtagctaggatggaccgatctcgtcatgatgcacctggacgtcatcctcgtcactatcatcctcattgtcctccttgtcgtactcatcatcaaatgtgtcccttgtcaaatgtgatgagctttgtgctattgtggaaagtattacactttgcagagtgtcgacctagagctacataggaagttggagctatacaggagcctacatgtcaactactgcgctagtcaagcaaccacaatgacaagtagcacgacgtagacaacacgatatcctctgccatggtcaaaagctagttcaccaccaagttttggacattaaaatgaatgattttggttttaactgttattacttactgagaaaattgcaaatgtcctactgtcagaagtagtctatgataaacgatcagtatcgatcatagagaggtcgaaagactttccctatatagaaggtaaaacatgaggatagaaccaaggaaaggtacgacaatgcatttgaaaaattcaaaagagtgaagatcttaatatgactctgtccaagatgggtgcgacctcgacttgcgtcccttgctaagtagctaggttgtacgcattgtcttcaccatccgatgactctagctcggcgtagttcgtagctatccactaccccttcaacttgcacctagtcgcaccaacataccaataggaagttattgtctgtgttcgacacgtcattatggtagacgagatcacttagttggtcccattcatcaatgtaggctcgttggtagctctcaaagtcaatgacctttttctgcttctggcggtcgcactagcctgcaaatgggaaacatctctttgaggtcgcactacacattttaattatgagttagacaacgaagtggacgaaggaacttacttgtggagttcaactgatgtggagaagggctccattggaaactccttagtccaaattgtcatgccactcttgggggtaagtggtactcaacggcttagaagcatatgagcggatacctcattaggtaaaggccatcgtcctccaaacatgatgagctcaactaaatatacgacagaggtggctcactatatggttgccagcaaacctaaaacagaataatatttgtggcacatattatatttattatgtcaatgacataataattaataaaagacatagtaaacacaaagaactcaccatcagtaacataagtacgttgagctcattcgagaactcgacgtaggcccactcatgatgtgcgaagggctgctggacctggtcccaacgataggccgtcgtaggccgtaatcggtgcccgacgacgacgaaccaatcacgaggaggaaactctatcgggcacccaaccggtatgctcgaccacatccaaagctggagtaggtacagacaactatctaagctcgtggtactcgccctccgacgacatgcctcgtagagctgtctgtagaggaaggctagaattgatgaaccctagctatagactccagcgttgtaccgtaagttaggcagggcaggaacatcgaagatgcgttgtcacccgtcgtgtctagaaaaaggacacaaccaaaaagatgcaggatccaagctcggcagtggtaggtaatagcctgatcatctgctctagctgaacaatgctcgaaagtctgcctgagccaggtgaggggcacgctagatgtgtggctgcctgttctatctttgggaaccactataccaagaaaagcctggactctctatctctagccaccgggtgcttcatgaccgatcactggacgactacgaatcttgagacaaaatagcttctagcagtcttgcagtgtcacggtcatctcgctgcacggaagatggaaagtgtgagtttctggccaccacctacgggaatacaaacaaataataacttaaaacctaaactataaataaagtgttttcaatggattgcaaaaaaatcttgatgaagttacttgtcaaccaaaggcatgagcgacatagggttgactgtggccaacccatagcgaacctggaatgatatgatgtccaagccaactctccgaaggagaggagtgtacatgccatcgtgcaccatctcctcgaactagtcatgggtcctagaccgaaaattggcagtacctgacaacaagatttatttgatcaaacaaacatcatttacatttactcattcacaaatttaatatatatatatataggcattacctccccctctatggtcagtcgtcccctgcggtgctcgtcgtagtgtgggtccaacaaagtaagtaaagcaggttagtaaagtaaataaatattacaacaatttggacgtactaaaaactattttctactattcatgtgaggtcaacattgtatcacacctgactaagtgcccaaaggcatgtatttgagttgtggccaagtctgtcgcatttgccgcattcgttctactctgggtcaatgagaaagggggtcactcgacctctcctagtgcgactgtaaatatgatccatgaccatgttgaacctgctcctcttcctagttccatgtttgtctcaacggtgcgctggatcagcaatgtatgtcggaacggtgtacgttgtaaatagggactccaggtgcgtactaggctctccacactaaactcgtacttgcctaactcatcgtcaaagcattgtacatcatgtctatttgaccttgcgtttgcattgccttcgtgtcacacctagatttaaagacaaacccaggtgtgtttcaaatgtcaactaggatcaagtctcacacatattgtgactcatggtatagaaattaatgtcacatctttagtatataatagaattccaaacaaaaatagctagtaaaatacatcatatgacagcaacgatcctctccggccatagttgactcgaagacgacggcctagacctctctgaactcatcatagcatccttcatgctcctcatcttacggtacctgttcttgaactggttgattatagaaagggtgatgtaacaccctgaattttagggtataaaaatttatttgctctatactcaaaatttaactattactctctattttccttgcttttctttcctatttactaaaataatggagagttttcggtaaattttcatattttggaatatttttctattttccaaaaaccaaaatctatttatttgaggtacttaaaacaatttaaaaaactctaaatatgttttttgagttcattggggtgccaaatcatgtataggaatttttctataattttttgagccttttgagatatttttcgaacgttaaatacgatttcagtattttctggaattattttaattctacaaattgattcctttcaaaaaataaaatatctttaaaccctggcaatagcaatatatatacggctcggaacatctcgccgaacccgttccaaatatcagatccgttttgcgagacaagattcgtagcgccatcagttcctcgtcgaagttcggggcagttctaacttcggcaagcaattactttcaagttgtgcgtcgttggcgaaatctgagagtgttgttgcgttcgtctcatcgaggacttcgtctttgtgctttcgattcgttgatccgacctctggttcaccgtcaatcgacggatttctcctggactccggcaagggccttcctcttcggtgagcaaccaccatgattttggtgccttgttcttcatttttcacggttttgtggtagcccctccccagtcgacccctcccttgtgccgcccgccccctttctctcctctctcccctctcactgcgctccttctctctccccctcccccctcccttgtgccatgtgtggaagagagatggagggaggtagaagaaggcatttttgctaaaaaaagagcatggggttacgtctaagtgcgcgtagatgtttgatttattagaatattcgatatcttttgcgttataaatccaattcactccgttcaagtcgctttagattcgtattaaagttgtatatatgttaaaaatactatttcaaaatgtcacatgttttaaataatttattaaatggttgtttggctaacgtttattaaattatcgttccattttatagttttcaacttgctcttttatagttttcaattagcgttccaattaaatcacctctttctaatttatagtttttaacttgtgcttttataaataaatctcatcatggttaatattaacttaaatacttttctattaataattgtttggtataaatgtgtcatctatttagtagttctcgcgtgtcatgtttgtctatgcgtcgttcgcgcatcgttcgcatgtcgcacacaacgttttcacgtcgcacgtttttcttgcgtcgtgaatccgcctcgcttagaatcactcatattaattaacttacttatttaactaggggctattagcgtagctgattaattaaaactacctaatagctctaatgtatatttgataaatgtcgattaatacaggtatgtcaaattaaatgttctagttcatattttataacgtaaacgcgataacttctcaatcaaatctttgatctcagcatttcttttttttctcgtgtgaccgtagaagcgagctctatttcatatcgcacgttttataatgtttttccttatatggtgtaacgttcctttttgtttcaagaatgttgaatgtatgttcgcactcgcctagataacgttccgttcgtggagtctgaggaagttgcaggagaagcccctgagcagcagctgtttggtgaaggcaagtgtcatctgacctattatgtcatatttactttataattcactttcccgcataccatgtgtaacctaaggattgactagctttctatttatcatgtccttgatcacctttttgggttgggctattataatcaattacatgctagtgctttactttaatcaacgaaacatgatgagaattactttatgatacgatgatttcacttctagttatgattatgaacttgtgacactttaggggccttgggctgtttcccgagtacctctccaaaaaggacttgttcattaagagaccacccaggaaaatagtgcaaaccatgaggttggaatggggacgcccttagctgattaattggaaaaatatgggtgtagtttgcttcgccgttgtgcagtaaatggggctaagggtgcggtgtcggggttcatccgatttggttttgttagtcaccctcttagggaggagtacagtgtttatacgattggcgaaacctaacgggcggctacacactaggagaatctttgtaaaggctacgtagagaaaccttgcctactcaccttgggagtgtttgagggtttgatcgacccgagtcgaaaagggatcatgacttgtgggtaaagtgtgcgacctctgcagagggttagaaactggtatatcagccatgctcacatttaagagaagccttgggatcctctttgattagagatactttagatacattaatgttgacggtttaatgatggtggctatacttatggtttctggtattttcctctctgaggaggtgcttttgggatatcaacttgggctttatggtaaaacttggcttctactaatgataaataactgaccaactaaaagaaactgctttgagcttaaaccccacatacggctagtctacctcagccaaataggacatttgttgagcatgttgatgtgtactcacccttccttcaacataaaacaccagtttctccacattgcaaccactactcgggagaagatgaaggctacgtgaaggagtttcaggagtttcaggacttcgaggagttctagactggattagcggcaaaccaccagtcggtagcctatgaaggccttatcttactgcgtttcgtttagcactttgatttctgtttaagttaatgactatgtgaatgtttcagacatcatgatgtaataaaagtaatacctatttacgctattatttaagcattgtgtgatgatgtccagttatgtaatctctgtgtgtgtgaatttctgatcctggcacgtacatgtttcgc

SEQ ID NO: 35688 - DNA, 1015 bp, Zea Mays
tatatataaacccgatatatagggtctcacttgtgtaccccaacgagaagagcggcggcgcgggcggacaaggagcaggcggaggaggagctgtgccaagccacaatgggtaagattccatccacctgcttctcgttttgcctgtactgacatagctgccgcggtggttctccgatttgatcaacgctgccgcagtcgtttccggtatctcgcgtgactcgatgcacaagcgccgggccaccggtggaaagcagaaggcctggaggaagaagcgaaagtatgagcttggtcgccagccagccaacaccaagttgtcaagcaataagacagtgaggagggtccgtgttcgtggaggtaatgtgaaatggagggctcttcgccttgatactggtaactactcatggggaagtgaagctgttacccgcaagacccgtatcctcgacgtggtctacaatgcatcaaacaatgagcttgtgaggacacaaacccttgtgaagagtgccattgtgcaagttgatgctgccccattcaagcagtggtacctcactcactatggagttgacattggtaggaagaagaaaacccctgctgcaaagaaggataatgctgagttctacatgaagaagctacagaggaagaagggcaagagcgctgtagcttagagcattctcatggattgtcttgcaccgaaatgtgtgtcctgatgagtacactttttttggttaatcgtctcaagttcagagcgttatgccatgttttcagacctgattagtacactgttttctaaaagcgattgagctctagtccaatgtattgataatatctgctgttgtcctattgcggtgatgttgatttgccctgttcgctagctgcaatagttcctatttgttgatgaatttgtttgaagcataaacgcagaacatgtcgtaaagaaaacatttttctgtaatattagcttgtaagatcgtcatggcatcactgcatatataggccctgtttgggagagcttcacttc

SEQ ID NO: 35689 - DNA, 2461 bp, Zea Mays
gcacccgctctcgtactcgtaggcaaggcaacttcgcaaaacggcaaaaaggcagccacgccttgttcatttttatttttttaatctcctcccgtcggcgaaattttacacgccagcaaaaccgccctgaggatgaaatagaaaaaaccccaaacaagccctaacgcgtcccccggaaccagaacaagtccagtctgtccagaaatacattagaaaaaagagccaaagaggagaacaccggccggcgaggtggacgaagcggcccgccgaggaaatggcgtcgatgcagagctggcgcaaggcctacggcgccatcaaggacaccaccaccgttagcatcgccaatctcaactccgacttcaaggatctggatgtggcgatcgtgaaggcgactaaccacgtggagtgcccgcctaaggagcgacacctgcgcagggttgttgcagcgacgtccatcaccaggcctcgggcagatgtcgcctactgcatccacgcgcttgcccgccgtcttgccaagacccgcaactggatcgttgctctaaaagcacttgtagtgatccatagacttcttcgcgagggtgatcctacatttcgagaagagcttctcaactttacacagaggggacggatcctgcaactttcaaactttaaggatgactccagtccaattgcttgggattgttctgcctgggtgcgcacatatggtttgtatttggaggaaaggttggaatgcttcagagttctgaaatatgatgtcgaagctgagcgcttgtccaaacaaggtcaaggtcctgaaaagggtcacagtagaacgagagagttggattcacaggatctgttagagcagctgccagcattgcagcagttactgtaccgacttgttggatgtcggcctgaaggagctgcaaataataactacttggtgcaatatgctcttgctttggtgctaaaagaaagctttaaaatttattgtgcaataaatgatggaatcataaacctcgttgataagttttttgagatgccaagacatgatgcacttaaagctcttgaaatctacagaagggctggccaacaggctgggaatctatctgatttctacgagaattgccggggattagaacttgctaggaattttcagtttcccactctgagggaggtgagggcttgtactctgtctagtcttcgctatgtgcactggattatgttatgacatcttttacatgagaaaattctcagccaccacaaacatttcttgctactatggaggactatgtgaaggaggctccacgcatggtcccagttcgagaacccctggaacttcctgagaggctgcttcttacatacaaacctgaagaatcagaggaaattcttgagcctgctcctgttgaagaggaaaaagtaccagttgaagaacctgttcttgtaccacctgttactgaagttgtttcacctcctcccaaggctgaggtgcccgatactggtgacttactgggcttagatgatacaaatcctgctgtatcagctatagaggaaagcaatgctcttgccttggctattgttccaacagatggcgcttcaacaactggtaacactgcatttcaagataaggggtttgatcctacaggatgggaacttgcccttgttactgcaccaagcaatacaacttcatctacttctgttgggtggtggactcgacaagctcattttggagagcctttatgatgatggggcctacaggcagaggcaacaacaacagctgtatggttcagcagctcctaatccattcatggcaaatgatcctttcgcgatgtcgaaccaagttgctcctccaccatcagttcaaatggctgccatgtctcagcagcatcagcaaatcccaacgatgatgcaaccaaatccctttggaccacctatgcatccacaggtgagcatggcccctgcaacaaacaatccctttctggatgctggcttcggggcattcccagcggcgaacaacggccatcagcaacacaacccatttggcagtgcccaacttctgtaggtcacttagtcacaagagcaaatttgtgccccagcagatgcgatttttgtgtgattatatcatgcattgtgctggacctttcttgcatgtgacgcgtgtattatgttatggcttcaccacacggagagctgtgcctatgtcgtgacccaactcttgttgtaaagaaattagtcacctgtgtaacatccaatatatgtcaataaacagtaggcagtgttattacatctataaacaaaagaacagtggtatgtaggaaattcttaatattgtttattccattgctttttatcttcttggaaagctgttccgttgttgtttgattgccactcttttgcatgcattgtgattgatcatcatgtgctcattcgaatattctaagccaataatggagcgttgctgtagctactacctttatatttt

SEQ ID NO: 35690 - DNA, 3197 bp, Zea Mays
agcccaggcacacacgactagaaccaggcaaccagctgcggagggaggaaacctagcggaacactgtgcaggtgacggcggcgcgctaccggtgacaggggatacggcggcatcgtcccctcctccatccccggcgcggcggcgccagcagccggcctgcaggcacacaagtggccacccttccaatggcggtggagaagtccagcagcggcacatcaactccctccaccacctccaccatggaccggtttcagaagattgtcctaagctgggattacctccgtctcatcgctgaatccaagggcggcaagcaggccaaggtgctgcagcatgtgaagaacacatacgtctcggtggctgagtaccttggtgtctttgagccactgctctttgaggaggtcaaggcacagatcatccagggacgcagtaacgacgaggaagaatctgggatggactggaggaggggagcagtggggtcgtgcacggagtctgaggggttccacaagctctctgtggcggtggaagacaattttcaggataatgtgtcagagaatgatctactgcttatctccaaggagaaatttgaggagggatcgacccctaatgcatatgcatttgcattagtggagcagcgaggtggtggcatacatatttcacttagaacttttgtggcaggtgaaattcaaaatctgaatgttgcaaagcctgtgaagtctacaaggctgcaacattttgcttccattattgcaagtcaaaacagcttgctgtggatactgaaggtctgcagcttgtctacaataatgcgggagttcacagctatgcattccgtagcttctctaccttttaaggatttgattctttcagctaccgaggcgcacaaggatggtgatgatcaaagtcgtgcgtggaatgtccctgagccacttatggattatctcaaagtgaatcttaatgattcccagctagaagcagttaatgcaggtctttcacgcagatcctttgttcttattcagggccctccaggaacaggaaagacacaaactattcttggactccttagtgccgttctccattctgctcctgcaagaatgcagatcaaaggaggatttgatgttctaaaacatgggccagaactggacattgatggcaagcgtgcacactggataaaggcatctccttggttacttggtgcaaatcctcgagatctgattatgcctgttgatggtgatgatggattttacccaacgggaaatgaactggttcttggactatttaccccttacatggaaaagaaaaaaatctttatagaaacccgaaatcgtaagttccaatcgcaagtatcgggctcatgtgttggtgtgtgctccatccaactcagcactcgatgagatcgtgttgcgtgttcttaagacaggaattcgagatgaaaataacaacacttataaccctaaaattgtgcgcattggagtgaaggcccttcattctgttaaagcagtttctatggattatcttatcgcacattagatggtgggagacgaggtgctggtgaatatgatcggattagagcttcaatactggacgaagcagccattgtattttctactctgagtttcagtggatcatcaatttttagcaggatgacccgtgcttttgatgttgttataattgatgaagctgcacaagcggtggaacctgcaactcttattcctttgatccatggctgcagacaaatttttcttgttggtgacccagttcagttgcctgcaactgtcatttcacagactgcacagaagttgggatatggaacgagcttgttcaaaagatttcaagctgccggttttccagtgcaaatgcttaaaatccaatatcgcatgcatccagagattagtacattcccttcaaaagaattttatgaaggggtactacaagatggggagggcctgagcaggaaacgtccatggcattcctacagctgcttcggaccattttgtttctttgacgttgatggcattgaatcccaaccatctggaagtggttcttgggtaaaccaggatgaagtggaattcataactctcctgtaccaccaattggcattgcgctatccagagctcaaatctagtcctgaagtgggtgttatatcaccatacaggcatcaagtaaaactattgaaggacagttttcgatcaacctttggggatcaatcaagggaattgatagatgtaagcacagttgatggattccagggacgtgaaaaagaaatagtcattttttcatgtgtaagatgcaataaggaacaaaagattggctttgtttctgattttcgacgaatgaatgttgccattacaagagcaaaatctgctgtactggttgtaggttctgcttcaacattgaagcaagataaacactggaacaaccttgttgagagtgccaaggagcgaaactgcttattcaagaggataacctgaagactatgaaggtggaaaggcgtcctccgccagagctgaatgctcgagtactggaagagatcaaccaagaagttgtaaggcaggagctcatgaatgtcgatgatgctgccgaccatgcagacgcaggggacgacgatgatgctgatatggatgctgacgatggaggcggcgatgattgattgtaagattcaaaggcttgggtggcctaggtagagcatttacgtagactactggtatacaagaggagtcggttttcttgggtagacgtagtgattgctgagggttgaaaaaaaatggaagcgatgattcttttctcttatctaattatggggagaagctgactatcgtagagtgcaccaccaaaattattttttgtgaaactgcagaggtgacaaatatgtcgcttatgtctgttttccacggttcacagttaaattgatggggctggagcctggaggttcaccagctccagtatttgtcttcacggattgagttgaggcagtgaagaacgtaagcatgtggataccagctagggaaaacaggcaacagcgttgatccaagcagcgttttacagttacatgcggaaaattgtgtgggttgtatcttacaaacacatattcatctcccaaacacggaaatctctgacttcgaaggagataaacttgtcgtttcaaccagaacgtctctgtgtagtacgaaaataacaaaaaccagctccgtggtgtcatttta

SEQ ID NO: 35691 - DNA, 1929 bp, Zea Mays
gtgatttaatgtcaccaggattcggtattttctttgtttggcactaaatgattggtaaagttagaactgacctaggacaactatctggaaaatcagctctatattgctcagatgcttcaattgcaaggtacctgatagcaaggaactgggacataaggaaggctactaaaatgctgaagaaaaccttaaaatggcgttcagaatataagccagatgaaatccgttgggtgagatgcaacctctctgtatttgcgggaagaaggtttgccttggtttattactttcctagatcctacccatgtgggaacctccagcacttggtttattacttgctttgaaggatgtgacaatgttttgatgaaggatgtgacaaagttttgatgaaggatatgacaatgtgtgattaggtttatgtcagcacaaagcttttcagcatgctttgtgaaacatctggtgcattatgacatctgatttgacgggttataatctggtagaaaatcttattttgcatttcttcatgtaggatgacatatctgatgaagcggtaactggaaaaacttaccgaactgattactttgacaagatcgggcggagtatccttgtcatgagacctggatgccagaataccaagaatgccaatgggcaagtcaagtacttggtgtactgtatggagaatgcaattctaaatctgccacatggtcaggatcagatggtttggctcattgattttgctggtttcaatttaggcaacttgtcaattcaggtgacaaagatgacggcagatgtcctacaaggccattatcctgaaaggttgggtgtggcaattctttttaacgctccaaagttttttgagcctttctggaagatggcaagcccccttcttgagaagaagaccagaaacaaggtcaaatttgtatactcagatagacctgacaccatgaagatcatggaagaccttttcaacatggatgagttagaatgtgcgtttggtggcaagaacccagctactttcaatataaatgattatgctgcgaggatgagagaagatgacaagaagatgccatcattttggagccctgagaattcagctcttgcttctgagccatatcagatgagcagccaaaaagccctaggaagcgtttcaggtgcgaagactgaagatgctggatctggaaagatggacgacatggagactgctcctgaaaagagtgaagaatcgggtactgaatctggagaggaggtacaaacacggactgaatcaagcacagttgagcagaaaaacttgcctggagaagataatgccccagcagataaaagtggcctttaatctgatctccgggtatcaccatgaaacataaatgtgaaacattgataggagctctaccacatttcactaaggtttgaacatgaaaggcgacgagaaactcttttaacacggcaaatcggcatgcctgacttgttttgtagtcggcacctatttctctgtcctcaagatcttatttggggaaccttttcatgacagaatgagatctaccagatggtaaagaactaataccatactgttaccctcagttttcatgacagaatatggtctggtgttcagtttctgatatgcccttgtattttcgctggaaaagaaaaatactattgtatctggagctgttgggttaataatatatcattgttcagtttgtattctgttcagtaaccaccattgactttcagttagtatagccccacttggtacaaagacaagtgttaggcttcaaaaacttgggccttttcgctacaaacgtttatgatctttgtaacctactctatcatcacgagtcaaaacttcagaagtcgtcatagaagctgtgtctcttgggtatcgcgggggagtcgcagtggatcctagcgtccagagtcgagtagccctttctgatc

SEQ ID NO: 35692 - DNA, 939 bp, Zea Mays
cctcgggccctgctcgcggtacgccgccgtgccgtagccatggctgaggcccttccccgacgagctccctaggctggcgcgcgagcctggcctcgtcctcggcgcggccagccggtggctcacccagcgcagcggccagcgcgcgcagcaacaggcacggcttgcccggcgtggcgaccagcagccccggcgagccgccgcgcaccgcgaccagccgtccgtccatcagcgccctcgcccggcgccccaacctggcagccgcggcgtggcccggctagcggccagacccaactccctctaccccgcggcggcctggctagctggccggtgaggcctcagctggcccctccttccctcttccccatgccagttttcctgtccaaactccaaggaagaagaaccgtcgtgcgttctgcgttgtgcggttacaacagagaagaagctagccacatgtgatcctaagcttgggatcctctatggctgtgtttcgtgtgaccatagattatgatccgttttcgagcttcgaggaatcgacggtcaagcttcggtgaccaagtgacctggttcttcgagttctgcaaggttgaagaccctgagcatctatttggtgaaggcaagtgtcctctgacccattatgtcctattcacttataattcactatcccgcattacttaattgaaacctaaggatttactagctttctattcaccttgtccttgatttaccttttgggttactatggttagctacatgctagcgctttactttaatcaatgaacattatgagatacaatgatgatactatgattttattctggatatgatgatgtacttgtggcatttaggggactcgagcagtttctcgagtacctctccataaggacctgttcgttgagagaccacccgggataacagtgcaaccatgagggtggaatgggg

SEQ ID NO: 35693 - DNA, 3086 bp, Zea Mays
ggaaattgttggattaggtcttttatagcaccagatgtggaaccatgccaggtgcatcttcagcaagaagaaccagataaaatccgttgacgatgttgaagggatagatgcacttagatgggatgatcaagagaagatacgaaactacgttgggagtgcctcagctggtacaagttctacagctgctcctcctgagaaatgtacaattgagattgctccatctgcccgtacttcatgtagacgatgcagtgaaaagattacaaaaggatcggtccgtctttcagctaagcttgagagtgaaggtcccaagggtataccatggtatcatgccaactgtttctttgaggtatccccgtctgcaactgttgagaagttctcaggctgggatactttgtccgatgaggataagagaaccatgctcgatcttgttaaaaaagatgttggcaacaatgaacaaaataagggttccaagcgcaagaaaagtgaaaatgatattgatagctacaaatccgccaggttagatgaaagtacatctgaaggtacagtgcgaaacaaagggcaacttgtagacccacgtggttccaatactagttcagctgatatccaactaaagcttaaggagcaaagtgacacactttggaagttaaaggatggacttaagactcatgtatcggctgctgaattaagggatatgcttgaggctaatgggcaggatacatcaggaccagaaaggcacctattggatcgctgtgcggatggaatgctatttggagcgctgggtccttgcccagtctgtgctaatggcatgtactattataatggtcagtaccaatgcagtggtaatgtgtcagagtggtccaagtgtacatactctgccacagaacctgtccgcgttaagaagaagtggcaaattccacatggaacaaagaatgattaccttatgaagtggttcaaatctcaaaaggttaagaaaccagagagggttcttccaccaatgtcacctgagaaatctggaagtaaagcaactcagagaacatcattgctgtcttctaaagggttggataaattaaggttttctgttgtaggacaatcaaaagaagcagcaaatgagtggattgagaagctcaaacttgctggtgccaacttctatgccagggttgtcaaagatattgattgtttaattgcatgtggtgagctcgacaatgaaaatgctgaagtcaggaaagcaaggaggctgaagataccaattgtaagggagggttacattggagaatgtgttaaaaagaacaaaatgctgccatttgatttgtataaactagagaatgccttagagtcctcaaaaggcagtactgtcactgttaaagttaagggccgaagtgctgttcatgagtcctctggtttgcaagatactgctcacattcttgaagatgggaaaagcatatacaatgcaaccttaaacatgtctgacctggcactaggtgtgaacagctactatgtactccagatcattgaacaggatgatgggtctgagtgctacgtatttcgtaagtggggacgggttgggagtgagaaaattggagggcaaaaactggaggagatgtcaaaaactgaggcaatcaaggaattcaaaagattatttcttgagaagactggaaactcatgggaagcttgggaatgtaaaaccaattttcggaagcagcctgggagattttacccacttgatgttgattatggtgttaagaaagcaccaaaacggaaagatatcagtgaaatgaaaagttctcttgctcctcaattgctagaactcatgaagatgcttttcaatgtggagacatatagagctgctatgatggaatttgaaattaatatgtcagaaatgcctcttgggaagctaagcaaggaaaatattgagaaaggatttgaagcattaactgagatacagaatttattgaaggacaccgctgatcaagcactggctgttagagaaagcttaattgttgctgcgagcaatcgctttttcactcttatcccttctattcatcctcatattatacgggatgaggatgatttgatgatcaaagcgaaaatgcttgaagctctgcaggatattgaaattgcttcaaagatagttggcttcgatagcgacagtgatgaatctcttgatgataaatatatgaaacttcactgtgacatcaccccgctggctcacgatagtgaagattacaagttaattgagcagtatctcctcaacacacatgctcctactcacaaggactggtcgctggaactggaggaagttttttcacttgatcgagatggagaacttaataagtactcaagatataaaaataatctgcataacaagatgctattatggcacggttcaaggttgacgaattttgtgggaattcttagtcaagggctaagaattgcacctcctgaggcacctgttactggctatatgttcggcaaaggcctctactttgcagatctagtaagcaagagcgcacaatactgttatgtggataggaataatcctgtaggtttgatgcttctttctgaggttgctttaggagacatgtatgaactaaagaaagccacgtccatggacaaacctccaagagggaagcattcgaccaagggattaggcaaaaccgtgccactggagtcagagtttgtgaagtggagggatgatgtcgtagttccctgcggcaagccggtgccatcatcaattaggagctctgaactcatgtacaatgagtacatcgtctacaacacatcccaggtgaagatgcagttcttgctgaaggtgcgtttccatcacaagaggtagctgggagactaggcaagtagagttggaaggtagagaagcagagttaggcgatgcctcttttggtattattagtaagcctggcatgtatttatgggtgctcgcgcttgatccattttggtaagtgttgcttgggcatcagcgcgaatagcaccaatcacacacttttacctaatgacgttttactgtataaatctaccaggagtgagtaatttatatattagcgggactggacctcttggtcgcgtgctatttt

SEQ ID NO: 35694 - DNA, 2982 bp, Zea Mays
cgtctctctctcctccaagaccatgcccaaatcaccacgatcctaagccagcccagaccgctctcaaaagccgaatttctcaagcaacagctcgttccaatcgcttcgaaacctaaatccactgctcaaatcatacacacattgaacgacacctcccaccaaacacacacacacacacaaatttcggaaagagaactgccagcgcagatcgccatccgaccacgaggctaccaaaatgcagcgcccagactcgtgccagccagccagccatcactcctgctccatctccatggatgcacacaccaccgcggccggccaccatcagcgaccacagatagaatcgagagggcaaccgcacgagcaccagctctgctctcacggcggagacgacgacgacgacttccatgtcacgacccacccccctatccgatcccaaatcgcacgaggaaacttcgggaggaaaaaaaaaacgcacctccctggccacccgggcgcgttcccttgtctatcccccctgtgcttggaagcccatgagagcacaccaagaacaagcacaggagacgagagagaaagagagagagagagataggaaaaaaaaatccccaaaatccaaggccgatttatcttcgccaacatctggccagctccatccgaggccgttcccgctgcctccgcgaggtctcgggagggggagaggagctccccgactgaccgaattcgcgaggcaggcaggcacgcaggcttagggtttgccaaggtgctccggcgccctgactcgccggggcgatctagcggccggttcctcggttccggatgatcttcaagcggagtcagcggtcggagatccttgcgccgcggcgctgcaatgccgcggacagcggaggcgaggacgaggggggaggcggcccccgcccgaggaagaggcggaggggcgacgagttcttccccgtcgacctgctcggcgacgtcccagcctccagcatcccgtacgctgccttcgggctccggtggagcgaggcgcccgaggcaccgccagaggccgcgcaaccgccgcccgcggcgaggccgccggtggtgcgctcgtcgcggggccgcaccctggtgctgccctctaggttcaatgactcggtacttaccgacccctggaagaaggagaagccggccaggccgccgcctcctgtcaagacagagcacttggcgcgcagaaacgagctgctgcacaagaaaggtgcaaattttgacagcagcgttgcattgtccgaggtagatgacgacgatgaggaggaggccatggtggaacgttaccgagcacgccgcagtttcggtgcctccaggaagcacttagcctcttggagcacgcttacctcggtacatgatgaaccatacagcaatcaccacaggaaggaagtaaagcttaggcattactatgaggaagacgaggaggaggaagaggagaaagaagatatttttcactgtaccgaagaattggtgtatggggacattgtgtgggcaaagcttggcaaacgccagccaatgtggccaggagtggtggtcgacccaactcagcaggccgctgccgatgcaatgccaccacaacctcgcggtgtcgctgtgctttgtgtgatgctatttggctggcgcacagagttcagtggcgagaagaagtacgtgtgggtgaggcaggggttgatatttccattttcagactacatgaaccgatttcaagggcagacagaactaagcagttgcaaacctgctgatttccggagggcagtagaagaggcctttttggctgatcagggattctcagaagtagtggtacattgcagcaccaagggccaatctgtggtgtgtcattctttcccagatgatttacatgaagtgactggttcaaatgaattggagtaccagccacagattaagcagtgcagaagagtgctgcagtgtgagagttgtggaaactgctttcccaacaaggatacaaacaagatggtgtatgtgatggagcaacttgcttgcagactttgtgccaggatcttagcattaaaaaagtactgtgggatttgtttaaaaaatttgcaacataaatatggcggaagaagggtttgctgtcatggctgtgaaagttgggttcatgcagaatgcgatgaaaactgcagcaacctcaaggatctacaagacaagaaatatcactgtccttactgtagagttaaaatgaattcaactctccccgggaagaacacaaaaatttctgatgtgagaaaagatagttctgcacagaaaggaagcaagcctgacaaagttgcactggtctgttttgacatggaaggaacatacgaaccagatctcgaattaatttcttgccattgtggcccttgcaagggacagaaatttttgttcaatgaatgggagcggcatgctggctgtagaagtaaaaattggagatccagtattaagcttaagggctcgttgatgccatttgggaaatggatagatcgacatcagccaggcgtgtgccctactaatcctccaaaacgctcatctcagaaaatgaagaaacagaagttaattgatttactgaatgacccatatgatcctgtaaatgtaaaatggacgacagaaagatgtgcagtctgtagatgggttgaagattgggattacaacaaaattgtgatttgtaatagatgtcagatagcagttcatcaggaatgttatggtgtgaggggtaagcaagactttacttcatgggtttgtcgggcttgtgaaaaacctgagcaaaagagggagtgctgtctttgccctgtaaaaggtggtgctttgaagccaacaaatgttgataacttgtgggttcacgtgacatgtgcatggtttcagtcacaggttgcttttgctagtgatgagctcatggaacctgctattgggatattgaacattcaacctttgttatttatgaagtctatgctctatgctcatctatctctg

SEQ ID NO: 35695 - DNA, 2513 bp, Zea Mays
gaagcgtcgcagatgggccgccttggttgggctctctcttttcccaggccacgagcccacccgtccgctgaatggcaaacccaccacggccaccatctcgctcgccaccgcttccttcccgatgccgtcgtcgacgatccgaagcatctccatcaccgtctccgacgacgacggtgctgcggcggcaccgtcacggcggccgcgcgctggaagacggaaggcggtggcgcgtagcttggggcagcgggcggtgcggctggtggcgcggtggtggcccgttctcctgctcctcccggccgtcgcgctcctcctcttcgaggcgtcgcggctccgcgcctcatccccgggcccctccccaccggtctccagcctcggacggctcgacccgaccacacgtctcgtccatggcgtgcgcgagccttgcttgaagctccttagccccaaaagtttggcaaatgtggtgttcccggagggtacaagactcgattctgtggtgagcagaatcacgtacaaaactgatgacgatgactatgacacataccactccgaagcaaactctacatatttactgcaacatgcggaagcaacaaggttcgacctgtttacaggatttcagacacttgctgaaagagaagatagcttcaaggtgaatgagactgttagtgtgcactgtggtttctacagcgacaatggtggcttcaaaatttctgaggaggacaggagatacatgagagcctgtaaagttgttgtgtctacctgtgcatttggtggtggggatgatctatatcaacctattggaatggccaattcttctattggcagggtttgctatgttgctttctgggatgaagtgacactagcagctcaggaagctgaaggaaaggtaattggtgatgatagcatgataggaaggtggcggatcattgttgtcaggagcctcccttttgtagatcaacgattaaatgggaagataccaaagatgttgactcatcgccttttcacagaggcaaggtactctatatgggttgactctaaataccaattacgaagagatcctataggaatgcttgaagctcttctttggaggacaaactctacatttgctatctctgaacatggagcacggagtaacatatatgatgaggggaaagctattgttcaaaagcacaaggctacccctgaagaggtagaggtacaattgactcggtatcgtcaagatggaatgccggacacaaaaagattgcacggactgaaagctctagccgaagcctctgttattgtgagggaactcacccctgcaacgaaccatttcatgtgtgcttggtttaatgaagtggttcgcttcacatctcgtgatcagctcagttttccatacgttttgtggcggctaaacatgcatggattgagcatgtttcctgtatgcactcgcagggatcttgtgaatagtttgggtcacacaaggaaagtaaaacctcttacacagacaaattcagggtcttctactacttcgtaaccttcctcccagttcatttgctggacatatggaatacaacctggtatcctaaggctgcagatcatgtaactaccgagaagacatggtatgttgttgatgcaacagacaagatcctaggcaggctagcatccaccattgcagtacatatcaggggaaagaatgaacccacttacactcctagtgtagacatgggagcttttgttattgtggtcaatgcagataaggttgctgtttctggtaaaaagcggtcacaaaagctttataggaggcactccggaaggcctggagggatgaaagaagaaacttttgaccaacttcagaaaagaattccagagagaatcattgaacatgcggttcgtggcatgctccccaagggaaggctgggaagaagattatttacccacctcaaggtatacaaagggacagaacatccgcacgaggctcaaaaacctgtcccactcccgatcagggataaaagaatacaaaaaactggatagagaattcatcgactgaaaaggatgcagtggcgaattcctccccagaaggttttgccctttgtttggaatgctatcctcataaccatgcctctgatcggggaggggggggggggagtataaatcctctttgtaattttgatgtttaccaatgcatgaaattcagtcaaatttctgtcaatgagtagtcatgtaatatggtacggtttaaatcaacctaaaatctttattttccagttgaagtttgtaattttgacctcgtatggtatgaagtggcagattgtttcaatgttcggcctgccatctggatatacgaaattgatcgacagttttcataaccaattttcttgggtggcgaggtgtgatattttcttctgagtttgtagaatagacatgtgcttcctcatgtgacctatatcttttggtaaaattgttgtggatgtaactgaatgctggaatgcgtgggaataaacatggaaacataaaataaaataccacacatacag

SEQ ID NO: 35696 - DNA, 2439 bp, Zea Mays
aaaaacttaaaatttcaggctcgcctaatagagaggactccatccatgagtgacctgaatgaagtgatatttgggcaggaacatctgtctcgagatgatctgtcttttatcttctccctcaaggtatcagacaatgcgccactatatggtgtttgtctgcatgttcaggaaatagttcaaaaggcacctggtatactaggtgctgtctcacccttaaaccctacttcctataagcccagtcgtttcttggtttctgcaccacgttgttactgtctacttacaaaggtacctttttttgagctacactatgagatgctaaacagcattattgcacaggagaggcttgacagaataacacagtttgctagtgaaattactctagctgagccagttcctcgtcctattaaagaacaagatggagtagacggtgattttgattcctcaaatgggattccatatattgactggacagaatatgctgtacctgtcaacagtatatcaggtctcatttcttcatccagtattccatcagaaagggacatgtcttcatatttgttcaggagctgggagcctaattcttctcaaagtatatctggtagtgagatttcagattctagttatgtaagagaagttgaggaggcaaggcatagtttccagcattatgaagattgtatagtagagaacttggaaccacgttgtgatagctttgggagagcaagttacatgtatgataatgggcatacttccccagatcttctgtccatgcattctcctgcctctagcagattagagcgtgcacaaagtgtggagtctttagaaagtcaaaggtgcaacatcagatgaagaatatgaagtaaatgtgaagcatgaagtgattgttgatgatgaaaaagttgtaggatgggctaaggcacacaataacgaacctctacagattgtgtgtggttaccatgctcttcatctgccacctcgtggtggtgaacttgtattccgcccccttgaacatctccaacctgtgaaatactcccggcctggattacccttgttgggttttggagaggagattttggacaatgctttgactagggcagaaaaaaataagatcaatttacatttggtggctgcagaagaagctcttgcattgtcgatatggactatggctacagtttgtcgttctctgtctttggaaagtgtgctaggcttattcactggagttttgctggagaagcaaattgtggtaatatgcccaaatctgggtgttctgtcagcaattcttttgtctattataccgatgataaggccgttccagtggcaaagtctgttgcttccgattcttccgaggaaattgattgattttcttgatgcccctgtacctttcattgctggtgtacaacataaaccccctgatatcaagatgaaaggatctagtcttgtcagggtcaatgtccagaaagatcaggtccaaggcatgttcactgcctcgacttccacattacaaggagctcgtttctaatctcggtccacttcatgccagactatcgtgtgagaattctttggctaagagacatcccatctataaatgcaatgaagttcaggctgatgtagcttggaagttcttaaatataatgagaacctacttggaatcactttgctctgacctgcgctttcataccattacaaatgtacagtcaaataatgacagggtttctttgcttctgaaagacagtttcattgattcgttcccctcaaatgatagaccatttataaagctctttgtggagacgcagatgttttctgttctatcagattctcgactgtccagtttcgaaaatgaacggacataaaggcattgttccagtggagatcaaacacagtgatactctctgctttggttttggcgtctgcttcctggtgctacctttacatgtcatttccaatgcgcaggggattgggaagataaaaacaaggcacgtcgcgtggagtgcggaggatttcgattttgccgaagccacatcactaattagaagtgttctgaaaagtatctaggctcgtctgcaatgtaagaagaatacgacggactctcaggttataggaaatagatgcaacccgatcttctaaatgggaccgagctacatgtggcgcacaaggaaaacaaatgatgatgaatatagttgggtttctgcttgcgatcttgttttgctatgtaacactagtgtgtagtgacttagctatatttcatatagggaaaagaagaaccctgtatataggtgaagttattcattggagttacgcgtccccggtttgatcatgtaaatcatgacctggtgcgcaagaaaccggcatcagttttgaatagggaacgttttgcaatttagtgcatttaaggccatggagtggaacaacttcgacgtatgttcgattggacctgctatatcatca

SEQ ID NO: 35697 - DNA, 4109 bp, Zea Mays
cagagcttcggaccaaaaaaacaccaaaaaggcggcacccgggcgcctaggaggaagacgacgacgaccctccaaagcaagcacacgagcttccctccctcctcccccacgagctcgtgcttgcttccttccccaaaaccctagtaccccgccccaagtccggctgtgctccccgtctccaccgccgcggcgcggcaatgtcgtcgtcgaggccgacgcgttccagtatatccccattccgatcccgccgctcggctccggcggtgtcggcagcgggacctcctccgccggcgaggacctcatctgggggtcgcccgtccaccccctcttctactgcctctgggcgacccaccaccccctcgtcctccggtggtcgccccgctaccccgtccgccgcgttcgcgcgtcccgccaccccttcgtcgtcatcggcgcggcccgccacgccgtcctctaccgcctccgcgcggcccaccacgccctcgtcgatctcctcgcgcgttgcggtgagggcgccgctcgtggacgcggccaatgccaaggagaacatcatggtcaccgtccgcttccggcccctcagtcctagagagatcaacaagggggacgaggtggcgtggtacgcggatggtgacaacatggtgcgcaacgagtataacctcagcatcgcctatgctttcgataaagtgtttggccctgctactacaactcgccatgtatatgatattgctgctcagcatattgtgagtggtgccatgcaaggaatcaatggaactgtttttgcatatggagtaactagcagtgggaaaactcacaccatgcatggagaacaaaagtcacctggaatcattccattggcagtaaaggatgtattcagcattattcaagatacacctggacgagagtttcttctgcgggtttcgtatcttgaaatttacaatgaggttatcaatgatttactagatccaacagggcagaatctcagaattcgagaagatgcacagggaacttatgtggaagggatcaaagaagaggttgttttatcacctgcacatgcgctctctctaatagcatctggagaagagcacaggcatgttggatcaaacaacttcaatcttgtcagcagtaggagtcacactatcttcacgttgacaatcgagagcagcccctctggtgaaaatgaagcagaagaagtcaagttgtctcagttgaacttgattgatcttgctgggtctgagagttccaaaactgaaacaactggtttacggcgcaaagaaggttcatacataaacaagagtttgctcacccttggaactgttattgctaaacttacagatggtaaggccactcatattccttatagagactcaaagctcacacgcttacttcagtcttctttgagtggacacggacgcatatcactcatttgcacagttacacctgcatccagcaacagtgaggagacacataacacattaaaatttgcccacaggagcaagcatattgagataaaagcttcccaaaacaagataatagatgagaagtccttaataaagaagtatcaaaaggagatatccagcctgaaagaagagctacagcaactcaggcgtggtatgatgggaaatggtggtattctccctacggatcaagaggatcttgttaatttaaaacttcagcttgaagctgggcaagttaaacttcaatcgaggctagaacaggaagaggaagcaaaagcagcattgatgggtaggattcagaggctaacaaaattaatattggtatcaaccaaaagttcgatatcctcaaatgtttctggaaagactaacttccgccgacggcattcatttggagaagatgagggaaacttgatctgaacaatccagaggagtcagccaggtttggcagaaggaaccacaaacgtggaatgcttggctggtttaaactaaagaagtccgaccagttatcagggctatcatccagtgtagacggtgatagcactgctagcgtctcaccttcgtgctctaaatcatcacaacaaaaacacttgctgcttgacctgaaggatggtcgaaggaaatctatgactaggaaaggagatgacccatcacttgctgattcttttcttgaaaggactcaagccggtgatttatttagtgctgcgcccagagtacggcaccctctgccgagtggaacaaccatcgtggatcaaatagatcttctacaagagcaggtcaaaatgctggctggggatgttgcactttgtacaagctcactcaaaagattgacagagcaagcagccaacaaccctgataatttgcaaattcaggagcaaattgtgaggttgaaagatgaaatcgcagaaaagaaatcacatatacatatgctagagcagcggatggtacaatcactggaaactacagaaggcccagcaattaagacagagttatcccagaccttttcaaagttgagcacgcagctgagtgagaagacatttgaactggagattatgtctgcggataataggattcttcaagaccagctacaagcaaaggtaacagaaaatgcagaactccaagaaacagttgcacacttgaggcaagaaatcagtaatttatcgaaggctgcaaaaagcgaggatagttttgctagcgtgcagtctagtgaaccatcaacagcaagcactgatactagggatcaaacaaatgaaatctcaaaccgtgcaaatatgtcctctagaacaacggacttaaatgagtcaggatttatatctcaagtgctcaaacaggcttcagaaattgaaagtttgaaacaagaaaatctgaggttggtggaagagaaggatggactggaaattcatagtcaaaagttggcggaggaatcatcctatgctaaagaattggcttctgctgctgcaattgaacttaagaatttggcagaagaagtcactaggctttcttatgaaaacgcaaagctgaatgcagacttagctgcggcaagagagctaaatgcatcgatgtcaagaagtaacatccaccctgacccaaagcgtcgtgatcatgagagcggaattttagttgaggagttgcagaaagagttggttgctagttgtcaaagggaggccgtattagaggacacactatctcaaaaggaccgaagagagagtgagcttctaaagattattgatgatgcaaaatgccgtgagcatgagttgaaaaatgaactggcaagcatgggggcccttctttcgaagataaagaaagaaaactctcaacaggatgtatttgaatttaaagcaaagcaaaacggctttcactcatccaagactgatagtggtagactggtaagtgaaatgcaagcatcggataatgggtgctgggatggcctcagtacttttgaagaagcaagagctgcatacaattttgaaagaatgcgctgcaaggaattggaaagcatcgtgtccaaactaaagggtgaggacctcaggggcctagatgttaaagttcttgaagaactacaaaacttccatgtagaagcactgtcaaggatctgccaagaaaagatggcaagtcaggcgctatagcaaaaacctttcctgagacgagtagccgctttcatgcaggccagagcttatttctcagatgtcccttcaacttcatgcccatctctctgaagttccactcacaatttcacatagttgctgctactgcaaccgggacaaccttgattagtccgcctttggacactgattcctgcgtttaaccgacagaaaacgaagcaaaatgcggttagatagcaggcgctaatggtcactgagtagttagcatgcagatactcccctcctgtacagctttttattaaagatagtagcagtggtattgtaggagtacccggattgtatttatactggtaatatatgagccggtaaaacccgaaggtggtgtttctgttatacctggaccgtgctctgcccttcaaaaactgtagtaaacccgaacggacgctgatgtagctttggcaaacttgctgttgatgtgatgcatgactgccgtgcacctggtgccgtgcccgacgatggttgactccacccaatcagccaagagcacggcacggca

SEQ ID NO: 35698 - DNA, 1493 bp, Zea Mays
acgtcgaccagtacgtcgaaaaggaacacgtcgcccccatttcccacccgctttctccccctttggcctccccccctctctctctctcatctcctgccgataagaagcttcgccgccgtctcctctttctccgtcctagcaaaatcctccccgtattgagagccaaagaagaaaaaaaaaaaaggcaggaggccggcgaactacgcgaggaaaaattttctttcccgggaggctcgggagtcggacacgccacacgctttggtcaaaatcgtttccggttgttagcgcggctgctgctgccgctgctgtcgggggcgagcaggaaggggagcgaacgagcttgggcagctcaagaagaggggacgggggagggagcctgtggaaggcacctgagtacgcgtgaaggagcccgcgcgagagtaggggggaaaccaaatcgagagacatggactcggagcactggatctcgcgcctggccgccgccaagcgttactacgcggcgcagctcggccgcgtcgacgatgtgcccgggatggggacggaagaggtggagatggaggtggaggacgacggggacatggagatggagttggagatggcgctggagctcggggacgcgacgtggccggaggtcgcctgcccctactgctacgaggaccatgacgtcgcatccctctgcatccacctcgaggaggaccacccctacgagccccacgccgcgccctgccccatttgctcccaaaggattacaagggatatgcttaaccatatcaccatgcaacatggttacttgttcaaggctcttctagggggtggtcatggccacagatcaaataacgcagtgaccacaaacatttccagtgatcctcttctttcatcgtttggcctgagcttctcagcatctgatgcaccagaaccatcaaaatcagcatcttctattccagacggtaccgcaatacgtaaggagacaccagttcagccttgggaatcaagtattgattcatctctcacgagcgaggaaagggagcaaaagcggaaacaggccaccgggagggcaacctttgtgcaaggcctagtgatgtctactctattcggagattgatcgctcaagcagccctaggttcttgcacttgctagatcggctctttctcctgcctggtccgtcgtcagatagtgctccacccggttcggactctgatggcagggaaaattcgccccaggaaacttagccgcgttcacctttttttttttcagaaaagtgcgccgttgattctagcatgatgcagcttgatttaagctagctgttgctgtacctgtacctttgtttttatcaatttatcggccagcaattcttatctgtaactcactggtacatcgtgttcgttaccaacatacatggtagctgtggcatctgcttacacaatgcaagaaaagacttgaaaattgctgctttcgtgaaggccccaaaaccacgcttgtccacgtgaacgcga

SEQ ID NO: 35699 - DNA, 2633 bp, Zea Mays
cctggcccctgtgctccccttgccaccgaacgagagccaaaagcctcccgccccacgacgcgcccgccccggcggcgacgccccggaggacgtttcccgcagcgaccggcgaccaagccttgattgcctccgccccatggctacccgggcgcgggcgtagccgccgcctcggccgcagcaggctcggtccgcccccctcggcgatttctgttccagtcgcatcgcgcgacagctcgtcgtccgattcggatccccgccaccgcggcggaacgaggcgtctccggtccccgagggtattcggggaatttgagactgataagtcgggatcctgtcgataatgcggggctacgtgtacgagaccaatgaagtggaagatgagtacggagatgagtactatgatcaagatgagtatgaggaggaaggttcgggtgctggggatgggtatgctgaggaggaagagcctacagagggacaaaaggagatccttgaattgagagaaagattaaaagagcagattaggcgaaaggcaaaggctgctgctgcctgcacagctggtcgatcatcttcttcacaaatacctcaagccagggacaaatttggctctttttttgggccatccaagccggtgatttctcgtcgagtgatagaagaaagaaaatcattgaaagaactgcatagcacggttgcaagggagccaaggccttctggagtacataaggatattccatcgtcctctaaagtgcaaagtagagtaaatggacatcagcataaacaaaagattgttaatcagttgcaattttcaggtaaagaagaaggctgaggcacttaaggataaccgggattattcatttctactctcggatgatgctgacctgtcatcctctccaaaggagaaacctgctgctagatcttccttgactcaaagggctgatcgtgaggtgacacaatcaacagtaaagaggaaggcaccaacaagtcaacctgcacgcttgtcaaatggatatggacctaagaacacaatgtcaactcaaaggcatgctgaaggtaaggtaaattccatgagaagggaggatttctcgaatacagaaagggttgtttcacgtgacaatgagaggatgtatgaaagggttgtttcacgtgacaatgagaggatgcatagtattgcaagaaatggatccaaccaggcaagtactagcaaaaccacaatccaaaagcatccaagcaggggtcccattgctaataagcaaccgtccaaggattcgaatgatgcaactctgaggaagagcagtgtagcctcaaagcaccatcccttagagattgacagaccaaaatcctcgcaaagtcagaggatgcagtcagctggtcagagaccacagcattcttcccatggtcagacgccacatcaatccatgcagcataggacgcagcagtcattgcagagtcggaggccacaacaaatgacacagggtcagaagccacaacagtctttgcagagtcaaaggactcaacagtccttgcagaatcgaaggccacagcagtcctcacatattcagaaatcgcaatcctcacaagcacacagaccacagtcattaagtaacaggtctcaggctttacaaggacaaaggcctctttcttcacagggtcaatatccggagcaaagaagagtacatgcaagtgacagagtcaaacaagctgaaaggcagattcggcctccttccaagtccatgccatcacggccagtctcttccaatggaattcgtgatgatcatgcaaaaaggaagcaagtggcaaaaagaagatttgatgaagatgatgaagaccccttagcaatgatcagaaatatgtttgggtatgatcctagtagatatgcaggcagagatgaagatgtcagtgacatggaagccgattttgctactatagaaatggaagagaaaaggagcgcgaggattgctaggcaggaggatgaagaacaacttcgcttgattgaggaagaagagagacgcgagcaggagagaaagaggcgaaagatggcacgaggccgatagtcgaatacactcctatttggatgttataatatactaccttcgttctcgaatatttgtcgtccgctggttcatttttgaactaaaccgtgacaaataaaaaagaacgcaggagtatctggcaggcctgattgcctgaatacgaagccccatggcggatcagacaggcacttctcttgcagtcctgtttacccttaccacgatgattatctggaggcaaatcaagggaaaacgacaggtgaccaacactgggcacgtgtaacagcagactgtagttgtagtggtttagttctcgaagctgacatggactatatttaagttctcgtcagattgtttggatagcagaaggtttccattgttgcagcgcctcaccagattgtttcttcatatgatatactgattctttcagtcaagcctatataaggatgcgtaatacaagtgcccctcttgtatatctttttcgggtgtaatagtgttgtaataaacgatgttcgaattttcggatatgattttgagctttgtcaggcgatcactgcaccacggtccacagagatgcgcttctggccgggagccaatcgaaggaagcgggaa

SEQ ID NO: 35700 - DNA, 856 bp, Zea Mays
tgcgtaaccagttgtccctgtataatactctagctgtgccccattggctaaaacctgtttgagtcttctgtatgaatgagtttattcgcgcctataggctataattgagaggccaactacccggggtcgcttgagcctgggtgctctgctagcaggttgttttctcctaatacatctactaaagcaacaccacgtacagcacactgcacactgtctatcatggtaaccagtgttctcttgcctaggaggctaggataagaaaaaaagaagatcgatttcttaaaaatgtatctgttcaaccacaacatctgaagtaagaagtaggaactgttctcatactgcatttacccggatttaaaatggtaataaagtactgcagccattgtttggcccaacatggaacgaaccagaatcgcacagcacaacccgactttcagagagtttgccagaaaggagcggaacaaacatgggctcaggattcaggaggtttaattcaactgaacccctagcaaatttcgaaaataaaccgggttcgggcttccctctactccacgtacatgcaaatttcacagtaaactgaactgctaatccatccaggaaagaaaggttgagtcgttgagagaagctcgtccaagtagggtagggtttccttaccaagcgaagcgtcttatgctcctgcggggagggctcgatgttcgtgtgctcgtgtgaggagaccctgcgacgaggagacgggagtcaactgatcggtggcctcggttgtcgcttcggcggtcggccagcaggcagcaccgaagcggggagagaaatgaagcggccaaacggatgataattcgtcagagctggaggggccaag

SEQ ID NO: 35701 - DNA, 1367 bp, Zea Mays
tgcctggtgcacacatccccgtgtgagacgtgcttcaccacggacccaaaggtctggcatgaagatgaagcaaacagcccactaggcactagcaactttagcccgccaaatgcccatcacggtctcacccgcatagggccttccaaccggtcgaacatctcccgtcataatgggctccacggcccatcacccccatgccccgtctccaaggaaagcgaaccattctgatcctgcaacccgtggcgccgccgccgccgcatcgcattgcccggacgccaaaacctagctcctgaactctcctcggctcctcgcccacctctcgctagccgttcccgctctgcagtctccgtggccggacgccgcggcgacatggcatcgacctgtttccgcgccgccgcccgcgtggcctccgccgccggccgctcggcggcggccacccgatcggctccctccgcggcccgtgccgccgccgccgcccaccgcgcctcgtccttctccaggatgccggtggagctcgggtgctgcgcgggattgtcgctgctgccgctgcacagcgcggtggcggcggccaggctgacgtcgcggctgagcacggcgtcgagctgccgtgctctctctcagggtatcctctgttgcacctatcccgggctttaacatcagatgggtctatccgttcgaaggtgataaatcgctggaagacttgctcatgtcatgctgttggactcaaatcatttctatagattagtcatctaaatgaacatctggagcactacacttcatcaccccttcgacaatcgtggctatcttagatttttttcccccaaggttttgagttcatgccttgtgagatatcatttgatgaaaatatgcaaggacggtttgccgacgtctgggctgtattcagccagtacaattctgcgttaaaaggtggttgatgatacctgaggattgtcattttgcgttaaaaggtggttgatgattatgttactatatgtattgcgtatgctttcttttgtttcaaatttttgaataaggtgacccgaacctgaacgtggctcgatctctagtgaacgctttgagcctccgggtttgctttggtatttttcttggttcagttttgcattggattgcttccttgtttatatattttgaaaaaaatacattgtggattcaaattttagccacatggctatatattcaaattccaatgggtaagctacatcacatcacatgcttacaactaggttgaggaaactattaaaatacgcaaggaaaactttgattgatttgtgtgacgaagcactcaaaacacaagtgatttattctagtttggaggtcaaagacctatttcatcggtgttcttcgat

SEQ ID NO: 35702 - DNA, 242 bp, Zea Mays
cgggttcgactccgaatcaggctgcgcgctgttcaaagccccgaagtcctccaccctctcgttacgcgccgcctgagacatagcacacagattcagcaagcccacatataacccacattcagcaacactaaacaagagtcaaacattacctgacccctcgccgtgtcggaccggtccctgaccacctcccgaccgtggggaccccacatccggtcgaagagggctcctgctgattccttcac

SEQ ID NO: 35703 - DNA, 2163 bp, Zea Mays
gtcgggccactatccctctggcctcgtctcgtcttctcttctcgcgaatggcggcgctgtgcgatctccgtcgctgccccctccgccagtgatttctgggacgcgcgacgaacacgagttggaaggaggtggtcgtgctttgggcggcgaaggacctgggcgctagcagcctcagaccctgacagatcacaacctgacagatcacagcgatcacaggcgctaccaaaagcgacgggcggccgacggcggcattgcagttggagcgagcgagcgcggtgcctttcggacgacactgagcacaggtcgcacattgtcacatggagctagactagaggtcgtcgccatcctgtcagtgtctgctcgtgatcaaactgcctgctgcctgcccgccccaatacacccaaccagatttcaattcacttcttggaagctgctgcttcgagcttttgagtagcacccctgcttacagacatttcatatccatatatatgctcctcgtcctggatctccttgccggcattatattgccccccacaccacccccgactccccacgaccattaatctgaagtctatatttcacattgtcacgactatattttgttccaatttgtttccttaatttgcatcagttttatatgttatattgataggtagcacatctatataagtccatgattaaaatttatgtttctagataatgggttcttgggaggagaatgttaggcaatttttgttggaggaggaggaagatgatgatgaactattctttgttattctccctgctataatcccatacctctcggaagagaaaagacccatccacacatcctccctcaccggtgctaaaaaggttaaagaaattcttgaagggcatgagagctggtgcaaatctgagtttagaatggaaaaggaaatattcaaagccacgtcaaattttcttagaagggagaatttactacgtgacacacgaggagttagtgttgagaagcaacttgggatgttcatgtatatgatctcccacaacgccagtaaccaaatgctacaaaaggcttttcaacacagtggagagactatccatcgaaaaatatctgaagtttttgagatagttcccatactaactcaacgatttgtgaagcttcctagctcagttcaaactcatgctaggattgcaacagattctaggttcatgcccttttttcagaattgccttggtgccattgacggcacacatgtatccatcactatcgcagaagatagggcccctccatatagaaatagaaaaggaactctttcacacaatgttatggtagtctgcgactttgatctcaattttacatttgtctcgtgtggatgggaagggtcggcatcagacgcaggggtgcttcgatctgctattagcaaaagatttagtgtgccagaaggaaagttttatcttgtagatggtgggtatgcaaatacaccatcatacattgcaccatacagaggtgttcgataccatctcagtcaatttaggaggagtcgttcatcacaaagtggttatgcaaactacaaagagttattcaatcatcgccatgcaattctccgcaaccatatagagagggccattggtgttcttaagaaaaggttcccaattctaaaagtagacacattccatcccatagaaaatcaaatcaagatcgcagctgcagccattacatttcacaacataattagagggcaaaatggtgatgaaggatggctggacaaccaactagattatatatctccaagccattacattggtgttacttggtacttgcagagtgctgagtggaagcaacatatgaagctgacacggaaaaggaaaatggatgatctccttggttatgtttccctgtcttgtgcatgctgcatttcctgctaccgtgaagaccggggtccaggagagtaggagactgaaagcactgtcgagaagactgaaattatcacattgacatgaagaccaaagccatctcttacctacttatctttgtagcttacgtttctattttattctgtcatgaaaactaaagtcttatgtatggtcattatgtactattttggttctgaaaatatttgtttatgttatgaaaactattggttgaaagaatggtgattacggttttggcttgaaggttcagaa

SEQ ID NO: 35704 - DNA, 270 bp, Zea Mays
ctaccatccattttgggattatcttgtgatatatttcatcatattcatacatatgcatcctgcatctcatttaggaccgagagatgacgatcgtgcaagtgatatggtgccaacaacaagatgcagttggtggacgacctgaagagtgatgaacttaaccagtagatgctcgccaagcgggtgtcatccagcaaacactatctaagtgttaaattaaaggcaagccccggttttatgcataaccgtttatatatgctattttactacact

SEQ ID NO: 35705 - DNA, 3055 bp, Zea Mays
gcttcgggtggacggcagggcgagcggcgacgccctcttcgtcggggaccttcgccggcgacgagaatccaacctgataatccggaagatacatgtgccagatgtgtcgatcacagggatagtaaagctctcgaactgggtgtaaagagatgtttgttcccgtgttagataacatgtctgattttgaggagccctttaaaatttctgggatgtggcaatgctccatttgcacgcatgaaaatactacatatagttcatcttgtgagctatgtggtgtgcttcatgatctctcactgtatttcaatgatatcagtgaagacgaagatggagacacaagtattctggagtatccatccttgcaagatctctttttacaccacctagtgcaaagtcaaaggctattgttttctctcatgatttcaaagacagaagaaatacaacagggaataagcaagctacaatggatgctctacataagacattcatgactcgcaaaaagcgccacattaacatagtgcctttcaagtttgatacaccatctcctgatgacatggtcactacaggattaaaatcatccagaaactttagaaaagttgacacagaggttctagttaaggattctgttggcgtgactggaaaggagatgatgaataatgatattcttctaactgaaaagaatacaagcatggacccaagtgcattagtacagttggatgatggtggaactagtagcaatgttccttcgagtagtcaaaatataactcttgctttggaccatgagctacaacatttgagtttggagagcaaactgaagaacagtaaaacgaatgttaagaaaacagcttctgtttctcactacaagccagaaccttggatgctccagagtgaaaatcaagaaatccgtaatcagctaagtcttgccattgttggtcatgttgattctgggaaatcaactttatgtggtcgattgcgacatgctctgggattgatttcaaaaaagcaaatgcataaatatgagaaagaagctaaagaaaagggaaaagggtcatttgcatatgcctgggctatggatgagagcagtgatgagagggagcgtggcattacgatgactgtggctgtagcatactttaatagcgagaaataccgtgtggttctgcttgactcccctggtcacaaggattttgtgcctaatatgatatctggtgctacacaagctgatgccgccatcctagttgttgatgcatctatagggtcatttgaagcaggcatgggtgtcaatgggattggtcagacgaaggagcactcgcagcttgttaggagctttggtgttgagaacttgatagttgctgttaataagatggatggggtggaatattcgaaggagcggtttcagtccgttaaatcgcaactcggcgtctttcttcggtcgtgtgggtacaaggactcttcagtcacctgggttcctttgagcgcaatggccaacgaaaatttagtcacagcttgttcagacactcgacttttatcttggtacaatggaggctgtctgctgcaagccatcgactcgttacctcctccccgtcgcgacgtgtcaagtccactgcgccttccgatatgtgatgtcattgcatctcacacgctgggccaggtggctgtctgtggtaaagtcgagtctggagggatccgaactggctgtaaggtccttgtcatgccttctggagacatagctacggtgaaaaccatggagcgggattcctctacctgcagcttggctagagccggggacaacgtcgccgttggtttgcacggggtggaccctggccacatcgcggcaggcggagttctctgccatccagatttcccggtgcgcgtggcgtgtcacctggagctgaaaattctggttctggaaatcaccgtgccaatactggttggccttgaggtcagtgggaaacagcacgacgaatagcattgttcttgttcgtctggtgcgatcttctttatctgtttgtttccatgagaaaccattatttccagtttgagctgcacatacggcacgccaagtcgtccgcgaggctggtgagaatactgtcgtccctggaccagaagaccggcagggccctgaagaaagcgccgcgtctgctcaccgcgaggcaggcggccctggtcgaggtgaggctggacagagaagcgtgcgtggaggaattctcgacgctgaaggcgctcgcgcgggtgttcctgcggtcgcagggtagcacggttgcggtgggcgtggtgactcgagtcctggaccgggctttggacatgggctagctgcattggcacgggcgcggataatttatgaacgtcacgcgcgcggggggaggcaggtaggtcggtctcctggattaatggcacccgggaccgggagggagagagagagggcctttcggcgcccaacgaacgattcaaaggcggccgacacgagtttcgtccacgcacccccacggttcaaagggaggatccgcccgggacggacgggtcaaaggcccgcgactgcaatgaattcaatgaatctggggctgtaagccggccgttggcttgttgcaatctgtccctatttttcttccatccaatccaagggcgcaccgacaggcacactgcgtagttagtgccccttgtgctgaccgtccgaccgcggctgaggaggggggtgtgcggtggcatgtgttgaatgagctgtggtttctgccgtattagtctagtatctatatagcgactcgtttgccggattacccactaagccatgtgtgttgtttgctggaacggccgcgcagctagcatgaacaatcatcggctgccagccatgtggcgcctgcctgcccgcctccattatgcatgcagctagctgctcggcccctgcaacggagaaatttgcaactttggcactcccgtccgccgccgccgcaaacgatttataatcatacagacataaattatgtcttctgtttctgtttgaaatagagatgagataaagagatctactgaagatggccttagactgtttcgcagcggcaggttc

SEQ ID NO: 35706 - DNA, 1356 bp, Zea Mays
gctgatgtagcttcgacttccagtggaagcgatgaggttgcgacagcgtggctaaacaacaatagcgtcagatccgctatccatgccgaaccagtcagttcaatcggaccctgggaattatgcacggataaactggattttgatcatgatgccggcagcatgatcatctatcacaagaacctcacgagtcagggctaccgtgctttcatctacagcggcgaccatgacatgtgtgtaccttacaccgggactgaagcatggactgcgtctttaggctacgccgtcgttgatccgtggcgacagtggattgtcgacgaacaagttgccgggtatgtatctggattctgaacacaagcatatatgcattgaccctttatttcctcctaagatctttgaaccgtttagtcgatcctagatcgatgttgagtaattgctagctcttggacgatatgaattcactactataatcaacaaaaactttggcattatttatatatttcacgaaatattcagctcgatgatttgttatcatgttccatttgttccagtcaaatgtttgtatttttgctcccaggtacacccaaggatatgaaaagggccttacttttgccactattaagggtgctgggcacacagttcctgagtacaaaccacaggaagcactagctttctacagccgttggcttgccggtgctaaactgtgaggaggcctattttgtgtgcaaaggtcatgcagtactgaatcaaacagaagttggataaagcatgcagcaataaggcagtcgaaggatcaaagtatccaacgcgccaactacaatgttgcattcattttcacatgttataccaatgcagttgctaattacctgcattgttcatgagttcacagtccatctaattggttgaccacaccgtctcatcttgcaccactatatacgttaactttattttagccttttaataccatttgactgcacccacacatacgccagaaaacgtcgtatctggccagccaacatcttacgaacctgcacctgagcgcacaaccatccaatcatgttgagtgtgaccaaacatttgtgaaaattttcccgtgattttttttaataatagtatatacggtggttgggctgtgcggctgtgcctcttggtgtccatgtctctgatttattctgatcgttcgacagcgtaaataaagttattacggtaatacaacagtccctccaccccccaatgttgtggcagcgtggtggtcgatgaggagtacgcagaggagagtagctcgagattaggaacgcagaatgtagcgaggacgaagaggaggactgtcgtcgccgacggctgaataggcgccaccat

SEQ ID NO: 35707 - DNA, 2458 bp, Zea Mays
gaggaaatccggcccatcaacaggcccattggggagtggaagtggccggagaacattgcagggcggagcgcaacccccacgcccgaccggcccgggatgtccaccggactttcgcagctctctggcggcgtcggcggcgaccggggctcctcctcctccgccggcccccaccaccagcacagccaccacccacctcccccgccgccgcccaagatcctcctcgccaagccgccgctgccgcacgcctcgtcctcgggcgccgatgacgacggcgggaccggggtcgcgggtggccgcgcgcgccaggcgccgcagccgggttcgctcagcctcgtctccgacgcgtgggaggcccacaccgacaagatccttccgtatctgacggagaacaatgatttcatggtgattggggtaattgggccgcccggtgtaggcaagtcgaccatcatgaacgagctttatggatatgatgcgagctcacctggaatgcttcctccttttcctacacaaactgaggaaaccagattgatggggaaacactgtactactggtattgacatcaggatatctaatgagcgagttatactccttgacgctcagcctgtgtacagtccctctgttctaatcgatatgatgaggccagatggttcatccacaattcctgtccttaatggtgaacccttatcagcagacttagctcatgagctaatgggaatccaggaattgctgtagattggtgttttcttggcatctgtttgtaatatagtgttggtcgtgtcagaaggtatgaatgatttgtccatgtgggagctcatgcttacagtaagttttctcatctacaatttgtactttctgtctttctttcattagcccatctggaagaaccgaggaagttatgcctttaggtttttggttcaggatctgagttttcacctattgacctaatttcaaagaaaattgagatgcagttctagctttgtaatgattctatcacattctcatcatacttgtttctcccacccgtttttttttctgtatcccaaatagtttacaacttggcttttgggacctggcagtaatgcaataggctgaatggatgttccaatacatttcttatgcctgtaggttttttgactttttggttcaagatctgagttttcacctattgaccttatttcaaagaaaattgagctgcagttctagccttgtaatgattctatcacattctcatcatacctgtttctcccacccgtttttcccctgtatcccaaatagtttacaataacttggcttttgggacctggcagtaatgcaataggttgaatggatgttccgatacattgcttatgcctgtaggtttttggttcaggatctaagttttcacctattgacctaatttcaaagaaaaattgagctgcagttctagctttgtaatgattctatcccaatcccatcatacttgtttctcccaccacatttttctgtattttacagcaacttggctttcaggacatggcagtaatgcagaaggctgaatggcagaaggctgaatggatgttccaatacatttatgcaggttgatttattgaagcacgggatacctgatccgtccgtgttgacgtcatcagcttcccaagacaaggaaaacaaaaacgaagaccaaacgggctgcgaagactatatttccgatctctgtttcgtgcatactaggctgcaggggcaagatttttctccttcaaagttcatgcttctaaggagaactcttgagaagcacttcaactcatccacttttagagtcgggagctctaatgcaacgggtcatgcttctgattcgctggttccttcaagcacgaaagttgaagatttaacctccagtcggcaggacatatttcttcttcccctgagagggcacgacgactcgacaaagtttgagtatggaacgtactcgtgcatgctaggcatgatccgtgatcagatcctgtcatggccggcgaggtcattctcgaagaacctctcggagcgtgactggctgaggagctcagcgaggatctgggacatggtgaagaagtcccccgtcatctcggagtactgcaaggcgctccagagctcaggatggtttaggaagcaaccgtagtagtgtctagcagctacttgttgggatgcgcccgctttggccggcttggaaaaccagagaatcgccatcagatcaaatgaattcgcttgctctgttctgttcaatcagtcgactctgatgagataccgtgcatgtgtttgttagtttgttgggctttgtgtaatgagctcagagccagcgacagcaggtggcagtcagtcgtgtacggctcatgcttctctgcgtgtcctgtgctatgatttgaggctgtttcatgcgacgtctcataaatttcatcttctaaaaaatatatatttactgttctttacagcactttcaaaaaaa

SEQ ID NO: 35708 - DNA, 540 bp, Zea Mays
agatcttctttcgacggtggatttcgacagtaaagtcccgcgggccgcggtgacttgccggtgggcatgtcctcgtcctcttccttccccacctcccgcttccccttcgccgccggcgccagggcccccggcagcagacgcggtgccggtggaggcgggagcagcgtgcggccgtgggggtcgaccggcgggacgtcggtgtcttcatctgggaaacggatacagaaggagctgctggacctcaacgcctccgactgctccgcggggcccaagggcgacaacctgtaccactggctctccaccatcttcgggccccaaggatcgccatatgaacgagggatatttttccttgacatcgtgtttcctcgtgattatcccttcaaacctcccatggtaactttcaaaacaaggatttaccattgcaatattgattccactggtaaagtgcatttggacattctgaaggatggttggagtccagctttcactatttcaaaggtgttattggccatcaaagacatcatcaacaatccagatcca

SEQ ID NO: 35709 - DNA, 524 bp, Zea Mays
ggatttggatccactttgccatcaggcgcgcctcgttctttcttctccgccggctgcatccacaccagacaccacaccacgttgctctcaccggtggaaggaagtggaagtagaaggctggaagcggaagcattcgatttccatcgtggggcatggcggcggaggggaagaggaagggcgtcccggcgctagggtggtggctgatgctagtcggctccctccgcctcgcctccgtttggttcggcttcttcgacatctgggcgctccgcgttgccgtcttctcgcagacggagatgactgatgttcatggccgtacttttggtgtctggactcttttgacctgcaccctgtgcttcctttgcgcactgaacctggaaaataggcctctgtacctggccaccttcctatcattcatctacgctctcggtcatttcctcacggaatacttgatataccacaccatggctgcagcaaatctgagcacagttggcttctttgcaggcttgtcatttaaaccttttcag

SEQ ID NO: 35710 - DNA, 6414 bp, Zea Mays
atggggagaatggcggcggtaggcgcggcgggagagagcgctgcccacacagggggggtgggaggtggctggctcaaggttgtccatgtggctgctattgcagagcgtgaagctggttggttgctattagcttctcttctagcatccatgccaaaagaggagctggaagaccaggtgtttgatgttcttttgctatgggcgggtccttttactggaaatcctgaatcttaccttcgtcatatacaggattgggcatcagaattgcgggttctgtcagttgcagttgaggcgcttactgccttcataagaagttttgtttatccatctatcacaactactgattgtggaatcttgcttaatcctgtacttgcctaccttggcggagctctatccctcatatcttcgttgagatctaaacaagtgcccaatgtaaggtctgcgctggacctactcacaactagaacattgatggcttattggtccctttcgaatccagtggtatataaaactgagcaccagcagatacttcagctatgctcaagtccgttcagtgatccttctggatgggaagaaagctcatgcttgaagtttttgttggataagagagatgcttcactgggcccatggatacctggaagggattcatttgaggatgaattacgtgcttttgatggtggtgctgatgggtttctaccgtgtgtgtgggatgatgaaatcagcaacttccctcagccagagtcaattcggaaaatgctcgtcaaccagatgcttctctgttatggttccatatttgcatgtcaggaaaacactgtcaagataagcctcttgaacaatcttgaccagtgcctgaagtctgggaagaagtacctgtggtttaagtttctcattacaaatgcatgtgttgctctattgtcagggttaaaggaattcctcgctttacgtggtgctcaatcattgccaattgatatattaagtatgattcagtccattttcaaggccattttagtagagcctgaaatttctacagcacagcggcgagcagcgtgcgagggtctcggtttattagcacgagctgggaatgatatctttacagcaaggatggctcgctctcttctcggagagctggtaacaacaacagatctgagctatacaacttctgttgcattttcattgggttgcatccatcgaaggtaagtttcatacctgaagatatttcgttgtattaattctgaatctcaaaataccagttaatagtctccatgggtgtatagtgtccatttgtttcagttttataattctttgttgacatggcctactatttccattgtttactttgagattttttttcttgagtactttgtattgacgtaggtgttctcctgttcctattgggaagtcatttgtgtccccattacttgttcgaacactagccacaacattgttgtatatgcaccttaatgagtccaacgtagctcttttgagaatttatgtttgtccaacgcccaccacataacatttcttggtattttgtattaaaccttctactagacggtgaagaccatgtatatgtccttattttgctccctatattgctccattacttgtcttattgagaaaatgactttcatggttgacctttcagacataaaccaaattggtttaggggcatcgtggacgtagaagaaaatagcatgcaattaaggtaggaagggtcattgttaagccgccatggatgaagcatacattgtggttggcaggctcgagaatgcgtcgtgactggaggctgtgcaccgggttgtactaggtagagggccccaaccatataccaatgtttaaggaaacggttgagcgatcctcaacgatgattgcaacgcgtagaacatcgggggtagaaggtgctaggtgtagcctgctgttgtcggattagacaaattagatgtgaaacagatgtggttgtgctagacgaggttaggtcaagcagtgtgtggatgatagtagatgtacctacttagaggttaggcatgcctgaagttagtggtccggacgcaaggtacacgtgtcgtcaatgcatagcatacgatgatgtagatgctgcagtgagtgccatcttggatagaggcatgcttgtgagagtgtgtcctttggtggataccattggaagtggtgttgtgactcgaggaggcgacacaacaatagcagcgctattgtttggagtggatgcgtgtagtactttgctaacttcacatgagctaggaggaccgtgcataatcagttggttgatcaagtatgcatgatgtgggatgctaatggaagaaatcggtggtggtgtcctcatttatggtggcgatgatgaaccaacgataatcatgggtcgttgtgggattgggatatagagggcaacattgctagaatcatgacacaattatgacatcatgctctagtgctatgtttgtcccgcttgagcctcaagttcgagccaagcatagttgtcatttggcaatgagtccaatgcacccgcacaagaggagtctggactcctgtgcgctcgtgtgacatgctagctgagacaacatccttgtgatatacaactgcaggccatggatgaaataagaagagagtgctggaggaatggcattatctactctggttaccccaactgtgagctcactatctcatttgagtaaaagctctaatttcaatctgcagttgtggtcactgcatgctcttcttttaacaattgaagctgctggcttgtcttatgtctcgcaagttcaggggacacttttccttgctatggagattctcctcttggaagaaaatggatatgttgatcttcgacaaggaattggtcatcttattaatgcaatagttgctgttattggtccagagcttgctcctgatagcacattcttttcacgatgcaagtctgttattgcagagataagttcatcaaatgaaatggctacacttttagaatcggttagattctcccagcagcttgtgctttttgctcctcaagctgttcctgtgcacttgcacgttcaaggtcttatcccaatgctttactcaagacagccaagtcttagatatttagcagtgtcgacactgcaccatctgattgaaagggacccggctgcaatgattgacgagaatattgaagagaatctgttcagtatgcttgatgaggagaccgattcagaaacagcgatgttggttcgtgcaactattattcgcttattgtatacatcatgtccagtatgtccatcacggtggctggcagttttacgaaatattgttcttgctacgtcaattagaagaaacacaggtgaagttctgtcatgttttgggcataatcctcctgatagtacatctgagaatgatgtgtactatggagaagatgaagacaacatgatttccagctcaaagcagcagcaaatccgctgtgctggttctatatccagccagtttcctccaaggaataaacacctcagatatcgtaccagggtttttgctgcagaatgcgttagccatgtaccaattgcagttggagcagaacctgctcattttgacctcttgttggcaaggagcgcaatatctcaaggcacttatttgtcaaatgattggctagtgcttaaactacaggaactggtctcactttcataccagattagtactgggcaatttgaaggaatgcaaccaataggtgtgaagcttttgtgtttgataatggacaagttcggcaaggcagtagatccggaatttcctggccatatcttgctggaacaatttcaggcccaacttgtttctgctgttagaatggctataagcactgcttctggtccacttcttttggaggctggacttgaactcgctacaagggttatgacgagcagcataattggtggggatagactagctcttagtcgcttgttttctctgataacacgcccgttaagtgacatagagggcctactatatccatcttttgctgactgggtagtgtgcaagataaaagttcgccttctaactgcccatgcagcagtcaagtgtaacacctatcaattcttgaggatgagggaaaatgctcctaatgaataccagcaattggcaccttcacttgtaaacagttcaactctattaggaaaatactggattcgagcactcaaggattatgtttctataagttttggtttgcactcaaaaatcaattacaagccattccttgatgggattcagtcattattagtcttgtccaaggtgcagaggtatcttgatgaagtttggttattaattcttaaagcaacagctcttgatgccgcgcctttggattttgatgagaataatcctaaaaatttactcgaacaaacatttatatctgggcattgtatggtcaaattggacagaactgaattccaatttctttgggggttatctatccttgtgctgttccattcctgccaatcaatgaagaataattctttgaagatcaaccttgactttaaacaagacaaaaactttggggaatttattgttcatggacttgatgacaaaagaccgtgtgatcaggtcttacgcgtgctttcgtccctcacaacagaagtctttttcagcaataattttatttcagtggatatttgccagcaactcctccaggcacttacatatgcagattgttcaagcgctcctatcatccacctattcacccagattatcagattctgccctgacaatttttttgaggttgaagcctttgtcttctctgcaatagagttattgtctcagtatctgggtctgatacttcaatgtagggatgggagttctcagaataattcaagtaacactttgatttctgagttgtctattgcaagcgagacgatggcttatcggatcaaaggagagtatttgtggaagctggtgatgttagtggtatctacttcacaccaatcatttcaacaagtttcaactaatttatgcttctcaaatattatatgcttcctccaaaatatcttccctttcatgaggaaaatttttagagcttcaggctgtgcgtacaggttattcaaggttcatttcgtagtaccaacatacaggtgcacatgctgggtctgcaagtactgagaagctatgcacagaaggagctaactgaaggttcagaaacaaagttggattcttttatgatgttgcttacggaattgttgggagacttgtttttggtgatggagactacattgaaggaatgttcaaacaaaaaatctgtcagtgtcgttgatgaatgtttgaaacttgttttcctcttccacacactagcacaatcaaagaaataccgacaagatgctacaactcttctgctggaggccttgctgatggttttctctctgtccagtgatactgtttcacagatcaaagacataatgctttctgcaccagctgaaaggagactacagcttcaggacatggtccgagcttcagtcagtcaagggcagataacggtgccagtggctacgagtgcacactcagaacagaatattcaggatagttgcagtaaaaaccctgggtccacatctgaagcttctgattgtgttgcaactcacgggaataatgacaatgaagttgttgatgatgactgggatgacgattgggatgctttccaatctcttcctgcaattgcaaatgatggtgttgattctggagaaatctctcttacaactaggtacaatgaacagatccctcaagaaaatagcagttacggttcttgtaatgcggatattacagctcgtgctatggaagacataacttgtgtggacaaggaacttgaggagccctctgatttgcaattctcaagtactgaacaacagcctaaacatgatttaccagggtcatcccacgaaggttgtgctaaacttgaaagacatccatctgttgattgcaaagagcaattagctgatgatgagacagcagatgaactgcagcagcaggttcatgaagacactgatcatgtaaataaagatagcgaagttctctctgcagaaattcatggggttaaattggatatccttgatgaagatgttgaagatgattccccaatgaattcaaacaatctatcagatatcgcagaggaagagtcctagggttggtacaatgcaacgagggtggaccgcaagcttgtcgagatagtagagaagagctgtccggttcctctgatgctggcataccagattttagtatgtcaggacacgtgatgagcaagagcggaggaaatgagcaaaatgttattttgcctgtatcaatatatattgcacgagataaaaataatataaggttacaaccatgatttttattttgtgccttcctccgcccctccgcttctaaataaatagttacctttgaatgaatttcaagaaaacccaatcaaga

SEQ ID NO: 35711 - DNA, 415 bp, Zea Mays
gttgttgttcatagaaaggatctacagggaattcttagaccaacctgaggagtaagaaatgcctcatgttattagtgttacaccagacgtacaggaggccattggatggcttgagtccatggggttcgactgagcatgtgttattgaagcattctttgcctgcgataggaatgaggagctatctgcaaactatcttcttgagcatgctagtgaggaagattaagccagagtagttttcatatgggtacaaacatagctttgcgtcaatcggtgctaggcgaatgcagaacgcttggtagccggtcagcgctatgtgtagaacacatactccagagatgaaattggatcacgagcactggaataattgttgtcaggcagatcctattaacaactccgcattggctctctgccccag

SEQ ID NO: 35712 - DNA, 1898 bp, Zea Mays
ctttgacaagtcacatattggctcttcaaaatctgattttggttctatttctaacaaagcagtgggagacatggcacaactaggttgctccctctttagtttttaacatgtttggcttccgagcaaactttctccagaccccaagaaaatataagatccgatcagatatgtgtcgatgctcatctcagcgtactcccgttgcaacgggcacacacccagtacagctgatatccggaacgagcccgctcggccaaatcgaccggacctgagcgctctcgttctctctactcctccgttctctctcacgcgagcagtgcatccttgagccaccgccgccgtgaggagctccgcccgtccgccgtcatccgtcaaatcagggagcttcacagtgatggatctgaagagaagtgggaaatggcagaaaagacccggcagctaggtggccatttggtacaggcgtcggactcccaggaggatgaccggtggcaagaggttcggcggcgggcgggtgccgacggggaccccgtccctcgcgtggtcgtccgtcgtcatcgtcgcctccctcctcgttggcgcctccatcgtccacaacatctacaagcctgacatgaccattccacctgtggagggtgccgccggcggcggcggccaagaaagctgagctacgaatggctggacactgcatgcaagagaggaggctgggcatgggagtagtgagggaccggccatcagcacctttttttttttgttctagaacaaaaacgatattatgttgttcttttctgttttgctaccaaaagatgtgaggctgcatagtatttgcttcgttaggcgctactggtcacgcgtaaccatggtatatgtacgttgattttgttttttctaatgcctaataatcactacactcaaaatgtacgggcttgtggtggcactgcggcgggaggtggttggttggttccacttccatccaggctgctccgtggatgcgacggtgattcacgagcggatacgcaagtgtagctgtggcctgcacttggggccggattgtgacccattatcaggcttaggcctgcgtgcggggtcgtttgccgttgtgtacacatggaagaacggggcaccaagtcttgcttccattgccgccgccccttccgtgcacgcgcgcacggcgcacctatacatatgcaccgccccatgccccgcacgccctccctctcccagcgacaccagagagccgaatttacttcgttctcagcctccgttgcccctcgcgcgcgttacgctgtaccaccaggctcgatcggtcgatcctttgctgggcgtcagagaagcatggcagcagctggcaagtcgtcggccatggaggaggtggtggcggcggcggattgactggcaggccgttgacaggggcatcgcctacctgctcatggtggccacgtacgcgcttcactagagccgtcttggcttcggtctgctccggccggcggcagagatcacgggaaggaaggctttgtgagctctgcttcccggcctcagcgtgagagttcccccgcgccaaacttcattcgtttctcttccactcttcctcttgtatggagatggagatggagatatgcctgtgtctttaccactagaaaaaaatgttgttttttctattgtctttctgtgattattctgtgcaaaatggtcaattgttgccaaaacgatcaatgttaccatggtttcggcttgcgtctatcttctgttgtgattgggttcgacattcagagtttgcacaaggccatacatagcatacatatatggcagagtttgcagcgtgaggaaaactgtcatcgccgtgtattttagcattatacataacataccccatccgttcattccaataggcatataagctacca

SEQ ID NO: 35713 - DNA, 874 bp, Zea Mays
gtcaccacagccgcatctctcgctcttctttcttgtcccgggctcccggctccatagtcgccgttacatcggacaagggcatcttgcggtgaagcatctaatctgagcagtcagtcgtccccccgctcgcggccgggctactgctggtcgtcaagtactcaagttgtaggcgtgcagccggggcgccggccgctagctgctgtcagcacgcgcacacagcagcagggtggtcgcccgcggccggtagccggcacgcggtcgcgacaagccgatagcaacagcaagccaggcccaagttcagtccccagagagcggcaaggtctgtcatcttctctggagggttcagaaccaccgagaattagctgtctttgaggagtacaataggaatggatgatgctcaagggtatcaagaaggagatgatcatgagttagtgctgaagaaacaagaatggatcaaaacacaagacatgctcaagagtaaacttattcttgaagatgaatttgcctggagtttaccttcggtgggctcaggtttagatgaacctgagtggtgcaaactgaagtatattggtgggactgacatcagcttcttgaaggaagacccatccacagcatgtgccgcggtggtagtcctcaatgccgatactttagaagttgtccatgaagagttcaatgttgttcgactgcaagtgccatatattcctggttttcttgcattcagagagtctagagccaagggattctagtatgatcaatccaaaatcatagatcttgagaaaggctccagttcttcttggactcttggaaaagctgaagatcaatgcacctcatttctgcccacaggttgcataaggggccaataggaaattaaaaa

SEQ ID NO: 35714 - DNA, 2759 bp, Zea Mays
cggcactcggccgcacgcgccggagctcatctcccagtcccagaccgcacctcctacctactcgaacccagccacccacccaactgcccgagcctgcgactgctcggcttccgcgcggcgcgcacagaaacggacgctacaggggggcagcagcgcaggcggcagtccggctgcagagcgagaaacccgcaagaggcgatcgctagccgcgagcgcgggcggccaccatggcggcgagcgcgagggggagcgtgtgggagatccagccgcgcgacgtggaggccgcggggctcgccgcagccgacgcggccgcgttccacgccgcgctccgctccgccgcgggctcggcagccgcctccggggacgccgtgtgggcggccgtggccgcggcgggggtgctgcggccggagcacccgcacgcgctccaccagctcgtctactactccgcctacgccgggtgggaccgcgccgcccggggcccgccgccgtactggttcccgtcaccaactgactgtaagcaaacgaacctggggagattgatggaagtaaatggaccaaagctgttaggatcatcatacagggatcctatatcaagttttaaccacttttacaggttttccgtagagaaccaagaggtctactggtcaatggtgctaaagcaactcgcagtcaagtttaaacaagaaccaatgtcaattctaaaggacagatgacagtacagctatcatttggagggatgaaggccttgatgattatccagtgaaccgaatgtcactgaaggagcttcgcagtcaagtgataactgtcgcacatgccttagatgccatatttgagaagggggacccgattgcaatagacacgcctatgacatgcaatgcagtcatcatatatttggcgatcatccttggtggttttgttgttgtatctatagcagatagttttgcacctcaggagattggtagtcgtatgggtgtctccaaagcaaaggcaatttttacccaggatttcattgttagaggagggaagaaagttccattgtacagccgtgtcatacaagggacttcatctaaagctgttgtgattcctgcaattggagattctcttggaattatgctaagggatggtgatatgtcctggaaagattttctttctcacgctgctggaaggtcatcttcatattctccagtttatcaatctgtggatgcactaactaatatactattttcttcaggaacaaccggggagccaaaagcaataccgtggacacaactttctcccataagatgtgcatccgatacctgggcacatttggatgttcgtccgtgtgacataggttgctggcctactaatctgggctgggttatgggaccaataatcatctactcatgctttctgactggggcaactttggctttataccatggatctccacttggacgcgatttctgcaaatttgtacaggatgctggtgtgactgtattaggaagtgtgcctagcttggtgaagtcatggaaagctgggaactgcgctgaagggcttgactggaccaaaatcagagtactaggcacaacgggggaggcttctgatattgatgacaacctgtggctaacttcgcgtgcctcatacaagcccattgttgagtgctgtggaggcacagagttggcatcctcatacattcaagggagtcttctgcgaccgcaggcctttggagcttttagtggcgcatcaatgtccactgggtttgtcatacttgatgaacagggaactccgtatcctgatgatataccttgctctggagaagtgggtctcttccctttgtattttggtgctactgatcggcttctcaacgctgatcatgacaaggtttacttcgatggaatgcccatttataaaggaaggcaactcagacgacatggagatataatccagaggacagtaggcgggtactatattgtacagggaagggcggatgacaccatgaacctcggtggaattaagaccagttcagtagagatagaacgggtgtgcaacagagctgacgagtgtctgctagaaacagcagcagttagcatcaaaccttccggtgggggaccagaacatctagccatcttggcggtgctaaaagatagatcggcccagtacgacgtgaatcttctcaagaggaagttccagactgccattcagaagaacctcaatcctctcttcaaggtgagctatgtcaaagtcgtcgctgagttcccgagaacggcttcgaacaagctgctgagaagggttctgagggatcagctcgcgcaggaactctcaaatcgcagcaagctatgacctttgagactgttctgcctttgtttcagcatcaaagctatcgattttcttgttccatttcaataaagcactgcttcaatgaaggaagcataccaagatgatcctacaaattccccccgcccctgtaaaacttcaaatctggttgtccttttgaaaagggaaccgtagtccagagaacgtttgtaaaggtctgtacattttatctgatcgttacagtgctgatgaacaaactaggcgcatgcatagttgtgtcacttagtatgtaccaatcggtggtaattgcatcgaatcatttgctgcgatttttttttatcttgcgagacaagtgggagtcagtgcttcgttgtatcgtactgtttgaacgtctatcacctagttaacctcgtttgtgacatgtgagaggatataggttctggaatgcagagctgctgtgagcc

SEQ ID NO: 35715 - DNA, 4067 bp, Zea Mays
atggaccccacgtgttattaactcatgtggacccacatgtaagtgagatagtaatggtatagatctaaattggtgatcttttaatggtatggatccaaatttttcttctttattttatcctcgtgaatcaatgagcgcagcgaggaacggtgaagcaaagctaaggtatcggacgaacacatagggggcgagcgagccgactgacgagcacaagaccggcggacggggccgcctaatccagtgagagctcccccaagcgccatggcgtcggacagtcgcccccccaagcgctccccctccgcgcgacgcgtggcgccgcgtcacgcgcaccaccaccactcgcagtcgtcgggcgggagcacgtcccgcgcaggcgcgggaggaggtggcgggggcgctgcggccacggagtcggtctccaaggccgtcgctcagtacaacctagacgcgcggctccacgcggtgttcgagcagtcgggcgcgtcgggccgcagcttcgactactcccagtcgctgcgcgcgccgcccacgccgtcctccgagcagcagatcgccgcctacctctcacgcatccagcgcggcggccacatccagcccttgggctgcacgctcgccgtcgccgacgactcctccttccgcctcctcgccttctctgagaacgccgccgacctgctcgacctgtcgccgcaccactccgttccctcgctcgactccgtggcgctgccccctgtttcccttggtgccgacgcacgcctctacttctccccctcgtccgcggtcctgctggagcgcgccttcgccgcgcgcgagatatcgctgctcaacccgctatggatccactccagggcctcctccaagccgttctacgccatcctccaccgcatcgacgtcggcgtcgtcatcgacctcgagcccgcacgcaccgaggaccccgctctctccatcgccggcgcagtccagtcccagaaactcgcggtccgcgccatctcccgcctccaggcgctacccggcggggacgtcaagctcctatgcgacacagtcgtggagcatgttcgcgagctcactggttacgaccgtgtcatggtgtacaagttccatgaagacgagcacggggaagttgtcgcagagagccggcgcgataaccttgagccttacctcggattgcattatcccgccacagatatcccccaggcgtcgcggttcctgttccagcagaaccgcgtgcgaatgatcgcagactgccatgccatcccggtgagagtcatacaagatcctgggctgtcgcagcagctgtgtttggtaggctccacgctacgcgctccgcacgggtgccatgcacagtacatggcgaacatggggtcaattgcgtcgcttgttatggcagtcatcattagcagtggtggtgacgacgagcgaacaggtcggggtgccatctcctcatcaatgaagttgtgggggttagtggtgtgccaccatacatcaccacggtgtatcccttttccattgaggtatgcttgcgagtttctcatgcaggcatttgggctgcagctcaacatggagttgcagcttgcgcaccagctgtcagagaagcacattttgcgaactcagacgctattgtgtgacatgctactgcgagattcaccagctggcatcatcacgcagagccccagcgtcatggaccttgtgaagtgcgatggggctgcactgtattatcgtgggaagtactacccattgggtgtcactcccaccgagtctcagattaaggatattatcgagtggttgacggtgtgtcatggggactcaacagggctcagcacagatagccttgctgatgcaggctaccttggtgctgttgcattaggggatgctgtgtgtggaatggcggtggcttatataacaccaagtgattacttgttttggtttaggtcacacacagctaaagagatcaaatggggtggcgcaaaacatcaccctgaggataaggatgatggtcagaggatgcacccacggtcatcattcaaggcatttcttgaagtggttaaaagcagaagcctgtcctgggagaatgcagaaatggacgcaatacattccttgcagctcatattgcgtgactccttcagagatgctgcagagggcactagcaactcaaaagccattgtcaatggacaacgtcaacttggggagctagaattgcgggggataaatgagcttagctctgtagcaagagagatggttcgattgatagagacagcaacagtacccatatttgcagtagatactgatggatgcataaatgggtggaatgcaaagattgccgagttgacaggcctttcagttgaggaggcaatgggcaaatctctggtaaatgatcttatcttcaaggaatgtgatgatatagtcgaaaagctactctcgcgagctttaaggtgaggaagacaaaaatgtggagataaagctgaagacatttgggtcagagcaatctaagggtgcaatatttgttattgtcaatgcttgttccagcagagattacacacaaaatattgttggtgtctgttttgttggacaagatgttacaggacaaaaggtggtcatggataaatttatcaacatacaaggggactacaaagctattgtacacaatcctaatcctctgctacccccaattttcgcatcagatgagaacacttcttgttcagaatggaacacagccatggaaaaacttacaggatggtctagagaggaagttgtcggtaagtttcttattggagaagtgtttggaaattgttgccgactcaagggcccagatgcattgacaaagttcatggttgtcattcacaatgctatagaaggacatgattctgagaagttccctttttcatttttcgacaagaatggaaagtatgtgcaggccttattgacggccaacacaaggagcaaaatggatggtaaatctattggagccttttgtttcttgcagattgcaagcgctgaaatacagcaggcatttgagattcagagacaacaagaaaagaagtgttatgcaaggatgaaagaattggcctatatttgccaggagataaagaatcctcttagtggcatccggtttaccaactctctattgcagatgactgatttaaatgatgaccagaggcagttccttgaaactagctctgcttgtgagaaacagatgtccaagattgttaaggatgccagtctcaaaagtattgaggatggctctttggtgcttgagaaaagtgagttttctcttggagacgttatgaatgctgttgtcagccaaacaatgtcattgttgagggagagggatttacaacttattcgagatatccctgatgaaatcaaggatgcatcagcatatggtgatcaatttagaatccaacaagttttggctgacttcttgctaagcatggcacagtctgctccatccgagaatggctgggtagaaatacaagtcagaccaaatgtaaaacagaattatgacggaacagatacagagcttttcatcttcaggtttgcctgccctggtgagggcctccccgctgacattgtccaggatatgttcagcaattcccaatggtcaacccaagaaggcgtaggactaagcacatgcaggaaaatcctcaaattgatgggcggcgaggtccaatacatcagggagtcagagcggagtttcttcctcatcgtccttgagctgccccaacctcgtctagcagctggtagagaaaatcagctgatatgttaagatctgcgctgacaccacctaacttctaggtcgattaggtaacttaggtggtgtttgtttgggattataatctgcctaaattatataatcagtgttagttcaaaataaggtagattatataatctggtcagattataatcccaaacaaatagacccttagctccctgataagagggtgcctaatttacaagaagcctggaaacaaatgaatgctgccatggcaattcaatggttgagtgttgatgaggaggctgtttttcggtgcgccgctgtaagtttgggtatccatgctgtggtttcaagatca

SEQ ID NO: 35716 - DNA, 1184 bp, Zea Mays
acagcgcctccataccatacccgtccccgccgcccggtgagatgccgaggcgcgagcgcgacctgccgcagcaggcctgacctcgcgtatctctcaggagtcaggactcctgaagatcagtttcgtgccttacctcgagagcgcctcctgaaggattggtagatttgaaattggaagagagctgtgggatgaagctacaaatagtggtcttgtattaggatgctcacaagatctgctcgatcccttgaagacagaggtattcagaccaatctgtccagcacaaagattaagccctcagaactataaacgcttggcctggaaaaagaaggttactgctgttggagtcaaaaaggacattgctatctcagcctcaaggaagaagtcgggagtgtaggaagctcgtgcatcacaaaagcaagaaggcttggtgttcctactcctgtactttatgctgtggatccacttctgcatactttgacagtatgtggatggcttgtctgtcaaggatatacttcttggttttggttcagatggggttaacgaggaacgcctggatgatattagtatcacacagataggaaacgtcgtcggcaaactacatgatggaggccttgttcatggtgatttagaactgtaacaattaattggtggtgggtacaatatcctttttgtcaacgccttctatttaatgtgtccactttattgtgctatgaagtcaagtttatgatttgtaacttatatatgttagtcttgacaggttcttattgatttcggtctgagttttatataaataattcccgagggcgaggacaaagcggtggacctatatgtgctagagagagctttgatctccatgcattcgtcccgtggggatgtggtgaggagactgcataaattggcatccaagttgtcttttgctgattatatgcatacattgattcctttattcggtgactttattttggggaggccaatgacgtatacgggttacggttacataagcagccaacaatattggattcatcagtaattgaaatgtctggtcaatatttgggtttgcttgagcttggctgttattccgcacttgggtccgactaatctgtgccaatgttttctggctatatacaacacaaaactagtccatccgcatcgtggatttgttatttttttcctttcgtccgtgg

SEQ ID NO: 35717 - DNA, 1392 bp, Zea Mays
ctattcacattgcccttttccgcatcatctcaattctcatgtcggtacagccgagaaccgggaccggtgattttcccctcccccttgtcttgctgcttccaattgacccgtcaattgctcaggcgatagtggctgcagtgcatttctgggatggggctgctcttccttgagcggctcgagggggagggcgtgttcaggtgccggcgctgccgcgtggacgccgcctccaaggacgccatcatctccagggacttctacggccgcagcggccgcgcctacctcttcgaccacgttgtgaacatatgcctaggccctaatgaggatcggtatcttgtaaccgggctccatactgtgaatgacatctactgtagctgctgccaacagattcttggctggagatataaatggcaggagctctgcctaatcattaaaaggagagtccagaaaacacactgtacaggtccgaggaccgagacaagacaagacagactagcaaacacgacgtgaggaacgctcctaacagacccgtacaaagcagctaaaccactgcagcagccctaatactggggaacgtagctctcttgaaagtgaacacatcctctttatttcaattcgccttatgtcatttctgctaaaatggtggatgaacggtatacctttatattttcaacccagcatcgtgttatgacttctactgttatatccagaaatgcaacaattaatttgtgcagaattaattacagctattagcattattgtataattgaattgtttccaatgtcaaagagtaacaccatcaattttccccctgtctgccagtggttcctaacgtcaaaaacatatcacgtttggtagtcatgttgctattccgttccttaaatgctacatcatattcatataccactttgtgcttatcacgcatcatcctaattcccggggtgatgtgctgcaggagaaagcctacgagcaaagccagaaatacaaggaagggaagtacatcctcgagagagctagaatggtgaaggatgggtgacgatcatttggatgctcttacttctaacaccccagaagcgcaatcttcttgaactctggaaagattcagaactatccctcaatttgcatgcctcagaacatttgacacctaattggcatcccagttagctaggaagatcactggttgcagattctttgatttgtagaatattactgactctgaatacccttagcttgttagtaatggtaacatttggtgaaatattgatgattaggtgaattgaagtgaagctgatgatttatctgtagtaaccattattattcaggcgccctgtggacttgtctggttcgctcaggtacaagacatgtgattagagaagtgacaaaaaggaggggcgt

SEQ ID NO: 35718 - DNA, 1458 bp, Zea Mays
tggccatctctagcacagcccggccggcgtcgttcatctgtgtttggtagtacggtcgttccgacggtcggatgctcacaagagaaaagagatgctgtgtgcaagctgcagagactggcgtccgacccgatcccactcccacggtcccacctcgcctctcgcgctcctgcccacccagcctgtccgccgtctggtgtccgcctgttccccaaaagcaaagagaggcgcagagccgccgccgttgatctctgacctttccgatccagagcctagctctcaccgtctaccggagctctcaccatggcggtgagctcgcggtttccctcccaacccgcggcgcgtggcctcctgcgccgcaccccgcagcgcatcctccccgtcgagcgcacgccgcgccgcctcgccctggtcgtcaccgccgtctctgggggacctgtacctggcggatcgcccgttcccaggcggccgccaccgccggaggacgccgcgaccgtggcaccgacctcagtgccgtcgtcggccgcctcggccatcgatttcctcaccctgtgtcaccgcctcaagaccaccaaaaggaaaggatggataaaccatagcatcaagggccctgagtccattgctgatcacatgtaccgaatggccttgatggctctgattgctggtgatctgcctgctgtggatcgagaaaggtgtatcaaaattgctattgtgcatgacattgcagaagctattgttggtgacattaccccatcggatggtatacctaaggctgaaaaaagccggcgcgaacaagcagcactagatgaaatgtgccaagttcttggtggtgggccagctgctgatgagattaaagagttgtgggaagaatatgagaacaattcttctattgaagccaatcttgtaaaagattttgataaaaacatggcaaagtgctagatgagttctttctctccactgccggcaagttccagacagagatcggtaagagctgggccgctgaagtaaactcgaggagaaaggagggatgcggaaagcaggagccttcatcaaacttccacggaaacgtgttgtgatggggacggtgtggccaactagagcctggcaagtttaagtggccctggagccaacttcagcggtgggctgatggcagttcaccgattgacacggctgttcagccttcctaaataataacaggagggttatggagtgaacactagattttagtctggttagctgaaatgttcgtagttgctcgaagaccaaggggtaggtaaaactgtgtagtgtttcgttgtagcctggaatccagcgaggatgagatacttcttcttttttcaactccgtgaataatgaaagggcaatggtgtttgcccttctcatcttccctgcccatttttattgggcaaaatctatgcacacagttacttagggcctgtttggaagcaccggtttttaaaa

SEQ ID NO: 35719 - DNA, 2419 bp, Zea Mays
agacgaaacctgtttttccgacaatcgagcgccgaaaaaggactgccaccaaccgctcgctttccctcacctccccacctctctcgctccctccctccctccctcccattgcaggatcggcaccgatgcgattcaaccgcggcctcgcatccggtgcggaggtctgcaattggggggaggctcctctccgccgttggaaccgctgcggcgtcgcagcctgtgcgactttcctgctggttcctcatccctcagggacagattttgcattctttggcattactgtttgatggcagacagtagtgctccttctctgtggaggcattggggcaaaaggcagttgaactgaacgggcacatcaatagtctctggcctccaagggaaattgggaaattcagattgaacgtggctgcatcatttttcctttcattggtcttttcagcaacagcgatccattctcgtaggggggagagagagagagagagagagggagagaaatcaaagaggagagtgatcatggagcatgtgatcggagggaagtataagcttgggaggaagattgggagcggatccttcggagagctatatctcgtgtgacttttcttgatctaggtgttaatatacagaatggagaggaagtgggaataaaattggagcctgtgaaaacaaaacatccacagctgcactatgaatctaaagtttatatgctgctgcagggtggaaacggtatcccacacctcaagtggtatggtgttgagggggagtacaatgttatggtgatcgatcttcttggcccaagcttggaagatttgtttaattcctgcaacaggaaattttctatgaaaacggtgcttatgcttgctgatcaactgataaaccgagtggaatacatgcattccaagggatttattcatcgtgacatcaagccagacaacttccttataggcttaggtcggaaagctaatcaggtctatatcattgattatgggcttgctaagaaatacaaggaccttcagactcataaacacatcccatacagggagaacaaaaatctgactggaacagcacgttatgctagtgtgaatactcatcttggaatagaacaaagcaggagagatgatctggagtctgttggctatcttctgctatattttttaagaggaagcctcccatggcagggccttaaagctggcactaagaaacaaaagtatgataaaattagtgaaaagaaaatgcttacctcggcagagattctgtgcaaatcttacccgccggagttcgtctcatatttccactattgtcgctccctgcgatttgaagacaggccagattactcttcaatgaagaagctctttcgtgatgtatttatacgggaaggataccaatttgattacgtatttgactggactgcactcaagtaccctcaaatgggctccaacaacaagcttgttcaacaaccaagtgcaagaatggctggagttggaccatcagttgagagaacagacaaagcttccatgggacaagagatccgggataggttcactggtgctgttgaggcattcgccagaagaaatccaggctctgggcgccctgcagatcattccagtcattccaggcacaaaagctttgcagattcctttggaacgtccaacgaagcagttgccgactcatcagagaaaacgcgcatcttgtcccggggagggagctcgtcgaaaatgcccgcagctccgtccacccggccgacctcttcgggggactgcagtgaccagaaccgccggtgggtctccggcagcagtggcggcagcgggcgcccgtcccccgcgcagaggctccaccactcgggaggcgccgagaacagcaggtcgtccccgcgctcccccgtggcccggaacgcggccgggaggggaggctccgcctcgcgggacaacacgacgttccgcagcctcgagcgcctcaccatcaccaccagcaggaggaagtgagctgccgaggaccacgccgacgaattctgagagtggaaggcggttactaggccgaggaacttttgcgggatccttgctctctgcagctaaagcaaatcggcaaatagatgatggatggatggttacaaggctgccatgaaaatgcaccctttccccaaaccccagcgtatagtataacgctctccccaaactccaagagggaagacaactccaaagtacaatgcaatcttgattctgtcgatctggcactagttttaaggtgttattgcagaatccctccatttgaccataaattttaaaaacgtatacaagaatctgagttaattttgtttaccgggtatttggctcgaagaatcgaataacctgtcactttctcacaacacattttctctgcggggtttgaagaagggttatttgaattggcatcacagacatttttt

SEQ ID NO: 35720 - DNA, 3152 bp, Zea Mays
gctctcgcacgagacacgcacgcccgcgcgcgtgaaggtacgcggaagcaggggcgaggattctccgaagcggagggcgaggcggcggcagcgaccttgagggagatggcggcgggcggtagggtttcaatcccggcaggggcgcggcgcacgatcgcggacatcaaggagatcgccggcggccacaccgacgaggaggtctacgctatgctccgcgagtgcaacatggatcccaacgagaccgttcagaggctcctcctcgaagatacctttcatgaggtgaaaaggaagcgtgacaagaaaaaggaggttagtaaagagccatcagattctcggtggagacctgccgtgcaggggcaaggtggaaagaattgtcggaattgtgcttcacgcagtttgtccagctctaatgattctgctggacgaagtgctatttctggaaaggagaatggaataagtttgatcatgggaaaaggtagtggttctactccgataaccaatatgaatatggatgtcaaagcttccactttcatgccaagtttgttgagtggtctttgcaacggtccatatcaatcagttgatcctgctgctgtgctggtgtctagttctagtgctgttggtgataagtctggttcaacagccttggctgatcttacagacaaactattggaatcaagaagacatcagtagaacataaggtggggcgtgatgtatcaacagacaaaggctcctccgaacaatctgtgcaatcttcatttcgacgatcctctgctagtagaccatcttccagctacaacagtcattcagaacaatcccaaaaagttattccaagtaaagaatggaaacctaaactgacttgcttggctgcttctcaagcaaccgaggatgctaccgtacatgataatgtacctttggctgctgctgacactatcacccaatcagctccagtaccgaattcagctggtacagaggattcgttgaaggtggacatatgtttaaatgatctacagttatcagataagcagcatgtgataattccagatcatcttcaagtttctgagtctgaaaagtatgttctaagctttggaagcttcgacgtcagttttcagcaaactaagggctcttcagatcctgattatgtgaagagctctttaccgaaattcagttcgtctcatgagttggatggcaacattgatgaacttcagtccatgcaaagagatcagaattcaacatctgttgtccaagaggaagctggtcatgttcctcaaccttctgcaaagctagaaaaatgtgcaccctcagcaatggagatttcatctattgcccttatggaatcaaaagactgtgatgacgattcagccacttcaggggatccccaatctacaggaactcatagtgcaccatcttatgtgacatatggatttgcaccacaatcacatgttaatcagattgagaagtccgaatctcattctcagtcgtaccatcccacaactgatgctgatgaacggctgtccccttctcttgctactcaagctgctcacaagtatgggaatatcccagttgttcccacacaaactggccaggatcaagaggggaacgactcacctgtgattatttcatctgtttctgcttccgttgctacccctgctgctggagttctgtcggcttcagttgctatccctcaacagtctgttcctgtatttcgccagcctttaggtgttcatataccacatctcccgatgaattatgtcccttacaatcagtacatttcaccattttttattccaccccctacccttcacccttttatgggtaatgctacattttctcagccaccttcaacaggggtcatgtacccaactcctggaaccgcaagagttcttccacctgtcaaattcccagttccttcattcaagcctggtgctaacattgggagccaggcatctattggagttcctggttgctatggaacatatggttctagtccatcggtttacactaataacgcacccgtgtcatctggaaatctagcagaaaatgacaatgttacttcatctcagttcaaggaaaataacatctattttgctgggctccagaccgacggcttgactctgtgggttcctacacctggacgtgatatttctgctctccaggtcaattccttctatggtctcccccctccgggacaccaggtaacatatgcgcctcaggctggacatggtccttatggagggatctaccacccagcacattctgtggcaggagctactgttactccactgctccagccatctcacacaatggctggagctgttgaaatagttggggcacctggtggtgtttaccagcatccccaagctcacatgaattggggaagttactgataggccatgattattgtttctttgactttgggtgtccatgacaacacatttggcagaggtgttcaagttttaacaaaggtgaacttgatcaggagtgtatatatgttctcagcatggctgatctgcagggcgggttattgcttccagaagcttccagattgttgtggttgtatttgtagcagataatggccatgaaattggttgagtttatctgctcaggttccttaatacaattttagcctcctgcgcccatcctgaaacttctgcaaggagcgtgatttcgctatcttgtctgattgagggtatggagtacttgaaactgaaattgagcaagtggattttcgttctttccgctgctttacatgtaaattaaattttggttcgatgtgtgacagctgttgtacttggtatcagttgtggacttgcagctaaccagagtcaaagtgctttgaaggacttactgagcacgtttctgttcctgtaggctgtagctcagagcctagtgcttcgttatattgcttattactcattattactatttattgttcctatgaactcgtattgtttggggttaaagggccagacatttgttagtgcccctttggtataagaaaaaatggcatgcaggctacgtgccgactcacgaggttggcgtgtgggagtgatgatcggccgaatggccttggatgactctggtttggtctcgggtgggcgaatgatgtgatatgttattatttgagtaattacatttattggacaatgcacgtg

SEQ ID NO: 35721 - DNA, 2127 bp, Zea Mays
cggaaagctattatccacaaaccctcgtcggctcggcctcgttcctcgcgcgtactgccgcttgccggctaccagaaaaatggccgcggcggcggcggcggctaggcgtgccgctggccttctccctctcctcctatcctcgcggtccggtgctcgcatacccctccaccgggctgtatcccagatccctccgccttgctcctatcgcctactctcgcagcaagccaagcccttctccgcctctgcctctgcctctgcctcagcctccgcgtcgaatggcgcgaccgcggaaagaacccgtgagctgcatctgtacaacacgaagtcgcggaagaaggagcagtttcggccgcgcgatccaggcggggaggtcggcatgtacgtctgcggcatcactccctacgacgacagtcacatcggccatgcccgcgcatacgtagcctttgacgtcgtctacaggtacttgcgctatttggactatgaagttcgctatgttcggaacttcaccgacattgatgacaaggaaacctgagttgcacttctggaattctgtagataatcgcaagagcaaatcagctgggggaagatccttttaacttaagtaaaaggttctctgatgacttcttgttagacatggccaatcttcaatgtttaccaccatctgtggagccccgtgtttcagatcatattgatgagattataaatatgattaaacagatccttgataatagttgcgcatatgtagtgggtggggatgtttatttctctgtagacagttttcctgactacggagaattatctggtcgaaaattagatgataatagagctggtgaaagggtttctgttgatgagaggaagagaaatccagctgattttgctctatggaaggccgcaaaagatggggagccatggtgggatagcccatggggcccaggaaggccaggatggcacatagaatgcagtgccatgagtgcacattatttgggtcattcttttgacatacatggtggtggggaggatctcatctttccacaccatgagaatgagattgctcagagccgtgcggcatgttgtgacagtaccataaattactggatacacaatggttttgtcaatgtaaatagccaaaaaatgtctaaatcgcttggtaattttgtcaccatacgaaaggttatagagatgtaccatccgctggctttgagaatgttcttacttggcacacactacaggtccccaattaactacacaatagaacaactcaatgtcacatcagacagattgtactacacatatcagaccttgcttgattgtgaagagatttgtcagcagcaacaaagcaacactggaaattcattgcctgctaataccttaaattacatccaaaaacttcatgaggaatttgagacctcaatgtcagatgatcttcacacttcagtggcattggctgctatttctgagccattgaaagttatgaatgatctgttgcacactcgtaagggaaagaagcaggacaaaaggctggaatctctttctgccttagaagagaaaataagagtagttctctctgttctaggattgctaccttcaagttatcatgaggctttgcaacagctgcgggataaggcactgagacgagcttccatcaccgaggagcttgtggtgcagaagattgaagagaggactgcagcaaggaaggcaaagcagtatgaaaaatccgacgagatccggaaagaactggctgccataggaattgccctcatggatggccccgacggaaccacttggagaccatctttgccaattttagaggaagcggtggttgcgaaaacatgatctgtgcaagggattccaatacgacccatggacaccagttctagtcggtaatcatggatttgctatatgtgacgaacttgttcgtttgactttcattcataccggcttgtaatgcttctataatgttttttcataattctctgctcccattagatctatagtagttactagctgaatgcacgtgtgttgtaatgaaaatatataatatgagtatactatgataacttatatacaaaatgtatgttataccgttatgagaaaatgtttcataatcaatttatgattcgggccata

SEQ ID NO: 35722 - DNA, 4402 bp, Zea Mays
cgggaagtgaaaataattcggacgttgggaaagtcgttccgtacccgtgtgccgtaaaggcgtaaaccacgtattgcgaaaacggctcacagtttcgatgcgatcgaagccggaagcacaggtccgtcagacccgatccgagccccagattccagccgaagccgaccccacacatctctcccggtccaggtagttacgcgtcctcttcctcctcgtcgcctcgcctcccagtcggccagtcgccaccgcccgagaagccgagcccgcagccaccggatcccagcgggcatcgccacccaccccgctctccatggtggcacgcgagagcgagacctaaccctaccttaaccttactacctcacaatggccgccgcgggggagcgccgcaagctttgtggctacctacgcgccgtggtgtccatccccggcggggacgtcgcggcggcggcgtctatccttccgctgtccccgtgcacgctctccgcgtgcggggccgtggcccttgcgccgctccccgacgacgtgcgggcccagccgcggtggcccaggtcgcgcgcccccggcgtcgtgcgcctgctcaggacgctcgtggcgaaccgctgcgtggaggtggagggtacgcttctccgggtcgtgaccaggaggaggcctggggaaggggaaggggaaggggacggcgccgcggtggaggccagggccgtcgtgctgctcgacgtctacatacccgtcgccgcgtggtccggttggcagttcccgcgctcgcgctctgctgccgccgccgtcttcaagcatgttaggtgcaactgggatgctaggaaagcgttgcttgattttgattgggcttctcatgacaatacacactgtgatgaccaatccgtttggagatgcactgattgtcacgtgcttgattgcgaggaccataagatagcatcgatatcaaataaagaaaagtcatttgacctgcacgaaatcttcaagacactccctggtgttaggatggagaagaacatgcaggtagcaagaataacaccagacgaaagagcactggaactgggtatttggtccgtccctgatgatgtattgcataaagtactaattctactcaaacccagagatttggtaagagtggcagcaacttgtcatcatctaaggactcttgctgccactgttatgccttgcatgaagcttaagctcttcccccatcaagaggctgctgttgaatggatgttgaagcgagagcagaacgtgcatgtcctagcacatcctttgtacaaggatttctgcactgaggatggtttcccattctacataaatgttatctctgctgaaatatctaccggtgatgctccaacaataaatgatttctgtggaggtctgttttgtgatgaacctggcctagggaagacagtaaccacactatctctgattctgaaaacccacggaacaatggcgtaccctccacaaggggtagatgtgagttggtgcatgcataagcctgataaaaaatgcggttactatgaattaagtcccagcttttcttctaatagaaacagctcgtctgtgtcaaaaaagcttttgggagaggatgtgatagcagattgtccaagtccagatgattctgtctgcagtaccagatcttcaagaaagagaggtaggttactgagccctgatccaaccaaggtaatgttgcatgctgcgattgagaattccccatcatcatcaaacagcaaagtgcaaccaatgccagctatgcatatactgaagttcactaaaaactcgagacaagttaggaaaaaccccatggatgcatacagcgacgtttcagttggcaataaaaggaagattgacaccacctctgaggtaagtgagacctgggttcagtgtgatgcttgtagaaagtggcgaagggtatctgatggaacagttcttgattctaccacagtgtggttttgcactatgaaccctgatcctacacgacagaaatgcactgccccagaggaatcctgggattttaagagaaagataacctatttgccaggattttacaagaaaaattctttgcctggaaatgaggaaaacgtatcatttttcacaaacatattgaaagattatgttactatgatcaattcagaaaccaagaaggctttgttatggttagcaaaactttctcctacaaaacttcttgagatggagtttgttggtttgactcgcccagttctagatacacgtgcaactacaggcaagggtgcccatccatattacaagatattccaagcatttggccttgtgagaaagattgagaaagccaccttgatagtggtgcctgctaacctaattgatcactggacaacacagatacaacgccatgtgtcctcggatacccttaatgtctttgtgtggggagaccacaagaagccatctgctcacaaccttgcttgggactatgacattgtcataaccacattcagcaggctaagtgcagaatggggtccacagaagagaagtccactaaagcagatccattggttcagggttatactggatgaagggcatacactaggttccagccttgccctgacaaacaagttacagatggctgtcgctttggttgcatcaaataggtggatattaactggtacacctacaccaaacacaccaactagtcaggttgctcatcttcacctcatgcttaagtttcttcatgatgaaacttatggtcagaattaccagtcatgggactctgggatccataggccttttgaggcgcaaatggaagaggggcgtgttcgtcttgtgcagctgcttcagagaacaatgatcagtgcaagaaaagcggatctgaaaactattcctccttgcataaagaagataaccttcctagacttcaatgaggggcatgcaaaaagttacaatgaactggtggttactatacgccgaaatatactgatggcggattggaatgacccttctcatgtagaatcccttcttaaccccaagcagtggaaatttcgtgctgctactttgaagaatgtccgtttgtcttgctgtgttgccgggcatatcaaagtagctgaggcaggtcaggatatacaggaaacaatggatgaattggtgcaacagggccttgatccttcttcagatgaatatcagttgataagatattctcttttaaacggtgccagttgtttcaggtgtagcgtttggtgtcgcttgcctgtgatcacaccctgtcgacatcttttgtgccttgactgtgtagctcttgatagtgaaaaatgcacattaccaggttgtggatatcattatgagatgcagtctcctgagactcgtgcaaggccagaaaatccaaacccaaagtggccagtgcctaaggatctaattgaattgcaaccttcatataagcaggatgattgggatcccgattggcaatcaacatctagcagcaaagttgcttacatgattgagaagctaagaagtctgcgagaagcacacatgaatcatgggaataacataaccaacagtgttggtcattctaatacactatcttatcaaccacaggcaatgctggacaaagttataattttttctcagtttctagagcatattcacgtgattgaacagcagctgactattgctggaataatatattcgggaatgtatagtccaatgcctctagctagtaagagaagtgcacttacgaagtttcaagaggacccaacgtgtatggctttagtcatggatgggactgctgcactggggcttgatttgagttttgtgactcgtgtttttctcatggaaccaatatgggataggagtatggaggaacaggttattagtcgggcacatcgaatgggggctacgcgtccaatacatgtagaaactttggctatgcgtggtaccattgaagagcaaatgcttaagcttttgcaggattctaacgcctgcagaaaaatagtggataaaagaacaggcagcactgacaatgaaggagggcggtcccatcggagcctccatgattttgctgaaagcagctatctggcgcaactcagctctgtgtagacaggatctaaagcaacaattcacattggttgttggtagcactaactggattcgtgatttcggttccttccttctgatcattcctttgcaatagtgatagtatttgcttcgaagccagttgttgttctcgattccaaaccagtgttgatcggggttcttttgtgtaaataactgcgttccttttgttaaacgcggtattcccagttgaagaagccttatactgggcaatatcaggattctaccgtagatttgtgcttttactaataaccttatgaactttgaacagtttaagttgaagctaacgtttatactccctctgttataaattacccttcgttgtcct

SEQ ID NO: 35723 - DNA, 973 bp, Zea Mays
agctagcaatctactagcgtccagcagcaccatccaactggctcatccgcaagcgaacccgatggatccaatcacaaggccggcagctccatcgttccatcggccagcagtcgcgaccgcgaagcatctccatcaggccgccgccaccttggctcggaggaatggagtcagcaggaggtgccttctgacgctgctgatgtccactgcggccatacctggcggcagcgaatcgaggaaggctctactgcaagagtatctgaagaaatcgaaggagaacaaggaaaagaacgacaaggaggtaactggagactcttttcccgtggtttaatagtgccctatcgttgccagtcgattgagggaggctggatgactacaacaagaggaactacagggactacttcgggctcatcgagggccaggtcagagagaagacggaagaggagcgcacggagtcggagaaacggatcctcgagtggctcgacaagaacaggtagtctaatgagcaggatcgaatggtcgatcatggagggccggccggtcgcacggggtgaaaattctcgcaggattcttcgtgttcccgctctagctatggcacgctttgtgtaaacaagtactccgtatatgattgactgagcgtactacgtcgtgtttgttttcctgttacagcgagagcgagcgaggaaacatgttatctcgttcgcaacataaacaaagattagaaaatttcaaatacacgatgcctgactttctgttcacagacagaaaacaaaacacaacctgaagattcactacaagttaatctccgcacggagagtcaatgtgcaatgcatgtacggtgaattgcaaaatctgatgtagactatcatataaaatataatttgttattacaattaacaggatgtctgggtggtgtagttggttatcacgttagtctcacacactaaaggtccccagttcgaacctgggctcagac

SEQ ID NO: 35724 - DNA, 1897 bp, Zea Mays
cagcgcgctatggtcaaaacataatatttcagaacaagtccgaacgaactgaaggagaggaggaggaggaggaatggcggacgcagccagaggcctcgggtcttcgtctctcccggtggctaacgtgcaggcgcttgcggagtcttgcaacgacaacggagccgatgcgccggtgcccgggaggtacctcatcaaggatcctagcgccgaggaggtcgtagccgccggcgacagcgcctgcacgattccggtcatcgatttccgcaagctgctcgatccggggtcgtacgaggaggagtgcgccaggctgggagccgcgtgccaccactggggattcttccagctcatcaaccatggcgttccggccgaggtgactgggaacctgatgaaggacgtagctgggttcttcaggcagccgctggaagccaagaaggagtgcgcgcagcaggccggcagcatcgaaggctacggccaggccttcgtcgtgtcggaggaccagaagctggactgggcggacatgctcttcctcatcgtgcggccgagggaggccagggacatgcgcttctggccgacgcgccctgagtccttcagggattccgtggacgcgtactccttggaagcttcgaagctagcgtaccgcctgctggagttcatggcaaggggcgtgggtgccgacccggcgtcgctgcagggcatgttccaagggcaggtgcagggcatgcgggtgaactactacccgccgtgccggcaggcggcggaccaagtgctgggcctgtcgccgcacagcgaccccaacgggctcaccctgctcctgcagatgagccacgacgtgcacgggcttcaggtcagcaaggacggcaggtggttccccgtgcaggctctccccggcgccttcgttgtcaacgactcaacgtcggtgacgcgctcgaggtacgtgtgtactttgaattgccccagttcgctaccatcactatcgaaattcggcgctttgccgagtgacggaagcactctataaaacctgaaaaacagttggcaaagtatttattgagtgcgacactcgataaagagaactcggtaaatagtatatcagcaacggcttatttaccgagtactttttatcggacagactttgccgactcttattcggtactcggtaaaaaaaaaccgtcatcacaactactagtagcggagacgacgcttttgtcttttccgttacaaagactttttttactaattaaccgaaaaaaaacacttaataaagaaccgaggactcgacaaagaatcgaatttaggtagtgcatatatatgcttgtttctctctctcgaatcccgacacgccaccacccttgcagatcgttagcaacggagcgttcaggagtgttgagcacagggccgtgatacacccgaccaaggagcggatttcggcggcgctgttccacttcccggaccaggatcggatgcttggtcctctgccggagctggtgaaggaaggcgacacagtgcggtacgcaacgacgacttaccaagagttcatgaagcgattcttcgctgcaaagctcgatggaaagaagctcatagagagattcaagctacagtagtagctacgacctctcagctcgaacaaaaaataaattcacttgtaattattaataatggccagttattgaacggtttgcttgtctaaaatgttaacgcgcgcaacctcgggttcgggcattactgtgttacatccgtttgcttcctgcatactgtcagagaattaccctgagcatagtggtactcgcatgagttatccaaatgataaatttggtagatgcataaggcttagcccatatttgtttaccttctaaactatataagttagattattatgtcaaaagagtatgagagtaaaata

SEQ ID NO: 35725 - DNA, 2426 bp, Zea Mays
cccggctgtcccgtctcgaccaccagcaccagttcagcccatccaccgccaccacctcagacgctcctagtcaccactcgctgtcctcggcttctcctaaaagctcgacgcgatggcgacgctggtgcggccgcccgcgctgcacgtccgcgccgtgagcggcggcgggaacaaggacagggtggcgccgcagcggccttggtggggcgggaacaagcccatctcaccgcgccagtcgggcgggagcggggcgcgaggaggcgcgggcggcggcggcgtcgcgctggaccaggtgctaggtgtgctccgccgcgacggcgaattcgtccaggccgccgtcggcgccccgctccgcgacgtcttctggctccgcttccttgagaagaagcagcggaagcagcagcagccgagacctaagcacaagcctttccggcagcagcaggaagaggaggaggtggtagtggtggacgagtcgcccccggccttcccgcccccctcgtacccgtcagggttgtcgtgcgtggagctaatggcggccgacttccaggccctcaaggtgtacgccggtagcgcgcggcactctctcgcgcgccgattcctcggtagcaatagcaagggaaagtctgaacagcaacctaaacccaaaccccaggagcagcagaaagagcagcaacatatacttcaggccccagccttccctccgccctcctacccaccaggattatcctgtatggagttgatgatggctgaccttgaagccctgaaactgtacatcaactactattcggccatcctgactacgccgctcccccagcattatgatcctgacctccttgcccagtacttcgcctcacgtccgcatatccttgcctctcgcgtcattcagatactcttcacatttctctcagctgtggtgaagatgcggatttcaaaaagagctcagttaaccacagatgctacctatagtagtggtaacagcggcaacgggtttgatgatactcaatatatggtcggccaacttctcaaggagacatttcttaaccttgggcctacttttattaaagttggacaatcactttctacaagacctgatatcataggttcagagatttgtgaggcccttgctgagttgcatgaaagggttcctactttcccaagagaggatgcaatgaagatcattgagggagaatttgggtgccctgtgtcgcatatgttcagttatgtttcagatgagcctgtagcatctgcttcctttggacaggtctaccaggggcgcacagttgatggttctcttgttgcaataaaggttcagcggccagaccttctaccttctgtactgagagacatctatattctacgccttgggcttgctttcatacggaagatagccaagcgaagaagtaacatttctctttatggtgatgagttgggtagaggtttcgtcggcgagttggactacaatattgaagctgctaatgctaccaaatttatggaggttcattccagatatcctttcatgctagttcctaaggttcttaaacaacttactcgaaagagggttttaacaatggagtgggtggctggtgagaaccccaaggatttgctttctttgtctaaaggagtttctgaaaaatttactcaagcttcagataatcagaagttggaagcaaaatctcgccttcttgacctggtcaataaaggtgtagaggcatcgctagtgcagcttcttgagacaggcttgttgcatgctgatcctcatcctggtaacttgcgttatactcctgaaggccgtgttgggtttctagattttggtttgctgtgcatgatggagaggaaacatcagcgtgctatgcttgcaagcatagtgcacatagtaaatggtgattgggcttccgtcgtttatgatttgactgaaatggatgtagttccaccaaaaaccaatctacgtcgtgtgacaatggtgcttggaaaaatttggtctgtggcatttaaatatcacttccgtatgccaccttactacacacttgttctccggtcacttgcctctttggaaggactagccgtggcagcagatgggactttcaaaacatttcaagcagcatacccatatgttgttcggaagcttctgtccgaaaattcacttgaaacaagaagactcttgaatcaggcaatttttaacaaaaggaaagagttccaatggcagaagattgacgcgtttctaaaattggcttcagcaaggatgatatgcatgtgccaactgctaaccgtacttggcaagcaaacagacagttctttgtaatacttacatgcccactcatgggaggaggacccagtatggcgatgtatggcgcttgccataccttgattcttccatgagcaatcctagaaaatcgctgaccggctgctctcctccgatgtccgccata

SEQ ID NO: 35726 - DNA, 2203 bp, Zea Mays
gtatgtggcagtttcaatttctggcaacaactcccgaaagcaccagtacatggttactactatagttgctaccgacattttggtgtaccagcaatctattggtgctgtttgcggtctggactggccaaggccaaacttcttggtgcaggtgctagacgattctgatgacgctgccacttcaacacttattaaagaggaggtggagaagtggcaacgggaaggcgttcgcatattgtaccgacaccggttaattcgtgatggctacaaggctggaaatctcaagtcagccatgaactgcagctatgtaaaggattatgagtttgttgttatctttgatgctgattttcaaccccagccagacttcctgaagcgaactgtgccccatttcaagggcaatgaggacgttgggttagttcaggcaaggtggtcttttgtgaacaaggatgagaacttgctaactaggctgcaaaacataaacctttgcttccactttgaggtggagcagcaggttaatgggatcttcctcaatttctttggattcaatggaacggcaggagtgtggagaataaaggcactcgaggattcaggtggatggatggagaggacaacagtggaggacatggatattgctgtccgagcacacctcaagggttggaagtttctgttccttaacgatgttgagtgccagtgtgaattgccggagtcatatgaggcatatcgaaagcagcaacaccgatggcattctggtcccatgcaatcggattctggaagaaagttcaacctcatatttcttttctttctcctccgcaagctcattctgcccttctattccttcacccttttctgcatcatccttcccatgacgatgtttattcccgaagccgagctccctgcctgggtcgtgtgctacatcccggcgaccatgtccctgctgaacatcctcccagccccgaaatcgttcccgtttatcgtgccctatctcctgttcgagaacaccatgtcggtaaccaagttcaacgccatggtctccggcctgttccagctcgggagcgcccacgagtgggtcgtcaccaagaaatcaggccgttcttccgagggcgatctcgtcgtcgagaagcagcctagacagcaaagggcagggtccgcatccaaccttggttcccttgcaaaggagccttcctccagtctcagaaaggactcccaaaggaagaaacacaataggatatacaggaaggagctggcgctctccttccttctcttaacagcagctgctcggagcctgatatcggtgcaaggaatacacttctacttccttctgttccaaggggattgcgctaaggggaacccagaaaaagggaagaagatgttctgcatgagtgcatcagtagaatgcctacgggctctgtttgtgaatgcaagagcgcaaatcacatgcggctcacgaacggtaatcttccagcccacttgtccagcagtgatggtggagagagacagggtatcaggggaactggggaaggggtttaggaacaacccatctccattcaccaacggcgcctccaactccgagcgccgcctctgcctcgaaaactcttactcgcggagctgcagccaggggggcgaccggtgtgtgaaccgctgccgctatggctgctgcttccgttccgccaacatcttcatccggcggctgggacttcacctgtaaccttgaagtcgattatgggtctgaagaaaatgcatccatagtctacagaacgttagcagttgacaaggagttgcagcctgacaaggtgaagagggagatgactctatcaggcagcaagctggccgtccacttcgcagccgtggaggcccgcttcctgcgagcatcgttcagctcatttgtggatcttatgggactcgtgacgaagctcgtcgaagaatatggtgtggccaatgcagggcattcttgaatcttgatgaacaatctcatacacggcattgcggagttgattttagttcgcctgtgagcaatttggagttttggacagtctttaccagtggaactgctcttgatctgtgtcaagctagtgtagtatttgcccttgattggtcaaatcctattcggaacggttaattcttttcggcaatgccgttgtgaaatgtatagatgatgaataggtaaaaattatctatatatcctcagttaggctttctccacgagtaa

SEQ ID NO: 35727 - DNA, 589 bp, Zea Mays
accgacatttgccgcctctaaatcagatacacgccgctgaagcagcactgggttccaacgcgccagggacaaagctccttctgggacagaggcaccttgcaacttcagccgactagacatctcatcgaccaacgcctggcattaaaagcagacaagcatgagaacaactatccgccaaggtaaagtcaggccaaaagaaaccaaaatacctggaggttggagaagaatgtaacaccccaggatccccaaacatcctgaaatgctactaaactacacaactaacattcatatataaaattttgacagcatctcctttgaaaatttgcataaacgtggaagcaacagagtataagcagatatcatgataagaaaacatactagacattaataatcggctagcaataggaagataaccataacgacatgaattgaattaactagtgtgcatgactagttaaagacaaacatcctttgacaagaagtttctaattaaatcatggctgtgcctgggcagcgttattatgagagtgaaggtggacgtgctgctactcccctcattcccaacatgaatcaagtaccttcatccaac

SEQ ID NO: 35728 - DNA, 2827 bp, Zea Mays
gttaaatggggctgaatagaatgcttcattagatgaagaagggagtacaatgtatagccagaagggtgcaacactagggaaggtgtggcatcctggctattagatcctgaataccgtaggtagcagcccctgataactatactaaagtagctgatcctagatgctatataggactgcactacctgctatgcttgacagaatttcgatacatatcctcttgtaggaggatggaaagaagcctacagatagtaattacaaattatagtaataatttgacaaggaccaagaagaatacatatacctgttgatcaataatcacaagatccaaatgtttgattggatcatcatcatttttgccatgaaattcccaaactcttgatatccgaacacaaatgatatagtggtagacccctggtcgaacttgtgatagtggtgtaatgtccatctgcaaatacaatttgttaaaaatagtatcaatttatgttgccatggctctcaatagattgtagtacttctttatacacaatattttctgttattgttccacatgaaccgtcgtcattttctatcaatattttgagccctttcttttctgtaactcgtgacacagctaaatatagttgaccgtgtgtaaacacctttttctttaaatataaccctacatttgatagtgtttgtccttgacttttatttatagtcatagagtagcaaaccttgattggaaattggcgttgacataatgtaaaaggccatttattgcccttagttgtcagattaatgcggggtatatgtattttttcgccaacgtgtgtacctgttattattgttccttctataattgtgtctcctagttgagttataataattctggttccattgcatagtcctaaactttgatttaaatttcgtagaagcattacaggagtgccaattttaagttttagtctatgagaagggaaattgtttgcgtttaaagtgtttagatactcaatagggtataaaatattggcatcatttggagcatctgtgcatttagatatgctatctgcactatagtattctctctctactgttggcaaaagagagataatataatcatttatttcatctacaacatcattagttgttgctaatatagctctttttttgatataatctggatcattatattttgtttgtaggtcaggataagtaaattgaactaatgcttgaattttatcctctgttgtttcaattaaaaattcttttggtatttcaatgagtgttgagtccgaggaaaaattatcgttgttgttatataccccatttccaatggcaaggatccaattattgaatgataacaagtcttcatactcttcatttgatatattactttgtcgtagtcgcatgttttcagaaaggaatataatgttgacatggttccaaaggtatgaagcaatgatacaagcatttattatttgttcttttgttccattttctataacaggtaatatttgttttggatcgccacctagcacaaccactttaccaccaaaaggaatgtcaagagctttttcatatgtttctcctactatatctctaagggatctatcaaatgcttcaaagcattgtttatttgtcattagagcttcatcccatataataagatctgtgtcaataagaagttttgcaagatttgttcctctttttatatcacacattgacaattgatccaaatctataggtatacgaaatcttgagtgagctgtacgtccatttggaagtagcaaagaagcaactcctgatgatgcaactgtaaggacaatctttcttatagctctaagttcgaatatattggttcctgattattgtgtctcgtcatggatttattgcgttcattgaaccagaaaattgcatcgcagtgtctacatttgtattctagtttaccaaggtatgatctgtcagtgtatgattctttcagttgctggatatactcggatgggaaatcaaccattccattatgggagttcaaaaatctttgtatgcagatctttttgttggagggttcacagtttttagacatcttcctctttctaatcctttcaccgcgtcttattttactctcttctccaaaaaagttactgctctaagagaggtgttttgaaatagaagagagggtacatatttgagcatatgtagagcccaggtacctcgctctacaacatcaaggattatcttgtcattcataagagttaaaggccctttcttcagtctttcactattaagacacaatttcatgttgcaaagatcttcaatggatgatattgatgacgatatataagggatatcactcttgagccacataagcttgatgaagagattgttgaatctaatcttgagcttgaagcagactttgtacaatttaaatatgatgatcgatcacaaaagatgggaaatggacataaacagtgaacatgaagaagggtgtgctagatggaaaggaaaccggtcaagctgattgaataagaagaagtctcttaactactataaatccatccatgaaatggagaagattaatgctaagccacttcaagaaaaaaggttgggtctagtcgttgttgtctctatactggcaaagggaatgcggagatacatttcgagaagaaaaaggcaatgatatggaggtgttttgtctttcattgataaaaaattagaaatgagcaggtgatgaatgtcacatgaatatatttagctatttcaaatggaaaccaactttgttattgtactggcttttgttcataataaaaacacagaaggcaatggaaaatctacatgcaaatgttttgct

SEQ ID NO: 35729 - DNA, 2514 bp, Zea Mays
ggaaaaaattgctgcgtgcgccccgccgcctacacacgcctagcccgctccccaagaaagagcccccgcacacaggctgggaggggagcgaaagcgaaacgtattaaactcgcgtacatcatcaaccgcatgcgctgatgcgcactgccactgccccggagaaattcaaatcccaagccccacaagcaaattaccccagcatcaaatcagcggccggccggccggcagctctcggtcgatccactgcggtttccagtcccgaataatcccaattcccaatcgattcgaagcttccttccttcgaggagagggggaggtggaaggcgcgggggaagctctgcttagggttcggaggtggccggcgccgccgcggggcggggacggcagggggatggatccggagcagacgttcctgcgggtgcacgcgcgcttatcggggacgctttcccagctgctcacgccgcggatccgcctcgtcctcgagtacctctacctcgccggcgccgtcgcgctcttctgcctgctcgtcgtcatgcacacgaacttcgtgcagcagcctggttgctcaagtgaattttctggaattgaatttggagaagcacaacttgtccaaatcaagattatcagtgggggattatggtccagcagaggtgcttcttacatcatggatctccagaacctgggacgttcagctgagaaaattttagaggttaatggtgataagttcaacattttggcatctaaattttggtcaacctgggttggccctggagctaggaggagcttaccagatttgaaggcagccggagagggttctgtacaccaccctttatctgctaaggagtcatttaaagcagcagtgacatttttgttcagaaaatggtaccttcgtgctgtttcattctggaagaacataaagcaactttcagaaaataccctccagttaatggtcagatcaaattggaacgatttcctacatattattaaggatcttcaactaccaagcatggatcatcttatttcgacaatagtgcaatggtttgagaggagaagtaaagcatttgagcctacttatttatatggcgtggaaaagggttatttcttgctttctgaaggtgctaaaactcgtcatggtgtccgaacaatcaatatcacaatttctgctcgaaatccttgctttggaaacaggtggcagcaacttttgataaacagcattgttggatatgatactatacttacaaacagcttggtgaattctcctggtcatggctatttatacaactttcagacgaaggagctctatgatcttagttatgggcatgaaccaccagaaggtcctacaagatttggagattactttgtgacaaaatgtggtgtccttctaatgtcactctttgtctttttcacaaccaccatgtctgtttcatttactttgagagaaacacaatcccgcatgcttagattcacaggcttctcatatctggctttctctgctacggcagcattcatgcagcacctgattttatatttttggaaccgttttgaggtgccagctctccagagattcatgcgaagtcgagcacacattcaccagcaaacaggtgtccacattacatcctcaactatctacacttctaccttacacattgctagggtaaatgtgagggaccctggtacaataaacgatggcctcggtgctgctcgtgaagcagatgccctattggttcaggatgagtctaccaggagccagcaagagggtcaacagaatggaatttctgagccagctgccaacaatgctctccagtatcaagagcaaaaccctcagcgagctggaagtacccctgcaggctcaggctccctcaacccatttgggtcccttttgctgtggttgctgggaggcggtgcttctgatggcatagtttctttcttctctatgttcagagatgttcgtgatcatggtcaagattacaccgatccacctcgaaatggaaatgatcaggtgacatagaatcacggggatgaaagtgggccaattactgaactcgagtgcttgggcggcagtagtctctttctaatatgatataatgccagcacctcccgtcaaaaggataatgacgaatattggtggcaactatacagactggtgtcgctggagatgccatgttagtgttatctgtttctcacttttttagttagtaggtaagggtgaaggttgtatctatattcattacatgtgcacattccctaccgtctgaatgggagcgcccgtcccagtcctgtacagaaatgtcaactcacagcagattgtgcacattctttttgtactcccatgggcgggtgctggcctggaacatgcagtgtgtgcaccactgtcactgaattggacagttaatggtttggatacatcgttgcatgtactgttccaacttccaaattctgaattctgtgcttgcagattagttcctgaaaatcatgtttttcagtgttccttggagttttgaacaccgatgtcca

SEQ ID NO: 35730 - DNA, 4819 bp, Zea Mays
ttctatcctcctcgtcttcctcgtgacttctccaaggtgaaaccctagctgctgcttccgccactcacgccgctcgccgccgacgccgactatcgccggaaacaggtcaacaggagagcccgttcaagtccgggacccctcaattgtccttttctctctctccccgcccaacttcccctgctctgccgccgcctccccagtccggcgtgcatcagcagcgacatcagagtcggcgatgggaggcgtcaccgacgttctcgtccccttatgttgatgaagtggcgtgccgtggagattcctttttgaccgatttcttgccgatcaatccttcattttctccgtcgtgcaagggggtcagttgaatcagatgctccacgttacgtccacccttgagctcgatggcagaaggaagcagtagccataggaggagtgcattctcccctgggctggctgtgttattatctggcgatgaagctaagattagctcccagaagtcgcacctggtgtcctatcatgacgaaattgggcaccaggctgttgagaggacgatagagcacatctttgatctccctcacaagtcagtggtccggcctcctggaccagttgacacaggcttcgtgcactcagtggtgaggaatcaagctagaaaatttgatcttgactgggaaaactgcattcggggataccatcgcagcgtcttcattgtggacaaaggtgctgggcagaggaaggtggttcttgatgattcgagcatttgtggtagcttcaggaatgtccggggaccttcacttgttgagagttccgcccctttcagcagtgccagggctaatgcttgtgtgtggaaaggcaaatggatgtatgaggtgacccttgagacgtctggagttcagcagcttggatgggctactctctcttgtcctttcactgatcagaaaggtgttggtgatgctgatgattcatattcctttgatggccggagggtgactaagtggaacaatgacccaaagccatatggccagccatgggcagtaggtgatgtcatcggttgctgcatcaacttggatgcaggagaaatttccttttacaggaacgggacttctcttggtgttgcatttgatggaattcgcagcgtggaacctaagaagggatattatgctgcagtatccctctcggaaggagagcgttgtcatcttaatttcggctcacatccattcaggtatcctgttgatgggtttgatccattagaggcgccaccacgctcttggtcgtttgtcacataccttcttagatgcctgttccggttgctagaagttcacaacctggagaaatctgaatcagcatacttcgagaaactgaggagggtgaaaaaatttgcaccactacaagaactctttggacccatttcagaagggatctgtgcagaaattttcagtgctattgaagcaagccaggggtgccttgagtatattgcctggggctcgttgatcactctactcttagatgttttcagaactcgtgagccgcatgatttctcatgccttgatcaggttcttgaccttttcctccggttcccaggttgcacttcattatttcaggagctcattgtggccctttcttgcatgtgcaaagttgcaccacttgtgttgacagaatgcccatattctgggtcatatccatttttagcgctggtttgccaccttcttaggcataaggatgtaatgtgtttatggtggaaagcagaagatttcgttttctcgtttgaaggcttccttacaaggaagattccaaataagcaggatctacagtgccttgtgccatctgtttggtggcctggttcttctgaggatgaagttagcatgacactgacgatgacaacactctcagatgcaataaaaaagattgaggagatgcatcgtgaactttgcagcttggtaatatgctttattccaccaatgtctacgcctcagcctccaggctctgtatttaggtcctttgtacaaagtttggtgctcaaagctagaggtggagatcataggatggttgtcaatgggactttcaacaacactgtgcttgtttcattgtacacagtaatcctgcatttgttgtctgaaggattttctatggattctgctggatctgcatcatcctctaaagcgaactttgggaatggtgttggatttcttcacaaaggtggaaaacgcaagtttccgacacaattatttttcaggaatgatgcctatcacagtgtaattcctagaatcggtggaccaccaagtattttgatgcatcaccaatttgatgctgtggaaaatgaagtgcagtgggatgaaggctgcatgaatgatgaagagacacgtgttacacacactacagcacagaagccttgttgctgctcagtgacagatgttgctgttggcctaagatacaaagaaactgctaagtatgtgccatcaacttcaaaaggctcatgtaagcctatgcctgaaagatctcctcatgttgctgctgagtgcaatggtagaggtctgagtgatgagatcgaagacaaacctagcacaagtgctcaatcagaaattgaatatggataccaatcactgcatagtcttgaaaacatgccaatggcaactcaatcttcgtcggaaacacttaaagaagaagagctgcttgatgttatgttgttgttatatcatctcggcatctcaccaaattttaggcaggcattttatttcatgtctcagcagtcgcagtccatttctttactagaagaaactgacaggcagatacgagaaaaatcatgctcagagcaagtaaggcgtttgaaagaagcccggaatagctatcacgaggatttggtagattgtgtacggcattgtgtttggtaccgggccacccttttctcccagtggaagcaaaggggaatgtacgcaacttgcatgtgggtcgtggagcttcttttggtccttagtaactcaaatagcatgttccactatgttcctgagttctatgtggaatcactggtggattgtttccatgcactgcgaaggagcgatcctccttttgtttcccctgcattatttctcatgcaagggttggcctcgtttgtcactttggttgtcaagcacttcgatgatacaaggatagtgaaccctgacttgaaagatcttcttcttcaatcaatatcagttctcgtacagtataaagaattcatgcttgttttcgagaacaatcgggaggctataaataaaatgcctagatcactgttatcagcttttgacaacagatcatggattcctgttacaaacatactttcccggttctgcaaaggctcaggatttgcttcctataagaatggtgaatccgcatcatctgcaacttttcaggttctactgagggagacatgtattcatgaacaagagctgttcttttcctttcttaatcgacttttcaatacactcagctggacaatgaccgagttctctatgtccatccgggagatgcaagataaaaaccaggttgctgatttgcagcagaggaagtgcagtgtaatttttgatatctcatgtagccttgcgagaatcttggaattctgtacccgagagattccttgtgcttttctcatgggaccagatatgaatttgcggaggttgactgaattggttgtctttattctcaaccacatcatatcagtagctgatgcagagttctttgacatgacactaagacggccagggcagcatcaagagaaaacaaatcgtactatgatcttggctcctcttgtgggcattatcctcagtcttatggaatgtagcagcacatcagaacgaagggagctaaatgatgtgattgcagtgttcgccagcatggattgccctgccacaatccattttgggctgcagtacctactgagctacaactggagcaatgttcttcgaggggattcatcccttgcaaagctagcgcagcttaaagagttctcccattacttccgacgcattacagcgtccgtggatggtgaagaagaagaccatagcctaaacgcgggcgatgaagacgacgaccacacttgttgcatttgctacaactgtgattccgatgcaacattccagccatgccatcaccggtcctgctttggctgcataagcaggcatctcctgaacaaccagaggtgtttcttctgcaatgcagtggtaacatcggttactagatagccgattcgcgagcgatgcgctgctctactcattgcctctttcggtatcgtgatccgaaggaagatggtgccactgatttgtcttatctattttgcttgacctgagggctggggcgctggcgtcccagagatctttccattgcttttccaggaagaacgcgttacctttgtgcacgagggtcagaagcggttcttcgttttccttgctgtatatgtaaaggccaggtaatagtagaaaggattcaataacattgccgcagaaggaggtttctgtacacggtgggaagccagtaccaccgaaaggaatttcatggaatcgcaatttttgtagggtgtagggggagattccacgactgtaaatatgatgagatatgaaacagaaaagggggtggcagatcaacatcgaccttctgtaattagccagaataaaagaactagatgctttatattgagcagagctctcgtctttttgatcctccccacggtgtagtatcaagaatgaataaatcttctgtttcttgtctggttgtagcatgccagcatctgtaagttgtaacaattcagtgaatttatttaccttcagcaaaaagggtaaaaaggttgcctcttcaa

SEQ ID NO: 35731 - DNA, 156 bp, Zea Mays
cctaggtataaaacgagaagcccaggagcctctcctttctaggcgtggcaaagacgaagtgatgcccagccgaatgcgcctcatctagatctcacgacgacggtgcccaagttctcggagccccgacctccaatcccgctcgccttgtcaacaact

SEQ ID NO: 35732 - DNA, 2234 bp, Zea Mays
cttccttgagggaagcagaaccgccttgaccgacgtgactacggtacggcccccaaacccggaacggcagcgaaacgacagccatgcttctccagccgatccccaccgccaccctcgccgctcgaccgagatcaagcgaagcttccttcccctttcgttgccaccgccgccgccgcgtgctcctcccagtccgcgccgacttgaccccgatctccctctcggcctccgccccctcgcggccggccaagccggccgtttgcaccgccgacgagctccactacgcctccgtcgacggtgccgggtggcgactcgcgctctggcggtacaggccaccgcgcaatgctcccgtcaggaatcacccgctgatgctgctgtcgggagtcgggacgaacgccgtcggattcgacctctcacccggggcttcgtttgcccgtcacatgtctagccaaggatttgatacatggatagttgaagtaagaggtgctggtctgagcatgcgtgaatatgatgattctactccatctggctcagtcacttttgaggatgtctctagtggtattcaacctcttaatagtacattcgaggccacttccattcagagttctggtggctatgctagtgattgtgatgaccttggaatagttgctttggatgaaccacctttacttgctgaactttctaatttttttgatcgaatctcaaaactcatggaagaggctgtagttaatggaaattttcatgagatcacagaaaaagtttctgttctctcagaaatggtagagagctctaccattattggtccagtgagagaagaaagtctacgtcttcttaagaattttcaggaccagttggattcatgggagcgttttgtagcaacacaaatggatctgacttctgagtataattgggacttcgaccattacctagaggaggatataccagccgcggtgggtttatgatcttatctaaattgttacctggcaaactgcaggcagatttcattgctagtagtgtaatcatgattctttcaatggaatattgtcaagtttaccttttatttgtacagctggagtatattaaacaacacagcagagcaaaagatggcaagttgcttgccattggacactcaatggggggaattttgttgtatgcaatgctgtcaagatctggttttgaaggagtttcgtcaaatttagcagctattgtcactttggcttcttctgttgactatacaacatccaattcatcgctgaagctgttactgcctcttcggcgtatccgtgggcatctggtccaccatatcttttttcctggcttaatcctcaaatatcagctcaggacatgatgcatccggagttgctggctaagcttgtttcaaacaacttttgtacagtgcctgcaaaggttgttctgcaacttacaaccgctttcagggaaggtgggctgtgcaaccgaaatggaaccttctcatacaaggatcatttgcgagagtgtcagactcctgtccttgcattggctggagataaagacctaatctgccctccagatgctgtttatgaaactgtgaaactcattccgaatcacaaggtggactatagagtgtttggaaagccacaaggcccgcattatgcacattatgacttggttggaggccgactggcgatcaatgaggtgtatccatgtatcatagagttcctctctcgtcatgatggttattgatttgattatatgatgctaatacagagtaacttacaacaccatgttcatctcaaaggttttttaagttgagctgaacagtcttttccatggcttggccagaaaataggtgcatgcacgaattctcgtgtgtgttgaagagagagaaaaaaacacgagctcatctgatgtatccttgtaacaagcatcgaccacgtacttcggcgacgaagcaattgatttcgggtcacgccttcgcaacatcaatgtccacacgaagctctgcgactttttttcctggcctgcaagttacccccggcgaaggttttcttcgttgtcttttcgtgatgtaacacattttcacaccccgaatttaagggataaagctgggtgcgtctcatatgtgcgccaaagaagaacaacacatataatgaccaagtgtatagagataaatgtcataatcattattacatagcggaagagtcttacagaaataaatgataacaataaagcgaactaaataattattccttggcgcc

SEQ ID NO: 35733 - DNA, 2224 bp, Zea Mays
ccgcaggcaaccgagagcccgagaccgcccaggtgcccaccactccaccagccaaccctagagcctctccagtctccactgctcggccgccgcctgccgcagcccgccgtccactggtcccgcctcccggcgtccgctccacgcctccactgctcccggcgtccgctccattgctaccatcgtccggcgttctgctcctgcgccctccctttgattcgttgccagttgtagtgtccgggcagatttgagctgtggcagcaagcaaggattgacgaagcgtgcgttcccatcgcaccaccatgggctacacagagatcgacatccacccctctgggagcggcaagatgtgatagatattagtatgaaagataaaaactagaatgctatgcctgtcagaggagctttcttcagtttcaggtactgctctgctttattagtcatccagccgatggataatttctatacgtgtatcgcccctgcactttcaaacacatgttcattgtttccaatcacataatttttttcttctcttagatttactatgtggttgtggtctcagtttggtttgtaggttaatttgtatactcatgtgattttagtttttccgtgtattttatgttcatttagtatgtcttaatttagttactttcaattcttgatgctaataatatggatagattgcgacactactttctggcttgagcagaaatgagtttgttgtatatagcagaatatagttgtcgtagctggcaacaatgaccgctctttggatgatctgaaaactattctgtagtcaggtagttaaatatagctgaatatccattattatgttttattaatcttatttgttttttctgtcaaaagaacacacctctccatctttcggtgcttggtggatcaccgtctaaacgatccaccaccagaaccgcccaaccccaagataggcagctccatctcagtcgttgtacccgttcaatggcgagctggtggcagcgatgtaggagatgatccatgccgaggtgcacaagtacatgttagtggacggcacctgccaaagatacaccgtttctactgtttttcagttggagaaaacatttaagacaacattttcatcgtttgttctccatatggggcttgtttcacgccacttgaaggaagaagggaatggtggtgttaagttcggacaatacatctacacatcttggagcatcggcatcaatgttctcaatcttctcaaatttcaaattatactggtcattactttgaccattagaataaaatccctataaaacgtggccatgcaatcactggttgtaaactgatgggcagaatgttgtaggatggattggctcaagaactaatatagcttacttatgacaatgtagtaattcatgaagttattgttccttatgttcatggagtttgttctgctaggtttttatgcttttaatttctatttccttaacgaaacctcaggcaccttaaagacagcttggatgattggtttcatgaacagctagagaacttggatgatgattatcttgtgtttgattgccctaatatattctcaaatcatcttttcatgctttagttgtttcttaatagttgcacagtttcatctcactcatattcttgccacttacatgtatgtgacaaaacagacaatccgtcttttttattgcttatggcgttgtgcattatacatgtccaccaattatatacaaataccatttgtgggttacctctggtgtgtttaggtgcgagctgcaatcaaagttaaggcattagtcatcatttgcttcacctcttctggacaggctgcaagggtgttctggacaaagaaagcttgtaccttaaaacaagaggatacaagaagctggagtggttgtctaaaggcttttgaactgcttgaagcattagtgtagctttggtgattttgtgactgatcagctctggagcagctagagtgatgtagttgtgggcttttgaacaatagctggagtgatatgaaacattagtgatgtggttgtgggcttttgaactgcttcaagctggagtgatgtcgctgtgttgcttttgtgactgatcatctctggagcttttgtgaatgatctaactagctatatgtaaatgatctagttgtgaatggtattataattgtgatgattttgtgaatatataattgtggtgcttttgtgtttatgtgatggatctatgactggta

SEQ ID NO: 35734 - DNA, 219 bp, Zea Mays
attacataaatcagagtttttcaagtaactgaaacaagttcataaggtaaatttgcagcggataatcgatatcgtcgaaaaatgaggaatagggcaaggcctagcccactactcctcctgctcctctcctactggagcagcatcccactcgaccgtccaacccggtggcagggtggtaggccaagtcacaccatcaaccatatcctgaagcgtacctgc

SEQ ID NO: 35735 - DNA, 1001 bp, Zea Mays
ctgtggcctctgccttctcccagacacgcttgttgcccaccccctctgccttgtccttgttatgctcgtcactgacgcccgtgccttctcctggctgcacccatcacccgccgccattctcctcctggacgccgcccgccactaacctccttttggtagcgcttgtggcctgtggcctgccctccttctgggccgtggccgtctgtactcgcttcctcggccgccagtccgccacctgccgtccctcaggcagcacggctctggatctgggggcatgctgcctatccactgctgctcccttgtggaacactgatgtttacttgtacacaactacaagtacacatgcatgtacaccgtgctcgtcatatattctcacaggttgtgctaccacagctggcgagtgtggtggttgcttgggaggtgctggggaagctgggctacctctgcttctcatcatgggggttattgtgcttgggcttttcacggtcatcggcatattctacagtgtcctggtcgcgacaatggttggccagcggatctggcagcggcattatcacattcttgcaaaacgaatgctaaccaaggagtatgtcgtagaggatgtcgatggcgagcgcacagactggtgtccgccgccgctccctgcagagcacatcagccagctgaggtctctggggcttctataatagctagggtactcggcgtggcattaccctacccagctgtacaggaggcgatacaaaagcaggaagtcaggcatactgcgttgaaatgtggcaatattgatatcttctttttttgtacattgtaatggcaacagtttcttcctgacaaccaaaaagttttataccaagtgaaatcacgtactttacgaagtctgcgtggcttctcacctctccaagtgactttgtcatgtttaaattcgcgtatcagcctatcggcctatcctccctcattcagaataacaattgacaacggggattcatcgaattctatactcc

SEQ ID NO: 35736 - DNA, 1087 bp, Zea Mays
agcggtgcattagcaggcaaaggcaccctaccagagtaccagtcaacagccaccgtttcgatcttcgccacaccgctcggcgctcgcctccgcctgattcccatctttcccgagctccacacctcacgtctataaataaggcgcccgcggtgcccatcaattcgcgtcaccgcgtcccgagagcgcgattcattccgcgcgacgcaaaaccctagcccatccaccgatccttgtcatggcggccaccaccagccaggcgagcctcctcctgcagaagcagctcagagatctcgccaagcacccggtggatgggttctcggctgggctggtcgacgatagtaacgtattcgagtggcaggtcaccatcatcggcccgcccgataccctatatgatggagggtacttcaatgcaataatgagcttcccagaaaattacccaaacagcccgccatcagtcagatttacctctgaaatgtggcatccaaatgtttattcagatgggctggtgtgtatctctattcttcatccacctggtgaagatccaagtggttatgagctcgcaagtgagcgttggacacctgtgcatacagttgaaagcatagttctgagcattatatcaatgctctctagtccaaatgacgagtctgcagcaaacattgaggcagctaaggaatggagggataagagggaggatttcaagaaaagggtcaggcgcatcgtgcggaaatcacaggaaatgttatgaagaaaatggaatactggggaagtcaaccgtgccataaatgcattgggacgtggtgtatcgtgtggcctgggctctactaatgtttgacaatcctgaagtgccaccagtggtgaacctggtataagcaggcgccattcatgtcagctaatcgttgagaaaacatatcagtgaaatcgtgcaactgttagtgtaatgaggcagttcctgcttacatattattactcgtgctacctgtctacagtgtcttgaatgcatggaatgtcttgaattttacctgttttccttggtgtaagcatggtatgcaataatgggaaacgcaaatttctcagttaactgtatcct

SEQ ID NO: 35737 - DNA, 1157 bp, Zea Mays
gcgctatgggacacaagccagcccaccgtcaacccgcatctgcagcacgtctcctccttttcctcgtccacccggccatctccgcatccactaccgcaggccgcagcccagcaccggccgctctacgccggcacgtcctcgtttctgtccgaggtcatcgcctccgcaacttcgtggccggtgaggtcgcaccaccatggcgtcgctcctagcccggcaggcagcgcaggcgctccgcgcgaggcaaacgaggatgaggagaaagaacagcttgcaaaagatctcgcaaaagattggaatgctgtgtttgaaaggagcatcaatacattgtttttgactgaaatggtccgtggcttgatgctaactctcaagtacttctttgatagaaatgtcacaattaactatccgtttgagaagggtcctctgagcccccgcttccgtggtgagcacgctctcagacgttatgaatctggggaagagcgctgcattgcttgtaaactatgcgaagctatatgcccagcgcaggcaattacaattgaggctgaagaacgtgaagatggcagtcgccgaaccacaagatatgatattgacatgaccaaatgcatttactgtgggttctgtcaagaggcttgcccagtcgatgctattgttgaggggcctaactttgagtttgccactgagacacacgaggaactactgtacgacaaggagaaattgcttgagaatggtgatcgctgggagactgagattgctgagaacttgagatctgagagcctctatcgctgaatctgtcttccattatggttgataaactgggttcttccattttccatattttgctcaactagctgatgaataagcaaacgatgtatcataacttaggtacgatgtttttgtaccttggcaccatctgtgtgttttgttcattgccttgctaaaggtggcaccagatgttctttgatgggaaaattccttttgtagcactgagctgttttcagtcaccttattttgtatacaatgaaacagaacgctgtgttcatggcacagtgatttggtgaatgttcacatgcttgtttccgactccgttttaaaacaaaacaaggtttgaactgattagcttgttgtaaatgtcgtttattttgaaaattgaaacaaac

SEQ ID NO: 35738 - DNA, 1951 bp, Zea Mays
atgcgcgcgaaggggcgcgtaagatactagtatttctctctctacgggagttccctctccttcggtccttcgcgagtccaatggccgcctcgccctcttcacccttgacagcgccgccagagccggtgaccccgccgtccccatggaccatcacagacggagccatctctggcacgctcccagcagccgaggccttcgcagtgcactacccgggctacccctcctctcccgcccgcgccgcccgcaccctcggcggtctccccggcctcgccaaggtccggagttccgatcccggcgcccgcctcgagctccgcttccgccccgaggacccctactgccatccagcctttggccagtcccgcgcctccactggccttctgctgcgcctctccaagcgcaaaggagctgcggcaccttgtgcccatgtggtcgctcgtgtccggactgcttactacttcgaaggtatggcagattttcaacatgttgttccagtgcatgctgcacaaacaagaaaaagaaaacactcagattctcaaaatgataatgagaattttggtagtgataagacaggacatgatgaagcagatggagatgtcatgatgttggtaccccctctcttttcagtgaaggataggccaacaaagatagcgcttgtaccatcgtccaatgccatatctaaaaccatgcacaggggagttgtacaagaacggtgggagatgaatgttggaccaactctggcgcttccgttcaacactcaagttgtcccggagaagattaattgggaagaccacattagaaagaattctgtagaatggggttggcaaatggctgtttgcaaattgtttgatgagcgccctgtgtggccaaggcaatcactttatgagcggttccttgatgataatgtgcatgtctctcaaaaccaattcaaaaggcttctgtttagagctggatactacttctctactggaccctttggaaaattttggatcagaagaggatatgaccctcgtaaagactctgagtcacaaatgtctcgaaagtgggcagatatgtgcaagcttgaaacaatgccatcacagagtttcatctacctgcaattatatgaactgaaggatgattttattcaagcagaaattcgaaaaccttcttatcaatcagtttgttcacgttctacaggatggttttctaagccaatgatcaaaaccctgaggttgcaagtgagcataaggctcctctctttattgcataatgaagaggctaaaaacttgttgaggaatgcccatgagcttattgaaaggtccaagaagcaggaagccctttcgagatctgagctgtcaatagaatataatgatgctgatcaagtttctgccgcacatactggaactgaggatcaagtcggccctaacaactctgatagtgaagatgtggatgatgaagaagaggaagaggaattggagggttatgattctccacctatggcagatgatattcatgagttcaccttaggtgattcctatgcatttggtgaaggcttctcgaatggatacctcgaagaagtactgcgcagcttgccattgcaggaagacggccaaaagaaattatgtgatgctcctatcaacgctgatgcaagtgatggagagtttgaaatttacgaacagcccagtgatgatgaagattctgatggctagttgtatctttttttgagctgtgatcttccttagcttcagttttctaaacacataggattggttcacatgtatgtaagaactgcatagatggcttatttgttaaattattttgggtactgaggagcttagtagttcaaacccatcagtggcactttggctattgaaaatcatagccccaccacaccgatgaggacagccacgctgccattggacttgtgcccgtaactgctgttgctcgctgcaaaactcgcatatgattttcc

SEQ ID NO: 35739 - DNA, 656 bp, Zea Mays
atgtatagctgtaccatgcactatgagaagatttttcatgggagactcgttgaagcagatgcacgcagatactttcagcagcttattgacggtgttgatttttgtcacaagaaaaggagtctaccattgagacttaaaggtgaccattggataggaaaaatattaagtatgcactcatgatttttggggatgttaattttattttacaagcacacagcccgaaaatctcttccttgattctaatttcatacttcggactgagtgcatggcctgctcagatgtgtatctttgtgcagctttattatagtttattctttttgttccctgaggatgcttagtgggtcaactgtagggatctttccttctacatacgacctgtgggactcgcttttgtatgtcaattatctgtcaattcttccatttctgaatcctaaagaaaaatggtccctaatagcttatggtttacttgaaaagttcatgaatactccggtaacagaattcgaggtgatattccagaacaatcatatccggtcgctctttggtatcacaattatttgtcaattcttctattcctgaatcctaaagaaaaatggtgcatgatgtctcagtgagtcagctctcaccatgttcaatgtacatgataatttaataaactg

SEQ ID NO: 35740 - DNA, 1627 bp, Zea Mays
aagctacacttcctagccctgttttcttggggaacattcaaacgctcactgctagtgacttagacaaatacaaggcacatgcatggcttctttctcctccatgccagccatacacacgacaagaagcattcagctgatgctcgtgcattttcgttcatcaagattcttaacctcatgcaagacatgagctatcctccacaaatgttatttgtggaaaacgtagttggatttgaggtgtctgatacacatgaccagttgctggaggtcctttcaagtctcaattttaacacgcaagaattcatcctaagccccttacagtttggtgtcccatattctagacctcgctacttctgtttggcgaaacgtgaacctgtgcggtttcgacatgcattcgtcaacaataagttgctccagacacctatgtgcctgagcctgacactgagcagtacatcacagggtagcgaccaccagactgaagaagagctagagccagtttgtaagccaataaaagatttccttgtcaaggaggctgatggaggcactccagatgagacagttttgcaggattatatggtcccagtaaacttgattgagcggtggggcaatgctatggatattgtataccctgaatttaagcggtgctgctgtttcactaaaagctactatcgttatgtgaaggggacaggctctttgttggctacatctaaaaacctcaatgttcctgaagagaagctccaaatttcttccctgaaggagttgggcctacgatttttcacccctcgtgaggttgccaatttccattccttcccttcaaatttctgcttcccggatcacataagccttaggcaacagtgagtttaagttccattatacacttctggttatctttagtaagcgacaagggcatttgaattgcagtacatataagaaacatgagagatgaggctatgctgggtaactatctgaatagtgtttatagttataggttaccatatatcttttgaaaccctcttgttgcaggtatgctatgctgggtaacagtctgagtatagcagttgtgggtcctttgctgcattatctctttgctgaggcctgagtcatagagaagtccagtcagccctggtgacattagcatggcacaaacactgtggctgcgatctgccaaaatttcttcatacgtgatttaagcaaggttttggggactacagtttggccatttgatgagcacaccgtgtaggcacaacctcacaatgtatcaacaaaagtgtaccatacagtagagaagctgtttctgcgcatacttcctccccctcatgcctatgctgtcatggtgaatgaattttggaattgtgatccgttgatgtgtgcatggatgaggctgtcgtaacgattgttgatctgagctttaagtaacttggaacctacttactccgagcaattccaattctattcttagctaacccatttaaagtttgacaatatttatgatgtaaaatatgtatagcaagtataaaatatactcaatgaagaatctatatcataaatattgacactttttttatataaacatcgtgaaactcaagattctttgacttggtattatgtttgaattgtattttgttttcgg

SEQ ID NO: 35741 - DNA, 4266 bp, Zea Mays
agtgataatttggaatgaaattagagtacataatattacttacatggaaggataaactattataaataatgttagtggatggtgtggcacgctgatgtagacaactaaatgcatgttagtagatgatgtgtcttgttgatgtggatattataattgcacgtgctaatgagctgtaattgcatgtgatagcggactgctgaggtgctgcatgtctagataaaatgctgggtggtgcagtttcactaaaaggagctgcagttcctgctccacggttgatcagctcccaagaactagagttcttcaggcctcatattgaaataaagcgcgaccgtcagactggtgaagtttttgaagtacttgatggtttgatgttcaaagatggatttctgtataagaaggttgcacttagttctttgatttattgggggatacaaccgacagaaacagagcttttgaagttctcttctagcccaagcaatagagcttctgctgatgacttggattggctctccggcatgtatggttctaagaaaaggaaccttccagaaaaacgagatatggaatcatcatcttctaaaataagatcctccaaagcatcagaccttaaagcgtcaacttctactgaaaattatgacgagaacgatgaattcaaccttcatgatcttgtactctatgggcgaaaagattttggtgtgattgttgctgttgagaaagatggttttaggatactaaagggtggtcctgaaggatctgcggtgaaagtgagaaagcaggatattaagaaaggctgcgtagataaaatgtttacagctgttgatcatcaaaagaagacaatatccattaacgacactgttaatgttgtggaagggccatttcagggtaagcaaggggtcgttaaacacttgtacttgggaatactgttcatttataatgaaagtgaaagtgagaactgtggatttttctgtgctcaaagcgggtcatgcgaaaagatacgaaagggtctgggaagctctactactgaaagttcggactttacaactcctatgtttcctgaacctgcttatgagcaaaatgggcatcgggacactgaaaggccttacaggagcaccagagaacaacttttctctattgggcagatgctgcgcattagaaagggtcctttgaagggctacctctgtcgagtagttcggatatttcggaatgatgtgactgttaagctagattctctactgaaaattgttacagtacaagctgatcttctctcagtcccagctaacaggggggataacttgtctggtgccccagctagtaaatttggaagtcaagatacatccttctttggttcagaagcaggcaaaacttcatgggacaatgggttgccatcgtttggaagtgactcatggcaacccttttcgagttcaacactatcagttcagaatgcaggtggagaatcagaagctgatccatggtctaagaaaacttctgccaaagatgattctgatccatggggtaagaaaactgatggtgattctgatcgatggggtaagaaaactgatggtgattctgatccatggggcaaggaagcggtatctgctgctgatggtgattccaatccatggggtaaggaaacagtaccttccgctgctggtgattctgatccatggggtaagaaagtggtgtcttctgctgatggtgattctgattcatggggtaagaaagcaacatcatcagctgttgacactgaaaaggaaggttctggtggtactgcatgggacaaacaagctggagttggtggatctgatgctgctggcagctcctgggacagagcggttgtcaatgagagtgaaaagagtgacaactggggagaggcttgcagggttatggacatgggaactggagctgaagctgacactgacccttggggaagcaaggtcaaagcagtagatatggaaggaccaaataactgggaaaaggctacagtgcctccaaacaataagctggaggatgtcagtcaaggatggggccaacctaagggcaactcaactgaagaccaagcaatagacaacgtttctaaagacgtggacaacaacagggcttgtgacagttctttgcctgtcactgaagatggtacctggggcaagtcaaaagacaacagttgtggtggagcaggtggtgcgggaggttgggatgtttctgttggcaactggaataaatcatctgttgtggctgatgcacaggatgaaggttggggcaaaggaaactggtcatctgctgagtctgaagaaacaaacaatcaaagcggaaattggaacaaaactggagcttcggaccaagctggttacaacaattgggataaaccgaaatcctttggtggtaatggttggaacaagggtgatgatcagaatagcagttggaacaggcctgaaaattttggaggtggacgtggctttgggcgtggacaagggagaggtaggggtcaacaatctggatatttcaatggcagaaatgatcaaggaagctggaagaagtcatggggtagtgacaatgctgaaagaccctcttggaggtctgataatcaggtagacaatgaggctggagagtctggtggatataggggaaggggaagaggaggaagggggcaatatggaggacgaggtaaagacaatggttggagaaatgatgatagaagcaattctgggtttggaagggaaaataacagtggcgatggaccaaaatggggtggtggaggtaattggaacgctacaaatccaccaagtagcagtgtaggcaccaagtcatatggtcaaaatcagcctttcacttggaataattctgaggataacaaaccatctgtaggtgaacaaggtgatccttgggcaagcaaggtgtcttctactgaagatacagaacaacagaatgattcttggtcaagcaagatgatttctggtggtgctgaggataccagtggtggctgggacaccaaggtgaaagactcttcctgcaatgatgggggtgaaggactacaaaatgatccatgggcaaacaagattggttctaatgaaggtaaagaacaagaaactgatccttgggccagcaagatgtcttctactgtgtgtgctgatgacaagaaaggtagctggaacactacagcaaagggcattccatctaaggaaaaggctgatgatccatggaatagtaaggggggtaatgatgacagcaagaaaactgacacctggggtgctggctcgtcaggtggggatcaggaactttcttggagcaaacctaatttctctttgggggaccaggaatctacttggaacaacccaaggttcagtgacgatgacaatgcgaataatagaggtggatttggacgtggaaatcgaggcagagggagaggaaggaattttggggatggtggtgggtcatcatggaatggaggcaatagaaacgatgaatcaggtggcggaaggtctggagagccatggaacagaagggactttgatggtggcggaggaagaggcagaggtcgttttgggcgaggtgaccgtaaccagggcaacaacttcgggtcaggagatggtggcagctggggctctggcaggggaaatggtggccgcggtggttacaggaactggaacgataacaatgagcgatccttcggtgaaggtggtggctggtcccagtcccagtcttccgattggaatgccaacaaaggaaatggcgaaggaaatcaagctttctcgaaaagcaagcccagctgggaagcacaaaacacctctggtagagatggtcaggcaggaaagggtgatgcaaacaactcctggagtaagaacagatcatctccatctagcgcttggggcgctcccagtggaggagctggcggccgaggttcttggggaaagagcaacgaggatggctggaactcagcgggaggatcagccaaagagaagcctgcatggggtggtgggtcagaagcgtctaccaagaaagaggacaaaggtggtgaggggaacgggagccaaggaggaggtggtgtcagttcctgggataaaggggcagatgatgcatggaacggcaacacgggtagtgatattgggagtggtggatggtaagatttccgccaaaataatatgaactctgtcggtgcgtgtgtctagttcgtatccgttacttcgccatgtgtactctacactaaaaagaacatggcttgtgaccatttaaacattaccttagtggtggcagtaactagtaaaaaagataaataaa

SEQ ID NO: 35742 - DNA, 829 bp, Zea Mays
atgacagccggggtcgggatcttacttgtcacaaatgttgaggatagtgccaatagattcatctgcgcttgtgtggtagtgttctacacatcactttaacatattgagaaagtggagtttttgaggggccagaattggagcgttacactgactaggagcagggcttcaccctcctcaagccagcctcctggcccaaggagggtgaagggagcaacaatattgggtttgtcgtcaaccttcggcttaattcgctgacggagttcgggacgccgccagttcatcgcgggcaaacttctgcaagcagagaagaaaaaggatgttctcagtgggagagagatcaggtcatggcggcctggcagtgtatgaaattgagtacacactggatagcactaggtgagggatgaaacagatcttctcgggtgcatttgttgcttcaaggaagctttatctgctcaacatagcctattcagacacccggacagtgagtcaagaattgttctggacaaagcattccattcttttgattatgtatagtttatattttctatggcagaaaatatagtcgtgagtatttgtttgtttgtaaaaagagtgctaatcaaaaggttgcattgtcgtcttgtccagtactattgcacctttatcagtgatgtcaggctataagtaatttcagtttagataatgaacttcatcttgcacatattggtaacattatttgtgtcgaaagcagtaaaatgtcgtgatcttaattcctagcctaacactactgcatttgtaatatcttggacttgaaattttatacagtggagtacatctatatttttttgag

SEQ ID NO: 35743 - DNA, 3457 bp, Zea Mays
atggaccttgacgcggctgcagaggaggaggagcgccggcttgaggactacaatgaggcgcaggatgctaggtacttcctggggtttggtgacacccatggagatcctattgaggttgatactgttgccggctctcaaattggcactggaaccgaatccactagcccgtcagaagcagtccctaatcctgatcaggctgctaatgctagtggtagcaacatgaagaaaaggtccaagtgctgggatgactttgatgaattgactaagattgtgaatggtaagaaagtcaggagccacgttgtgcctgccgccagccccgacacctccagatgttgcctccatccatcctccgagcttaccgcctcgcccccgcccccaaaccctagaccccctacaatcacgaggaaggggagaacggccgaggaggatgctccgcaaggaaggggaggacggtcgaggatgacgttgttgctcgtcgctgagcatcttcgcgccctcagtgctgccaaggagccctctctatccctgatggcgtcccaaccgttggccgatcgtcggcgatgatgacccagcctccctctccacgtccctgctccccaactcatacaggtgttgtggcgccctcctctccactcccctatctattttgttgtttgatgtctactttcttcgccgctctggttgcggcacgattggtgcaccacctcctcgtgcgaggtgagggcaagcctgcacatgctcaactccatcgacaacctcaccttcatgccactctgggagcatgccgagtggcgatgtgacgacttggtggtctatcgtcgttgcccttcgccaggtgtcgatctcttcgtcagtgaagagcatccaccagttccattcattcatttattatatggtgaatggccacaaaaccatattctatgatggcacaaggtcccaccaagatgcgtagccatgtgcaaaccatatttgtcatgtagccacaagggcccgtcgatctgttttggtttacaatgtggatgaaaacaacatggagctctggcttatgggggcttatcgatgccagcgaagcccgtgggagcaattgaagccattggacattggttgcacaacttgataaagtgaagaatctgcttgcgtctgagtttgggagtctataaacatggggaagagaaaatattggtgcctttgcaattggtgaccctgctgcaactatttttttctaggaattcacaagagcaatatggtacaccaatgccacacattggacaaacaacagttgaagttgatcttttgaattatggtgtgatagaaggtgatgaatcatgtaaacatttctctgaactaaaagtcttacatccatggatgatcaaagatggcatgaatcttacaaaggaacagagattagagaaaattgagtcacaaaaacttgaaaaatatgaagccaaaggtgacaagagacatgacttgaaagatgatcaaagtgtacaggaagaatacataaatgcatattatgaggccttgaggaaaagttggaagaggaagaagcaaaaagcagaatgcagcatgaaggcaagatttttgtccctgatgctcaaagggaacgccaagttgacaataaatacaagcaggatgatgatgaagaaggcattgaatagatgatttaaacccatatgttgttccaatggctatgggcatttaacgtcaactagagagtcccttggatatgactacaagtactatcatcaggaggattgttgctaaccatgaagcttacctgtgtattgtcagctttcaaactcgatgaaccaactgagaaagtactgcttatgaagctagagaagcatggaaggagtgttgctgaatcaaaggcaaaagaagaagctggaagagttttgatttgcatgaaggataggtcctcgacacagttcagcagagatgctggctctatgcccaaggtgtggacaggaaaggaggacataaaagccataactaaaactgttcgctcagttgtacgccagatgctaatatttaatactctatatatagaatactgttgaagacgcttctaaagcactagagtattgtagcactgatggaaggccttcgatgaaatgtttccctgaaagttgcatactacatcgctgaagcactacaatattgtaacactgagggaaggcctttgtatcatgacctaaattcatatagggccctctttgatgagttgcttgcaagaatgtaattggaatccgatgtgcttcatggcgcatcgtatcctccattgagtatagggaataaggttgtgtcaacatggaccgtgccactctcatcgagggctaccataacaagattgaagttgaactcaacaagatctgcgttggaatcctcaagctctttgcttcccaccttcccccctcattaatagttccaaagtccaaggtcttctacctcaagatgaagggtgattactacaggatattgctttggaggagttggcccccttatcctattaggctttggctgatgcttaacctctcaactctcctgatcttgctcgtggtctccccaaacaggcaaagccaacgaatgaaagggactcactcgcagcaacaaccaaaaagctgatcacgcattctccttttcacatttgttgcatttaattaattcatccaatagcataaattggcactccttttgtgttattgctctttggttggtcttattgttgttgttgtactgcttgccatgtgtattttatcataagtgttgttttggctaatccctaacgatgcaatacatttgagcaacaattcaattgttttgttttttgaacagttattctaaatacccaatgttcacagcatatttcacttcccatggttcactgttttgttgtattagtagctctaattctaaggtgtcaatgaatcttaggcgaaagaattgttcgtagtagtggtccagaacagacttcatactgtgatttacagacttatgttttactagctgagtactcgtgcgttgcaacgggaatatataataacagtacactacgataacttatatacataatatgtgttataccgttatgagaaaatgttttataatcaatttgtgattctggccatacataaattttgttattttaatctatctgtttcaccactacattgcaaccattagtatcatgcagacttcgatatatgtcacgatttgcatggtctcatcattggagagcacgttccacacatgcaggaagaaattcccccgtacatcgttagtcattagacacgtaccaccatatgcttttgcttaaacaaaaaggcaagtgtgtgtgtttgcgaagagaattaaaggcaagtcggcacaaaagctaccccaatggtggcgaggatgacgaactggtcattattgtcggtcctcctctgcgtcacctcctgcgtcgtcaagatgacgc

SEQ ID NO: 35744 - DNA, 6609 bp, Zea Mays
ccacggtccaaccgaaggaaaaaaaagtttgaaaatcaaacacctttcattccccccatccctcctcctgctcatcactgctgctctctggctgctccctctccctccatccccactgctgctctcttgccaaatctgatctagggtttcgttccatctccacgcgccgtcccagtacctatctactctagactactacagtatccaaaaggcaagcttatctgcggagggagtgagctgacgcattcccgtgctggcgagggacagccagacccagacggggagatccgatccgattccgtgctagctgctgcggagtgagtgaggtgacgcgggagcgggatggcggcgccggggcggaggacggcggacgtgtcctcgtcctcgcccgccccctcgccgtccccttccaccggtaggcgcctcctgcgcacgcagaccgtcggcaacctcggcgagtccatcttcgacagcgaggtcgtgccgtcctcgctcgtcgagatcgcacccatcctccgcgtcgccaacgaggtcgaggccaccaacccgcgcgtcgcctacctctgtcgcttctacgctttcgagaaggctcaccgcctcgacccgacatccagtggccgtggtgttcgtcagtttaagaccgcacttctgcagaggcttgagagggaaaatgatcccacgctcaagggaagggtccaccagagcgatgctcgggagatgcagcgcttctaccgcgaatactacaagaagtacatccaggcactgcagcatgctgctgataaggctgaccgagcactgctcactaaagcgtaccagacagctgctgtcttgtttgaggtcttgagggccgttaatgtctcgcagtccgttgaagtcgatcaagcgattttggatacacacaataaggttgaagaaaagaaaaagttgtacgtaccttataacattctcccgcttgatcctgaaagtactggtcaagccattatgcgatatccagagattcaagctgctgtttatgctcttcgcaatactagaggtctgccatggccaaaggaccaagacaagaagcctggcgagaagaatactgggaaagaccttctcgattggcttcaggctatgtttgggtttcagaaagacaacgtgtccaaccaaagggaacatttggtactgttgcttgcaaatgttcatataatgaaagtacccaaggttgaccaacaaccgaagttggatgacaaagctctggatgctgtaatgaagaagctgtttaagaattataagaagtggtgcaagtaccttggccgcaaaagcagcttatggttgccaaccatccagcaggaagtgcagcagcgtaagcttctttatatgggcctctacctgctgatttggggtgaggcggctaacttgagattcatgccagagtgtatttgttacatctaccatcatatggcttttgaactctacggcatgctggctggaaatgtgagcccaatgacgggtgaaaatgttaaaccagcatatggtggtgatgaagaagcctttttgattaaagttgtgactccaatatacaaagttatagagaaggaagctgaaaggagcaagaccatgaaatcaaagcactcccattggagaaactatgatgatctgaatgagtacttttggtcagttgattgtttccggctaggatggcctatgagagctgatgctgactttttcaaaactccaaaagatgcttatctgaatcttttgaatggagagaacagatctgcaggtaatacccattggatgggaaaagttaattttgtggagatacgttcattttggcacatattccgtagtttcgacagaatgtggatcttcttaatattgtccttacaggccatgataattattgcttggaatggtggaacaccaagtgatatttttgatgctggagtatttaagaaggttttgagcatatttattactgctgcaattttgaagttgggtcaagcaatcctagacctcatatttggttggaaagcaagaagaaacatgtcatttgcagtcaagctgcgatatatcttgaagttaatatgtgctgctgcatgggttgtgattttacctgtgacttacgcgtacacttgggagaatcctactggacttgcaagaacaataaaaagttggcttggtgatggtcagaatcagccatctttgtacatattggccatagtgatatatatggcaccaaacatagttgcttctatgctatttcttttcccatttatgagaagattcttagagagttcaaatgttaaggtcataacgatcataatgtggtggtctcagccccggttatttgttggcagagggatgcatgaaggtgcattctccctcttcaagtataccatgttctgggttcttcttttagcaacgaagctgactgtaagcttctatattgagatacggacattaggaatgttgagatctcgctttgaatctttgcccgaggccttcaatgaacgcttgattccttctgatgcaaataagagtaaaggtcttcgtgctgccttttcaagtagacccaaggcttctggtgacgaaagacagaaagagaaaagagctgcaaggtttgctcaaatgtggaatgtcattattacaagtttccgtgaagaagacctcatagacaatagggagatggatctgctactggttccatactgtaaagaccgtgagctcgatatatttcaatggccacctttcttacttgctagcaagatcccaatagcactggatatggcagcagacagtggcggaaaagaccgtgatctgacgaagaggataaaatcagatccatacttttcctttgctatcagagaatgctatgcttcattcaagaacatcatcaatactttagtgtttggtcagcgggagaaagatgtcctagcacagattttcgcagttgtggatcagcatatagaagatgaaactctgataaaggatctcaatatgaggaaccttcctgcactgagcaagaagtttgttgaattacttgaattactgcaaaaaaacaaggaggaagacttgggtcaggtagtcattttgttccaagatatgcttgaggtggtcacaagggatataatggaggaacaggaccagctcggcacactgttggaatctgcacatggtgcaaatagtagaaaacatgaaggaattacaccgctagatcagcaagaccagttgtttgctaaagctattaagttccctgtggatgaatcaattgcatggactgaaaagataaagaggcttcatcttctgttaactgtgaaggagtctgctatggatgttcctactaatcttgatgctaggcggcggatatcattctttgcaaattctttatttatggatatgcccaatgctccaaaagttcggaacatgttggccttctctatcttgactccttattacaaggaagatgttctgttctcattacaaaatctagaagagccaaatgaggatggagtttccattcttttctacttacaaaaaatttacccagatgaatggaaaaatttcctcgaaagggttggctgcaagaatgaagagggactccgtgaagatgaagaactagaagagaagcttcgtctttgggcgtcgtatagggggcagacattaacaagaactgtaagagggatgatgtactatcgaaaagctttggagcttcaggcttttcttgatatggcggaagatgatgatcttatggaaggttacagagcaacagaagtaatgcccgaggactcgcaattaatgactcaatgcaaggctatagctgacatgaagtttacatatgttgtctcatgccaacaatatggaattcagaagcgttctaatgagccttgcgcacatgatattttgagactaatgacggaatatccatcacttcgggtcgcctatattgatgaagttgaagcgcctagccaagatagaaacaagaagattgaaaaggtttactactcagtgttggtgaaggcttctgttacaaaacctgatgagcctggtcagagccttgatcaggtcatctacaagataaagctaccaggtaatgccattttaggtgaaggaaagccagaaaatcagaaccatgcaataatattcaccagaggcgaatgcctccaaactatagatatgaatcaggagcactatatggaggaggctttgaaaatgagaaatctgctgcaagagtttgagaagaaacatggagtgagatatccatcgatacttggagtcagagaacacatatttacgggcagtgtgtcatcccttgcatggttcatgtcaaatcaggaaactagtttcgtaacaattggacaacgagtgcttgccaatccgttgagggttcgttttcattatggtcatcctgatatcttcgatcgccttttccacattacgaggggtggtgtgagtaaagcatccaaaattatcaatctcagtgaggacatatttgcaggattcaattccacattgcgtgaaggcaatgttactcaccacgagtacatgcaagttggcaagggaagggatgtgggtctcaatcaaatatctctgtttgaggcaaagatagcaaatggcaatggcgaacagacgctgagccgtgacatctaccggctgggtcatcgctttgatttcttcagaatgctatcttgctactatacaacaattggtttctacttcagtacaatggtattttggtgacctgagtttttgaactgttcttgtccgttcattggttaacctttcttgcattttctgacttgttcgttgtttcaccttaacacctctgttatttctgcatgcacttagattacagtgtggactgtatatgttttcctctatgggcggttatatcttgtacttagtggacttgatgaagcgctggctactggaaggaggtttgtgcacaatgcacctctccaggttgcgcttgcatcggagtcttttgtgcagcttgggtttttgatggcgctacccatgatgatggaaatcggtttggagagaggattcagaacagcattgagtgacttcatactgatgcagcttcagttggcctcagttttcttcacgttctcattgggaacaaaaactcattactacggaaggacattactccatggaggagctgaatacagagccactggacgtgggtttgtggtgttccatgcgaaatttgctgacaactatcgactctattcccgtagccattttgtcaagggcattgagctgatgattctactagttgtgtatgaaatatttagccagccatatagaggggctgtaacttacatcttcatcaccgtgtccatgtggttcatggtgggcacttggctctttgcaccattcctgttcaatccttctggatttgagtggcagaagattgtggacgactggaccgattggcacaagtggatcagcaatcgtggaggtatcggtgtagcaccagagaaaagctgggagtcatggtgggaaaaggagcaagagccccttcgatactccgggaagcgcggtactgttgttgaaatactgcttgcgctgcgtttctttatctaccagtacggacttgtgtatcatctgaatataacgaagaagataactaaggacaaccagagtgtgctggtttattgcttctcatgggttgtaatttttgtgattttgctcgttatgaagaccgtatcagtgggcaggagaaggttcagtgcagagttccagctagtgttccggttgatcaagggtctgatatttataacatttacagccatcgtggtaatcctaatagcgatccctggcatgacggtgctggacatatttgtttgcatccttgctttcatgcccactggatggggtttgctgctgattgcccaagcgatccggcctgtgatccacaagactgggctctggggctcgatcaaggctcttgcccggggctacgagatcctgatgggacttctcctgttcacgcccatcgccttcctcgcctggttcccgttcgtgtcggaattccagaccaggatgctgttcaaccaggcgttcagcagaggtctgcagatctcccgtatcctgggaggacacaagaaagaccgagggacccggaacaaagaatagggctgggctgctgctgattcaaggtttgtgtgcgccactagtatttatgtgtgaatgggtgggtagcatatggctcgagagtatctcctgaatggagattgattgatcctgaagagtagaagagactcgagtgatgtaagatgctgcaggcttgttgctttgttacctaggcgttaggcagaacagatgttttcaggatctctggcctgttaaccacatcttcccctgttcagagtgaattaattcctaatggaaactgatttgtgaattacttcctaatagaggagtgcttccaaactgatttcatgtgtgtgctgtgatattgtttagcatatagtattttaaatgtagctttgaattttcattctttcgcaacaaaaaatgaataggacaagctggtcaaacttgaaaaaaaaagttaaacgggttataatttgggacggagggagtatgatttgagaacctcatcaaatagtcttgcca

SEQ ID NO: 35745 - DNA, 1988 bp, Zea Mays
gaaaggactgccctaacctcgtgcagtcgtgcccgcttgtttcacttgctcgccttcacccctcgccgccgccgtcgccgccgtcgcaagcgacgatgctcgacatcaacttgttccgcactgacaagggcggcaacccggaccttattcacgagtcccagtgcagtcggttcgcctccgtcgagctcgtcgacgaggtcatcgccctcgacaaggcatggcgcgaaaggcagttcgagctggataagatccggcaggagctcaacgctaccagcaagaagatcgacaagctcaaagctagcaagcaagaagaggaagcaaagaagctcatggaaatttagttggtgtttgttctggctatttgctttccactgaagtaaccgttagactgtagtgtgacatcctaaatattagctccactgtcaactccaaccctgattctcacactcacaatttgattgttggaattctaattgtgctttagggttctatgtgaagatacaaaaaaatattgcattcctattctggtcccgtattgaaattgccagtggtccctctgaattttgatccaattgttataaatttcagatgaactgaataaaactactacttgtaggcaaacaataaaattgtacgggcatttggagagaagagagtagaggataatttgaagaaccacgtggacctttgcaggatgcttgatattgtcgcattggaaaaggccattgtctcagatagataaccttctgcagacatcttatgatcaaggggacaaatgagatcatgccaactctactccatgtactgctggtgtcacaggattaatatacaatgaagatgttgattcttggagttgcacgaaataaccttgtgattgtgattagttacttcaaagcgttttttggtcttaatgcatggtaagtttattcaccttttatttcatcagacattatgacattccattttgagacaaggatctacaacaattatgtagaagcaatcctttaacaacatatgttacagttaatatattatgttttttctacatgtactcatttgaaacaagtaccagttcattcctcagctgatcttcttgaacaacttatttggttacctgtccttgctaattattattaaggggtgaaatgcagatctataccatgttatgatgtacatgttctttagcccaacaaatgatttttgtgagaactagttttttgtgagatctataccatgttagtccagaagacagtgcatgtctatattccttgttggtaagttctcttctgtgaagcagactgatctatcatgcctaaccactcgccttctctaacaccagcttattctacttctacttgctttagtgtttgtgccttggatgtagtaatactacattgttaaattatttttctttacaaacaaatatataaccttatgaatactagaaattgacgttgctaataatagagcaaagagacctacacatatctaaaacatagaaccccacagttctaaagtcgtatgacctatattctctatttcatacataattacttactaattccttggttattttcaataggatgggagagtgtcggatgcttcttcatatactatttcttggtccatcaaatctgcttgactcaaatgcaagttttgctcaaatgtggcaaaaataattgtctcaccaattgtcagcgcgcctgtttccagcaaagtttcagagaaggaaaagatggaatgtaactcaaattttggtggccgcacaagtgtggagacttgaattcatatatacttagttaggctcaatattagtgcaaacagttgataaccaagtttttcaattagtatttagttttggctttagagtacacttatgtatgagttatttgacaatatttatttatgagatattgaatggtacttatctatattatattagttacaatgttattaaatatatgtgtatgtatatttctctttcaaat

SEQ ID NO: 35746 - DNA, 3350 bp, Zea Mays
caaagcttgcaatggcacaatagtgacatcttgggaaacaatgaaacgttttgtctatatcaatgatgattcgtgccggtattcctactgtgacaaccggatatccaataccaagtatactctgtggaattttctcccgaaaaatttatgggagcaattcagttgtggtcccgtatcacccctgtcagccctgcaactacatggggtccacttatcatcatcttcattgtttctgcttcaaaagaggcttgggatgattacaataggtatctttctgacaagaaagcaaatgagaggaaaatatggttggtaaaggatggcgtccgcatacagatcaaagcacaggaggtacatgttggagatttagtgtggctccatgagaatgatgagataccatgtgatcttgttctcattggcacttctgatcgacaaggcatttgttatgttgagactgctgctttggatggtgaaactgacttgaaaacaagaaccattcctccaatttctgctaacttgtcagtagagcagctaggaaaagtcaagggtgtaattgagtgccccaacccagacaatgacatacggaggtttgatgctaacatgcgcttgttcctccctataattgacaatgaaaaaagtcctttgactatcaacaatacacttcttcagtcatgttaccttcgatacactgaatgggcttgtggagttgcagtttacacaggcaatgaaacaaaatctggaataagtaggggagctgcggagcccaagttcactgctgctgatgtaataatagacaagctcactattgcaatattcatgttccaagttgttgttgtacttgttctgggttattttgggaatacttggaaggacactcaggggcttaagcaatggtatcttatgtatcctatggaggtagagggcccatggtatgatttcttgattatcccgttacgctttgagctgttgtgctccataatgattccaatctccataaaggttactcttgatttggctaaaggtttgtatgcaaagtttattgactgggatgagcaaatgtttgattgggaaacaaatacacctgctcattcagctaacacagctattagcgaggacctcggacagattgaatatattttgagtgacaaaactgggacactcacagagaataaaatgatcttcaaacaatgctgcataagtgatactttgtatggaaatgacaacggagatgcattaaacgatgtcagacttgtaaatgcggtctcaagtaatgatcctgatgtcatcaaatttctgttggttatggctctttgcaatacagtggtccctatcaaaagcaatgatggtactgtgtcatacaaagcacaatcccaagatgaggaagctttagttaacgctgcagcaaagctgaatatgatgctcatcagtaaagacaccattacagctgagatttgtttcaatgggtctaagttttggtatgagttgttggacattttggaattcacttctgatcgcaaaagaatgtctgtagtggtaaaggaaggggagactggtaagatccttcttttatcaaaaggtgctgatgaagctctcctgcctcgtgcctgtccaggacaacaaatacagagatatcttgaagcagtagaaatgtattctcagttgggattgcgaaccttatgtttggggtggcgtgatttaaaagaaaatgaatataaggaatggtccaaaaactttcaaaaggctagctgctcattggacaatagagagtttaaaattgctgaagtttgtaatagcttagagcaagaccttcaaattcttggtgttactgctatagaggatcgtcttcaggatggtgttcctgaaaccattaaattgttgaggaatgctggaattaatgtgtggatgctaaccggtgataagcaaaatacagcaattcagattggacttctctgtaacctcataacttctgggtcttgcatttgttttggatggttgggcacttgaattaattttgaagcattccaaggagtcttttactaggttggcgatgctgtcaaaaacagcaatatgctgtcgaatgacacctttgcagaaagcacagcttgttgctatcctaaaatccgttggctacctaactctagcaattggtgatggtggtaatgatgttagaatgattcaagaggctaacattggagtagggattagtggtagggaaggactgcaagctgcaagagctgctgattatagcattgggaagttcaagtttcttaagagattgatacttattcatgggcgttattcatacaatcgaacagcatttatttcacagtactccttctacaagtcacttcttatgtgctttattcagattctgtttgcctttttgtcggggctatctgggactagcttattcaactcaattagcttgatggcttataacgttttctatacaagtttacccgtcatgactataatctttgacaaggatatctctgaaacaacggttatgcagtacccccagattttactgcattctcaagctgggaggcttttaaatctcactacattttgcggatggtttgggcgctcgctatatcacgcactcgtcgttttcttcattacgatatgcgcctactcagatgagaaaagtgagatgcaggaactgtcaatggtagcactgtccggttgcatttggttacaggcttttgttgtgacaatggatacaaactcattcacttgcccgcaaatccttctcatctggggaaactttgtggccttctacatgatcaacttaatactcagtaccgtcccaagtctccaactgtacacaatcacgttccgcctgtgtagccaaccttcctactggatctccatggctctgacggttgcagtaggaatgggaccggtggtggctttcaggtacttgaagaacctgtatcagcctagcgccgttaacatactccagcaggtcgagcagcgcaatggatctatcagaacttctgggaatctggagtcggcgggagccaatctcactaatctactgactggctcacgtaaaaacagggattctaattatcgccctctgctttcagagtctgcggagtctgtaagtgcaagcggcagctaagaattgtctaggctttccgtactagcatgacagtcatacactcatacagacggcagaacagtgaactgtaacagaatcatgcttgtactaaaaaatatttcgtcggggtcaaagccaataattgttttgttggcctaaatttgatcatttttctcagtctgcgctgtggcaccgtctgtgctgtccgctgtcgcacgtagggatggtaataggatctaaattttac

SEQ ID NO: 35747 - DNA, 3600 bp, Zea Mays
gtccaatactgctatagtagcttctccaagttatgacactgttaggaagatggttcaacttctctcgaaatgaagcttctgtcttcctatgtatagacaagttgttcagttaggaggtctagattctcttaaaatggtgctatctacgagttaggaggtctaggagcacactgaatgttttagaggttgatgaaatcgttgttttcctaaaaaagcattttttctgctttgtttgaaattgtttgggttttcctccccaactttcataattacctatttctattgtatgtttgatcatttggacttctactccatccacaattttggtttattcagtgaggaactatgtttttaaccactctatagtttgtatagacatgcaacattcatctcagggtcaagaaagaagctcaacttggcatgcttcctgtttaaagcaaggcaagaaacatccccgccagatctctgtcgccaaagcagggctggtgaagaagttgtgtttccctcccggattgtcactactttcatatttgttcatttatgtttgttccaatttatgttggttttttacagttacagaatatgtttgttccagttgagttccagtttgaaaactggaacaaccactagcagatgcaaagttcacaaagtagcttgtcaaataatgtgcatgaactggaacaagcaacttgtgcacgaatgagcattactggaacaagtagcttgtgcatgaacgagtaatactgtagatgattggacatgtatgtctattttagatttttaatatttaatgttatatattcagctcataccatacatgaatttgcatttctgtactatactcacttaatgtcctacctgttttgttagcttcaactatccgctttaaactgacaaaaccagaccaaacatatgcaaatctcatatacctgtgaaagcaacaactgatttgccagattggttaattaaacgtaacaataaatagccccgattaaatggcttataaatatacttggatctgttcatttttcacatatcagctattaatgaagccttcactgggttcattttgtactactccattacttatttacagttacaagtattctaagaaacttaatatttcatcatcaaagttgtattcagacagtttcatttacattgctctgattttttgtactaggagctactgacaatggaaagcaacgattagagtaacttgatgagtgaggactattcattcagttgcttcgatcaataagtgaactaatggatgcatgtttcttttgataagtcacatatggaaagtgaagaacccaaatgatttcttcacaggaaggtgcttacatcttgcttccatgcctcggtagtttcggtcactattagttttgctatgcctttcctacataaataattttgctacctcaaaatgcttctaaatatgatgatttatgctggagactgctaaccttcacacatctaataagatgaagcaacaagctagaaaatgtggaatttgtcatatgtccggatgcaaaacgggtaacttcatgctttccacaatgtgtgtcgacatgatgcttgtagagatgcttggaccaatcttcaactcatggggcgcttcatcctcggcctcctacgcatgcacttctcctgcttctcctgctggtcatcgcccaaggtgcacttttcctccctgttctgttcacgtgcccatgtgtcattcttgtttttcactgtttaggatcgtgagggtgttattgcaataatagctgatggagaaatgagaatgattttcaaatgatgacaggattggcagaatgagagcgacaaaggaatgagctaaatcttttgaaatatgaagcaatatgatttctttccagtgttatatttttttatttcctatgcatttcttaaaagtgctattacatgttcacctactaatacccttgtttttcttgcatctcaaggatgaattgctgctcttgaccatagggattggagcagcatgtagtttatactttatcctggttttctctctcgagatgttgcatggtgtcagtgtgtcagatgtgccgtaacagatgactccaaaatggattgcatgctcttcaaatagctacagataactatcttcacataaaatggagagtacaatgtttataaaagaaggaatatggataaggatccagattctcctatagcatatgaagaggcaaaggaaatggcaagccaaagctgcacaatttctgatgatcactcgttgttactgttatccattatctcctcagaggcattgcttttaaattcaacagcagacatggcaggtgcaggtcctatcctatccattatctacccctgcatgtgtgccagctattctactctatgtttcaatagtttggaaataattcagagctaaggttttctgatacaggtacgtgtccactttcttctcaaggaattgcactagaggttggactttgtgggtcaagagaaatttaatgcctattgttaatacaacctttagctatttttccatgatgatggagttggacaagtaccatattgagtataagtgttagcctattatatctttgtacaaccatggcaaacgaataatttcttataacaccatgaagataatgtttaacgaagtgtgtttgcgtgcgtgtgtaatttcttcttttgttttgctgctaagtttgatagttcaaaacatgattcttgtaaagtttggttttagtctaacaaatacactcaagtcctgacatgtaaactgtaaagttggactgttgcttggtggatctgtattgaactttattttttttaaaatgttttatggcttgtatagtttgtattcacttctcacctaagctacaatttgtttttccagcctttcaagatttggcacattgacataatgacatgggttggtcacggattggatgtcaattttgctccctgtaccttgtagattatcggttatgtcaattttcgaaatttctatcgtgatggataacatttgaataaaacatagttaaataaacatgactactgtttcagtctttcgaaattctgatgctatagtgtcagtatactatgtcattttagggaaaatatatgtcatgtttattttgataaaattatatgatttctcactcaattcttgtcggtggcttcaggatttgttattttgtatatcgatctgtgtcatttgacaaagtactttgacttggtataatatgagtgttacttcgaccaaaagagcttggtaaagtgtgagaaactccgcaaacttcttctgcagacgatgactagcaacagttatgacgagggtcaagatagccgccatacatgatacattgagtacaacatcaagataaacactccctccccacacacaacttttgccttccgttcactctgtatgttgtgtttattacggttgcatatgttgtgtttattatggcatcaacacgttccattagaaaatataactattgtttgtcaagtacaaaatcataatcacatcagcttgtaataatattgcatcactgttttgtaccaaattgtaagttgttgtagcaacgcacgggcacc

SEQ ID NO: 35748 - DNA, 415 bp, Zea Mays
ggcaccagcatcacatcgagccgggagattggaatccagttgagatttcgctcctctcctcccctcccccgccctggtgagcccctccgggcgacgtgtgtcccgttgcctttccttcgctcgacggccacctgttgccctcgcatggctctgcctgctcctgccaagcgtccaagctcccgctcgcccggcggctgcacgccgcagcgtctatccacccagatccgcacgatccccgctaatcgccgcaccccctacctcccatgcaacttctctagctcacccgcatcccggctcggcactgccttctccttgcacttcacttctgtatctagaccacctcatcacaattcgtcgtcagcgtcgcgccgtcgtctcaggtcaaggttgaaaatcatactagcgcacaagtttg

SEQ ID NO: 35749 - DNA, 3776 bp, Zea Mays
tgtgctagaacatgatcgtaaactggatgaacacaagtgcaaaatccaaatgaatttcttcttgtgctatcagacagcatggagtatacactaaccaaggaggacgtggggagacacctcaaatttgtatatatccctgttaaccttgaaggtcaggagggtgaatctgcttgtgcgataacagatgtagttaagaaagcccctccaaaagtattcaatctaaagattgttggggaatctatggaaggaagcaagatatctgccagtgctactgttacaggtggaactgaagggtccagcagggttcaatggtacaaggcatcttcctctgaatttaagaatgaacatgagcttgaagcccttactccgtcacgagtttctaagacattccgcattcctcttggtgctgttggatattatatcgttgcaaagtttacacctgtggcacctgatggtgaagtcggtgaaccagcctatgctacatcagatggccttgtggaaacactaccacccagcctgaacttcttaacagtcactggtgaattctctgagggtcagatattaacagcatcatatgggtatatcggaggacatgaaggaaatagtttatacagctggcaccttcatgaggctgaagatgacgaaggcactccactttcagaggcaaccggtttgctacaatactgtgttacaaaggaagctgttggaaagtttgtttctttcaaatgcacccctgtcagagatgatgatattgttggtgaggcaagatcattcataggaaaggacagagttactccaggtgcttctgttttcgttttcttgaaaaaattacgacactgaagatattattctgtcacaaaagagacactcctctttgtgtgcttgtatggatgacaaaaaaacatgtttggaaattaagtgatgcatgagcctggattatgtatggaaatatggatatcacacatacttttgcattatggatatcacacataatatgtgacgaactacaaagatgtgaaacagaaaagaagtacaacaattgtagcacactcctgagggcctgtttgggaactcttcctcaaaaccacagttttataatgccacaatttattgtatgccattgacatagccatggtatattttacatcagtccaatctgatacctatttggagacacaatatttcagttgtagtgtagaagagaagactgcagggatgccgacattactttctcttgaagtaactggtgatgcaattgaaggaacaactatgtttgccagtaaaaggtattggggaggagaagaaggggacacaatgttccgctggatactgacaaattctgatggaaccgagaaagaaattgaaggagcaacaagttcatcatacaccttgaaatgcaatgacattggcttctacatatctgtcttgtgcaagcctgttagaaatgatggagttgatggttctttagtgtcgactgaagcgattggtcctattataccagggccaccaacatgtcaatctcttgaactagctggctctatggttgaaggtggccgtttgacctttcatgctgtgtatacaggaggtttgcggggaagttgcatccaagaatggttcagattacatgatgatgggcacaaggacaagttgactgctgatgaccttgatctagctgatatcgattgccggattgaacttatgtatacacctgtacgagaagacggagtgcacgggttaccaaggagtgttacttctgatacaatcttacctggggagcccaagggtgtcaatcttattctacctgagtgttttgaggacaatgaaatttctcccatcaaaacctatttcggtggcaaggaaggcactggcaaatatacatggtttcgaaataaagagaaacttgataacttggaatttgatctggttgctgaatcatcagaagttgttggagaaaccttaaaatataagccttcattgaatgatgttagttcctatctgattctttattgggttcctacacggcgtgatggaaaggttggtgatcctttgatggctatctctgatgatccggtcatggcagatgggataagtggagaagaaaaactctctgaaccatctgatgtaattttgccagaactactcaaaatcgagacactcaatttcaaggggaatcaggttgaaagagaaacactgactgctgctgaacaaattccgtacagtgagattcaacaacatatatggaaaaattataagaaagagatgaaatatcaatggtttatttccaatgaatcaggaggcgatcagtcttttgaaccattggcaacccagtgttctcgctcatacaaagtgcgctttgaggatattggtcgttgcctgaaatgcgaatgctttgtcactgatgtatttggacgatctagtgaattggtatccgctgtgactgctcctattttgccaggaaggcctaaaattgaaaagctggagattgaaggaagaggtttccacactgacctatatgccgttcagggtacctatagcggaggcaaagaaggcaagagtaaaatacaatggctcagatcgatggttggaagccctgatcttatctccatacctggcgaaactggaagaacgtatgaagctaatgttgatgatgtagggtataggcttgttgcaatttatacacctgtaagagaggatggagttgagggacaacctgtttctgtttcaacagaacagattgcagttgagcctgaactttacagggaagtgaaacagaagctcgatgatggttcagtcaaatttgaggttctgtgtgacaaggaccgaacacccaaaaaggcacaagtaatgggccatttggagcggagggttttggaagtcaaccgaaagaggataaaagtagtaaagcctggatctaagacatcattcccgagtactgaagtacgaggaacctacgctccaccgttccatgtcgagctgtatcgcaatgaccagcaccgcttcaagattgttgtcgacggtgatactgaagttgacttaatggtgcaaacacggcacatgcgagaccgcatcatcctcacgatcagaggcctcgcccagaagttcaacagcacctccctcaacacacttctcaggatcgagtcatgatagacctgacagtgtaaaaaccaactattacgggaagctgtaccccttgttccgattggttagagtgcgtggttttagtaggattcgtgacatgccagccttttgtgtgtatgggtgtgggacgggccgagcgtgttggattacaattttttccctgacacatctctcaaatcagagcagcatcagctggttgctctgactggtgccgtcgtgcgtcatgaaatgtacatagggtggttagagcgagaaagagagtggtgtttcttggtgctgtatttattatgcactggttgggttgggttttttcgactgccattctcatactaagtattggttctttcttttttcggtcgttgggtttgcatatacttgtaccgacaacacagcttggggtgattgggcgagtgctgttcagaatgcctggtccacacttgtgtacgactggaatcctacggtggcgtattcacatgctgttttatggtgcaaatgtaaattcatctgttcataaacgagaatcaaaatcgtcggccacgtgtattcgtcgtattcgtaccgatgtatactaccttataaaccagtactaatctcacggtggcatcaattatcttcctctgtttcacaaggcacacgtt

SEQ ID NO: 35750 - DNA, 1695 bp, Zea Mays
gagcatgatctatcaaatattttagaaaggaaaaattaatgaaaacgaaataggaaaaaattatagtatgaacttttatttggtcgtccatctaaaaagcccattaattgagcacaaagccaagttccaccaggccgaaacgtttctttagtctttaccctaaccttccagcgaaggcacacagccgccgccgtttcttcatcttctcgcagcgccggcgctccatcttcccctcccttccgtactcgcgctcggcacgcgggcaacggcagcggcgctcaggctctcagcgacggcgtcagcggcttcccctcccgactctcgccagtcgcctcgcgccctagcctccgatcctccgcacaccggccggtgacccagcttagtggtccattgaagtgtagctgtattgcgatcttcaactgctggggccatggcctacgagattagtgagatcaaaaagattggcataggtctggtggggtttggcatcctattctcattccttggtgttatccttttcttcgataggggcttgttagctctgggtaatattttctttttaactggagtgggtctgttactcggttggcaatctatgtggcagcttttcacaaagaaggcaaaccttaagggatcagtgcctttcttcattggtttgtttcttctgtttgtccgttggcctgttgctggtataatcatggaactatatggatcttttgtgctcttcagtggttatgggcctcctatccaggccttcctgtatcaaataccaatcattggttggattctgcagtacccattccaggtaagtttatatttcactgaggattttagcagagtttttaaaactgtaactgctttacctcaacatcaattatctatcaatgttttcaagttgtccgattaatcgtccaagtcggtttggaaaaattgcgattaatcgccaagtcatccgactaattgagattaatcgccacatatgagccttaaattgtacagtactcaatctgtattataactgatgcatcagcaatttgactgtgcagctgcttggtcagttgaggcgtaaacgcacctgaaatgttctgcaactgccaagatactctttgactcttcatggttaaagctatggtttattgttcatatttagacaataagagttcataagttgatggatgctccgactcttgaagcaggacctcagtgccttttggtcatcacaacaacaatggggccagagtgatcacacctgatttatttctgattctggaatctggacacaatttgacaaattattttgcaagttgcacggacggaacccttgaagaaaactagagaaaacaaaatcttacagtggagcttgatagcccacctgatgaataccacgcgtgatctgcttcatttttttgtcagatgcaatgttcatatgattaggataaaaggctatcaacctcgggtacacatcacacctggtgaagttactgccaacttgttagtataaaaggctattacaaggactgatttattgacaagagaaatgaagtggatttttgggaagaagtcccctttctatccaaaattgaatagctagcgattcttacccaatagaccctctgtatttttctggtcatcaaaccaatcctaaggaattcaacctatcctaaaagattggctttgtagaacatggtctgccac

SEQ ID NO: 35751 - DNA, 1310 bp, Zea Mays
ctgatcaagactgtagtgatggagtccattagtccaacaaccaaggccatgctatattgatcttgctgttaatggaattgttttaaggaccttcatgcaaaaccccaaccatttccccttctgcactccacggagcagtgaaaccgacctttctcccctcccccgcgttccacttcgcggagatctagcccttgggtttcgccagcggcgaggcctaagtcatcggcggcgagccaaactccacgagcggaggaagaggaggggaagctgagacgaggaggcagctatggggcagcagtcgctgatctatgcgttcgtggcccgtggcacggtcgtactggccgagtacacggagttcaccggcaacttcacaaccatcgcctcccagtgcctcatgaagctccccgcaagcaacaacaagttcacctacaactgcgacggccacaccttcaactacctcgtggaagacggattcacatactgtgttgttgctgttgaatcagtggggcaacaaattcccattgctttcatggatagggttaaggaggatttcacaaaaaggtatggtggcgggaaagctgctaccgctgcggctaacagcctcaaccgagagttcagattaaaacttaaagagcacatgcagtattgtgtggatcaccctgaagaggttagcaagctggccaaagtgaaggcacaggtttctgaagtcaagggtgttatgatggaaaacattgaaaaggtccttgatcgtggagagaagatcgagctgcttgttgacaagactgagaatctgcgctcacaggcacaagatttcagacagcaaggaacaaatgtgaggagaaagatgtggttgcagaacatgaaaatcaagctcatcgtcctgggaataatcatcgcacttattctgatcattatcctctctgtctgccatggtttcaaatgccattaagcacagccagaacactgggtcttgctatttggctttaaaaaaaaatcggtgcaccgccgcggcagcagtcaggtacgagaatgcgccagaagtggtaaatggtctctcgtcaggtgccgggcatcgaagaatcacgtagagggtgtttggttttactgaactcgtatcaaatatttggatatcaattacgcctattatatatatgtttaattagatttaataaactcgaatcgtcttttagtgtttgtaattagttttataattaaactacttaatgttcataattactatttaaacatttgatgtaaattgaacttagttgtgtggaaccaaacacactctaaagttagctcctctggac

SEQ ID NO: 35752 - DNA, 755 bp, Zea Mays
aagagcttgggagttcagctccaagccgttcgacgagagagacgaccgaacccggccggaaggggaggagcgggaggaccgcctgcgccgtcggtgagcgcagttgctcaagtcagcaaactgaacccgtccggattcgtgcgccgccgagcacccctcgacgccagcggcgatggcagccgacgacgtgcgcgagctcctcctctccaccacagccgacgcctctgacccgtccacgcccctctcagcgcccgacctccgcctcctcatcgaccgcctacgcttttgctccgaccgcctgaacgcctcggccctctccttcgctgcctctaaccgcggggtcctcgctaatgctctcctccgcgcagcctccgccgccgattcctccgcctccctcgagtcttccctcgactccgcgcttgccccgctcgcctcctggcccgacctctccgacctcagggcccttgccgaccgcctcctcgctgcccgccgcgagctcgctgagcgccaggagcacctagccgctgcctccatgattgcctcgctttcctcccgcctccgcgaggcccgtgccgcagcgagcccccttgacgcggccgctgccatcgctgaactcaagaccctcctgatcgatctcgagcgatctggatctggtcaagacgacccggtcgtatttaggctcctcaggagcgactgggagcaacttgtcgatgagctgcaagttaggctttcgaagaatgtggaggagtgtgtgg

SEQ ID NO: 35753 - DNA, 2531 bp, Zea Mays
atcacaagcaatcgatcaagctagcatggcggtgaaggtgtgggtgttcgccgtggcactgatgatgtgcgctggtgtagggcttggagctgacgacgacggcggcagccgccttattagccgctgtcgtctgagctcgcccaactaccgcggcgccctggcaaaggccatcctcttcttcgaggggcagcggtcggggcggctgccggcaaaccagagagtcaggtggcgcggggactcggcgctcaccgacggccaacccgaaaacgtgaacttgacgggtggctactacgacgccggagacaacgtcaagttcggtttcccgatggcgttcagcgtcaccctcctgagctggagcgccgtcgagtaccgcgacgaggtggcggcggcgggtcagctccgccacctccggtccgccatccagtggggcgccgacttccttctccgtgcccacaccacgccgaccaccctctacactcaggttggcgacggcaacgccgaccaccaatgctgggagcggccagaggacatggacacgccgcggacgctgtacaagatcacccggagctcgcccgggtccgaggccgccggcgaggcggcggcagcgctcgccgccgcgtacctggtgttcagggacgaccgggacaagaccttagccacgcagctcctggccgcgtccagatccgtgcgtcgtcgtcacctcttcgacttcgcaaacgactacaggggatcctaccagttgtcctgcccattctactgctcctactcaggctaccaggacgagctccagtgggcgtcggcatggctctaccgggcaaccaaggacagcaagtacctcgacttcctgcagaacaaccagggcggcagcgccaccgagttcagctgggacaacaagtatcccggagctcagctgcttgcaacacaggagtacttggctggaaggacagagctggaaggctacaagaggggcctggactcgttcgtctgcgccgtgatgcccaacagcggcaacacgcagatccgcaccacccctggagggcttctcttcacccgcgactccgttaacctgcagtacacaaccaccgccaccctgctgctgtcgatctacgcgaaggccctcctcgcttctgcagcaggagcagtccagtgcagcgccgcgaccttctctccggaccagatcagttcatttgcgacgtcacaggtggactacatcctgggagacaaccccaggagcgcgtcctacatggtcggcttcagctccaagttcccgaggcgcatccaccaccgcggctcctccattccgtccatcaaggtcctcccccggaaggtcacctgcagcgagggcttctcgtcgtggttcccgacggccaaccccaaccccaacgtccacgtcggcgccatcgtcggcgggcccgacgggaacgaccagttcggcgacaacagggaggactccacgcactccgagccggcaacgtacatcaacgcggcatttgtgggcgcctgcgctgctgcactggggcgcagccagcaggtgcctgtggacgaaacagcctcagcccacagtgatgttatgtaactagctacaacggaggagtatgcaagggcgggcaaccaaaccatgatatcgctttgtgtaacatcccaaggcccctacccccactaccactcttgatcatcctgataagaagagataaataaataattaaatacaatggcaaatctgcagtagtaaacattatctgccgagtcaaacatgcatcattcagcaaaacccaatcacatgactagagaaagcagtcaatctcgtttcaactttgatcgaaatgaagtgtcttatctacaatggtttgctgcagtactccagcaacagctggacaaatcaaaactaaactgggggggttctatttttctttatactgccatttctatatatagtagtgtgccgctaagctagctggccaatccaggaaccagccagagatgcacaattaaccgcggtgccaaagaagagttcccagaaccaaagatccaccgcgagaaccgaagagaagatgagcagggcgagcgtctcgtatctattcaaaggccagcctgaagcctcagccagcgtcttcaacaaggggagggattcgctgtctatctcccggcttcttattgaccacgcggtgacccactgcacatcggccgggaccatgtccagctcttctcgaaggcgtcttcccaggtctggcatgtgtccgccgccgtagaggaccgctattctcttgtacccaccgtttattgcttcctggatcttctcggcagcaactctgttcctctccccaatgataactgatttctcctcaacgggtgtaggcacagctgtgaatctttaataaaaaaaagagaagtaaatcagcgaatactaagaacctcaattgcctgattggtttcagattactcactcagatgtcagttgctttgccaagaaaatcttcagtgcagctccaaaatctagcctggacaatgcctccagctctggaaacccatct

SEQ ID NO: 35754 - DNA, 1281 bp, Zea Mays
cagaaattcacatacacatagattacataattggacatcatcacacaatgttcaaataatagcggaaagtagtactttattacatcatgatgtctgaaacatccacatagtcattaacttaaacataaaatcaaagtgctgaacgaaacgtagtacgataaggccttcataggcagctgactgggggtttgccactaatctactctagaattcatcgaagtcctgaaagtccaacatattgccttcatcttctcctgagcaagggttgcaatggggacaacctggtgtttggtgtttaagcaagggtgagtacacatcaaggtactcagcaaatgtcccatttgactaaagtggactagctgtatgtgggggaagctcaaagcatttgcttttagttggtcaggtatttattactagtagagggccaagttttagcaataacccccaagttattaacctaaaaagtactcccttcaagaggaaatataagaatccatcattataatcatcatgactaaatcatcatcataaatatatccagaatatctctaatcaaaggagctcccaaggctgctgacatcataaatatatccagcatattgggatagctggatgaattgtctctgtattcgcttactgacatccctccctgtttgagggataggaactctttctttttaattttcataaggccaacaggaatgtgataattcctaaattgagtggagaattctgcccaggtgatggtgttggcaatagcgtgaacaacgtaatatgcatcccaccaatccgcagcggggccagtaagcatagagtactttctcctggtcagagcactgagctatgttgagcatcttatccatgaactttaaccagacatcaacttgtagtgggtccgaggagttagagaatgtcgggggcttgtgactcataaactctcgatgcttatccctgggcggagctggtggtggtggaggtggtagttgttgttgttcctgccgtacttggcgtatttcctggcgttcttgcctcatttcctgtcgtatttcctgtcattcctggcacatctcctgacgttcttgtcgcatttgcgcttgcatttccatcatggtgtttgccatttgccacagcagctgcatctgagcgatggcaacgggatctgttccaggcggtggagggttcggtggaggattcatctctggttgtggttggttaacaatcatcctacgacggttgttagcaggtagatcgatattgcctcccttcctggtattgaccatc

SEQ ID NO: 35755 - DNA, 1926 bp, Zea Mays
ccgcagtcggttgcggcgctcgaagcggtgggcaggctcaggcgctagttccacggccgcgggccgcggctcgccctcaccgcgccgacgcaccggctccccctctctcacgtcccgtgcttccactcgacccctccgagctccggctcctctccgcccctccaccccaaccggcaaccggcagcgccccctgtggcgcagcggctgtatctgcgtccctctcttgcagttgcagcccagcagcagcaaaaacaactcgagctcgcttgttcttctagggccaaccgcagtaacagactaacacttgcagttaggcggctccgtagattagtgtctttcatcagctccagggtcaaggtggcacttttcatcagatcaagggtcaagcagtagtatactgctctgtttttgatcgggaaaagtattgctcctagcctcctacagctagttctttttatgattaagctccaatgaaggattctcaggatattcagagcacaacagagttgcagtcatcagcacagggtactaatgaagtgcaaagtcagcaaccaaacccgatgaccactgatgctcctgcaggaaattcgggttccttgtctatagctagtaatgacagtaagaaggtgtctcgcgaagacattgaacttgttcagaatttaatagagcgttgtcttcagctatacatgaacaaaggagaagttgttagaactctttctactcgtgctagaatagaacctggcttcactactttagtatggcagaaactcgaagaagagaactccgagttctttagggcttactatatccggttgaaattgaaacggcaaatcatcttgttcaatcatttattgcaacaccagtacaatttgatgaaatatccagcacctccaaatgttccattggctccaatacaaaatggaattcatcatatgccagttagcaatttaccaatggggtatccagtacttccgcagcctatcatgccggctcccggccagcctcacatggacccaatggcctgtggtctgtccaatggtcatgtggtcaatggaatacctgcaccaggtggttatcatccgatgcgcatgaactctggaaatgacatggttgtggacaacggagcgcccgaagcaccacatgctggtgctaccggcagcgtcatgtcatccgagatggccgtgagcccctcatcagcggcttcaagcaaccatgctccatttatgccgccggagatcccaggcatggccatggacgtgccaggcctagactcgacattcggatctgacgtagggaatggacctctgcaattaggaccagatggctcgtcgagagactccattagatccttggggcagctctggaacttcagcctctctgatctaacggcggatttgacgagtttgggagcagatttggacgtgctggagaactacaccggcacccctttcctgccttcggactcggacattctgctcgactccccggaccaagatgacatagtcgaatattttgctgacgccatcaacgggtctcagtcagacgaggagaggtcatagcgaagctagctcaaggtttttcaggcagggcgcagggatgtgtcttctcatggcctgctgcgagagatgctgcggctaatgtaatgtaactgtgccttgggcccgcgcccctgtgtgctgcggcaagtgtagctggtttaattagactttttttttaatttgtagctggttaattagaatcctaattctttggaataaaaaagtagtagctggagttatcggtaagaatcgctggatgtaatgcaaagctcgctctcacagtcacagctgggtgaccacaggaggacctcctttttgtttgttgtatatttgctgctacagaagtaaaacggtctcataggtctcaggcttactcggcgcagctcgc

SEQ ID NO: 35756 - DNA, 2356 bp, Zea Mays
gaggggtatatgcggaagctgaaaaaattcggggtgcgcccgtgcatcccagcacccgaagctggatccgcccctgcggtggcagcatgagcggcggggcgtcgctggggctcaggtcgtcggggagctacggatcgctgccgcagcagcagttaggcggctgccagtcgtcgtccccaccgctggccgcgcggaagcccgcgaagatgtccctcggcgggaccagcggcccgcgcgtctgcgcccggatctgcaagctcgccggacgccgccagcggatgctcctcctcctcctcgtctccgtcgccgtggcattctgcttcctcttctcatcacttgtcagtaaagacgaagatgcatcacctggtgttgagaccatgcttgtgttttctgatcatgtccggagctttgtgaaccctgtttggacatcgtcaggcagaccagtagctcagagaggttcgctgactgtgaatggtttgaatacaccatcgcagatggaaaaacaatctgatagtaaacaagttcaggaactcatgcagagttttccaccggctattgttgtggatcaccatccttgtgaaaacttttcattgtctcctccaccagttgatagaaaacgcactggaccacgaccttgtccagtttgttatttgccagttgagcaagcactggcactgagaccagctaaaccatcattgtcaccagtccttcaaagcttaaattatgttcttgaagagattttgattcccaaagagtccaagagcggttctttgtttggaggttttccatccctggaggaacgagataagtcttatgacataaaagactcgatgactgtacattgtggatttgtaagagggaaggtacctggtcttaatactgggtttgacatagatgaagctgatcattctgagatgcagctgtgccagagtacagttgttgcctctgctatttttggtaattatgacgtaatgcaacaaccagaaaatatcagcaaattttcaaaagatacagtttgcttctttatgtttctggatgaagaaacagaagctgcaataaagaacactactattggtcatactaaaaagattgggctgtggcgggtagttgttgtccgcaacctaccatttacagatgctagacgcaatggaaaggtacctatgcggttggcgattttgatttttctcatccaaacctgtgttattcgcaatctaccatgttgttctgtgtttttctccatgaactgaataaggaatactggactcatgttatccttgttatcccattctgaaactttgcttgacttgacatttgttaatgcaaatcagaaccaacaagttaattgggtctggttttaccatctatggcccctgtgatcttttcctcctacaggttccaaagctattacttcatcggctttttcccaatgcgcgatattcaatttggattgatgggaaacttaagctagtgagggatccttatcaggttcttgtggaggaagaatgttagctttgcaatttccaggcattacagacgcttcgatgttttcgaggaagctgaggccaacaaggctggtggaaaatatgataacacatcaattgactaccagatagagttctacaaaagagagggtctaacccattattcatcagccaaacttcctataacgagtgacgtcccggagggctgtgtgataattagggaacatatccccataacaaacttgtttacatgcctttggttcaatgaagttgaccgcttcacgtccagagatcagctaagcttcagcacagttagggataaaataaggtggcgagttaattggactgcagacatgttcctggattgtgaaaggcgtgattttgttgttcagtcgtaccaccgagaactgttggaacagaggcagtctgccttacgaagatggcctccccagcggtctcccgtcgcgcgcttccaacctagaaagatgcttccagacaatgcagcaagggaaccatggaaggcttctgcaaccaagaagttatcacggaagcgagcacgggataagaaatcaagctcgagacgaactcattgaactagtgggaaggaagcaattcaactgtaaatgctggcgattttgctcctacacaactgcatatctaacggacagcattccaacattgttttactacttttaacttcctttcatgctcctagctcccctccccaagggcgccaaaattttgtcagggattgttgatagagagctgaaattctttgttgtaaataaacatttttagatcagagatgtattcaactagcagctgattcaattcaatccattttggaggtagtctttggcagggtttcaaataca

SEQ ID NO: 35757 - DNA, 1856 bp, Zea Mays
tgcatcacaaagcacacttattgctgtttttggatggtcatacactgtacagtataccgcaaaaagctttcagctttcaagagctaatagagaaattctgcagcaagctgaatgcaatattcaggtttggtgtatccttctcagtgacaaagtaccttttaggatgcactggcctttacactctgacatgcaagttaatggtatttatgttagggtggttaacaggcaacccacacaaaagttaggggccaatggtagagacgatggtccactattaacagattacctgaaggagggacctaacaagatttctctatcaagaaatgacactcgtactttctgtttgggtatcagaattgccaagaggagatctctagaacaggtcctaaatttggtgccaaaggaacaagatggtgaaaacttcgatgacgcccttgcacgtgtgcgtcgctgtgttggtggtggagctgaggcaaataatgcagacagtgatagtgatatcgaagttgtggctgattttgtctctgtgaatcttcggtgccctatgactgcttcaaggatacagatcgctggtaggttcaagtcctgtgctcacatgggctgctttgatttagaagcttttattgaaataaaccaacgttcccggaagtggcaatgcccaatatgcctgaagaattactctctagagaacataataattgatccttatttcaatcgcatcacttctttgatcaaaagctgcggagatgatacatctgaaattgatgtcaaacctgatggttcctggagagttaagggcagacctaaactgaaggaccttacacagtggcatctaccagatggtactctctctctgtccacagatacagcagccaaacctggaatgtgcattgtaaagcacgaggtcaaagaagagccattgtctgaagaggtgggatgtcatcttaagttgggacttaggaaaaaaagcaatggccagtgggaaattagcaagagagtggatgctgatctggtgccgtcttctggtaacgaccatgaccattcaggacacgatgaaaacaaaaactgcatcactcactcaagcaatattgatgatacaaacattgcagatgaaggttataatttagagccagcaacaaatggttatcccatgacccatgtccatgatcttgactcttcatccgcagacgaaaatggtcctccagcatcgacagggcaggatatagtagttttgagtgactcggatgatgatgctatcatggtgttgtctcccggtgctgtgaactgtggctcgatgcataacactggaaatctgtttccacccaacacacctgaaaatttaggagtgtgtagtggagaaactggtggatgccccaaggagacatcattccttgcattaaaagaagattttggtgatccggggttgtcattttgggaaagtcatggtagtccccgagatgcttctacttcccagatccccgatgccagtacaaaggcagtagataatccaggtgaagtggacaactaccctgccaatgatcaatctaagcaagggcaagtttctggggctgattttggagtagcagcaaatccggtgccattggaagatgggcatgatagcgcactgcaaccttgttcaatgagtgaaagagatagtgccatgggtcttgctagcctgggagcggatactcaatcatgtgttgatgtccattctgacaattggacatctgtcagcattagtggccgtgatgaagttttaactgctgccaaaattgcatctaggaaaaggagcaatcctggagacagaatagaagatttagatgatgattttgaatctgcgcccattgttcctacag

SEQ ID NO: 35758 - DNA, 4985 bp, Zea Mays
aagattgtgcctatatcgattgttctagttttgaggcaaataacatcccacggtctatccgttacctatccatttccatgcaagatcattgtgctcagaatttcgaggaacaaatgggaaaactgaaagaaaagatatacattaacaatttgcggagtttgatgatatttggaaaatacattatgttacatctgctcaatattttaagggacacatttaaggaaataagacgtcttcgtgttctatctatattcatatactcccatagttccttgccaaacaacttttcagagcttcttcatctccgctacttaaaacttttgtcaccttattactcagaaatgtcattgccaaacacggtctcaaggttttatcacctgaaatttctagatcttgaacaatggggaagtgatcgttctttgcctaaggacattagccgccttgaaaatctatgccattttgttgtttcggaaaagattgattccaatgttcctgaggtggggaaaatgatcttcttacaagaattgaaagaattccatgttaataaagagagtgttggatttgagctacaagaattgggtaaactagatgagcttggagggaagctcaatatatacgggcttgaaaatgtgagaaccaagaaagaagctaaagaggccaagctgatgtcaaagaggaatttagttgagttgggattaatttggaacatgaaacaagagtccaccgaagatgatatcctagatagtatccaaccacactctaatgttaggagtctttttattgtaaatcatggtggtaccctcggtcctagttggttgtgcagcagcgacaccatatacatgaaaaacttggagactctacatctagagagcgtatcgtgggctaaccttccacctattgggcagttctatcacttaagagagctaaggctgagtaaaattgttggcatatcacagattggacctggcttcttcgatagcacgacagaaaaaagtgtctcacacttgaaggcagttgagtttaatgatatgccagagcttgtcgagtgggttgggggagctaactggaatctgttctcaggaattgaaagaatcaagtgtactaattgtcctaggctgacagggttgctggtttcagattggtctatttcttctatataagacagcactgtatggttccctaatcttcatgacctttacatttatgaatgcccgaagttgtgccttccacccttgcctcacacttcaaaggtatcccgtattcatatgggagacttttcttatgaaggtcgtaccatgttgaaaattaataacccctctagatttgccttcgaaaatctgggtgacctagagacattggtagcttgggatgcactacccttgtcctttatggatcttaaaaagctacattccttgagacgtataaatgtcactagatgtgaggaaacatttttgagaggactggatgatggtgttgtgctacccacagtccaatctctctaccttggacgatttacacctaccaaaaattatttgtcaaaattattcaaatgttttccagcactttcttctttgcatgtgatggcatcaccatcagatgaggacaacgaggaagtggtactgcattttccaccctctagctcgctgagagatgtcaacttcacagggtgtaagaatctgatcctacccatggaggaaggagctggattctgtggcctctcgtcgctcgagtcagtgaccatacacaaatgtgacaggttattctctcgatggtccatcggaggacgagcaactcagactcagagcatcatcaaccctctcccaccctacctgaggaaactcttcctttcttatatggaaactctgcctcaggaagctctgctcatgaatttgacatctcttgagaaactcacactatgtaattgtcttggctgtgagcaaagcaccgagcgaatggctgtactcgcgaatctaacatctcttaccacgctatatttatataattgcagaaatatcacaatggatggattcaatcctcacatcacatccagcctcaagtatctatgcgtgtacaatgagagaaatgatggaactgatccgtattctgtagcagcagatctacttgtagcggtggtgaggaccaaaacaatgcccgacgtttccttcaaactggtgggactttatgtggacaacatctcgggagtgcttgttgctcccatctgcaagctgctctccgctaccctcgagacgttaaacttcagtaatgattggcggacagagaacttcacgaaagagcaggacgaggcgcttcagctcctcacgtctctccaattccttgagttttataactgcagggctctgcagtccctcccccaaggactgcaccgccttccttctctccacggaataactatctatgggcctcaaaacattagatcactgcctaaggagggcctccccgattcactacgaatactacgtataactaactgttgtgctgagatttatgaggcatgccagcaattgaagggaacaaggccagatataaatgtacttgcctccaaagctcgtgtgcaaaattgaatacctgcttctgcatgtcttcacagtcagctctgcttcaacatgcctttcactctacaggtaaatactgtgaaaacatcttcctatacgtgagatagttgatcttcatcgattctacagccaggatgatgtcttattggatgatgtgttggtcatggttggcacaaaattcagtagtcatgtaactatcgttaatcatttgaaaaccactggaagacaggagatgtagcaccacaagccattcctttgatcatttgaaaaccattgcggctctttctgattatatcaaccagttgagtggatgaaagaccaaaaaatgctttggaagaagggctcacaattgtggataataaggcatccagtattatagaggaaacaaaggaaattcaaattagacggaaacctgctagtccaagttcttatatgccaaattcatcagtagatacacatacactctacaccctaatcttctttgttatgacatttattgtttttttcatgaactacgtacatcttaattttcaattcatctagaatactgaataggtgatgattcatcaccaaattgataagtgaatattaatacatctgaaacctaaaattaaatatatattatataagttgttgttaatgttcattccatttttgaacacttgcatgaattttagttctctgtttcttttgaaaaattctgtgttgcaaaaatataaatttatatgaaaatatattatatggtgatgagaagtttgagtttagtatatggtttcatattagctatacattgttggtactatcggcttgttctctttttgtttgaaaaaaatactatcggcttgttcttaaggacacataaaggactagttcggaagcaagagaattagaggagagatggctaaaatccccttcctaattaaataggaagggaatttgagcaccctcaatcccctctaattcccttgctttcaaactagcccaaagagtgtcactgcatcctctgaattatgatatattgaacatggtgttataattgtgaaccgatgagtataacttattttctccatattctgaacaacccattacttaaacagatttgcatcctactggagacattgctggcagaggaattgagactggcataggagaactcaatatatgcttgtgaataacgcatccagtgaaagatagtagattttcatcaattcactacccaggatgttgtcgcattggatgagaatgacatggaagacggcgaactagaggaagacaacaacctcatctaagctgaaaatgtgttgcctgtggttgaagaaaatctagcagatgaacaacactgccttccctgtcctctctagacctgaatctctctgatggtttggattcgtccatgattgatcctgtacgatgaaggatcagctcgtccaacgtttttcaaggaacgaactcaatctgaggaattaccttttcattggtcacctggggtactacgaggaatgacttcacgatagacgactcggttttgcgacgcaaaccaaacgccatggttaggctcagatgttggatcagatgattcctcgtggcttcgtgacgcaaaccaaacgacatggctaggctcagatgttggatcgtatgatttctcgtggcttcgtgacgcaaaccaaacagcctgtaagtccgcacaccttatctatcatggtcattgttgagctgatcagtaattggagtcgtgtgataagcttaatggacctcctatttgtcgtgatcttcacagatcaacaagtgagcggcctttgcatgctgcatgagatcaagcaagccgccgactggcaatgctccacctgccattcagttcgttggtgaggtattaatcaccagccatgttggcacttggcggcatgcagatggagcagaacatccaggtgaagcggacagatacatgatcgatcatgagttggcgcagacacaggccagacaaccagaggctatattccaattcatacattccatgataagcaaaggaagatccaagacaacacaaatatacaaatagttagttatacaagcaaaaatcctgttgttttgtgcctcccattttctagtccagaattaatatgacaatttttcactgaaactggttggatcagagaccaggaaaaaaagggaaatgacaactacagctgtgttttttttttcaaagaaggcagctgcccgtcgatgatgtgctcacttgaggatttcctctgccttttcagtgacactgcttcatccttttcagagtcaaatgaatctctacctcatttcactgcacatacttccaaactgatttgctgtaacatacttgagtttcggtatgacattaatttttaactcataagagaacaaaatcagaagaaaaaaaaacaacaa

SEQ ID NO: 35759 - DNA, 1810 bp, Zea Mays
ctcacccacgcgcttctctctctcaccagcaggccacgccgccgctgcaccaccgctctccggatcatcggctgtccccctcctcctcctcctcgcccactcaccggccatccctgctgcggtgccgcgcgttcaagcaggaggccgacgacggcgacggcgacccgactgaggccgacgcgcggaagcgcaggaagggcccgatgtacaagctcaaggcggcgatccagggcctcgcgggatctcgctccgccgccgcggaggtgtatgggggagagtaccagttccagcgcgccgtcgagaatttgtgcgagccaaggttccccaatccactcacgcgcgcgcatcgctgtggtttcctgtgttgctttccaccctcgcgcgctcttcttcttcatggagccatggcaggaagcggcaacaggagatttggccgggatatggtgtctagcagcacacatttctcccaatggcagatggtctgggttggagaccacgttcctggcggcagagtcgatctgcaatgtggaggtccaatctggccaccgatgtcagctcgctccggagccaattccgattccctagcagtgacgacgttcagatgcagcttcagatgcagcgacgacctctctctccatccatggatctctaggcaactgcgaacaagggaaccaggcatcaaaatgaagggaaccaggaatcgaaacggccccgagaatcccaaagcacgagaaggggaacaagggaactaggcatcgtgaagagagcccggggtgatgaattgttacggttcatggacggagcaagcaaggagcctctccgcaagagtacttgctctgttccacaatttgattcagaaaaaaaaaacaaatattcacctttattgcaatcaaacaagatatcagggacttgaaagtggcgaaagaggagcaagacattgggttttatgctggttttgttggggctacctatttccttggaagggccatcagcgccatgccatggggcatgttcgctgacaagtatggaaggaagccatgcatcgtgatcagcatcctctcagtgattgtgttcaacacactgtttggacttagcacaacttactggatggcaattgtgactaggggattacttgggttgctatgtggtatacttggacccatcaaggcttatgcttcagaagtctgcaggaaagagcaccaagctctgggaatctctcttgttacatcttcacgagccatagctcttgttattgggcctgctattggaggcttccttgcacaggtgaagattatggaatttagatagcagtataagttaaattcgaaatgctaatgagtgccttcatcatgtatcccttaatcataattgacctctgatgtgtaaaaaagggatagtggtcgacaaaaatatttctagcatcaggaaggtttccataattccttccttgctttgtaatatcgttgctagcagcaggatcatgtattgcatgcatttggcttccggattccggctctcatcaagtgactcctttccctcacattgactttgcggacagatgtctcaattctagtggtggagctacgaacaacaatccgatgtcctgatcgagagcgatggagctaatgtttgaacttgtgtgtttgaacttgtgaactaaaaatgtgaactatggatgtgaacttgtgtgaatatgtgaacttatttatttagacatatgtgaatttgtgaacttatatatttggacttgtgtgaatttgtgatatgaacatatatcaatgtgtttgaaatctgtattgtatgtgatata

SEQ ID NO: 35760 - DNA, 1206 bp, Zea Mays
  misc_feature (1205)..(1206): n is a, c, g, or t
attttctgaaaataggacttaaaaacaaaaaattcggcccagttgggagttgcccacccagttccgaacttcgaacacgacgttctccctcaccccaccctccaggctccgagctccaaaaccctagctatgcagaaacagacgggcaagtccggcgggaccggtgggggcacgccggcgaagcgcggccgcccgtttgggagcaccaccggcggaggggccgctgctgctgccgcggcggcggcggtcgttgacccgggtgcacccgccgctctggtcgggccgtccctccaagtcctatcagccctgtcagatcagaacaacaaaagaattgtccttgcattgcaaagtgggttgaagtcagagatactgtgggcactgaatgcccttacagtactctcatttaaggagaaggatgacctccgacgtgatgcaacacctcttgctaaagttcctgggctcctagatgctcttcttcaagttattgatgaatggagcgatatttcaatgcctaaggaccatacgaaaccacccagactaagaactttgggtgccaacacaacactctcgggctttggccaggagaatatggaaaaatacctctaatgaccaatccaaggcggaagattccagtgtcacaaagaagcgcgctgcaagcttttggtttgatgaggatgggttgtttaacaacgatgatgaagggagggcggaaaggcagcagtgtgctattgcagcctccaatataatccgcaatttctcttttatgccagaaaatgagattatcatggttcaacataggcattgcttggaaactatatttcattgcttagaaaaccagaatagagaagatgatgagctcataacaaacatgctggagacccttgtcaatttagcacctgtgctggacctgaggatcttcagctcatcgaagccttcgttcattaaaatgaccgagaaaggtgcaattcatgccataatgggtatgctttcttcttccgtaaagccatggcactgtgctgctgctgaattgattggccgtctgataataaatccagacaacgagccatttcttcttcctatcattccacaaatatacaaacgactcgttgacctattgagtgtaccagcatatgatgcacaggctgctgctgttagtgcactctacaatgtagccgaagtgaatatggattgcaggctcaagcttnn

SEQ ID NO: 35761 - DNA, 3794 bp, Zea Mays
cccggaccctccccagcgagcagcggcccagccacccgcctgccgtccgcccccgcgcttttctttttaccgccgaggcagtgaggcccctcctccctctcgccgttcccaccacttcaagatccgatccatcgtccgtcccatccaatcgccccctctccctcgtgatcccgacgccgacgacgacaacgaaacagctcagtttcgtgtttttctcccgtaccccgcagccccccacacggccacgccccacctccgaatcacaagggtggcaccgtggcagtacaagtagaaacgtcgagtgaaactgaaaccgggggaggggtcgtgggaagaagcaaggccagcagctagcacgcgggccgcaccacaagcgcgccggcaccggccacctacctggtcgcccaacctattgcctataggctataggagtaggcgggagggggacgatatggagtagcagtagccagtaggcagtgtagcactgcggcttctactaccaccgcacctccaacccccgtccgatacctatccaccacaggtctctatccagtccacttgcccttcttctcatccgtcactgcagcgagctctcgcttcgtttccccctttccctcagatctgttggtgtgatccccagcttggatcttgttgattcggtgatttgagtagccgattttcttcgagcaaactggtttttaggaagtgtggttttctcagtctctgtttgaaccacaacataccaaactgaatcaagtgataattgtgttctgaccatacgccaagttatacctgaaacttctgcttcatatgttcacccatcataaagatgccaacaaaagttcaggttagcagcgaaaggaatgtgaagatcatatcaggtcgagatgggcaaaagaagggaaattcacagcatgaccaaattgtacgcgtgccaaaggacatggtcacaccagtcaatggaaatgtagatggaaaatttgaagataaagttagagttgtgaagaatgataagttccgaagacaacgagagtcttggggtggggaaagggctgcatgcatgaagggctcaaaaccatggcctggtcgaaaggcaactactgttgatgaacttgtcaaacatatgtcaaatgttccttcatatttacagcgtaaagaaacttctgagcatcttcaagacaaggcgctgaatgttggagttcttgagtggggtcttcttgctaactggtctcagcaacaaaagcatgagctcgctagaagccatggagcatctccatccaatactagcaggtctgtactattctcatctccatcacattcttctgcaagccccagcagcagatctcttgagagcaatcaatctaccccaattagtgactatcatcattcatccatccgagcccagcagagtaggctcgcagataaacaccatgggaaggccagatgttcgcctagcccaaattctgcggtactgagcttattgccaggtcatggcacacatccctgtcaagagaatggttgtaattatgttgacttggatctcaacaatgtttctttagcctcagactctctaggttcttcctctcgaagttgcagtagacatgaaatagttgaagatgaagagactagatggaagattgaagatgttgtccatcattgttctcgtaggctttttacagacagtgataacattgggaaacatttcttcacatcaaataacaaagattccatgtgtaatgatcctgaacagagcagtggcttggattgtgaaaattttgagtcactaatatctgatgctgtgatggatacagctagaaatggcagtaggtcacctgattgtttcttggaggatattgagacatcccgtgaatttcctcgaatcccatattcatgtccacttcccatcatagattcagcagctaaagagattggcaccactagtactgaggctggagataattttattggtacagctgcaaaagtaagtaagaattctagcctaaaccaatctgccctgaatgccactgagaatcctccccgatattctgcaaagtttagtgataggatgcctgatcgccatcaaggttctgtgatgaatcgagtgagccgcagctctagcctcaaggagtcaccacatgctcgacaacccaatgtagttcctcctgttgataagacaggagatcggtcatcacccaacagcaaaggtaggcgaagcccattgaggaggatgttagatccaatattaaagccaagacattctagtccaatacgaccttcatttgttccaaaatgtcatcttccagtcaataccaccaagcaatctctggacttagggggatcagtgccacagaatatgcagcgaaggtcagttgatttggtagtcaattcgaattatcgaattgaagcaaatacaaatcagccacctcgtgtgctattgaacagtgcaagatacatccagaaagaaaaggattcaacaacaacaagacaagcatttctgcagctagcatggaagaatggcttgcctttattcatgctgtcttatggcgattctgatatcctggcagccactgttagaaggaagggcatctctgaaaaggatgatctggaaagcacatatgctgtattcactgttgaagaacctaagaaaaaaagtggagcttggatcaaggcagggggcaagaacaagaaacaccaccttttgtctagcatagttggggaaataaaggttgcacgtcgaaaatcaagatgtcaccatacagcagatgttcatgtatacagggaatttgtgttgcttggttccggatttctaccatcatctgaagaatcgggtgattcacatgttagtggagagtttgcggcttttattagtgcacttcctcagcaagaagcagaaacttcgaatcaatcatcttcacagaataccagacaaaaaaatttagcactaactggctgtggttgccccccactgggaaacttccagcctagttctgcttcagccaatgttattgcagtacttcctgatggcttccatggcaaatcaacgtctgggcagccgttgcctttgattgagaggtggaagtcaggaggagcttgtgactgtggcggatgggatgaaggttgcatgctgagtgtcctcactgatgcggccgaagaaaatgatgccgttcaggctaaccaggcaaaggatggcagccagcgatttgaacttctagctcagggtggatcacgagaagataggcatgccttcagtatgacttcattcaaagaggggctttatacagtggaattcagatcatccattgcattacttcaagcttttgcaatgtgtatagtgatgctacatgggaggtaccctgacaggctgcaagttggttcgcaagcagcgcaggagcatgacctccttgctggtcatgaggtcaaggccatggtagccagtcaaggaagagctccgaccagctatgtgccccaccgtccacctctttctcctgtgggccgagcctagcttatcgcgattaaatgtatgttctttgtgtgtctgtgtcctctttctccttcagtcgcgtagtgctggtgggattgatataccatggtcctcaggcccatatgcaatacgcatattgaaagtgacaatctcagaacaatcaatcggctttagaggtagctacctgtacatgttgtgatgttgatgttgtatgactgtactatgatgcggctgcaaggcccatctcggtgattactcacccgttatatgttctcttatcagttcataagaatacacaaaaaagatgaaaaaa

SEQ ID NO: 35762 - DNA, 909 bp, Zea Mays
cagtctagggctctagcatccccaatcccatcggtcagcctcatccatccgcagggcgccggcggcgggagtcttgccggccacatcgtcgccgatttcaccgatccgagctccggcctcttagccatggaatctccacgaactctggaagccctcaccaacgacctcgtggtggagatattcctccggatcggctcccctgccgacctcgttcgcgcctccgccgcctgcgtcgccttctgccgtctcatcgccaacccctccttcttgcgccggactgaattcacatccaggtttggggcttcttccaatccattctgctggtgtggagttgagctaggtgatggcacaggccctcatgtagatgtagcacatctgcaacactgtcccatgttatcctcctagtctgtcgtattgtctagcttacattagtagctactgaaactttagttatatctatatttttaagttctcccgactgtaatttaagatgtgacaaaggcgtctttagtgtatcaagagccaacttttataagccggctctgtgtgctgcgaaatcacgtgtttgctagtcttgtgtagaattatcatgccagcatcatcagacatggtacggtcagcatgtttctcacttgagactcagagagaggtgtccaaaagctattggacaaggaggaatagttaagcttggcttaacattcatctccgtgatccttccacctggactcttttctgtgcttctctcttgaaaacctcatctgaggttgggttaatggatcaggtggaggtcctccgcgtgctcagcctgacaattggtcaatagctttcgagtcccctgtcttttggcacggttcaaatgaacctgtcaaaacagaaagaatatcaaaatttagatttgttggaaaacag

SEQ ID NO: 35763 - DNA, 1786 bp, Zea Mays
gcgcagaggcggcagggtgggcgaccagtctcctccgcacgcttcccaccgagctcacacactgcacactcccacactcccactcccacctgtaggttcacgggaggcgaggaccctgccccccctgcattcttcccgtatcgcggaccgatcctcgccgcgggaggcgagcggagcggggcgtttctgcgggggagaagcgcgtccctgcaatttctgagagaggggaggcggcgagtggaaaagagcaggcgttgctatcctatcttgctgacacagcggcggtgtggcgaggcgcatggcgagggcgcgcggtggcgccgcgtggtgggtgctggcagcggcgtgggtgctgtgggcggctgcggctgcggcggaggcggaggccaggtcgccgtcggcgaggagggtgcaccggcacctcaagcgcctcaacaagccggccgtcaagagcatcgagagtccagatggagacatcatcgactgcgtgcatatctcccaccagccagcgtttgatcatcctctcctcaagaaccacacaatacagtttaggccggcgtaccaccctgaaggtctatacgatgataccaagagcagcataggctcaaacaatgctggcgagaggccgatgctccagatgtggcatcgaaatggcaggtgccccgagggcacggttccaatcaggagaaccaagaaggacgacctgcttcgagctagctccgtgaggcggtatggcaggaagcggcacactgctccgaacccactgtctgttgatcccaacatgctcagtgagggtggccaccaagttagccctgacctctatggagacaacaacaccaggctgttcacatattggactagtgatgcataccaagccacaggttgctacaacatgttgtgctctggtttcattcagataaacagcgaggttgccatgggggctagtatcttccccatctcgaactacgcgggctcccaatatgatattagcatcctgatctggaaggaccccaaggaaggaaactggtggatgcagtttggcaaggaatacgtcctgggctactggccgtccttcctcttctcctacctcgcggacagcgcgtcgatgatcgaatggggcggggaggtggtgaactcggagcccgacggcacgcacacatcgacccagatgggcagcgggcacttcccggaggaagggttcagcaaggcgagctacttcaagaacgttcaggtggtggacagcagcaaccagctcagcgcccccaagggcgtgggcaccttcacagagcagtccaactgctacgacgtgcagaacggtaacaatggggactggggcacctacttctactacggcggccctggcaagaactcgaactgcccgtgactggtgcttctaatgtgtagtgtgaagtgccgtcaccattagcaaaatgtaacccaagcgttcaggttcgcttatacagcgtcaatctgcatctccttgttcagtcctagctaggtagtgtgtaacatgtgcatgtgctctctagactctaatgttttcttcttcttttcattgtattttgttcttgtgccatgtaaagtttctgaagagaaggagcatggcttgaggctgcggtgggtggttgggctggtcggtggtgacctctactgatttttgcgaagtctgcttattggtcaccttcgccagttattttgaaagtgtgctatagcttgtttgatgatgaatgatagtaatgctgtaatggtattgagcttagtggttattattgcatccagttaaacc

SEQ ID NO: 35764 - DNA, 2471 bp, Zea Mays
gggacataaaagtaattctacgagaattttgcgtgaatcaatgtatttttagaaaaaaaaaacaaaaaaatatagagagaaatcacattccaaattggttcttaatgggagggcagattcttggcacatgatactaggaaacagtctttcccgtctaattgctctccctaaacaaacctaatctcgctggcaatgaggacattccactactagacgagaactctagacctgctgccggccaaggttgccatggtacaacaacgttgaaggttgaacgctgaacgggcgcaggaaatggcccaatcacccggcagcagatccgcccgaatcttcggtgctccaacctcgccggcaacaaccgctcccgacgcgtcatgggcccttcctcgctcccgcctccactccgtagctcccacctcacccccgctcctcgcaggctcgaccccacccgttcggtccgcgtgcccgcctcacgttggtccgccgcgcgcgcaccacaccacagtaccacaccacaccacaccgctacatacaaataagcgagccccccggcgcccaacgactttgcaaatcccgtgtgccgcactggccgagcccacattcgaaccaaagtccccccgggcccccccaaggaaaaccatgtgccgcgcccgccacgttcccacgcgccactaaatcagcagcgcccggccgcccggagctgccagtagcggcaacagcaaaacaagaagcagccataagcagcagagagcatggcgagatcagggcgggaagcggagcccggagaggaggaacggaagctggtgctgggcaagtacgagctgggccgcctgctggggcagggcaccttcgccaaggtttactacgcgagggacctgagcgccggcgccggcacgggccacagctgcagcgtagccatcaaggtgatcgacaaggcgcggctgcggcgcacggaggggatggtggagcagctgcgccgggagatctccatcatgcggatggtgcggcaccccaacgtggtgggcatccgggaggtgctcgccagccgctcccgcgtcttcgtcgtcatggagtacgcgcgcggcggggagctcttcgccaaggtggcccggggccgcctcgacgaggaccacgcgcgccgctacttccagcagctggtcgccgccgtcggcttctgccaccgccgcggcgtcgcgcaccgggacctcaagcccgagaacctgctgctggacgaggcggggcggctcaaggtcaccgacttcgggctggccgcgctgcccgagcagctgcgccacgacggcctgctccacacgcagtgcggcacccccgcgtacgtcgcgcccgaggtgctcaggaagcgcggctacgacggcgcccgcgccgacctctggtcctgcggcgtcgtgctctacgtcctcctctgcggcttcctcccgttccagcacgacaactacgtcaagttgtaccagaagatcttcaaggccgactaccaggtgccgccctgggtctccggcgacgcgcgccgcctcatcgcgcgcctgctcgtcgtcgaccccgccaagcgcgcctccatcgccgagatcatgtgcacgccgtggttcaggaagggcttcgtgccgcccgtcctttcgcccccggtgacgcccaagaaacagcagctggacgaaggcgctgccctcttcgacaacgacgacgacgacaacagcaacagcaaccactctggcgccacctcccctcggtcgtgcaacgcgttccagctcatctcgtccatgtcctccgggttcgacctgtcggggctgttcgagagcgagcagaagaccgcgaccgtgttcacggcccgcgcgccggcggccaccgtggtggagaagctggagtccgtggcgcgcgccctaggattcgaggtcaccagggggaaaggctggaaggtgaggatggaggccaaggccgagggcacgaacggacggctcgcggccaccgccgaggtgctcgaggtggccgtggacgtgaccgtggtcgagttcgtgcacgacgccggggacgcgctggactttaacaagttctgcgccgtcgacgtccgcccggggctcacggagatcgtctgggcgtggcagggcgacagccccgccgccgccgtcggcaccgcgtgaacaagcgtccccgtctgtcacgtggaagttgtagcaactttgcgtaggagttaaacacggctgcactggcaccagctttttatagcatgtaaagtttcaagttctcgtcgttgcttcgagactgccatggtggctagttcgttgtgtgccatatgctgtacaggaaggaaagagtcgaatcgagccggggagttttcgatcgacttgccaagttttgtacgatcataacctgtattttctggagatgtgtgcatacaaaattttgcccgtgatcaaatttagttttggtccccatatattttttcccatcaggatgattctacc

SEQ ID NO: 35765 - DNA, 174 bp, Zea Mays
ttggttgatggtgtgacttggccttcatccctgccaccgggatagatggtcgagagggttactgcttccgcgggagaggaccaggaggagtagcatggccaggcttcgccatgttactcgattttctccgttagttattctgctgcattaaaatttatgattattatttctgaa

SEQ ID NO: 35766 - DNA, 2969 bp, Zea Mays
ccagctcctagaaacccctctcctgcccggcctcctccctctctcatccgatgggcaagtcaagcaagaaggcggccgccgtggctgcagcgccagcggcggtgcccaaggggaagaagcgggaggcggaggacgagatcgagatggccgtgagcgcgaagaagcagaaggcggcgccaccggcgaaggccgtgccgacgtccaagaaggacgccaaggaggacgccaagtccaagaagcagccgccccccaagaaggctgagaacagcagcagtgactctgaagaggaccccgagtccgaagaggagaatttttataatttgattgagtcggggagggcagacggagatgaggagtttgacgaggacgaggaggacgggttcgagttcggtgacgctgacgaggcgatgcaatgcgtggtgatggcggaaagcagcaccaccgccgcggcgctgcgtgctcacacgcaggactacgaggcgctagctgcgcacaagcgcaaggcccttgccgaggagcaaccccagagggaggagggtcccaaaaggccaagaccggaccaactttcagaagcagaagcagcaaccatgttcgaccaactgatggaaggctttggtcttaggcgtaaaagaaggtcaaaagatggcaagagaaggggaagaaagaaaggaacaaagaataagggcagtgctgaagttattaaaaagttgggtgatgctactctacttttcgctgaagaaaaatttaacgaggcaatacctatactacatgagattgtgcgaattgcaccaaatttgtcagattcatattatctacttggtagcatttatagtgagattggtgaactagataaagccataaacttcttgatgctagctgcatatgtttccccaaaggatgcatctctgtggaagaaacttattcccttggcaaatgaagcactaaagcagatcaagagggcacaactacatttgggatctcaacagaaactaccagtacaattgcaggcaaaagaagtaatctgccatgcatattgcggtgacatgaaacatgctgagattttccttcgtgatgtgcgtttggagccatcaaaagaaaacattgatgtgctcaaggaactcgcaagcaatttagaaaaaatgggacgatatgagtatgcagtaaagttttacctgctaattgaaaatgttgctactcaaaatgatggtggtttatgctttgatcacaaagaaatgggtagttggtatgtcaaagctgctcagtgctacatgatcttaggggacaaaaaaaatgctattccttatttttataaagcgttacaaagcatgaaggacaatattggtatacgattgaccttatcctcccttcttattgatgacgacaagacagatgaagctgccactttgctttctcctcccaaaattccagagttgcagtctgctaatactccagaccaacagaaaccttggtggtgtgatgggaaagttaagatggcgcttgcaaaactttattacaataaaggaaatttggaagattttgtggacacaatttttcatcctattctagaaactttgaatgttgaatatgctaatcgaaaggtcaagtcaatgagaaagcttccaaacattgttctgcatgaaagagtcaaagtattgggtgagcaacggccagatagtgtatttcaaggattaaggccaatagcatcacctgatgaattacaaaaggcaaacagagcaaagaaattaattgagaaaaggaccgctgcaaatgaagagttaaaacatgattatctgccaagaacaaagcaagttcctcctgttcctggtctactgacaaatgtggagcatcatcagcttgtgttaaatctttgtcgaacattagctttgctgcagcgatattgggatgcactgcagattatcaaccgaaccctcaaacttggaaatgacgcactcactggtgacaaaaaagaggaactcagatccttgggtgctcaaatagcttatagagctccagatcccagtcatggctttaagtatgtccgttacgttgttcagcagcacccatattctcttgccgcatggaattcctactataaggtggtatcaagaatagaggacaggtttccacatcatttcaaatatctccttcggacaagagaagcgaatcctgactgtgtgcctccaataatcatatccgggcatcgatttactgctataagtcagcatcagtcagctgcccgggattaccttgaagcttataagctggacccagaaaaccctcttattaatctatgtgtaggcactgccttgattagtttggcccttggcttcaggcttcagaataagaaccagtgcatcgtccaagcttttgctttcctgtacagataccttcgcctttgtgataacagtcaggaagcctcgtacaacattgctcgagcgtatcaccacattggcctgaataccttggcagctgtttactacgacaaggctttgtcaaccgaggagaaggatcatcccatccccaagcttccgtacgaggctggttcacgtgcgccagaggatctgaggccagggtattgtgatgtgcgaagagaggcagcgttcaatctgcatctaatctatatgaagagtggagctaccgatcttgcgagacggatcctaaaaacttactgcactgtctaaaagctggtatcgggcaatgttgttgggatcggatatcagatccttcaaggctccttgcattagcttaggatcaagctagtctataaagctagaacattggtgtaatatgtcactagtgactttagatgtgtagctgaagagttaacaacgtgcttgatccagatttaaacgtatattctggtttcacaatgctgtgttatagtcaaatggttcagcgatgctttgcttcatgtgatttattggcaattcattattatttttctctcaaacgcacaggagaacgcatag

SEQ ID NO: 35767 - DNA, 5104 bp, Zea Mays
atcagtgcatggggtagcttgctcatcgctcgtctgcctcgggatagctttctgtcagcatactgtcatgtggggtctttgacagatggcaattaggcatattcagctaaaaaaaggagacatgttgaagctgtggaggatcatcaaagaatcaatttacaaactaaagactacatttctctattactctcatctgcttcctctccttccctctcatgttaccggttcttctatctctaatacattctgatgtaccctgatttgccagaataatatacagagtgttcctctagctattggtttggaggtcgtgtattacgagtagctaacatttggtatcagattaggtcatcctggatctgttctctgctgtgcggtggcgcccccgatcgtgatcgtccgtgatggatcatacagatgttgtcgtccgcaagctgctcgatgcaatggcactgatggagaagcgcttgacagctgcgttggctggcagtcatggtgagcaaactgctcgcggatgcactgccttcttcgacgacggtcgcatcgatgaactcgatgtgtgggacgaggacgccacgagcgtcgacgcagatgactctgtctccgcctccatggtagatcgggaactgcgcttcgacgagttcaccttcaacgacaaatctgcgcagtatcacctctcgtccacccacgaggccctcttctccgacggcgccaaccccttcttcgacgaggcgtgctatgcactcacagtgttcgatcaaatgcccagcccatgcttcgatggagagcctattttcgacgaggtgcccaacgactccatcaccgagtacgaattgtcgttcatggaggttccccacttcgcgttacgctgcgagaagattcagcagcacgtcgacgttgctgctctccggggcgaggagcacctagtctccctcgagacaatgaagtcgaaggtcgaggcggggaacaccatggcggcgatggccgcggccgcctcgccactcccgtccctactcgctgtggggaatctgacgccgtcctccatcgcgcaaccgcatccgcaagctggggcggtggggtcgtccgagtcggagcttgcggcgccttcctccgtccacgacgactctgtcgcgctgatcgccgtctccggcagatgcgactacgcacgcgccaacgagatgaccagcgcccagatcgacgccatggcacaggacgagacagacgagattgccaacaccgtggagcagctgacgggcctgggcgtggagaaggtggtggcaactgcgctacccccgattggctgcacgccatggctatcgaggtccaacaactacggctcctgcagcaccctcgacaccctgtttcaggtggttgccgtgtacaaatttagggacccaaagacctccgaccaggagatgctcgagagcatctgcggcgtgctcatgcccttgaagctccaagctaaggtatccaggcccatggacatcatcatcaattcactctacaacaacaaggatatcttcgtgtgggagtccatatctaatgtttctgatgcgttggagaggattaggatcctttcccttactgataaggaggttctggttgaaggggacactgagaaacttgagattcagttggacaaagagaagaagatgctctccatgcaggataagagtattggtatgaccataattgctaatggcgttcaagtcagacctctgccatggccatctttctactattatgcagcttgggtgaggtggatgaaatcactggtcatggcgctctgctgggacttgtttggcgccggaacagagaccacattggtcacaactgaatgggccccgtcgcttctgctgaaccacccggaggccctgaagaaggcacaggcagagctcgacgcgttggtgggcagctcacatctgatcaccaccgatgacatgtgctacctcggctacctgcactgcatcatcaacgagaccctgcacatgtactcggccgccatgctgctcctgccgcacgagtcgatggtggactgcaaggtcgacggctacgacggtaccctctccaaggacgatggcctggtcgatggactcagaaaatgtgagcaatggaagtggcaggacatatttgcatcgaaagaaacaaaaacaagttcatggttccacgaattcattgggcgagcaaagaaaccagaaatgggatgccctccatttggctgtggttgtggttgggatgtcgtgccgtacaagcaaccatggccaccacccatgcaatttatgctacttggtgatggtgttcaagttagacctatggcgtggccatctttttactgttatgcaaccttggtgcgatggattaaatcactggtcgtggccaacattctgacaaagcatccttggttggcaattgatcgaggcagcctgttcaaagtggattgcagctacagtaccacaggtgcttcgttacagtatgcattgcaacttttcttgttgctaggaatattcagagccaatgcttggaattgcacatgtccacttgttaccacattaaaggaccataatgcctctgcaatgcctttgacgctgttgatatgacgttgtcgcgaagtccaagttactgctactcaggggttcggatcaagggttcccattctatctccaagctcatggaacgttcgacattcttgctacaaatctctgcacacttgaagaagttgatccaccaatcttgtctatactatgagcggcttgggggcaagccgcatttgaagcggtgggaaatgtcagcatactgtcatgtggggtctttgacagatggcaattaggcatattcagctataaaaaggagacatgttgaagctgtggaggatcatcaaagaatcaatttacaaactaaagactacatttctctattactctcatctgcttcctctccttccctctcatgttaccggttcttctatctctaatacattctgatgtaccctgatttgccagaataatatacagagtgttcctctagctattggtttggaggtcgtgtattacgagtagctaacactttctccgatcccctcctctccagttaatccctctgtccattgctatcacagatcgtgcactgctgtagctatacattccacaccatgaaacggagcgcagccaacacgatcgtacaactggtgaggcatattcttcgtttcccgccgtccaatccaatcttgcctaaactttcttcctcgtggagtttttgctgcttcacgctggccaaatctgcgcgcaaagccggcggcggtgctcggtcgcgtcgggccgtcggggtcgaggcggccgcggcgaaggtgctgccgcggctgcggatcctcgccgtcctcgccgtggtagcgtggaccttcttcctctactacgtgcatttcaccgtgatcagcagcagcacggtggaggtgggcaacggggacgaagacggcggtgcggccgacccgtgccgggggcggtacgtctacatgcacgacctgccgccccgtttcaacgccgacatcgtccgcgactgccgcaagaccgaggaccactggggcgacatgtgcggcttcgtgagcaacgccggcctcgggcgccccctcgccgccgacgacgacggcgtcatcacgggcgaggccgggtggtacggcacgcaccagttcgcgctggacgccatcttccacaaccggatgaagcagtacgagtgcctgaccaaccactccgccgtggcgtccgccgtgttcgtgccgttctacgcgggcttcgacttcgcccgctaccactggggctacgacaacgccacccgggacgcggcgtcggcggacctgatggagtggctcatggcgcggccccagtggcggcgcaagtggggccacgaccacttcctcgtcgccgggaggacggggtgggacttccggaggagcagcaacgtgaacccggactggggcaccgacctgctcgacatgccggccggccggaacatgacggtgctggtgctggagtccacgctcaagtacaccagcgacttctccgtgccgtacccgacctacttccaccccaggtcggacgccgacgtgctccggtggcaggaccgggtgcgcgggcggcgccggacgtggctcatggcgttcgtgggcgcgccgcggccggacgtcccgatgagcatccggatccgggaccacgtcatcgcgcagtgcagggcgtcgagcgcctgcgccatgctggggtgcgcccgcaccctcggcagcacgcagtgccacacccccgccagcatcatgcggctgttccagaagtccgtcttctgcctgcagccgccgggcgactcgtgcacgcgccgctcggtgttcgactccatggtggcgggctgcatcccggtgttcttccacacggggtcggcgtacgagcagtacccgtggcatctcccccgggacgacggccacctcaggtactcggtcttcatcccggacgccgacgtgaggcggcgcaacgtgagcgtcgaggccgtgctccgggcgatccctccgcccacggtggagcggatgcgccaggaggtgatcaggctcatcccgactttgttgtacgccgaccccaggtccaagctggagactctgaaggacgcggtcgacgtcgctattgacgggatactcgacacgatggcggggaccaaggatactccgagccttttcgccgccattttctcaaggaactgtttcgttgcgccccccgtgcagcccacacgcagctcgaaggggccattgtgggcgcggatcaggaacgatgaggacgacgacagcggcgggcgggtcaccgaggaccctccggaccttttcgcctccacggagtccagattcagattccggccggtgcaagccgatcatccatagttctgtcagatcacgaaagggaaactgcgatggcgcaactctcgcatgtataattcaaacatgtgattcatacagtatttgttccacgagatttatatgtgtctagtctagggttccggacgggactgtacagtttggtctgctgtacacattctgttctttagctgatcattataatactatgtcattcgtcaacagatt

SEQ ID NO: 35768 - DNA, 988 bp, Zea Mays
attctgcgcacctcctcccagtgatcccgttcctattctgctgttactttgtctccgcaggccccacattctccgtctcgccacggtcgcggtcgtggtctcgctccggcaaacccaatggccgccgccgtccccaacggccacaccgccgccgccggagacgacgacgcaccacccgccgcttcgtcgtcgttggtgttcctgggcacggggtgctcgagcgcggtcccgaacgcgcggtgcctgatccagccccccgacccaccctgccccgtctgctcccagtccctttccgtcccgcccgagttaaaccctaactacaggtgcaacacttctcttttgattgactattgccaagatgaacgtgcacataagtatattataatagatgttgggaagacattcagagaacaagttctgagatggtttgttcgccacaaaatcccttgcgttgattctattcttctgactcatgagcatgcagatgcgatcttgggccttgatgatgttcgggtcgtacagccatttagtcccacaaatgatattgatccaaccccaatttatctctctcaattcgctatggacagcatctgccaaaagttcccctatttggtcaaaaagaaattaaaggaaggggaggaggttagacgagttgctcaacttgaatggaagataattgagagtgatattcagaaaccattcacaacttcagggctagagtttgttcccttgccggtgatccatggtgaagactacatttgtttgggtttccttttcggaaggaaatcaaaagttgcttacatatcagatgtttcacggtttcccccaagcacagaatatgcaatttcaaaatctggaggagggcaacttgatttgctcatcttggattgcctatacagggggctaaggaggactcaaagcacgagtaaagatctaccctataggggggtggaccctcgtgctacacgggggggcaggcagctttctt

SEQ ID NO: 35769 - DNA, 3119 bp, Zea Mays
cctcactcttttgacaagtcaccatggccgcggtgcgcgatcagggtttgcagtgcgctggtccgtagcctagccgccacactcttgcgcgcttggcaagctaggcttcacgctgccgttgcgacggccgacggcgccgcttcccagagacgatggagcgaggacggggtggtagtggcggtcgcggtggcggccgcacgtttcagaggaacaatgcgggggaggagtggcccaacctcgtcggcgtggtgctgtcgtggagcctagcggatgtcatgaacaaggacctcttcaaggacaaggtcaagcagataccgtccacgttccccaacctcaagagctacctggagtgctacacctctccattgctggaggagctgagagctgagatgtcgtccagcctggaatccctgtcaaccgtgccttctgtcaggatctcacggatagaagaaaagagagacaaacacgaaatttatctggcttctgattgccaggttgctaagccacacaatcgccctgaatgctacactccaagtgtcggtgatgtaattctcttgtccgatgtgaagccgggccacatttctgatactactcgcaacggaaggccgtaccgagttgcctttgtcacagatgcggatggaggggatgaatacgacgactcaccaccggctaagtatggcatcgtagcgtcaggcaaaatcgatgccgccgatgacgaacgccaagatggtaaaagtacctcactttttgctgcttgtctgctcaacattgtgacatacatccggatatggcgttgccttgattatgaagcactcagaacaaaccgaggccttatagagaagatggtaaactatcagccgatttcatctacttcagagaacagcacggaggatgctggtccaactgacagcgtggagatatggaccaagttgtctgcaatggaacttaacacttctcagaacgatgctgtcttgaactgcatttccaaaatgcactccaagagcagcacatttacccttatctggggtcctcctggcacagggaagacaaaaacaatcagtgtgctgctttggttaatgagagaaatgaagcatggtacgctcgtatgcgcaccaacaaaccttgccatcaaacaggttgcttcacgtttcttgaagctggtccaagagcactctggcgacacaaggtgcttgggagatgtcctattgattggcaacaaagagcgcatgtgtgttgatggtgacctcaaacaaatatatttatatgaccgtgtaaggaggctttttggctgctttgcaccattgaccggatggaaacatcacctatcttccctgtctgattttcttgagaatggctactcacagtacctccaacatctacaagacagtcaggaaggtgatacgccttcctttttctcttacgccagaaaaagatttgccgttatttatatggagctcagaagatgtttcaatgatttgttgttacatgtcccaaaatccagtattctggaagtgaattacaacagtatccttttacttcttgaaatgcttgaagagttcaaccacatgattcagtgcaggtattttggggatgaaattaggaaagttttcttgtacagtaatgatgaacctgatcagacaaactcgagtgtagtcactcttggcaaaatgaggataaaatgccttgaggaactgagcactctgttaagttgcttgaagcttcctctaacatcctcaaagcctaccattcgtgatttctgcattaaaagcgcttccatagttttctgtactgtatctagctccacaaaaataaccgctaacaaaaaggtagagtttcttgtggttgatgaggctgcccagctgaaagaatgtgaaacactgatccctttgcgtctgtggaccttaaagcatgctgttctaattggtgatgagtgccaattaccagcaacagtcaaaagcaaggtttgcactgatgcattatttggaagaagcctctttgaaaggttgagttcacttggacacgaaaagcatctacttaatatgcaatacagaatgcatccttccattagtattttcccgaacactagcttttatgaagggaggatctcagatgccactaatgtcatggaaaaagaacaccgaaggatgtatcttccaggttctatgtttggtccttactcatttataaatattgaagatggaagggaggaacgtgatgaacttggccatagcaaaagaaactttgtagaagctgctgtcattgaagaaatattataccgtctccgaagagcttgctttaaaaccaaaaggaaagtcacggttggtgtcatatgcccatacaatgctcaagttgtagcaatccaagggaaaatagagaaaatgaggttcgacccattgcaagtaaaaactaattctgtcgatggctttcaaggtggtgaagaagacatcatcattttatcaactgtgaggtcaaactcggttgggaaggtaggttttctttcaaacgcacagcgggcaaatgtgtgtttgacacgggcaagacattgcctttggatcctaggaaatgcaacaactctagcaagcagtggatctatttggtctgatctagttcgtgatgcaaaggataggcggtgtttcttcaatgccagtagcgactatgttatctctcacgtgattgctaagcaaaggagagatctcgacagagttaatgttgaaaagagcatccatatctcaagttccaaaaactgcagggtttggcgtccaagcaataaaaatgaggatgtcgaggatataactgtcattccaaataaagagaatgataaggatatcaatgctatgcccgttattccagataaagggaatgtcgttgatggcaaccatatcctcgccattccttgcgccatgttgagtaatctagctagatggtgtatccgttcgttccgatcttaattgttcctttatgtctcctatccctttttactcctaagtttacagcattatatataagtgtctctccataacatggtcggatgtttgatttttgtaatgtgggtttgaataatgaaaatgtatgtttgggcctttttagcctcccttgactgttgagagaaaaaaaagcta

SEQ ID NO: 35770 - DNA, 581 bp, Zea Mays
tgacagaactgttctctttattgcagagttacttgcttatatacaagtggatacagagtctcccaagaggtgtgtcccttgggagaaaagcatcaggggagggggttgatcacatattatacatattttgtaacactctggcaggagaggatttccatcgcaatcatggtcgcacaagaccaaaacgccagaacggagagaaagcgaagccgctggtgggggtacgcgaattctggtggggcctccccaccccccaattccctccgtcctcctgcctcctctctcctgcaatagttgtgttgtggttgtggacctcgaatcaatgagaagcgccatgaatgtggtgatggcgctgtcgtcggagagcccatccgtccctggcccgtcctcgcctcgccatggtctcgcgagcagcgcagaggaaggaaagaagaagtgcccactaggcctctacagtaccacggtggctccgtggtcttggcctggcgcgctccggacgcggccaccgccacctgtatgggggcattcatttcgcggcccccgacggtggctgtactcgcggcgacgccacgacagcgacg

SEQ ID NO: 35771 - DNA, 773 bp, Zea Mays
ccccagccgccgtccctgccctatcctccctcaggccaccgccgctctcccctggtagccgtcgcctctccctgctctgctcctctctctcccaagcggctctccctctctctcctcgcttctctcccctcctcttctccagccgctgctaggcaaccggccgccgagcagcgcagccacgctgttgctctcgccaggacgccaggaaccgctgccatggctgcagcaaatctgagcacagttggcttctttgcagtttgcaggctaaagtgtgttcctacttcctcctgtatacacagtttattcctgcattttttggggtgattaattcctttttcaaggaacgtggatgcgggcgataaattgaagctgtgggtactctgttttctgaaaggttgaggtctggtttgccaggagtttttaatgtatctgacttcccaatatccagcaagttagtcatatgatgctgcgacttcatcatgacaaatgatagctattcaaggagctagaggctgctcaacataaagcatcaacagcaacctctggaacagctgaaaatgctctactggaagctaagtcagtgactgatcttaaatctaaagatttggaggagaagaaaagggagctttgttcactgatacaagaagttggagtgcttttgtgaaggcttttgtgaatcacttgaagcgttagtacttttgtgaatgattttgtaaagtgtttgcaaatatgtgcaaaacataataacatgtgtaggttttgtgaatgatttt

SEQ ID NO: 35772 - DNA, 3199 bp, Zea Mays
ggatcatcagcgcacgcctctctgccgagcactcggcgcataacagcaccaccgcgccgcgccgccgccaccccctttcccgttcgttcccaggacgagtcgcagcagccggccagccgcacagagtggtggagcctaggaacagaggaggcgccgagccatctccgcagcctgctaccggggaacgggcgggaacggactctaacttagagagagcgcgggcgagagaggtcaaccgcagccggaggcgatggaggtggtggcgctggtgagcggcggaaaggacagctgcttcgccatgatgcgatgcatggactacggccacaaggttgtcgctttggctaatcttatccccctcgacgacaccgtcgatgagctcgacagctacatgtaccaaactgttgggcaccagattgtggtgagctacgcgaaatgcatgggcttgcctcttttccggaggcgcattcgcggatccacaaggcaagctgttatctctgcagtcactgtggcctatgattcggatgctctgcaagcgatctggttccactgattcaattctgttttgttagggatcagggtctcaggtacagtgtcacggcaggtgatgaggtagaagatatgtttgctctgttgagcgaggttaaacgtcgaatcccatccatcagcgcggtgtcgtcaggtgcaatcgcatccgattaccagaggctccgggttgagagtgtttgctcgaggctgggcctggtctcgctggcgtatctatggaagcaggatcagactttgctcctagaggaaatgataaggaggggcattgtggcaataattgtgaaggttgctgcactggggctgaaaccttcttcccacttaggaattatggaatcaatgtctgtggtgaaggtggagaatatgaaacactaactcttgactgccctctatttcgtaatgcaagaattattcttgatgactctgaagtgatactccactctgctgattccattgcttctgttggaattcttcatccacgggcgtttcatcttgagcagaagccagattcatctgatagaattggggatggttctgccgttcaagagagttctagttgtgtatatgaggttgatgaagttaccactcacgatgatgtgggagaaaaacaggccctgagtccagctgttgatgcttacaccaatgttgacctatgtatctcaaagacagggaacaatttgcgttcaatgagctgttggattcaggatccatccagagcttcggaaggcctgaaggcagaccttatagcagttttgagcagaattgaaaatcagctcaaggaagaagggttaggttgggtgaatgttttgtacgttcacctctacatttcaagcatgaaggaatttggattggccaatgaagtttacgtcagctttattacggaaaagaaatgctacctgggtgttccttcgcgcagtacaattgaattgccactagttcaggctgggttgggcaaagcatatgtggaagtcctagtttcaaatgaggtggtaaagagagttctacatgtgcaaagcatctcctgctgggctcctagctgcattggaccttatagccagctgggccttgaccctcctacgatgaagctctgtcttggaggtccaagagcggaactagaattagcactacaaaacagtgaagctgtggccaatgcctttagctgctcaatctatatctcggcaatacactttctggtgtactgctctgctcagttgacgtccagcgagaaggaagaaattgaacagacattgaagagttcttatattactcgtttggatcgctcaaaaggtggatcatatccaactgttctgtacgtattcgcgtcagaccttccgaaaggggcacgtgtggaggtaaagcctatactgtatgtcccttccactgatgattgggttgctgccgaagagacggagaccggagttccactgccagcaccgagcaaaacctggactgattgtaccgcaccatactctgcgttgcgcgattcgtgttgccaggtccacacaaccggcgggagaatttgttccgccgtggtgtcgatcacagatgacatcgcatcgaagatctgctctgcagctggacagctgcaccacggagaggagaatctgaaaataatggctagattctgtgctttccagatcgcgaagaccctggcagacaacagattttcctgggacagcgtaacgatgttgaggctctactactcggtagatctcgccgtggcggcagatgcagtgtccggagcattttccgaggccttggccgagcttgcccaagacaacccttccatgagaactgacgttcctttctacaacgttgtgcccgtagccggagctggccgctctgcgtgtgccaacgacataatggcgtgcgagttactggcatccaacgtctccagtgcgaagtccataccagccgaaccgttcgctgtgacgcctgcttgaatgcagctttccttcggaaattggaggtgggcgcacgttggaatttctgccagaggagccggtggccagtcaactgccagttggacgacgacggttgaccagcttctctagggctggcggcggtagcttcgtttctgtgctggcggtcgattaaaaaaaaagaccgtacggtgatcatcacagatgcacccatactgtattattctgtttcagcgtcctatacaaagtatacattgggtctgaattctgattagcctgtgctgatgcttgcaatgacattggttcttctgtgtacagactacggacagagtcccggtcagtaacgtgtgtgtacttgttcttcctctgtgttgacattcttgctcgatggtggaacctgtcgcagttggcggaggtgaagccgcgtagctcacttaggtctgccaaacacttcacttcttagattgtttctgtggaaatcgcttctgatgaatgcaaaatcaattaagtcgtccggttttgatgggaggaatcctacgcttcttaaactctaaattgcacatatttctttatttttctccgcatacaaatttgatgttgaatgcaaaatttatcaagtcgtcgtgtcttgatgagaggaacccgacgtttcttaaatcctaaattgcacagatttctttatctttttccacatgcaacattgttgacatctagattctcgttacagctagatcttt

SEQ ID NO: 35773 - DNA, 5380 bp, Zea Mays
gctgaacaacggagagaaaaagtgaggcggaagacgagggacatacttcaagcgcccgcggcccgcagcctgctcgcccaggtcttcgccggcgacgagcacccaccaggtccgctcagtccatctctccagaaatccccagatgttccacagcaagtcgctccctaggcccaaggacacatcggtggtggtggtcgtccttgagacgacagaagtgtacattgtgatcagcttgtcgacgaggagagacacccaggtcgtatacgtcgatccgaccaccggcgccctgcgctacctggggaagcatggggaggacgtctttgattcggaggcggcggcgctgaaccacatcaccaacggatcaagggttctatccaagagcactacatatgccaaggcagtgctgggatacgcggtgttaggaagccatgctctgctcttggtcgcgacacagttgagcgcgtcggtccccaatctgccgggaggcgggtgcatatacacattggcagagagccagtggataaagatccagctgcagaatcctcagccccaggggactggagaacagaagaacatacgtgagctggccaatctagacattgatggcaagttcttcttttgcgagacaagggatgttaccaggcccttcccgagtcctattacactacgggaaccagatgaggaatttgtttggaacgagtggctgtcaaagccctttaaggacattggtttgccaggacactgtgtcattcttctgcaggggttcgctgagtgccggaactttggaggtgctgggcagcaaggtgggttagtcgcccttattgcacgccgaagtcggttgcatcctggaactcgctatttggcccgtggactgaacgcatgttcaggcacaggcaatgaggtagagtgcgagcaactcgtttgggttccacggaagggcggacagcgcatcccttttagctcgtatatctggcgccgtggaactattccaatatggtggggcgcagaaataaaaaacgcggtgtcagtggaggctgaaatttacgttgccaacgatccttacaacggaagcttacagtactaccaacggttgggtaaaagatatgggaataaatcatctgaagcgaacgtgtccaggcaaaaaagttctggaagggttcccattatttgtgttaacttgctaagatacggcgaaggaaaaacagagtcagttcttgttgatcatttcaaagaatctatacggtacatgaactctactggaaagctgggaagcacgtggattcagttaataaattatgactggcatgccactgtgaagttaaaagggcagcagcagacagttgagggcctatggaggcatcttaaaccacctacaatggtcattggcttcagtgaagggaattactatgatgcaagacagcagcttaatgaatgtaaaggatcagttatctgcaatgacgatgtaaatggtgggttttgcatggaatctattcaaaatggggtgatacgattcaactgtgcagactctcttgatcgaaccaatgctgctagttactttggtgcacttcaagtttttgttgaacagtgtagtcgattgagcatctcgcttgacatagatgcaatgtttgggttgtcaagtagatattctgaatatgatggtagaaacactcgttctttgccccctggatgggaggagcgctttgactctgtaacagggaaatcattttatattgatcataatacacgtactaccacatgggaacatccatgccaggaggctccacagaagccctggaagagatttgatatgacatttgatcagttcaaaggctcaacaatgcttgctccagtgaaccagcttgctgaactttttcttttggcaggcgatatccatgctacgttgtacactggctcaaaagctatgcacagtgatattctgaacatattcaaggaggaaacaggaaagtttagtaaattctcagctgttgagaatgtgaaaattacggtgctaagaaggtaccaaaattttatgaatgatagttcccgtcaaaagcagttagagatgtttcttggtttgaggctatataggcatctcccgtccatccctatgttccctctcaaagtgctatcaaggccatctggatgcatgttaaaaccagttcctagtatcatcccaatggctgatggtggttccagtcttctgagcttcaaaaggaaggatcttatttgggtgtgtcagcaaggtgcagactatgttgaactttttatataccttggggaaccttgtcacgtttgtcaactgcttcttactgtctcccacggtgctgaagattcttcatatccagcaaccgtagatgttagagttggctcaagcatcgactccctcaaactcgtggttgagggaaaagtgcgaggcccaatgttcaagagagctcctatcttcctttgttatatgactttgaagagctagaaggagaattaaactttttgaatcgggttgttgcattatcttttcatccatctgctgtatcaagaacacccattactcttggcgagattgaagtacttggagtttcccttccatgggcagacatgttaaccaatagtgaacgtgctcctgaatttatggagtttatcaataaaaaatcatcaagtgctcactgtaatctaggttccaagtcttttggaaattcttccatgcctgggaatgattctcatggtattgatgagtcttatactaaaagttcatcattagttcaaccgtgtggttcggaaaatttgttggattttctcacaggtgattttgacatgtcggagtcccatataactcaaaatacttttggtgctggagaacaaacaaacttcttagatgatggatttgatgttaatcctttcgcccctgcattggaagtgcctgttcctgttgctaaagtaaacaaggaggttgaagaatgtggcagcacccagctttatattaaattttttgaatccctttctggctataataagggaaagggtcttgactttgagcaaacgatgaagcttgaaataaaacgtctccgtcttggtctttcagccgctgaaagggaccaggcgttgttatcaattggtgtaattcctgccacattagatccaaaccgtttaattgattattcttacctattgaagttatccagcttagctgataatctagcactgctgggccatacagtccttgaggatcgcgctaatgcttcaatagggcttgaaaagggcagtgaacatgctatagacttttggaacatcagtgaaaatgatgaattctgctatggtggggcatgtgaagtccgtgctctgtcttcattacaagctttagcatctagagaaaatcaatcggtattcatggaatgtttccagtgtgaaaagacagtttgcaaagcttgctgtgctgggaaaggggccttccttttgcttaacacctacagggagttgaagatatatggtgggagtcaaagtggtggctactcagcactcacagatagttttgtgtgcaaatcgtgctgcagtgaaattatcaaacgtgcattgtatgtggattatgtccgggttcttcatagtttgcgcagaaaagatcgttcagagaaagcagcactgagtgctgtgaatcaggtctgccaactggagtacaagaaagcatctgatttatctcaaagtattcaatttggtcagagacaattgaagcagatccttgatggtgaagaatcccttgcagaatttccatatgcaaactttttacaaatggttgaaactgccaatgactctgaaccactgctttcattactggcgccttttggtactggagagtatacgtcttactggaaagctccacaaggtatcacttcagtggaattctcaattgttcttggtggtttatcagatattgcaggagtttccataattgtcagttcttgcggttactcagcatctgactgcccaattgtagagatatgggcgagtaataaaatacaccgagaagatcgtacatttataggaaagtgggatgtacaggatataatatcttcatctccacagcttcgtggacctgaaaaatctagtagattgagtgaagaaccaagacacattaaatttcacttcccaaatcctatccgttgtcgtataatttcaataaaaatgacactttcccatagaggttctcattcaaccaagtttagtgaggagtttgatcttctatcattgaatgatagctcatcttatgaatcgaagccaaccaatttacataattcatttatccatgcaaaaagaattgtagtttttggcagtttgttgagaaaggagatggagcctgacacatcaggggggataatgagaatgaaaagttatttagacagatcaccggccttggggagatttaggatcccagttgaagctgagaggctgagagataatgatcttgttcttgagcaatatctcttagctaattcacctggaatagctggattccggcttgattctttcagtgttataagacctcgtgtgacccattcaccttcttcatcagagttggacatgagggagttttcattgacacgaatggaagatagatttataaacccagcaattctgtatatacaggtcacagttgttaaggagtccggcaagttggttgtagaggaataccgtttaccagaagtaaaagcaaacacgccactatattttgatttcccagatctacaacaggatgcgcgctgtgttatctttagattgcttggtgacgtcactgcctttgtcgacgacatttctgagcttgagaacttaaacttgcggaatcttcctttggcgtcgggactgtctttgtcaaataagatcaagttgtactactatgctgatacatatgagatgggaaagatcggcagtctctcagctgtataatgtatgtgaggtcgtcgtacatgccaacctgggatggtaacccgtccctagaagattgttgtaacctactgtttctacgtgttgttgtggaagtaagagctgctgctacagatacatgatgctttttttttactgcttctgtattcttgcttctttttgcttttgattagatgaccccagtttgagggatgtagggattttgcctgtagaatttctggaaattcatctctttttttaatgtagaatagccggaaattcaattcgatcgcagtccacgaaactgccagctacgtttgtcgatacctgtattgggacctggattattgtatagagccaagaacttgcattgatattttttgtttgtttgtttgtttcataccatattttaagcgctggctgcaccagatgttcgttcgtatggtatggtacgtggccatgctgcggctgtaag

SEQ ID NO: 35774 - DNA, 862 bp, Zea Mays
gtcacttgagctagcatatatttcaaaactataaataatttataaccgttcaaagtttctttctttgaatcaatgtagtaatcactctgatcatgtacgaagtaaaatttttgtaacttgtaaaatttggtaataagatttccgctgcaaaatattggtgtgtgtgatttgtattacttaatcccgcggttctggtttgtaagtggtttatccgatgtccttgggcaatcggactgatcctgttaagttatctggtgcacatgcatagctgtctgaggtctttgagacaaggacaggtgcatgtgggcccaataacttgggaggttctgccacagatttggatcatcaccgtcacgagctgcaagtgtcccaggatgaggtcctttgtcttaggcagttggtgtcgagcaaagacttcgtcatcaaggatctgcgtgcctccaaaagatcggtcgtccaggagctagaagctgctcgactgtctaccaaggttgccggagacaattccaccattctgaaggctcagcacgacaaggctatggataaagccattcgcgcggggcagatcttgatgagaagaccgagcgtgattgttcctgatgatatagttgccgatgtcaaagctgctcctgactcctcaagtcgcccttcttcatcggttactcctgagaaaaacattgccaagtagaaatattgaatacattcatgaaccatatgtgtatgtgatcgatgtgcccaaatactctgttagagagtgttcttggtgctgaatgctattcttgtttttctgttgtttgaattcaacagttgttacgattgcagaagtaaaagcagtgtgctggtttcgaaacttcttcctatt

SEQ ID NO: 35775 - DNA, 2647 bp, Zea Mays
cacgcccaacggccgtttcccgcaccccctatccgggaaggaagaaagccagaactcacccctgcttcgtctggcggcgccgtttcccgcacgcgatgccgtcgacggcggaggatttcccggcgataaggaagctggggaagctcttccggcttaccgaagtgtacctctgggacgattcgtatggcgctggacctcacgatggacagaagaacgggcgctcggcggaggctgctctcgtgataaaacatgcaatgaagcatccaatagcactgacaaaggccatttctttgttgaagatttggaattggtcaatctcatgggttctttggggcttcctgtttcattcagcacaagtaaagtgaacaagaacacatgcaacaagggaaagaaaaaaggaagacaagcaccgctcaaagcagcaaacactcaaatcaatgatgctgtgaggatatgtatcaatactgaagatagagaaaattctgttgaatcattggatgctatggagcaaacgcactcatgcaatttatttgtgacaccactgggtcaaaatgaaccctcccgtgatgacactgacaagaggcttagggaagacagctcttgtgttgaagaacaagaagagtctggctgtagcaccatctactctgctggcaaagcccctggctgtgatgctaaaaatcatctcactgaacttggggcttttgagctttctgataacttggccaactcagcaaaagaagaatactcaattcaagaaaatcaagcttatgaaagtgtgttgctagattctgaagagatgtcaaggaatgactgtgttgatgatgaatctacacattcctgtgttggcatttatcaggatgaaagagtgtccacaaggggagatcaaacatctgaagaaactctatcagtaccccatgattacaatgatgttggcagagaagctagtctaagtttggcagagccatcatctattgatgagcatgcacaaagctctgccaacaacttttactatgactatggtgaatggagggttatctgggatccattctataatcggtattatttttacaacatccagacacaagagtccacatggtgtcctcctgaaggactggaggattttgcatcatattgtagcccagataccactaaagagctagctgaactgggatctcagtgttcaagcatggcaccacaagagaacaatctggctactcatgtcaatcatttagaagcacaggagcaagatcactgcattcatgatttatctgacattcctgttgaaaagccaatatatcaaagtatgataactacctctgacaaagcacagcacactgaaaataagtacagcgattcaacaactactgtgttagagatgaaccaggaagttgctagcaccaaaacgaaaaagagagtaaggagatctcgatcgtatcattcatgccaagacatggcagggaacgtctctaatgacatcatcaagtactgggctcagcggtattcacttttctcactttttgatagtggtataaagatggatgaagtagggtggttttcagttacgccagagccaattgcaaagcatcatgcatctcgtgtgggtgcgggagtaatgattgattgtttcacaggagttggtggaaatgccatccaatttgccaaaaagtgcaagcatgtaattgcagttgatattgatccacaaaagattgattgcgcgcatcataatgcatccatttatggagtaaatgatcacatagatttcattgtaggtgattttatacatatagctcctcatctgaagggagaaactgctttcatgtcgcctccttggggtggccctgactatgccaaagttgatgtttatgatatgaaaagcatgcttattccttgtgatgggtactctctttttaaactcggaaccatgatagcttcaagagtagtgatgtttcttcctcgcaacattgacctaaaccaattggcggacatgtccttgtctgtggatcccccgtgggcagttgaggtcgagaagaacttcctcaacggaaagctgaaagccataacagcttactttgaagaacaggatcgttgaaccaagcatcggcgctggtgatacaaatcatcttgttagctatgactcacgacaaatttttgtggtgaccctaaacagaacctttgtgttcggagacagaaagaagcggtttatcatcttcaccgagcatagataatttatttgcagagatgagtcattggtatcatacaaaagcagctcagcttatctcaattcacagcaagtgaaactgtcgaaggaaaactacaaggctgacagtcgaacgcgtgggagttagcttaattttgccttatgataagcaagcatgcttcctggtttatttcatacagctactagtagtttcagctgcaacagttgtgcgttggtgtgcgtgtgattctcacatatctggtcctgcggatgtgagtgatgcaaatgtatgtgtcatcatcccatgtaagggtttgtttgtttgctctcaatctatgtagattgagtgggattaagtgagtttaaatctcagacaagtcaaaaaaaaatgttttcaatctcatccaatccacatatgatagtaatacccgagtaaggcttagatgtaat

SEQ ID NO: 35776 - DNA, 1611 bp, Zea Mays
atgcagcgccatatccgtgcagtctactccatttttgttcccctctccggtggcggcctagcgggggtgtggtcttcctcgcgtcgcctcccctcgctctcatccggtcatcagtttgaggtttcaacctatttcaccagagctgattggactcatggatgggaacaaagatgaggcattgagatctgtcaagcttgcaaaatctgcatttgcatctggggataggcagcgcgcagaaaaattaattaaaattgctcaaagattggaccctggtcttccacttgatgatttgctgagcccagttgagaaggttggcatcctgaatatttctacttgcaaagacaagactgaaagaggacaagctcttttatacccaaaaacaacaaaagaatctgttggtcctttaaatgttgataaggcttacactgaggagaatattagagtggttcaggatatcaggaaaaagaaggattactatgcagttctcggagtagagagaagatgcactgtggaggaaattaggaaggcatacaggaggttatcactgaaggttcatcctgacaagaacaaggttcctggggcagaagatgctttcaagatggtaagcaaggctttcaagtgcctaagcaatgatcagtcgcggaggacttatgatcagacaggcaccactgaggaccatgaattcaatgagcaatatcccaatgtcatgaggcggggagctgctaggcggagaaggccagcaagaagtggcttctataactatgaagaagattttgatccagatgagatattcaggtccttttatggcacccatgataatatgttccatccccagtatacctacagggctaggggaacaggcaggcaacagcaacagagaagggagcattcagtggagggtggttccagcataaatctaacagtgtttattcaccttgtagtagtactgtttattgtttcgcttgcatttattccagcgcgtcaagctgagtattcgctgcaacagacaaattacttccccatttcaaaggtcactcaaaaacaaggagtggagtacttcgtcagcaaacaagattttgatcagcagtttccacagggtagtcagtctagagagaatcttgaacggcatgttctgatggactataagagtatgcttggaagatattgccatgtggaactccaacgtcgtcaatgggccaaggactaccctacacctcgctgtgacaagctaagggagctgtctgtggcgcagaatgtgcatatgccatcagtttgatctcccgttttcatcatggaagaatattgctcatatttgcaggtgaaacgtaggaatcgtttggagcaaaacgaacagattgtgaaccagtaagccagagcataaaaggcttgtttacatgaagagatacatggctggtgaccaaccggttgaagttgcggttcacgttgatgcagatgcagcacgcccgacacctcacacctccgaactccgatgttgctgctgatgcccgcactgtactgtaaacaatctttcaaaggcaaatggaactgtgggatacatgtggcagtgtggcacttcgatgatgtgctctgttaaatatttttttaggaaac

SEQ ID NO: 35777 - DNA, 3498 bp, Zea Mays
cttatccacaggccgcagtggcgctcgcctagatcggcacgaccagcaggcagcaggagcggcggaatcatccgagagggcccgttgcgatctacaaaaagggaatttcccccgatccgcaaacctccacgacatatactccgtttgcctgtgttgggtagagtcgtatagcgtggagaagaggcttggtgccaagaaactggcatttcgatttggggagtggctaaattcgtcgctgtggaatcatggttctgaagtcgcacacaaatctgctagatatgtgttgtgaagatgtgtttgacttccaacaacctttaagatctcctcgtcatgtggtgaactctcctggcatcatatctgaccctgattgggaaagtagtaatgatggcaactcagttggttctatgcctttttgttttaagagaaagattattgttgcaaatttccttcctgtgatctgtgcaaaaaatgaagctaccggagaatggtcctttgccatggatgataatcaactgcttgttcaactcaaagatggttttccaattggtaatgaagttatttatgtgggtagtttgaatgttcaagttgatcctattgagcaagatcgagtttctcagaagctcttcaaggaacacagatgcgtacctacctttctcccagctgaactccagcatcaattctatcacatattctgcaaacagcacttatggccacttttccattatatgcttcctgtttgtcatgacaaagatgagctctttgaccgttccctttttcaagcctacgtgcgggccaacaaaatttttgctgacaaaattgtggaggcagtcaattcggatgatgattgtgtgtgggttcatgattatcacctcatgcttatcccaacccttttaagaaagaaactgcaccggatcaaagttggtttcttcctccacagcccatttccctcgtctgagatctataggacactgccagtgcgggatgaaattctaaaatcacttcttaatgctgacctcattggctttcaaacttttgactatgcccgccacttcctttcatgttgcagcaggcttttaggccttaattatgagtccaaacgtggccacataggtatagagtacttcggccgaacagtgagcctcaagattcttgctgcaggtgtacatgttggccggcttgaggctacattgaggttgcctgctacaattaaaaaggttcaagaaattgagagtagatatagtggcaagttggtaatattaggtgtagatgacatggacatctttaaaggtatcagtctaaaactgcttggcttggagcttcttctggaaagaacacctaagcttcgaggcaaggttgtccttgtacagattgttaatcctgcaagaagcatcggaaaagacattgaggaagcgaaatatgaagctgaatctgtagctcaaaggataaatgataaatatggttctgctaattacaagcctgttgtcctcattgactactcaatacctttctatgaaaagatcgcattttatgctgcatctgactgctgtattgtaaatgctgtgagggatggcatgaatttgataccgtatgagtacaccgtatgcaggcagggaaatgaggagcttgataagctcagaggtcttaataagagctcatctcacacaagcacacttattgtgtctgaatttgtgggttgctctccatcacttagtggagcattcagggtaaatccttggagtatggaagatgtggctgatgcattatacagtgtaacagacctgacacgatatgagaagaatctgcgccatgaaaagcactatcgctatgtcaggtctcatgatgttgcttactgggcacgcagctttgaccaggatctggataaagcatgcatagagcaatacagccaaagatgttggacaactgggtttggtttaaattttagagttattgccctttcacctgggtttagaagactgtctctagaacacctagcctcgtcttataagaaggctaacaggaggatgatattcctggactacgatgggacccttgtgccgcagacatcacacgacaaatctccaagcgctgaacttatctctacccttaacagcttgtgcagtgatatgaagaacacagtatttatagtcagcggacgaggaagagattccctaagcgagtggtttgcttcatgcgagaacctcggtatcgctgccgaacatggttactttatcagatggaacaaagcagctgaatgggagacaagcttctcaggtatttattctgaatggaagctcatcgcggaccctatcatgcatgtatacatggaaacaactgatgggtccttcatagagccaaaagagagcgctttggtatggcactatcagaacacggatcatgactttggctcgtgccaggcaaaggagctagtgagccatcttgagcgagtcctatcgaacgaacctgttgtcgtgaggcgtggccatcagatcgtagaagttaaacctcagggagttagcaaggggatttccgtggacaagatcatccggaccttggtcagcaaaggggaagtaccagaccttttgatgtgcatcggaaacgatcggtcggacgaggacatgttcgagagcatcaacagagccacctccctttccgagcttcctgccgctccagaagtattcgcctgttccgttggccccaaggccagcaaggcaaactactacgtcgatggctgcgacgaagtaatcagactgctgaagggtgtcacagccgtttcgctccaaaaggatactgccggccatagccatgcggcattcgaggatacgcttgaggttgtcagctgatccacacaagtagtcagtcagctcaaactagctacgtccagtgtgttcagcgtgccaatctcaaatctccactgcatgcaagccactcatcactccaaaccatatgtgccaagtggaactctaaattggacggagacaagtatcgccattgctgacacagagacagaacagcggtcacaaactgcaagttcgagcgaatggcgtcgcggttgatgattcactgacgacaacggaaatcacaaaccgcaagttttcaattcgtaggctaagacaactagtgggacgccatacattttgtaggcggctgatctggtggtgaaagggtggatgtccctgctagagccccagcttacggcatctgggagagccttggaagttggaccccgacgcttgtgctgcactgaggactgttacactattttctttgtacagaacaaacaggtgtggttaggcgattagcgctgtgacgattgattgtaattcacccacgtaccattgaggaaattaatggctgcgatggtgaagcgccgtgcgcatggcacattgtatgacgttcactcagtgttcggttcgagtttaaagtaggatgatgcggggtaacactgttgtctcgtttttaccataacaacaacaacaataaagcatttttgttctaagc

SEQ ID NO: 35778 - DNA, 759 bp, Zea Mays
ctcccctcctcccccgccttccctctgcatctccctctacccgccgccacattcatcagtagaaaccacctatcctgcctgctctacctacctccgctccccagccatgacggtgctggacgccgagtcgcggttccatgtcctggcggtggacgacagcatcatcgacaggaagctcatcgagatgctgctcaagagctcgtcttaccaagtgaccacggtggattccgggaacaaggcgctggagctgctggggctgagggacaacggcgcggaggacgcgtcgccgccgtcatcgtcctcatcatcttcgtcgtcgtcctcccctgaccatcaggagatcgacgtgagtctcatcatcactgactactgcatgcccggcatgacaggatacgatctgctcaagcgagtgaaggggtcctcatcgctcaaggacattccggtggtgatcatgtcgtctgagaacgtgcctgcccggatcagcagtatactccgtagaatcagccgaccggtgcctgtcgaggtaccagatggagccgtgctgttgttcttgcctgcctggctgcctgtttcttcccaactggaagggttggggctgttaagggagcagatggaatattaacgccatcatgctagatcaccagttctgcatgaaatgattcagaatggatcgagacaatgtgtgaggaatattgtttagtaatttgttttcttttttctttttacaaaaaagccgcctagggattacgtatttattta

SEQ ID NO: 35779 - DNA, 2358 bp, Zea Mays
acaacccgatcgcccacgcaaacctctcgacagaccacagctcgatcaaaccgcgaatgaaaaaaccacaaaaaatctcccaattctcgcaaccccaagccggccagcccccacgatctcgaatcccgatgctctcagcatctatcaactcccgagcggtcgtcaccagcgcatgagctttctccgctcgctggcgaactccttctcctcgctgctcttctcgtcggggggcgagacggcgcccatggacgcggcggggtcggcgccgtcgccggcggcggtggtgagggagcgcgtggcggtgaagctccggggctacttcgacctcgccaaggaggagatggacaaggccgtgcgcgccgaggagtgggggctccccgacgacgccaccgcgcactaccgcaacgcgatgcgcgtcatgctcgaggcccaggccgcgcgcgtccctgatgccgtctcctccaggtgcgcccgcgttctcttcctcgcgcccgtcgcggctagggcttctggaatgattcgtgactgactagtgggtggtgccctgcggagcttgagaggcttgcagcgagagggggcaggtcagggtgtaccaggagaagatcgccaagtggcaggcgcaggtcgaggagcggctcagagtgcttggtcagagaagtgctgaaggtgccactgctgcagtagtgcctaagaaggttgtcatggtgcaatggtctacttgttaggctatgttgaggtgggggtgaggcgtcctcttgtgctcctggggtacaagttttttcagttttcaaatagttacaagtattttggatttgattcagttctgctattttggatttgatatccagtatttggcagctacttcaatttcaatgtaatgattcttaagttcaactcctattatttggcttcaattacttaagtaaccttgggtaggatatgtaggaattttgcttcgtttttttgcttcttggggtgtcagttctgtggtctgtcatttttgaaacagttttgagccttattgggcaggagttgtcatcactaaattagtctaattaatatgccactttaccttctcagattttggcggccacattttctcatgtttacttttttagtaaagaaaaaggagcatggaaactaatgattgttctttgcattaccacaatatgacctttatttttgtcatctttttatagggtctgattttaaaagagaactctcggttagctgtgtacactgtgagctactaataaacctcaagagttggatgatgctgttcttcgaagactggtgaaaagaatatatgtgccactacctgatccaaactctttttatgtttggcacggtagccaacctggaactgatccctggcagaccatgatttcgaaagattagttgtggagaccgaagggtattctggaagtgacctgagagccgtgtgcgaagaagctgcaatgatgccaataagagagctcgggccacagagtattcttgctattaaagcaaatcagttgcgacctttgaagtacgaggatttcaagaacgcgatggcggtgatcaggccaagcttgcagaagagcaaatgggacgagcttgagaaatggaacgaggaatttggttcgagctgacggcggctcgcactgcctgtgcctgatgatgatcaagcggtcctatttccatctgtatatatgatttatgtctcccacgctgtggctcacaacacaaggggtcacaccatgcgcccattgatgcgtcctcgttgggctaggcagcacaacatcgacagaagcagaatgtaaaggtatacttctggcaacggcctatacagccattgagggctagtttgaaacaccgttcaagggattttcatttttcaaagggaaattagctcattttcccttgtaaaaatgaaatttttttaggaaaatggtgttcccaaactagccctaagtattgctgttgcccaagttaaacaaaaaaacgtgtctattattgggctctgtttgtttaccctctaaattatattatccagcttaaataagttaagagataaataaacaacacaacatagattattaggtggattatataatttagatacctagattacgataattcataagcaggtcattggatgcttatagaaataagttaagacataaataaacaacacacaatacagattattaggtcggaggctcggagctgcttgggccgaagggcgaaatctgtgtcgtcgttgtctagaaagacaaacacaaaaagctaaaggcttatctgctgatatgcgttgtacaacatacatagataatgcctgctaggctgtctgtatacagctgttgtatattttgtttg

SEQ ID NO: 35780 - DNA, 1642 bp, Zea Mays
caaatcaccaggacacaagtcaccaacctacctcctcccctcccaccgcgggctcccgtgcgtctgccacggtgccacccgctcccgcgacatctatagacagagcagccgttctagaaagcatagtaggagagagatgagcgaggaggagaggaaaggagggggcggaggaggggacgacggagcggcggcggccgcgcgagcggcggagcaggcgcgggagctgcaggacgcggcggcggcgctgctgacgcgcacgcgggcggaggaggaggcgctgcgccggcgcgccgccgcgctgcagggggagctaaggcggctacgcgaggccgccgcggcgcacgcggacagcgaaaaggttgaggaggacttggatcgagcaacgtgcctcattaccgaaggagacgttgcgtcgctgctcccgagcaagacgcaaggcacttttctgaggatgttcttgggaccagtaaatctgcgggcaccaaggaaggaggtgcagctcaaggtgaaggaggagtacaatagctacagggacagaactgccttgctgtttcttggttttccagtgattttgttgttccttcgacaatggttatggaatagatgctttccagcattgccagttcagctgtaccaggcttggttgttattcctgtatactagtttagctttgcgtgagaacatactgcgagttaatggaagcgatattcgtccttgtctcacatgggagataaaggggcaacctaattgtgcacgcaagcagagaggcgtggaactttttctgtgctgggccataatgcaaggatttgtcatgatgttgcagaatagatatcagcgtcaaagattatatactaggattgctttggggaaggctaaaaggatggatgttgtatggggagagactgctggtgttgaaggtcaattgttgctgttgtgccctctcctttttctattgcagggatttgagggttatgttgggtttttacttcttcgcacagctcatactggtgtcgtccctgagtggcaggtggtggtctgtgggatcctgctgatttccatggcaattggcaacttcgcaaacacattggatacattgatggccaagtctcggttcaaagcgaagatgaagaaatcaaagggcaaacgggatcttgacacgtgcccctcaccaacaggttcgtcgccgacagattcagcaaccagagcatgaaaaggtcaagagggccagttgcttaccctatgaccattgcccgtgtttaaccagggctggtcaccattgtaaatcattagtgttttctggccatcagcccctaatccttactgtctctgtcagagctcatactcatgtaagcatcaggcaactaggttgctgatggtcctaggctgaaaaaggatactgagaataaacttctggtgtttgtttatacctatatcctgaacatggagtggagtagatgagctttaggactgcaagtcttagcaaaattttcccagtatagttgtgaagctgtgagacatttgtcacaatgcgaagctgtatacaggttgaggcactatattgcttattattctgccctcggtgtatgattgatgaaatggagagtgcagaacagcgctgacactcagttccccatgattgcca

SEQ ID NO: 35781 - DNA, 378 bp, Zea Mays
tcctctcttgctcgtgacttcgtcatcgcgtcgtgtgtgcagctctatatacgtcaccctcccgtatagtcatcgagcctgtcgaacctcgttcttccctactcgatctcgtcgaaccccgaatcccggacgttaggcaaaaataagcgaggtctgtgtgcatcgcttatcaaggactcgatcaaagacttcaatcgaaggtcgtcgtcattccgcgcgtcagcaagaaatcccaagaatcgggtgaagacggagccagcagcgtggtgttcaccaagtgcgcgacaaaaagctcgaacaagtcatcgatcgtcatcctcgtctacgccaagccccaagccgtgaagacactctggtgctggccacgcgtcaccagct

SEQ ID NO: 35782 - DNA, 1625 bp, Zea Mays
cttgcccgcggcgtcaaattcaagggagaggcgcggaggcgacgcgcccagctacctaccggttccatactctgaagtctgaactggcctcagctgttccaccacctcgctgttcttggcccagctgctctgctcttgtcgagggatgatggtccagtgctcctccaacaaggctccacaccgacattgagctactgtgccttagcgctgccggtccggggtcgctctctgtgggccgtggcggctgtccgatgggctgcaccgggtccaggcacgcgctgcgcggcggcgtccggggtggcagccggtcgccgcgcgcgcggagccgctccggcggcgtccaccacaccgtcgcgctcaagtcctccacgctggggtcgctcagcctcgaccgggaccgggacgacgacggcgctctagcaggcgcggcgaagacgctgatgcggcggcagaaacaacaagtgcgaggctcgccggccaaggcgcctgctcgcgagcccgaggtgatcaacgtgtgggagctcatggacggcctcgacgacgacggcaaggacgatgaggaggggggcgacgccgacgccgacgccgaggggcggcgggagaagtcggcgacagggtcacccgccgagttcgacttcgacccggacgtcatcgccgcgttccggaaggcgctggatgagaaccccccgccgccgccgtcggacgtccccggcaacgaggggtgtgtcgacaagaagcctgacggcccgggcggcgaggtgggcgtcaaggtcaagcagcgggagcgcgagatacagaggttccctggcatcgtgcgcgcgcgggtcagcgcgttccagcagaggatcgacgcgaagctgctcgccaagctggcaccgccgccgcccccggatagcgcccggaaggtggtgctgtacctgaccagcctccgtggcgtccgcaagacgtacgaggactgctggtccaccaggtccgtcctccggagctacggcgtgcgcgtcgacgagcgcgacctgtcgatgcactcggggttcaaggacgagctccacgccgcgctgggctccagccccaacgcgggcaggctcccgcaggcgttcgcggacggcaggcacctgggcggcgccgaggaggtccgccggatgcacgaggccggcgagctggcgagggcgctcgaggcctgcgacgtagtagtagcgcccccgccgagctccggcggcaagggcgttgtcctggacgcgtgctccggctgcggcggcgtgcggttcgtgccctgcgaggactgctccggcagctgcaaggtgttcgtcgaggaggtgggcacgttcaggcggtgccccgagtgcaacgagaacgggctggtgcggtgtcctctctgctcctcgtgaacaaatctcagacacttttgaattttgatttgtacgtaagatcgttgaggagtatttgtccttctagctgagggtttgtacaggagttacacgcatgtgtaactttactaggactgatgaagcaacagatgatcgtatttatgctttgttgatgactggatttcaaagtgtacaagcacaagacgtgacaacaatcgaatgagctgatatgcattagaattgcacctcctgttgtttgct

SEQ ID NO: 35783 - DNA, 1028 bp, Zea Mays
gtctccccagtctcgaactgctggcccaagcccaattagccaattcacacaataacactcccggtcccggcctacaggaactgaccaacaccaccgagacctaaacctaatcccctcccagcagctagcatccccactcggccactctcttgctcgcagccgccgcccaccgtaagtcacaccgagtgaccgcgccaccgcggtcagtcgtcgtcgacccaccgtccaggcgtccacgcctacgccggaggcccaccgtccacgccagcgccggaggtcgtccaacagcacatcagagtcggaggtcgcccactcgcttgttgccggttggccgctgacctcgtcgacggccgatctgctgcccagccacgcgctggaggtcgcccgcgccataggtctctcaccagcctgcgccaagcactgatgtgcatgcaagtgtggtcacgtgctgacatgctaggtgataaatcttgctttattaatgcattgatgacttgtttggaagatgaggaggatgaaatggatgatcctaatagtatgataactgactgaaaattggaaagcaagcaacaagtcaacaatctacattcaggtcacctagagctggagtgtattgtggactgttgttgctgctatgcttgaagtatgggtgtatctgtgtatgatgcctgaagcagaaactctctgtgtttgtggggtgtggacagtggagagtggactgctgcagtgctgctgctattgtgcttgttgtgtcttatttcatccaagcgaccaagccaattagccaagcactcaactgctatgtttgtggacaactacctgtaacctgtgtgactgtctttgtgaaatgtgaactcttttatgtattatctgtcttcagtctgtgtttaattgttttattagtggactcgcctgctgtcttcagtctgtgtttaattgtttactaggggagtgtccgtgcgttgcaacggaaacatataatagttaagtgctcgtacgctgtgacttttttaggagttacaaaatca

SEQ ID NO: 35784 - DNA, 1814 bp, Zea Mays
acatccagatccgtccagatccagattcacccgtctggcacttcacttggcatcacccccgccgtcgcgccgcggccggccgggcctgcaccaaggggtccaggtgaataggtgatgcggccgactcacccgcggcgcggcgcggccctcgtgagaactgcaaaaccaccggccgtatacagtaggcctgcctgcctgcctgcctgcctgccagcaaaccctcccgatcggccgcactgaaatgatcagagtgagtcccctcctcctcgcccgcccgctccgtgttcattgccccactccctcacgcctctcgcgcccgccgctccaccaccccaacccccacccacgctcaggggaagggggtctgggttgcgtacaggcgaaaggcacgcgccgccgctgccgcgcgagcctctccgtccccatcgccgcgcagatggatccgtcgtcggagcccctgtacgcgcaggtcgagccgtacgactccgggttcctcaaggtctccgatgtccacaccatctactacgagcagtccgggaacccgcagggccatgcggcggtgtttctccacggcggtcccggagccggcacgtcgcccggcaacaggaggttctttgacccgcagttctacaggatcgttctgtttgaccagaggggtgcaggcagaagcactccccatgcttgtttagagcagaacactacttgggacttggtagctgacattgagaagctcagggagcatcttggcatccctgaatggcaggtgtttggtggttcatggggaagcaccttggcacttgcctacagccaggagcaccctgataaggtcactggccttgttctgagaggaattttcttgcttaggaaaaaggagtttgattggttctatgagggtggtgcagcagccattttcccagatgcatgggaaccatttagagattttattcctgaggatgaaaggaattgtttcgtagatgcttataacaaaaggttaacttcctctgatcctattgttcaggttgaagctgctaagcgctggacgatgtgggagatgatgactgcgcaacttatccaaaacaatgataacattaaacgaggagaagatgatgaattttcactggcatttgcaaggattgaaaaccactactttgtgaataagggatttttaccctcggactcattcctattggacaatgttgataagatccgacatattaaaggttttattgtacagggacgttatgatgtttgttgccctatgatgtctgcttgggatcttcataaggcttggcctgaagcagaattcaaggaatgcaggtggttggccgttgaactcggatataggccacacgatattttgcttagatggttgcaaacaatcaaccttttggtagactgagtagctggtggtagcagatgcagggcactcggccaatgaagttggcatcgctgccgaactgaggtcagccaccgataaactgagagacttgctgcgcaaatgagccggcgaaaggcaacctgcacctctatctgatcatggaactcagaggcccataataattacatagctgtgtaacggttagcactgtgccgttaaacaatgtcattgtcaccatcgatatgttgtttgtttgctcgctggagtgtatgaggaattgaagtttcaagacgggaccagaatgggtggggcgtgtttggtttgcgtttttagacctggtctgtctagccagctatgccagggcaacacaccctggctctcacctagatcctgtttggttgcttaaaagaagaagaagaagaagaagaagaagaaa

SEQ ID NO: 35785 - DNA, 540 bp, Zea Mays
ctcattatattatcaaggaaagacataaacaattttgaattacaaatataccttcggcttgatagaaggcaaaaatacaagcgtgacgcacaagcgaatacaagtcagcgtgaacagtacgggggtactgttcatctatttataggcatagggcacagcctgtgtaaatttgcattcatgtcctttatatttactattgactcatggataaaccgacaaggactaaataaccttttcccctttaggtcggttcctttttccaccacttagccgaagctccctcacgcgtagcttcggagcaacaccagccttcgtcaagaccatgttcttcacattgtgtatgcttttaatccgagtccgaaggtacctgttcatatgtcacacttggaagacattgttaaatcatgtttttgaggaccttcagaagacgaaggcccacaacaggaccatcaccataaaaaataaatttaaaattaaagtggacatatgccccacatactagatattaaacagtagatactacactttatcttagccaaa

SEQ ID NO: 35786 - DNA, 1615 bp, Zea Mays
gcgcgattataaaaacccccgccacacccccacggccacacctttctccccttccctttctccatctcctctctctcgatccctccccgtctccgcgctccaagaaggtcgcttgccagttgccacaggccccactcatgcagccgagcggccgcgaaatgcagggcggcggcggaggcggcgggcaggacgacttcttggaccagatgctgtccacgctgccgcccgcgtggcccgacctcggctacggcaagtcgtcgccctgggagctccccgcggggcccgacgccgccgccgccgccgccgccgcgttcgacgagaccgcgctcctcgcctcgcgcctccgccaccaccagatcggcggcgtcgatgagaagcccctcatgctccacctcagcgacctgcacggcgtcgccgccggcggcggcgacgacgcgggtttcatgccgctgccgctcttcaccgaccgcgccgccttcaagtcccccaatgccgccggagccgaccaggcgctgtacaacgggttcggagccgctgggatgcatgccgccgccgtgcaccagccgccgttcgggcagagcggcgggtcaatgccggcggcgcagagcttcgggggaggcgcggacgcgggcggtggcgcgccggcaccggccgccggagcggcgtcgggcggaggcggggccgcgccgccgcggcagcagcggccgcgggccaagagggggcaggccactgaccctcacagcatcgccgaacgtctccggagggagaggatagcggagaggatgaaggcgttgcaggagctggtccctaacgccaacaagaccgacaaggcatcgatgcttgatgagattattgactacgtgaagttcctccagctccaagtcaaggttctcagcatgagcagacttggtggagctgcagccgtcggccctctcgtcgccagcatggcatcagagggcgacgacagagccggaaacggcacaagcgacgacggcggcgatggtgccaccaacggtgataacggtggtggcggcagcagcctgcgggtgacggagcaacaggtggccaggctgatggaggaggacatgggcactgccatgcagtacctgcagggcaaggggctgtgcctgatgccgatctccttggcctcggccatctcctcctccacgtcgtcgtcgccgccgccgtccctcctgccccgcccctccgtgggctcagtggaaggcgctagaggtcccttgcacgacgacagtggtggtgccggtggcgacgatggttctaggaccatcaacttttcttctctgctaaatttgtcgcgaagctgtcgtgtctgctctttgttaggtgaggaggaatcgaaattattggtccaaagggatcatattcatatcacataccagcccgagtacacattttatggaatgagattaggatagtgccaagtgcaaagctggtcaacgggacgaaagataatgcgagaattaacaccaaatgagatgcacctatgttggtgaagtaaatgaacgaaggggcatctctttcatcgtggtttcagagaacttctggtgaagaggtcatagaagagaaggtacaaggtagtctggtagaattggac

SEQ ID NO: 35787 - DNA, 2352 bp, Zea Mays
aaaattacatgtgcctggaatttactttactaattactccctccatttcagtataaggtgcggtttgactaggtgtggtttccaaaactatactttgacctatattttttcttatactacaatgtttctggcaacaaaattataaccatatgtagtttttcaaatactaaaccaatgatgtcacttttgtataacaaagtttacatcttgtaagcctaattgttggttgtaattacaaagtttgaatcttaaaattagtgcccaccttataaaaataaatgggggcagtactaagcattggtttaggagggcatgcatttgagtttaaaagaacagaaaagctcggatcattaaactaacgagctagctcggctcatcttatttatcagcccaagttggtttgttcagctcctgggctcaaatagacattgacaaaaaaatccgaaagaaatatcggcggtagactatatagctcctaatctaaccctagtcaagaaaaataattaaggccctgtttgggacagctccagctccacaaaatttggtggagcaggtcattaggtgctccaaaaaatcgtgaaactggagccataagcttttaaaagacatttagataagtcattttgtttattatttcgattgaaaatatttttaaaactattaaaattgatattataaactacagctccacactggagctggaatctggagccatcccaaacactccctaaaatccaattgcccagacataccataaaccactggaattgttgaatcataacataaatcaaatagaaaaattgaatcgacttctacgcatggcgaggtcatgccacctcctatgcgcccaagataatgctgctagtcttttgagcgacatccttggatccatgctcgacagtcctaggcttagtaactaggttcccagatcgatgggatcgaggaacgggaacgtggtacacggtacactactaaaattaggttttaacactacgggaacgggattgttcccacgttcccggaacgaacgttcctgaaacgaggaacgtgaccacgttcccagttactaaggtcctaggcttccggcttgggaacatgtgggcaggtatcggacgtgccgaagataatgtcgctagtcttttcagtgacatccttggatccatgctcgatatttctaggtcttcggcttgggaacatgcagataggtaacagacgacgaaggtagagaagacatgcgatcgagctaaggctaagtgcaccacttatgcaagacaatataggatggagagcatcacctgcgaccctgcatgttggtgacctggcacgtgttagacttggaacttgggaggcggcgtatggtcttcttgaggtgagagtgagaagatatgagtgggaacatggatggcagtagagaagtcacacagaggaaaagtcctaatgtttttatcttaaaaatgtaagtatgcctctcacatgggtgtggtgatcagtcatcaatggcatttgccttgctcaagttagatgggagataatgtgagagaaacatagaagaatctgaactgtgtgtacgtatgcttggtcgtgtggttcacaaactggctcacaagctagctcattaacgtaacgagctcaaatgctagtgtaagctggcttgttatgttaacgagccaagtcgagtcgagctaatttgaccacgagtcgagcaagctagtgaaccatgagtttttttgccatccctacttgccacatgtttacataattcagcttctcgttcttcttaaaaatttaacttgctgtgaagccctcattcaccaacatatgctggaggttgtttccagaacatttgtaatgaaagtaattatttaaacaaatactttgatccttaagaaaatactttggataaatttgtgtatgtgtttggctcatgaggcccattaaaccacttacaccaaatgtatgtgcatatacatcatgttgctggaataaaattcagtgactgagactaaaaatgttcagagtcgaaggttcggatttcaagatttggttggcataattttgaggaaaagaattccatcttgcctcgatcccacaactaggcatatatggagcctagacatgagtgatgtcagggcctaaggaggcccacggaggggctgcgacagtagcagccatgggccctctaagggggattagataaggatagttagagataagattagaagattagttgagattatctaggaaggttatcagttagtttgttgagagtttttagaagagttttaaggagataatgatctttagctagacaggggcggccaaccgacctatttatgtaataaatggatgaga

SEQ ID NO: 35788 - DNA, 650 bp, Zea Mays
cttataaagaaaaataaaattatttctttttcacttatatatgtttaaccttttcatgagagcagctttatatattcacgatttcttgttgggttgccaacgttatgtttatattgaccaactttattaggacactgcattctggtatttggcacttaacagttccactttgcaggaagaaaggttcagattgtgagacaaaggatatatgtaccatatcactgctcctctatcaagcatcagttctcattatgtatatagttttaccattatgacatccattttccttatcaaatgaatatccattttatccctaggaagaatgggataactgttagtattaattaggattcccatggacatgtggttgtccattacacagatgttgatacaaatgttcagctcctttttaggtaccgttgctcatgttgcagcccgaggttgtagctacacaggaacacaaattcagaaagataaaagtacaagcgtgaagcacgagccagtacaagtcagcgtgaacagtacgggggtactgtttcatctatttataggcacaggacagagcatgtgaggaattacagttatgccctttacatttactattgacttatagaaaatctatgaggactagatagccttttcctctttaa

SEQ ID NO: 35789 - DNA, 2811 bp, Zea Mays
caaaaacggtggtggggtttctgtttctttaagatttataggaagatagtgttaggcagcccttattggtgggcaggagtatattattgctcgaggtaggaggagagccaggggttgttagaacaagtccagtctagagagggagcgaaccaaaagggagaaataacaaaaaaagaatagagacacacacacacagctctgttcttcttattccaatcctctctcatcttgctggttcatccttgggatcggctctgtcgtcccctagctagttcgttcggtgctgtggtttctgccgctgtatccaagaactcttgctcttgctgagtctgggacttcagttcctcgcagagccactatctcccgtcatccttgcatcgatctgtcagctggcgtcgcctcgtgcttctgaagacgatggccacattcttctccacttccacgaaccagagggacctcgccggaggcggcggcgacatgtcgtcgttccaccactacgcctactcggacccaccagccggcggcctcatgcctttccccgccaccatcgtgtcgtcggaaggccacgtcgcgcacggcggtgacgacggcggcaggggcgcgttcgtggacgtgaacgcgagggacgggccgacgggcggcgccgagatgggcctgcagacgcagctgctcatggcgaacgccgcgtcggcggtgcagcaccaggggctgtcgcttagccttggcacgcagggggtgccggtgtctctttaccagtaccgccaggcggaggcaggcatggccgccgccgcctttctaagcccgaaccaggcgtcggtggcggcgaccaggagcgcgcagagcatctacgtccagaactccaggtacctcaaggccgcgagggagctgctggacgaggtggtcaacgtccaggacgcgatcaagcggaagggggacaagagccagcagggcaaggattccggcggcggcggcggtggcggcgagggcaaggacgccgagacgagcgacgagaaggctggcgagcacgaggggaactcctccgcgccggagctgtcgccgtcggagaggcaggacctccagaacaaagtgtcggcactgatggcgctgctggatcaggtggaccgcaagtacaggcactaccaccaccagatgcagatggtgatgtcgtccttcgacgcggtggccggcgccggcgcggcgaggccgtacacggcgctggcgctgcagaccatctcgcggcacttccggtcgctgcgcgacgccgtcggcgcgcaggtgcagtcgctgcggcggagcctgggcgagaaggacgggtccgcgcagggaggcgggctgccccggctgcgctacatcgaccagcagctgcggcagcagcgcgccatgcagcagttcggcatgatgcagcagccgcagcacgcctggcgcccgcagcgcggcctcccggagtccgccgtctccgtgctccgcgcctggctcttcgagcatttcctccacccgtaaggccgcgtaacaacctacactacaccacaccttcttctccatcgatccagtgctcgtcgctccatgatttaatccgtggcacgcacggcatatacaggtacccgaaagattccgagaagctgatgctcgctaggcaaacaggcttgtctaggggtcaggtgtccaactggttcatcaacgcgcgcgttcgactgtggaagccgatgatcgaggagatgtacagggaagagttcggggcggagatggactcgcactcgtcgtcggagaacgcggcgggcaacaagggcaaggacgaggcgatatcctcggaggaccacgaggagttccagagcccgtcgagcgccgccgcggccgcagtgccactgccaggccacctcagcgcgttcaagtcggaggcgatcggtgtcatggacgccgccggcattggagcgagctccagcctcgacggcgccgtcatcggcccgtacgcgacgagcctcaacctcggcggcggcggcggcatcctgcaggaggccctcgcgcaccaccaccaccaccacggcggcgccgacgcgaggttcgtgcaggcgtacggcgacatggccggcttcggcggctacgacggcggcagcgtgtcgctgactctgggcctgcagcactgcaacgaggccggcgccggagccggccccgctgagccgcaggccctcctgtacggcagcgccggcgacttcgacttcatcagcggctccgaggacaggcagcggttcgggtcgtcgcagctgctgcacgattttgtggcgtgagcggctggactggacgtcgttggggaataacgtgcgcggacggcgtcagaagcctgggatggccggccggcgccgccgcgggtatacctaccaaccatatgatggccgtacgtcatggtacatggtctcaaattaaccagcaaggttaagcatgcatatatatacatacacatatatatataaggtgtggtaagtgaggtagcataagcagggtaagcagctgtatatgatatgaggtgtggtataaagtaagtgtagggattattattggtattatttttggtagcttgaagattcgtctaatgatgattcaagtccggccagatatggtgtggtgttgttggacctcaagtgagtccatgtacacacaaatgtttcatgttttgtactgtaccagttgttcagttcagcgctaacaacaacgcagaaacattaagcatactactctgcttttctatacatatataaactcatgatttgaaccttattgtgacatctgatctgagacagatatggcagagaggccagc

SEQ ID NO: 35790 - DNA, 2453 bp, Zea Mays
cactgagcaaagcggaaaaaagcgaggaaaaatatcctgctcggctgctccaacgaagcaccggaggccgcaacagagaagagcggacgccaccgccgccaatcaatagattaggcgcggataatggtgctggccggaccgcgacgggcggaggagggcgccgcggcccccgcgcgccgccgctgacagagtatacctgcttaaccagccgtctgcaggcacggcgcacgcgcggtggtacctcgcgaggggctcgggttgactgggcgctactcgcggccgcggggatggaggaggaggcgtctgcagatccaccgaccgcttcgtccttcgcctgcgtctctggttccgggcgctgctgaatccgacgcttcggttcgcgtccccagtccccttggcggaggcgtggatcgtgtgtttggggggtctgggtatggtgggcggaggcgagggggatcgcgtgggcggcggcgtaggggttgggggaggccagcagttcgtggaccggagcaaggtgaggattcttctctgcgacggcgacgccagcagctcccgggaggtgctgcggctcctctgcaactgctcgtaccatgtaacttgcgccaagtctccgcggcaggtgatcaatattctcaactacgagggcggcgagatcgacatcatcctggctgaggttgatctgccggtctccaagtgcttcaagatgctcaagtacattgccaggaacaaggacctgcgccacatccccatcatcatgatgtccaacagagacgaggtgtctgttgttgtcaagtgcttgaggcttggtgcggccgagtacctggtgaagccgctgcgcacgaatgagctgctgaacctttggacccatgtgtggcggcggagacggatggtaaagggcactatgctgattcacctcaacctctgcgttagagaagcatgctcagctgagatgcttgtaggagttgctgtacctgcatgaattattctttaaatcgagtgctggtgttggcagcttggtttgcccgagaaaaacttcttcaatgacaacttcgagttggtgctctcagaacctagtgatgcaaataccaatagcgccaccctcctctcagatgagacagacgacaggcctaaagaaaacacaaatcaagaaacgggcacctcaaatcagcttgaatacgagctaatccttccgttgctgagcgcgaccagagagacaagatcggtgctccaggctctgccctagatgccagtcaatcatcgactccgggaagaatgttttcacgtcctataaaaactaacctgaaggttgctgagtcgtctgcatttctagcatatgttaagtcaagcaccccagccaccagctcatttgatagcggactacaaagaggtgacagccggttagattctttggataaccatggtaattgctctagtgcaacagatagaagtgacaccggtgctgatgtaaatattcggaataaagaagcttttgagatgcctgtgcagtatcctatggtatgcttttcttcctctagcatgcatatggagcgaagcaatgaaggccataatgacacttcaggaactccacctgcataccatttcccattttattatccagggatggtagaacacaacatggcactttcatcagtgcaaaattttcaagcaaacataaacagtgctcaagcacatacaccaccagcgatgcttcatcagtacaatgttttctcccaatgccatagtttacccatgatatcaccatttcagtttaatacttctggcatgagtatgcactcaagtcatttaccgacgcaaaatgtgtggtcatcggcatcgagcacaccaacgcctgacgaaacatgcaatcgctccgagagaagggctgcagcacttgctaaattcaggcagaaaaggaaagagcgctgttttgacaagaaggtgaggtatgtgaacaggaagaaacttgctgagacgaggctaagggtgcgaggtcaatttgttaggcatgcaagcaatatggatatcataagcaccggagatgatatatctgaagacgaagatgacgatccaacctccagggaggtagatatgatttcttctccagagtagtggagaggtcctcttgtgtgaaaaattagagtgcagatggttactgctcactttgttacaactcagtaggactagacaatacattattctactggcaacaaggcaatacaccctttttgctcacacagtataaacttttgtccccaaatatctggctgttactccggttgctttaatcgagaaatcatctttttgataaggctgttactccggttactttgatcgagaaataatctttttgataagtgtagttatagttttgctaagtttttgatgcaaagaccagtcaaatcagtttgatcttattgcagggtaatatttgcaattttgaggttaacagtgtt

SEQ ID NO: 35791 - DNA, 1272 bp, Zea Mays
cgaagacgtacgttgactcgagtctgccccggctcagcccaatcagcttgtcggccagctcctctcgtcgatcgtttccaccaaatccaccggtctgccggccccgtcttccgctccgacgacccggagccggagaggttgtggacagtggaggagctatcgctgtacaatggaaccgatgaggggttgcccatactactcgcgattttgggctcagtgtttgacgtcacaaaagggaggtcacattatggccctggaggaggttatcatcattttgctgggagggatgcatcacgggcatttgtttctggaaattttacaggtgatggtttgactgattccttacagggtttatcaagcagtgagtcaagggaatcctacgaaatatctgaagggtgtagaaatgaaggcaaagagaggtgcacagcttcttgaaaagcagaagagtgatgaagctaaaatacctggctgcaattcaaaatggagccagcaagaaggtggagaagtctggtgcgacacgggctatccaagattggtgaggaggccaggtgacatagctctgaccggacaagttagccaaaggtgcgcttgcttccaggaaaacgagctggacaaagccgggctagtggtgtacgaagggtgtgattacctgtcccagtcttgcaaagtaaactaggccgtgcgtctcccttccacggacttgttgctttggggggtactcaaacgcaaggttcatcagttacgggggcgctgcgacattccacgagcacccaccagccacgcatgcatcatgaaggcgggcctttctgctctgtcccgcgtgaaacacctggtgcaacgtcgtggttcagttcagatgcctagatacgcaattgattggaagatacccgcgatcgaatcaaatgatggtaacgctgcgccgccacgggcaagatctcgatcctaaaggctgtccgtgttaataggcatggggccttgggctgtcgattgatcgaggctgccttgcaagttgcgccgtctgcaccataggctacctccatcaatgaaatgcatttttttggagagtcattttagccatttgcatagcgaacagtgtgtgcgtgtgtggtacgcaaatttttgtttctccaagttggatcatgcatatgcagatttatacagtgccgtgcgagaggcattttacgtttgcatacccctaacccctttgcgtgatctgttggagatagatcccaaactcattctctctgctgcaaaatacacgctctttggatt

SEQ ID NO: 35792 - DNA, 2084 bp, Zea Mays
atgttctgcctccgcaccctccgatcgcccgccgcgtccgattcccctgaccccgcctcgcccgcaatctccgccgccgcgcccgcgacatccatcacccccacccgcgacatcccgcctcgcacgccatcaactcgcagcggcccttctccgaacgtggtttgttttttcgtttgctcgagcagccagccgactcgtctccagcaatgcggccggggtcggctcgctggaggtgggcgtcgccgccgacacctccaacgcctccaggcagggattaggtgagccgtcggctaatcactcgtcattgggaggatctcctcctcccgttcagatttgggcaagaaaggcccgggcgcgatgtccatggccgaggaggggagtgaggccgaggaggggagtgaggccgaggcgctcgagaaagacggcagcaaggcttcttcaccttcggggccagccagtcgactcgtctccagcaatgcggccggggtcggctcgctggaggtgggcgccgccaccgacacctccaacgcctccaggcagggattagatttgggcaagaaaggcccgggcgcgatgtccatggccgaggaggggagtgaggccgaggaggggagtgaggccgaggcgctcgagaaagacggcagcaaggcttcttcaccttcggggccagccagccgactcgtctccagcaatgcggccggggtcggctcgctggaggtgggcgccgccgccgacacctccaacgcctccaggcagggattagatttgggcaagaaaggcccgggcgcgatgtccatggccgaggaggggagtgaggccgaggaggggagtgaggctgaggcgctcgagaaagacggcagcaaggcttcttcaccttcggggccaagcggtcttgaggacgaggagctacaggtgcaggatgcagttgccagtggttccaagaggagcaaagactccgccgccgccgccacacgcagcgccaatgtcagctcgccctctgtggttcactctcaccctgccatcctccctgctcccgcgcagcagattccagaggttaagcaagcagataccacacatatgcattctatgcctgccgcgcgctttacgtagctaacaagttgaattcatcatcaacatatccattgctcgagcttttcttcaagaaccagctaccatagggcaaagtgaagaaacggaagagttgagcaagatcacattagagaataaggatattcagcttgatatcaatataagagaagaatctcggagttcttcacaacaagggaactttgacacagaaggtaccagctccagtgaggctttcttgcttggaacgataattttatgtctgggctgaaggtcgtgtttgatcgagagaggaaggtcttgggctggaaaaactttgattgtaagcaccatcatatccatctagatgttttttacagattaaatttacaagagcttcaaactagagcaatgtcgttacatgttgtggctgctaacatgccatgccaggttacagcgtgggcaactcaagaagcaaccttccagtgaacccaaatccttctggtgttccccctgcccctggcttgggaccgaacagctacactcactcctgaagctaccaagggtgcctcaccgaatggcacccaagtcaatgtcttgcaaccttctgcaagtttttcgccgaagctgcattgcaacagaaacgtcctcgtcatcgctgctctgctgttcctcgaccttcggcgaaaatttccagatacccgtactcttttcatatggcataacacactagcattaagtcttatgagagaccttgctaaagaattagtgcttggaggggaagaatgacctagaactgaagatggatgagctgatgtgaaaaatgaggggaagaatgacctagaactgaagatggaggagctcaggtgaaaaatgaacttgttcattgtgtgttttctgaccttttttggaattgtattaaaatatactgtaatgaattggtgtaagaatgtgttggaagtagcaaagaacctgatgccttttgcaatgagaatgtctttctggcaatttatcctgat

SEQ ID NO: 35793 - DNA, 1753 bp, Zea Mays
ctgctgcttatctcgtggccgatccgcgctcgccccgtccccgcatctcgccgccgcgccccggtcagtgtgcgcttgagacatcgcccacacgagacatcgtgtgtgatgcccgcccccaacccttccccggtgtgatgcccgccgttgacgtctcttctctcgcccccatcctcctcaacctcggcgccgcccctgcccctgtcctcgatggcaaggaaacttcccccgggcataaatctcactgctcacgcgccattagcgccatacccgctacctcctctggcatgccacacgccgccatccccctagcccatcgtgtgtcacgcgcccagatctcctatttttacgcccccacgcaacataggccatcccaccatggagcaagaaaccctagcgtagccaccaaccactgctgccccacatggcatcctgactgtggctgcatccatctcggcgcctcgcccaccacgttgcaccaccaccgccgctcctcctccccaccgcgctgtcgccctgagtaccaccgccaccgccaccgtgcatgtcgctagggccgcatctctcgatgttagggcccaaccgaacatcgtcgtcgcctccacctctgcgtctgggccaccgcaagagtttagggctcctccggggttcgagatcatgtccgaccagcagagcagcatcctcagcaccatgctcgacaaccccctccacctcggtactggcgtcttcgccctcgggtacgcaccacaccttttctcaccatccgagcattgccaaggagctcctctccatccccaacgcgcgccacgccccaccaccaacgatgaatgggtgcttcagattcactaagacgatggcgcgtctgcggcaaggagcttcagattcactgccatcagaaacttgcagttattggccagatgaagggcgaaggccattatcagatcctcgtccacctttgggctattgctgacaagtggacgagtgtcgtacacctctccaattccccccttcaatgtggtcagtgttgaatcatctacgtcatacagtgagcaagggcatactgatgagggaagggatgacatggatttttctcgttcgagcatcaggttttgtgcgttgattatggtgtgctcgttggtgagactgcgacgtcctcgttcaagtcagctgataatcgtgtcctccaagagcaactactacagaagaatgtggaaatcaacgatttataagaaaaagtttttcacgttgagcaataactctcagcaaaagtggatatatcctctgagaaggaagctgattgtgcacatcaggagactattgatttgaaatctaaacttcagtccaagctaaaattgaaaagatgaaatatgagcatctggcgagggaggctgctttggtagaggatcttcttgaagaggagtacaagaaaaagtttgatgaggcaaacaaggaactatctcttgagaatgatctagcaagcatgtgggttcttgttgctaagttgaaaagaggggctttagacacatctgatttgaatgttgatgatcgaactaaagtgtaagggcgtagagatcgccacactgttgtctcataattggtgttaataaaaaataacatggtgctgcacggaatctctactttgtcttgtaagcaggattgttctgtcggtataatttgatttgtatgtataatgtcttcatgctttacttgcccttttatgaaatgtggcgaccggtcctcttgtctttctttt

SEQ ID NO: 35794 - DNA, 2659 bp, Zea Mays
atcggctcagggtcacacccgcaaagctaccgccgcagtgccgcacggcgactccgactctgtctcctgcgcggctccagctcaccctctcctcacatcgaggcggaccggcccacgtcgccggcaaccgaaacgtcggccgtagcctcgcacctccggcatcggcgagcgcgcgcgcccgtccggcggcggagatggcgctgcggcacctggtcacgggccagaacaactgcgcgccggacggcgcctcgtcgtccaaccccctcaacgccctcgccaacgccttccttggccagtcctccaaggcgcagtcaataaaggaacttcctggttctgttagtgttccatctacatctggcttcagcgcgcctgctcccttgtcaaacatccctggttcagaaaatgagttcaaacaagaccagcgaccttttgtgcagggctctgactttattcatggtggtcctgctaatgattggattaagtcttttcggcctccgggggttcctgaacttggtggaatagaagcacactttccagattttgagcaaatttataacaatgcaggaacaacctttcagccgccattggatggtccaccacaaagagtgttgtctggtgtcttgcattcctttctcacaagtggcccagctggtgtgccatttcaacctcttccagtaccagctgctcttggtttatctgaaagtgacaaacagtgcatacgtgatcgtagctgcataatggcacggcatattttttctgaccaaccggaagaatatatacaggctcaggtcaatactttgctgcattcgcttgatatagacaaccgtatgagaggacctatgcatggacaatacccagaactacaggagtactggaaccagtcccaaagttctatgggtcctgccctgatgcataataccgctgataaatggattactgagtttggcaaacaaaataataatccggaaaattgggcaaagtctttcgaacaacaatatggccccaatgggtgggcctctgagtttgaacagcatcagtctcagatggccatgggccagatgggaggagtgaacatggccaacctggctgctatggagcaatcccgaatgcttgcacaaactttagcaagtaataatgatcccaagtttcagctttcacaaggggcggataagtgggttagtgagttctctagtcaacataatcaaggtgcgctaaatgagagctgggttgatgagttctcgaaattaaatgtcactgatgaatgggcagaggaattcagtggaggtggttttggcgaaagctctgctgatccgtgggtagatgagttccaagaacacttgtcatctttcaaacaaagttcaggcgcctctcgaggggtttatgtttattctgagaacaacccgtatgttggtcaccctaatccaatgcaagaaggacaggagctcttccgcaagggcctcttaagtgaagctgttcttgctttagaggctgaagttttgaagaatcctgataatgctgaaggttggaggttgttaggcataacacatgcagaaaatgatgatgaccaacaggccattgcagcaatgatgcgtgcgttggaagctaatccgacaaaccttgaagttcttcttgctcttggtgttagtcacacaaatgaattggagcagggagaagcattaaggtatctttataggtggcttcagaatcatccaaaatatggtggccttgtccctccgcagtcaactgattcaccttatggtcctgatgttgttagattgtttaatgacgctgctcagatgtcacctgaagatgcagatgttcatgtagttctgggagtcttatacaacctatcaagagagtatgataaagctataacttcatttaagacagcagtacagctcaaaccacaggactactcactctggaacaagcttggtgcaacccaagcaaacagcatccagagtgctgatgcaatattggcgtatcagcaggcactagacttgaaacccaactacgtgcgtgcatgggcgaacatgggaatcagctatgccaaccagggtctgtatgaggattccattcgatactatgtaagggcagttacaatgaacccaaaagctgacaacgcttggcagtacttgaggatttctcttggcaacgcttcaagagctgacatgattgccgcatgcgacgcccgcaacctcgacgctcttcagaaagagtttcctctctgagtcctccctagctttctccagcagcgatctccatggaaatggaattggaggccagtaacatttttgtatttgcctgttgattcttctgtttttattttgcttaagtgttgttgggtaaatgtataggaactaggaagtgagggggaacaacatcccgtcgatgtgtgaagtatcattgcaagaaggcaatagtggcaaagggggaattatacatctgtaagtacacaggaataaaggaatggttgagtaataaattgtttttagggcgaaccactgcttgttttataaagttaatataaaaaatgcaatgcgggtgcttcttggtggtggtgccagatcgagtttaactgagacgatccaaattaaattccatggtccacgccacgggtcctgctgggccgttaatatacgggacaacctccgctggt

SEQ ID NO: 35795 - DNA, 2137 bp, Zea Mays
ggagacacacggaaacgtcagaggaacacctcgccgacgtcaccgtccttttacagttctacacttctactacggccgcacgactctcctccaagcaccgccgtccgtaccacttctcccgtgcccgcagcgtacgcaatgccgcaccaccaccacaccaatccgtcgcatcctcctgcggcgcgcaagctcctctcctggcgccgcgtagtcgccgcctgcgccgttgtcgcggcgctcgcgctcctcctggccgccgcccctgccacggaggaccccagccgatggcgctcctatctcttaggacccctccctggggatacccgcaaggagacagtggcggccgcagtcgtggccggaagcttcgcgggccccgccgcctcgacgtcgtcgccatccgaagcgccgctttcttccttcggcgagatcgacagccatttgaaactttaaagtctcgattacaaataggtgtaaaccctggtacaatcgtgattaatttgtcagctaggattgctccagcagcagccccctctatgttcctggccccttcatcttcacctgcagaaattttttatgatggttcaatggaggaacccgaacatcctgatataaagagaaatccgccaaaggagtcatccccttttctcaaagaagagtggtttgcctacaatgagttctgatgtcaatggagaaaatgtcatggataccaaatctgttctccctgtaacgccagaggcgcctctttggtcaacagcagctgatgaagagcttatatatgcaaagaaagaaatcactaatgcaccattgacctcagatgaccctgatctttatgcacccttgttccggaatgtatccatctttaaaaggggccttacacaacaaaattgcatgatgaattgcggaagaacactattaaagctctctgcaatgcagatctctctgaaggattttttatccgtggaaaagatgtttcccttccagaaacattccttaggtcaccaagaagacctctaagagatattggaggaagaccagctgcgcagaggactatcctggccttctttgcagggcagatgcatggtcgagttcgacctgtacttctcaagtattggggaaacaaggatgatgatatgagaatatatagtaggctgccacaccgaatcaccaggaagagaaattacgttcagcatatgaagtcaagcaagtattgcatctgtcccatggggtatgaggtaaatagcccgagaatagtggaggcaatatattatgagtgtgttccagtaataatcgctgaccattttgttctcccgtttgatgccgcactcaactggagtacgttctctgttgtcgtaccagaaagcgatgtacctaagctgaagcaaatcttgttggcaatacccgagagtcgatacataacccttcaggcaaacgtgaaaagggtgcagaagcattttatgtggcatccgaatcctgtcaagtatgacattttccacatgatactacactcagtctggtttagcagggtgaaccagatccgttagagcagcacctgtggttcacatgcctgaattacatatggagggttgtttgctgacccgtttttggtgtgctcgtctgaggaagctgctcatgtggtgggatttggattgtaatcttgtcgacacagctgttccgtgctcaaggtgctgaatggagatgttgatctgacagtagaactggcagtctgtggataaaatacagtttatataggagcaggcttatgactgagttctcattactggtaatttccctcatggatagtttggtgtaaagcgttgacaaaagccgatgaggtgttgtgacgactgacgatgtccctttctgtaagattgtaattttcgttactctttttaacctgggcacgggaaaagatctggaatagggatgcacggggaattctctgtcaggttttagctctccattcccgtttccgcgacaaaaaaaatccttgcaggatccccacaaatgcttgcggggtatttcttctccatccctattttccatggggataaatccccttcggggatcaccgttttcgcttaaattataattagaacatacttattatgttattaatgcaaagcattgtcacttctac

SEQ ID NO: 35796 - DNA, 2909 bp, Zea Mays
cgcattctcccttccctggactattcttggtgggtggagagagccgcagaaggcagctggaagaggagaggaccgcgcgaggctccgtgccggcgagttcgggtgcttttcctgcggtccgagatgcgatcgttgggacccgggagatagcgcagctcgggttcgggttcgggggcggctaccgcgacggcggccgccacctgagcaggatgtttaactggaacgacgagcagcaccagtggtatctggttttgggaatggtagtttaggtggacttcattgtcatcactgtgatcgagatggagatgttgaggcttattgttacaggaagaaggtctaatctcgtcgaggtggccgttcatcacaaggatctcatcatgagtttcttggttggtattggcgatcaccactgtgatccttggagtgtttgggagcttgactggcttcgtcttccttctgctcactctgccagtcttgtaggctctgcttctcctgcattgacttctacttcttttgctcagtggcattatcaattgagaaatgtatgtggttcccggctatccactcttgcctgttgtggtcttttgggagataccttggtgatgtttctttggatcaataacatgatggtaagggatgcaatatgggctgaattcaatgagtgtgatgaccattttgggctttgcccaaagggggcaaaaaaaaacccaatatttatttccggggtccccaaaaacaatgaggaagaggtggctagtattgctgccatcactgaacagtctgcaggtgttcaaaatggacatcaagggaaggaaaaagcagactgcaagtcacacaagtgcacatatttcacccacacaaattgacatggaatcctggcccggacttccttccctgaatcctacacttgatagaaactatagtgatgacaacatagcatccacatatctggatttttgtgctgcaaccagtttacaagaagtgaccagaaattctacagagcaactagatggtaaatcagaagtgtttggtaatgatcaagaagaaaagagtaacagtttccttgattgcgactggggcaatattggaggttttgatgattttgaccgtctatttagccatagtgactccatatttggtaatgagatagttgccaacgacagtgattttctttctgcatcttcgaatttgatggatactgctgtgctatcaatcccagttccggtcgaagcacataagaggccagtgtggtcacgtagaaaaccagaggaaagaggtaaaagtaaaatatccagcagtacaagtggcttctcccacagcaaagtagagagttcatcgacgaatttgcaaactcctatggaacctgtacagactcctcaatatgcactgttccaggatagcaagaagataggagaagttcagcatgctaatcagtttatgtttcctggatatgggtatcctcctgcatatccatttcctaccattccgttagtgtcaaacattcaagctgaaggctatcagacaaaaccagctggcacaagctaccgaacttcggaagattacctaaaacagtcaagttccacagaaatgtcacaagatataccatcaagaccactaacaatgacaccacaagaaaagatagaaaagcttaggcgccggcaacaaatgcaagcactgatagctattcagcaacaacagcaacagtttggtcaacagggtcctggcagtgacacaatggtgtctcaagcatacacccctggtaacaaaaatccggattccttagggagttcaattgtcatagatgaaaacacaaataaggttatttcgcctgagatgattccaactgaccatgaccgggttcacaagagttctgcaatttcagatgatccctttatagaggaaaaaatatattatcagctacaagatgctcttggcaagttggataccaaaactcgactatgcattcgagatagtttgcttcgtttggtccatagtgcaacagagagaaagattgatggtgataggagcactaacaagactaataaagatgaagatgaagcttcggaagacgcatctactaggaaaacaaggtctccaaacaaggaagcagaaacaaccactaatccaattgatcgtatagtggcccatttgctgttccacagacattgctccaaggttgcaaaagcaacaaaagaaataatatcgtcaatccccttgactctagaacctgagccgaaggtacccttgggaactcctagggttccatcaaaagatcaacgagatgagcaagaaattgtgttgcaaccatcacaataatgtgagatgtgctagaagataaggttttactcaatttgagtaaacttatttgcatttagttagcctatgaatctaatgtcgtccttctaacgagtatacacatgctgattaatcaactgttcaggataaaaagttatgcaaatccagtgatgatggcagtcttatgatcgcctgtggccctggagatcgcttgtgtaatatgtagccatttcaacattgtaggatccttttattttcatcctgtaagaacatctcagattgtataggaacctacgattttgtgccgagccgtaaaaagagcaaaccttggctctggacataaggcgtgtttaggagcaagaggattaaagcaaaccttggctcttggctctggacataaggcgtgtttgggagcaagaggattaaagttgattgaaggggctaaaatccttttctattcaatttaaaatagtaagagagattttagtcctttcaatctttttatgatgcgtttggttgcaatgataagacgagacgagatgagataatccttcaaataatgttgtttggtttagggtcaaaggttgagataggattatctcagtgttgttcca

SEQ ID NO: 35797 - DNA, 1415 bp, Zea Mays
agcgacggcgtcgcgctccaaccggtacctcttcgacgcgaacgcgcaggcccagtgcgcggggtacctggacctgatgaggctggaggtggatgcgcatctgggcaggcttaggggcggtgtcaccggcctggagagctacgccttgtcgggcaacggccgtgcgatcggaggccaaggagatgcttggttcggtcaactcgtcggtgtctgatctgcagtcggagaatgagctgcagctggaagtgttcggtgccatcataggagagtgcgtcaatggcctgcaggaggagctagagaggaagctgtacgcgcagatgagcatcacaaacaccatgagcaggaactggaaggaagccataactcagtttgccaccgtgcgcttcctctccctccctcggattttcatggacattaaacgctgaatttcttcatgcataataggtttgattttacttttagttttcactcacgaattgttttatcttaatatggattgctcttggtttatatttacaatttcatctggtcagtggctcaggatttagaactagaactctgaacgtacgaaggtctctccggccctgatagatgtatatctatgatttttcaacatatatccattataatgtatacatgctgcaattcttcttccatctgtttttctataagatcggaaacacactattttttccctgcataaggtcctacatatgaatgccatggtggctcagtagcagaaggcagagtcgtgacctaaagctagccaaggatctgcagatgttgattgctgcatctccacgtctacttaatgtgggggatccttcctttggcaagtccttggtggcaagcaagaaaaggctggttggagatgtggaagaacaacttgagccagataaaaacgatgatggggtgcaagcaacgcagcagcagctagagctcacaaaagagaacactgaagcaagagcttcaacatgttccacctcccaagagcttcaacatgttctgctccggtggctcaggaggcaagcgtcgcacccgccccgattttgattccaaggacgaatacaacattcccgccggactggcgatcaccgtacctcctgtgcctcgaggtggagccgcccgtctgcgactcgcgcagaccacatctaacgcgtgcggcgctcgtccggctcacgggcaagcaccccttcaacttagaaccttcggtgtcgtggctgatggcgcacgacttcatcaccccggcaccgcaccactaccactactggaaaaatatcggctagaaaccgaagttcttactctaatagatcaacgttcttatgtaaagttgtttcgataggtcttatctaatacctgtaatgtacaatgggcagtttgatgttcataatgtaaagttgaacgttggactgttg

SEQ ID NO: 35798 - DNA, 2558 bp, Zea Mays
ggcctgcccactgctcagtccactgcccagcacggatctcatctcaccagctgcccgcgcatccaattcctctcgctggacggctgcagcacatcatcaggtgagaccgtgagagggaatgggatcaacaacaatgtcccctccatcttttcccgtcgtcctcctgctcctcctcctcgccaccatagccgcagccgccggaagcaacatggatgaggaggtggtggacgacctccagtatcttattgacaactccgacgacatccccaccaacgatcccgacgggtggcctgagggagactacgacgacgacgaccttctcttccaagatcaggaccaggacctcacaggccaccagccggagatcgacgagacccacgtcgtggtcctcgccgccgcaaacttttcctccttcctcgcctccagccaccatgttatggttgagttctacgcaccttggtgtggccactgccaggagctcgccccggattacgccgccgccgccgcgcatctcgccgctcaccaccaccaggcccacctcgcccttgccaaggtcgacgccaccgaggaaaccgacctcgcccagaagtacgacgtccagggcttccccaccatcctcttcttcatcgatggcgtccccagaggctataacggagccaggaccaaggaagccatcgtcgactggatcaacaagaagctcggcccagccgtgcaaaatgtcaccagcgtcgacgaggcccagagcatactcaccggagatgacaaagccgtccttgccttcctcgacacactatccggtgctcacagtgatgagcttgctgctgcttcgaggctggaagatagcatcaacttttatcagacttcgactcctgatgttgctaagcttttccatatcgatgcagcagcgaagcgtccatccgtagtgctgctgaagaaagaggaggagaagttgaccttctatgatggggagtttaaagcatcagccattgctggttttgtgtctgctaacaagcttcctttggtgaccacactaactcaagaaacttccccttctatttttggcaatccaatcaagaagcagattttactatttgctgttgcaagcgagtccaccaaatttctgcccatctttaaggaagcagcaaaaccatttaagggaaagttattatttgtctttgtggaacgagacagtgaggaagttggtgaaccagttgccgactactttggtattactggacaagagaccacagttcttgcttacactggtaatgaagatgctaggaaattttttcttgatggtgaggtgtcacttgaagctataaaggacttcgctgaaggtttcttggaagacaagcttacaccattctacaaatcggaaccagtgcctgaatctaatgatggggatgtgaaaattgttgttgggaagaatctggatctaatagtttttgatgaaacaaaagatgtacttcttgagatatatgcaccatggtgtggtcattgtcaatcgctggaacctacttacaacaatctagccaagcatctacgtagtgttgactcccttgtggtagccaaaatggatggtactaccaatgagcatccacgtgcaaaggtttgtatcactacctttgaagtctgacggatacccgacgattctcttctatccagctgggaagaaaagctttgagccaatcacttttgagggggagcggacagtggtagatctgtacaagttcatcaagaaacatgctagcatccctttcaagttgaagcgccaggagtcgagaaccgagagcactcgggcggagggtgtgaagagctctggtacgaactcaaaggacgaactgtaaagagctcagggttggatgtgtgttggagtggatcagggtgaaagtttccatctcaatacaagtagatcgatcttggtggatgcgagtgcagtgttggcctgagggaggagcagcagagatgagtgcttactgcttagagagaggaatgaaatcagcaactaatcaaataaaatcaaattccattattccttttatgcgtctgttttgctgtctttactttctttcatcagtatacaatacatggagactggatgtatagctggagtgactctacgcagggctaccatgcagatgcggcacaccgcctcctcggccgcgatgtcctcttgctcttggtcttcctggtcgaccatcctaccagaggtgatgatgaagaacagaccagcgaaggtgacacgttcactacgaagaagcaacaggagggagtagctgtccagacacggccacgtcgacagaagcggaacaacgtgagagtggagtgtatatatgggcctaaatgggtcgtttaactgggccgtggagcttatatgcttccctatctctggaaggagggtatcgagaaaccagtaaacaaacactacggcagctatagccgcccccttccctatcttcttccgcacgccgatctcccctgctctcctatccctatcttccatggagcgctaacaatctggtatcagaggtcagacaagttggatcccatcagcaact

SEQ ID NO: 35799 - DNA, 2617 bp, Zea Mays
cgtcggtcgatcatgttgcgtctgcgtgtctatttatttggatttggacatatgggcagagcatggagcagcacgcggcctagctaggtgagagtgagacagagcagacgcggcgccgggagctggaagtgatctagagctagagcggcggcggcgggcatggcagagcatctcatctctacggctgaccacgacaggctgccggacagctacgtccggccggagacgcagcggccgcgcctgcgcgaggtcgtccccgacgcggagatccccgtggtggacctcgccgaccccgaccgcgaagccgtcgtcgccagggtcgccgaggcgtgccgcacccacggcttcttccagttgctcaaccacggggtgccggagcagctgacggcggcgatgatgtcggtggcgtacgaattcttccggctccccgcggaggagaaggccaagctgtactccgacgacccggccaagaagatgcggctgtccaccagcttcaacgtgcgcaaggagacggtgcacaactggcgggactacctccgcctgcactgccacccgctggagcagtacgtccccgactggccggacaacccaccatccttcaggaggaccgtgagcgcgtactgcagtgcggtccgggagctggggttcaggctgtacgtcgccatctccgagggcctgggcctggacggagcgtacatcaaggaggcgctgggcgagcaggagcagcacatggcggtgaacttctacccgaggtgcccggcgccggagctcacgtacgggctgcccgcgcacacggaccccaacgcgctcaccatcctgctcatggaccagcaggtggccggcctgcaggtgctcaaggacggccgctggatcgccgtgaacccgcggcccggcgcgctcgtcgtcaacatcggggaccagctgcaggcgctgagcaacggcaggtacaggagcgtgtggcaccgcgccgtcgtcaacgccgacaggccgaggatgtcggtggcgtcgttcctctgcccctgcaacgacgcgcgcatcggccccgccgccaggctcctcaccgacggcacgcccgccgtctacagggactacacctacgccgagtactacgccaagttctggagcaggaacctggaccaggagcactgcctcgagctcttcaggaccccgacctcctaggagtattttggatgcttctctttcattttagcttttcggtactagtttgtttgttactagaatggaacttgccgactgcatcagaaactgtctgtctgtacccctcatcagctccccctccaaataatctctctgcccatgtgggcttgtttcaatactttttgtcagtacagcccatatattactttttttttgtcacatacggtgtggaaacacaaaacaggccgattccttccataaatgggcctgctcctgtccagcccgccccccgtgatgggccaaattcgcggtggctgctgagaacaggaacaggccccgcgccggcgccgcccgtccagtttccaaactcgcgcatccggtcggctggcgcgtcgtgtggaccagaaagggagcgaaatcctactcgtcgcacggggtccgcaagcttttcgtcgcctcgattcgcttccgccccatcctccttcccgacgcctcacatggcaacggccgtgcccgccgcctgcctccgcgcgccgtgctcctctccagcggccgtcgcacgccgacttggggccggtggcccgtcgctgcgcaagcggcattgcgccgtcgcgcccgtcgctgccgcctgcggccccgcgccgccgcggctgcttgacaacgaggaggcggtctgctccgtacggcggcgtgtgctggttgccggtgccgccgcgttcctctcccggcctaatccggcggcattcgcagcagaggctaagaaagggttcctgcccgtcgtcgacaagaaggctggctactctttcctctacccgttcggatgggaggaagtggctgtgcaagggcaagacaaggtgtacaaagatgtgatagagcctctcgagagtgtgagcgtcaactctattccaactagcaaggaggatatccgtgatcttggtcctccggataaggttgccgaggctctgattaaaaaggttttggcaccatcaacacagaagacaaagttaattgaggcgaaagagaatgatgttgatgggagggcttactacacttttgagttcacagctcaggctccaaactacaccagacatgcacttggtgctattgtaattgcaaatggcaaattttacacattgaccactggagcaaacgagaggaggtgggaaaagatgaaggataggctgcatactgttgtggattccttcaaaatcgaaaatagaatatgagtgcctgaattgctgtgttgtttttccttcgttgattcgctttttcttacataactgcagtgctgagatttttcagtagtaaataccgggattgtggattatgctgatcagtttcatttcgaaatgtttgttaccagacttgagcaacatttgtttgtactttatgtgtataataataatatcttgtttggatgtagatattggagcataaaattgggaattagaatcaatgt

SEQ ID NO: 35800 - DNA, 2210 bp, Zea Mays
cgatcgagcgaagcagaagcgccaaggcagccgacgcgcatggggaggacggacggcaacgcaacggtgtcgccacgtgcacagccgctagcgaaaccgggcaggaaggaccgcagtagtatatagagacctctccggccggcgcgcgcgacgtcagcgacgacgtccgcgccacgcgggcggaacttcgtagtttgcgacggggcacgcacgcacgacgcaccccacgcattttcaactatataaaaagcaccccccgcgagcgcggccggccggcgaacagaggagaggagaggagagactagacccgctagctgaggccggccggcgcgctggacacgaacatgatggggagaaaggcgccgctcggctgtgctactactcttctcctcctcttggccgccgccgtcgctccggccgagctcagcgtattaggcctaggcggcggggcggcggctgcctcgggcgcggtcacccgggccgacttccccgccgggttcgtcttcggcgtcggctcctcggcgtaccaggtcgaaggtgcagttgcagaggacggaagaaagcctagcatctgggacacattcacacatgaaggctactccctcgacaacgccacaggcgacgtaactgcggatcagtatcataagtacaaggacgacgtaaagcttctgcatgagatgggtgtcgatgcctaccggatgtcgattgcctggcctcgacttatcccagatggtcggggagccgtgaatccgaaggggctggagtactacaacaatctcatagatgagctccttagctacggctcttcaggacgagtacagcgggctgatcagtcccagattcatagaggacttcacggcgtacgcagacgtgtgcttcagcaacttcggcgacagggtcaagtactggagcaccgtcaacgagcccaacgtcgagacgatcggcgggtacgaccagggaatcctgccgccgcggcggtgctccttccccttcggcttcggctgcgaggaaggcaactccaccacggagccatacgtagcggcgcaccacctcctgcttgcgcacgcgtctgcggtgtccctgtacagagacaggtaccaggctgcgcaaggaggacggatcggactcaccttgcttggttggtggtacgagcctgggacgcagactcccgacgatgtcgcggcagccgcacggatgaacgacttccacatcggatggttcatgcatcctatggtgttcggggactaccctccggtgatgaggaggaacgtcgggtccaggctgccgaccttcacggacgaggaggcggcgcgagtgagggggtctttcgacttcgtcggattcaaccactacatcgtcgtctacgtcaaggctgaccttggccgcctagacgaccaagtgcgagactacatgggcgatgcagccgtgaagtatgacatgccgtttctcaagtcacgcaaccagttcccgttcggcgccttgacgagcgacttcatgacgtccaccccctgggctctcaagaaaatgctgaggcatctccgggtgacatacaagaaccctgcagtcatgatccatgaaaacggagctgccggacagcctgatccatccggcgtgaacagctacgacgacgagttcaggtcacagttcctgcaggactacatcgaggccacgcttcagtccatcaggaacggatcgaacgtgcaaggctacttcgtgtggtcgttcctggacgtgttcgagtacctgttcggctaccgcctccggttcggcgtctacggcgtcgagttcaactcgacggcaaggacaaggtaccagaggcactcggccaagtggtacgccagcttcctccggggcggcgagctgaggccagtcgctctgcctgacggagcatattcacagtgaccagttacacgtgtacgctccggctccaggggaatatctggcgatcagcgctctcggtgaggtggagagaaaatagagagtttgtaagcaaggatagtcggggtggtatatatagcagtgcttagatacggttttcttgggtaaatgtggtacgagttgaataagttgtggcatgtttggttagaggttagaggattggctctacccgaaaccagctgattcagatggtcgtttctatatatttggttagggggatggagtggatccattttttgtttaggaagcaggtcttcactaccggaatccgg

SEQ ID NO: 35801 - DNA, 1288 bp, Zea Mays
attccagctctccccctcggcccctcttctctccctccctccctccgtccccgcattaaactcggcgaacgggccaagaaaagcaaaccgagggaggagaaaggcaaggaaagtgggaaggtaggagagagagggagacagggaaagctctcttcctcctcctcctcctctcgaattcgtctcttgtccctgtcgtcctcgcccggtttccccggtttttgagaggggaaagaggaggcggaggagagggatggggagggacgagaggttcccggtgtgggaggccgcgctcggcgccggagtcgccgccgccttcgccgctggactcgtcggtgtctacctttccatgccggactccgactacagcttcctcaagttgccacgtaatctcgaggaactccaaatcctcactggccatcttgagaactatactagtgactacaccctacaggtgttggtgcttcttcgtgctatttcctgtcaaagatgattgggaagccactggtgttcacactgtggccagataagctcagcttcttccagagacaggttgctaaaagaagagagaagttgttgaattacatgcttttcctcagggtgaccccaacattgccaaataccttcatcaacttagcttcacccatagtagatgtcccctaccatatattcttactgggaactctcattggtcttatcccagctgcttatgtcactgtcagggctggaattgctcttggagagttaacttcgctgagtgacctttacgacacccagtcgatagcactgctattcctgatcggtgttgtttcagtcacaccagcattgctgggcaaggatgaggcacaagagaaaccaccagaaatggcggtaggcgcgtcatgatcaccaaagcacctagcggtgtccacgtcacctgtatatatgtcaacatccagcatgcagtggcttcattagttcggatcaacgggcccttgtggctggatgataaaaacggttcgcatggccacacagcttggcgggacctcggcctaaactccctccactgctggcctagagaggcgcctgtgttgccatcatcagaacatgattcggtagccattcaccacattattaatgaatgaacctgggaagcagaattgcctgtagacgagctgctctgatgtgtaaacgagtagcgctgttcggataggacaggcatttagtccaatccctgtatatattaaccagattcattcaatccatattcagtggttcaaagataatgccctgttcagctgctgtgttcttg

SEQ ID NO: 35802 - DNA, 1299 bp, Zea Mays
tttgcccccaatccctagccctgcccctctcctccagcgccgcgcgccggctctatgcgcccgccgcccccggagatgcatatcacacgccgccgttaccgctgggtgaaggagtgggtcccgcaagatctggtcgtcaccggaggcccctgcacgctctacaagtgggtgcgagctacgaaggatgtgggaagacatttttttgatgtaggggctcttaagaagcacgctcatgtccatggggagaggcaatatatctgccactatgagaactgtggcaagaaattcttagatagctctaagttgaagagacattttcttatccatactggagagaagaattttgtgtgcccacatgaaggttgtgggagggcattttcgttggattttaatttaaaggcacacatgaaaacacattctgcagataactatcatgtgtgccagtacccagaatgtggccgaagatttacacaagaatcaaaactgagagctcatatcagggcacaacatgagaaagctgttggcttgcagaatccaggtgcgtcatcaatgaaccacagtgcaattggaggtccgcaccagccccctaggccagcgaaggtctcagcagcacctccagctccctcagctgagcgcccttacgtctgcccctacgatggttgtgacaaggcatacatccatgagtacaagttgaacctccatctgaaaaaagagcatcccaaccactaccaggatggtggtccaaatggtgctgccgccccttcaaagcgcagcatctcgaagagttcccacaggagcaagctggacatcacctctaggatgccaccggccaacatccccaagcacagagggtatgcaacaccattgccagctgtggtgagcctccctgaggagcagcagttgctaaggaaagtggtgtacgaggatgacagcgaggagactgaagaagagggggataacaatggcgaggacagatggaactacaagagagctgctagcagcgacgacgaggaaaccgaagacgaagaatgagctgctagcagggattcatttttttttcttctgtagctgtgcatataccataatctatagactggtggttatagatttcaatacatgtacatttttaaaatacggctggcctatagtagacaagaggttgttgctgccatgccccttctcaactacacaggccatgagttcagaaaggataatggatcattgctcccgtctgcctgtgtttgtgccttttggtttgttgtcataaatgagttctcagttatcgtagccctgattgag

SEQ ID NO: 35803 - DNA, 1178 bp, Zea Mays
cctcgcccccctgccccgcccccaccgtctcgactctcgactcctctttcccctccccgagcgtgcacgtctcgtcatcgccctactcgctcgccccatcccggagtctccccggctcccaaaccctagcgcctcccggacctcgcaggtgagggaggcggcgatgttcttctccggtgacccatcggcgcggcggcgggtcgacctcggcgggcggagcagcaaggagcgggaccgcaaggtgctgctcgagcagacgcgcgaggagcggcgccggcgccagggcctccgcctccagaacacctccgccacgaagatccaggagatgttgtaactctcttcactggtgtgaatggctcctcgctgcaacctcttgttgctcaccgagtaaaaaaatttgccctcatctgtgtgcaagcagtctatcaaaagaggcatgattggggcagccaacttttaacaacacctggaaccacatcagtgccttctgtgtcattactggaaactgtaggttgcttgataaatccaaaatttctttggaactgcaaagtagttggttatcttcagcagagaaagatctattgcttatttcgtggcattatcgtatctgtaccgcaaaatgtcagaaattctggtcattttgatagtgcatctgtgctggagcaagtgcttatgcttgttgcttcgcatgttggccatcatccctgttgttgtctgaaagtggatccaagatggagtttctcgtctcagcttctgtccatcccttttctatggcatcgtttaccacaactcaagaaggttttctccgttaacgggctcaacaaatattatatccatcaaatagcttgccttttgcccagtcttgttgatgtccttccaaacgatatatcagctaatcatccaggatatgcgtgcgtccttgcaaatgttcttgaagctgcaacctggattttgtctgatgcaaagttagcttctgattcagcggctgacatcattgctgtttgtacctcgttgttggatacgttgccagcagtcacaacacctactgaaagggcagatgacgatgatgagatgcccatggatgtcaatattaaaattaatcttgatgttgatttggaaagacagataactgcagcaattgattcaaagctacttcaacatttggttgtataattcat

SEQ ID NO: 35804 - DNA, 445 bp, Zea Mays
cgacaacaagaccagggtggcacagatccgggactgttgcacgcacgacccgacgatgagaacctaggctgtgcgacacacgacacgcagtcagcctgtcgcacgaccgagagatgacgacgaacagagagcttcaggcgcggccaacagatagcttgcgcgcagggacttcacggcgcacggtgctgggcgcgtaaggagcaggacgcacaccggcgagctgagcgacggcaggaagctcaacgcatgcaccagagagctggaacactgcagaccacgacgctggaggaacctcatggtgcgcaaacaccagagaactcgacggcgacgcatgcgcaaggagacacgcgcggtcagggagctcgaccggcggtctgcagccgagcgcacgcagcagccatgggaggaagaacggctaggcaccggccaacaggggagctcggct

SEQ ID NO: 35805 - DNA, 860 bp, Zea Mays
tttttcttgtgtcgattcttcttgtatcgaagttcgggcgcggtagtggacaaacagagggaaagaagaaatatttatgctgaggaaggttcagaggctatggatgtggctgctgcccctgctgtccaggcattggcaagatacacacgaagggaggcaacttgcctatcattgactggcaaagattctatgttctcggggaacttcaaattcacagctctgctgccggcaactcccagtcccagcccaaagaagcctgtgcgatgaactgccgtggtacgtccacatttcacgcgaaggtttagaaaacagcaggatcggtggatacctgctgttctctcagcagtacaaataacaggcttcttccagcagttgtttactctggggtccccacgattcaaacccttttgatggatatacttcgttccagataggaagtttgttttgttaatctctagtctcgagtatttgctctaggagaccacccaccagaacggagccttcttgtcgccggaccaggcatcgattcgcacactgtatgaggcgatgctgaaagaaaaaaaaaaggaaggcagcaccgatgttcggtcattaatatgcagtttctttcggctgcatgtgtctcttatgtagagtaaaactaatttattctcgcatatagaatcatactataccggacatcaattgatgatgtgaaccgtatgcaagatcatcgccatctactgtagtatgtgacagtgtaagttgttttttttccttaaaaaatgtaggcggagcaaagtcgaatctgttgtgttttttgcgatttatctggggaagagaaagaaaatggaccgctttaacatgctaatgtagagttg

SEQ ID NO: 35806 - DNA, 370 bp, Zea Mays
gctgctagccgtcgccttcctcacttgagcactagatctgtgcgatttggctggttgttcgcctacagttcttcttcattcgatttggctggtcactggttgggtttgattatgccttttgtctcctccccattttccatcttgtttctttttagcatggcaaacaccgctgagaggtcggccttgaaatctgcctttgctgttgatgagacacgtaaagccttagttgttgcggcaatgaatacacaaggagacggcgcaaatggacgggaggaggaagaacagaggcagggacaggaagggaagagcatagatcctaacggagatcaggcggtgccaaaaccaaatctttaatgtgcactggattatg

SEQ ID NO: 35807 - DNA, 1644 bp, Zea Mays
cgcagcttccttatatgccgaaggccgctctggtcgaacaggactccgactcgttcgggctattccatctctgctctctccctatatacgactaggctaccgccgccgccagatgcgcaggtcttcgtcggctccttctacttctcaggcaacgagcacccggcagtaccgatcgggtgttcttcactgggtccgctcctgcgtgctagaactagaagaatcctctgctcggctcgaacttggaaggggggaggcgagggatggggtccctgctttgctgcatggggtgctcggaggacgtctcggcagcgccgcccgtgagctgcttgtgcctactatggcctttccattattaccacaatttgaactcgggctctgctgcttgtcacagatgtgatacacgggtggcacctgatggtggaaggagtcctcctgcaaatcaagtggattcattggatactttgggtctccctccaaggcctttgccttacgatgatcctcaatccagccctcgcatggtgcaacacccacttgtatcaggacacgacaaagcaccaacgcatgtccagaaactaggacagcctgcagaaactaagaatacccatactgggtcaacttgcacagctcataaggtttctgcgtcctcaccaaaacagcactcagaaggttcaagaatggatgatggagtacaattctgtgattcctctgacagtgaggatgactgtccagtatgcctggaagaatatgattatgagaatccgaagattgcactgcaatgcaaacataatttccaccttagctgcatttacgagtggatggaaaggagccaggcttgcccggtctgtgcaaagactatgttgttcaatgaggatgaatgaccccgccgatggaagtcttcccagacgctggattcatgggctactcgtcagaaaaagaaggagcaaaaaatggtggttctaggaagcaagctaatccgaaagacggcaagtgaggcattcggccgggcctttgggtggtgccctttagataggcgcatttctggttgatatggaagctggaacttggaagatggtgatgaagtttgtttgtctcttgatggttggcttgttcagttccttttgtggcttctgcctgtctgattgggttgtaaataagaaagtcttatgtagttaatcgtaggccaaactttctctgctatcttaggctcttcactaatctagtttgatagtgtttagagtctagatagggttctggccgtgttcgatcttttgggatgatgtgccgcgtggttgtggatgtttcaaactttcctatttcttaatgaaatagggggcttcgccccttcgtaaaaaaaaaaccaagagacaagggcatatgctccctttccagaatggaagcgtatcttaatcggttcattctataaccacctcatccataatactaatatgctggttcatggttcatccacctaaactcaacagtttaatcccatgatttggccaagatggccatatccaaaacttatttcaaccagtgttatcgagaaaagattttttttactagacaaaacaataatatatttcctaattatgatcaaattgtcgttctaccgaaacaaataaaaaatgcggtagccctacccct

SEQ ID NO: 35808 - DNA, 1149 bp, Zea Mays
gtgatgttcgtattccaggacagagagcatctttcctttgtttatcgccggccggcagctagcaattctaatcagaaatggttactgctccggtccaacaccaatagaagcacgtcgcgggcgctggatgtctgtcaagaatcaagcttcccataatcgcgatgcaggaccggacttgcggttgagccagaaaataaaaaggactgcatgccagtgccagggaagaagtgctcgttcgtccactccagaatctggagcagatgaagctgaccctacaggtgattatattattgcatgcgtgtacggacggaggtgggcattattctgacgaggggaagggaaggggaggcgggcggcggcagcggagcatggcaattaacaacaaggctggcactagaagatcacggggaaggcgagtttgacaacgggggcatcttttctggggtccccagaggcccactccccacacgatgatgcatgcacgggtcgtcactcagcgttattgagagacagacagacagagagaggtgcgttaaatttgtgatggcctaggctggtgatgatgaacgacgactgatgggtacagccgggaatcaagagggatgaaagatcggaacagtacacaggacggcagcagcatcgtccatagtacgcgggggtaggcccgtggaagtttacggcacgcagctttgtgcctttgtgctatctctctctctctcttagagagacggagatagagagagtgtggggtgcagtgtacgactatggggccggccgtcgtccctgaccttggaatggaaatggtagggcaccatccaatcccacagtccaatcttcccgtcccgtgtagcatagcacagacagacgctagtagggaccacgcccatgcaccctcgcccggccggggccgggtccggcccccgttccgtccgtgtgccaaccaactagacgcgcactagcgcgctaggtcattatagcttgcaatacaaatttcctacctatctgtctatccatccacacgacatacatgtgcacatgtatccatgtttttgtgcgtgacggtgatatgctctgcttgtaacagttaataacgtcatatatactatgcacttgacctgtatgtataatatgcattaatgtgcgcgcgcg

SEQ ID NO: 35809 - DNA, 2387 bp, Zea Mays
atcctgggctcctggcggttagccaagaattccatcaattgctctatacacgacgtcgtcgacgtgtaatgtaaagctacagcggttcaacttcgacggcggccccagcctcgctacactgtcgctatccattttccccgtcacgagctgccatgagcaattaagtcttcttcacttcctggttcccagtattggtcgaggcgatctgacggagggagcagccaagtcagcaagtaccgcagcaccaagcagtcgaacagcgccgaagatgccagggctcgccgcgtcggcgtccgcagctccggcgccgttctcgttggcgacctcgcgcttaaccccggttgcaagacctgctccaagtttcagaacgcaagcttgtggattgaggtgctggattgctgcaaagctgaaactccgcaaggcattgaaaaggcatcacggatggcaacttcaaagaaatctagatgctcgagggaatgataacgttccagattgcttggaggctgcatctctgactgaaaagagaagtcattggaacatgcatcttgcttatgattctggaggtgaaatggccaacacaagctctgatactttggatagttcaactgttcaggaaaaaccagtggttccgggacacatcatctctgaaatcagttctcatgttcaaaaggaagagtctgctgtgtccaaaagacgctctaacaatgaaccatctctttgcattgctgtaattggagctactgaatgttggtatatttgggtattctaggaagaaattgacagatgagggcttaagatctataattgaagccaatttgacctgccgggtggatcaccatgaaaattgtgatgacaagctaattgagttcctcaaaaagacgtattatgtagatgccggacatgacaaccaagaagggatggttagattaaattctaggatgtcacaaatagagggcattggtgctgcaaacagaatattctaccttgctgttccacaagaggcactccttgatgtagcattgccactggctgacggtgcccaaactaagcaaggctggaatagaataattatcgagaaaccatttggctttactggtttgtcctcactgcgggtaacacaatctatgctgtcaaggtttgaggagaagcaaatttacaggattgaccaccttctggggaaggatctgatcgaaaatcttactgtcttgagattttctaacttggtgtttgaacctttgtggagtcgaacttacatacggaatgtgcaggtcattttttctgaagaaacatcaaatgaaatacaagggaggtactttggaaattatgggataatccgtgacatagttcacagccacattcttcaaacaatagctctatttgctatggaaccacctgtaagtcttgatggagaggatatccgagatgaaaaggtgaaggttctcagatcaattcggaaagtgaaccttgatgatgttgttcttggtcaacttaaagatatgtctggtaaagttgacagatacacaaaatccatgataccaacctattttgctgctgctatgtacattgacaatgcacgctgggatggggtaccattttttatcaggacaggcatgggacttatgacgaatagagcagaaattcgaattcagtttcgccatgtccctggtaatatctaccgtgaacgctttggccatgacatagatctcgacacaaacgagctggttctacgcgatcaacctgaagaagcaatcctgttgaaagtcaacaacaaggtcccagggcttgggctccagctggatgcttcagaactgaacctgctttaccgggataggtacaacaccgaggtaccagattcgtatgaacatcttctactggacgtgctagatggagatagtcatttattcatgcgcagcgacgaactggctgccgcatggaatgtgctcactccgataatccatgagatagatcagaacagagtagttcctgagctctacgaggctggggacagagggcctatcaatgcttaccatctcgctgctaaacatggggtgcgatgggatgacgactggtgagtcgatacatggcaaagattctcgatgcgcaacgagattcattaccaatttttgtcgttgtatcgcagtcagatgtacaatatgccttctgtaatcggcctgatcaaggactttcaaggagacatgcctttcaaggagatatgcaaacatggtttctttcctgtcctgtagactgtagcactgttgattcaagttggaaaaagaaaaaaaggagaaaagaaaatatgcttgcgacaagccgaggccccatgtcttgtgcgtttagcatctcgtttgccacaagtatggcagtgtttggaaaatggcaatgaaaag

SEQ ID NO: 35810 - DNA, 329 bp, Zea Mays
ctcactatagtcgtgtcggtgttgctgcccacgacgcccggcggccccgccgtagatccgcgattctggtgagcaatcgccggccacgagagctttcttttcccccgagaaagtggctgacggctccccgtagacacgacgaagcgattcaggggtcgtaccggcgtttggggagatagcagaggtcaacgacggcgcacgcaggggcgggcatagcggtgacccattgctccaccggccagatgactccgcggcaaaacgacgacgctgatgattttgtggtatggtggctctctctctggtcggcaatggcggtgctcgtacctgtt

SEQ ID NO: 35811 - DNA, 3976 bp, Zea Mays
ccccttcctcccgatcctctctcggatctcgccgcgcgctgccgcgctcgaaggtgagcggggccgcgatgcctgcggtgcccgttcccggaggcggtggctcctccgacgccgaggagctgttccgcaccaagcgcatcccggagattcgcgcggttgagggcgccacccgacgcgagatctccgccaaggaggaggagctccggcagctcgtcgggcgcagctaccgcgacctgctcgactcagcggactccatactcctcatcaagcagtcctccgatgcaatattctacaacctcgcccgcatctccgactccttgtcgtcgctctcgcctccccctgaaccctctctcgccgtaagcgccgtatcgccgtctccgtcagctggagggcgcgcgaggctctacgcgctggccgcgcgcgccaagtacctggttgacacaccggagcacatctggggccggctcgacgagggcctgctcctggaggcggcggggcggtacctgcgggctcaggtcgtgtacgggcgactctcccgcgacgccgctgccgccgcgcggttcccactcctcgcgcaccaggcgcagctcgtggaggcgttccggccgcagatcgcccagcgagcgcgcgagcgcctcgctgaccgccgcctccctgtagcggcccacgctgacgcgcttgcggccgtggccgcgatcgacgcgccatcgcttgcccctgctccggcgctccttctcttcctcacctcgcgccgcgcttggatctcccaagacctagctggtctcgcctcggatctgtcatcctacacctctgtgctgtgcgatatagcgaggatcgtgcggatcacgcttggccacgttggacagttgtttgtgcctgcactcagtgatatgccgttgttcttcaagacggtgactgagaagacgccgcctgagcagttgttcggtggcattccggaccctgatgatgaagcacggttgtggaaggagcacatgaaccagcttgaagctataatggtgctgcttaagccagatgttgttgcagcggcctgtacggattggctcaaggaatgttgcagtgaaatttttggtgtgattgctggtgagcaaaagttggttgatgccattgggagtggggagctgcttggatcagtgcaaagacttgtacgtgatgccctagatgggagagatggattggagagaagtttggagcagtggctgaaaagtgtctttgggtcagatactgagtcgccatgggatcagatccgtgggttgatcttgaaggacgacaaggatattttcgaggattggatggaggaagcatttgtgcgacggatgaaggacatcgtgcattcagagtttgatatattgggttctagtgttaacgtgaaggaatcaattcatgctatcggtgccaatgctgatccaaaggatgctggagatttccttgcatacctgcggaaatcttcaaagggtggtggtttctggttctcagagtctaagatcaagaaaggtggagttttggcacacttgaaaccaattgctgatgaaaatgatttccgtagctgcctaacatcgtattttgggccagaagttagtcggatcaggagtgcaattgacagtaaatgcaagaatatcctggaggatctgctaagctttgtggagtcacataattcaaccacaaggctgaaggaattggtgccataccttcaggagaaatgctacaagaccatctcgggagtactgaaagaattagaagctgagctcagaaagctctctgctttgttgggaaccaaaaaggagggtaacgacatacctgcagcttctattatagcggagaggtctctcttcattggtcgtctcttgtttgcgctgagataccattcaagtcatgtacccctgatactaggttccccaagggagtgggtaaaggaggttggtggtgcagcatttgccaggttatcatcacctacagcaagacatttaagggcatcttttacacccagaaggcacacatttgacagtcccaagagtcctggaaggcaattctccgatagccccagaagacaaactattgctgctgcagtatctttgtttggagctaatgatagatctaatcctagacttgatgaactcaataagaccctgcagtcactttgcatcatggctcataatgtatggatagcatgggtgtccactgaattatctcacattctttcatatgatctcaataaagacgattcactatcctctgcaactcctttgaggggctgggaagtcacagtaattaaacaagaggaaacaactgagggtcccttggaaatgcaaatagctcttccatcgatgccttcattgtacatcatatcctttctttatcaagcatgtttggagattcataaggttggagggcacatcctggacaggattattttgcataattttgcttgggagctactgcagaaggtcatcaatatttatgaaaattttctttcatctgttgaatctgggaattctccggtttcagagaaaggaattctgcaaatactgctagacttgcgttttattggtgatgtcctatcaggaggtacaagttcttccacaaacactactgaaatgcagacaaaacaggattctttgccaagcaccatctccaagacttccttcaggagaaaacagtcacaattacatgcagactcagctgtcatagagcctataaacaagtatgaaccttacctgtgggagaatgagaagcaatcttacaagcgtcatgttgttctttttggttttttggtccaactgaatcacatgtacactggtactatgcaaaaattaccaacaaaatcaaatacagattcaaatatcatgagatgctctcaggttccaagattcaagtacctaccaatcagtgctccagctatatcatcaagatcacacaaaccatcactacagtctctgtctagcgagtccacatctaaaaatccttggaaatcctattcaaatggagatagatctactacaccagagtttgatgataatgcaagtcttgttggtgctgctccattgcttaagtcatttgttactcaggtggggaccaaatttggggagaacacatcgagatggggttccatgctctctgatggacaggttggtaagctaagtgacatccttcctggaccagcagctgggtttttctcttctttcacatctggagctcgatatgattcatagtaatgcaacggtgaccattgatctttagcccttactacacgtgacacggaaacccacatgtgtcatcaaaggaagaaaaagaactgttggtcctttggaaatctattgctcactgaatgatgccacatcgctggtcccgtgttgcttggcatatctgccgtgcctattcacatcttattgtgcctagactttcatggggaagctgaggaaattataatggaaaagatgagatttattctatatcggttgcccaaggttgaatgagtggttaggaaaaatcagatttgggttcagtatgtttcttgcttgcatttgacttggtacataggacagaacaagtgcaacgatgccgctgatactagctcactttggggactcctgttgtggatacgcggcacttgaagttgtgaaaagagttttggggggtccattctttcttccttgtctttggctcggttagttggcttttttttttacatcggatcagtggtggaactgcgaggttgtggttttatcatgtaggcaaatttgccaaatgtgtacatcggaaatatgggaataaaagcctctatcaatcagcattcagcatcatgcagcgctcaagggcctgtttggttggcatgctgattgccaatttgccatagtctttctgtatttgtctacatgtctgtctgggttgaagttgttacaataggtacagttgctgattttatacgtggctaagagcatctccaaccgtcttttctaaa

SEQ ID NO: 35812 - DNA, 2519 bp, Zea Mays
gctttggccactcagccagcgctcaccaactcaccgagtgtccgagtcgttggcttggcttggcttggctccgcccgttggcatcgtctactcgccgaaaacctcgccgagtccctgccctccctgggcggtgggcgcggaaacccttcgtctgttcgctaaaccttggcggccggatctcccaccttcagaatccatctggtctcctctataaaagcgctgggaggatctgccgactttgccgtccataggcggcgtctctccggtgtcctgcgtctgcgccgcacacatcccccactcttcttccagtgaaacagttcaggatagcaagcaaaaatgttaaagtatctcactgaacagtaaggcggaaggcgcggccgtgtgcccgtgcccagcgcggcgagggctagcccaatggcctgcacgtctctggccagcatgggcgtaggggcaacggtccggcgacgggcagttcttgagagatcgagtgatcctttctctcctcgtccttggcggcgcatagcagattagcaggtgacgaagagatgcaaaaactctcctggaattgattgttgaggcatcacagattgcatttgccagtgcaagcaaatttcagagataaggatggcagcacaactacttttctccaatgcttccagttgccactgcccattaggcatttcaaggataaacgttgggaagacacttcttggtgaaagtgcaagttttcagagaaagaagtcgttttctggtggttcctatcgcttttctcgatttgattgctctgcgaactcccgccgagctgggccaaggcgcaccaaggatactttatatgaccttcaccctgagatctccttgctttatggagaagataatggtgcagctaccttatccagcaaagagcagggtattgacactacagctgaaagattggtggacacttctccctcttaccgctataatgagcccaggattaaagtcataggggttggaggtggtggctccaatgctgtgaacaggatgattgaaagctccatgaagggtgtggaattctggattgtgaacactgattttcaggctatgcggatgtcacccattgaaccagaaaataggttacagattggccaagaattgacacgtggtcttggtgctggtgggaacccagaaattggcatgaatgcagccaaggaaagccaggagttggtagaacaggcagttgctggtgccgatatggtttttgtgacggctggaatgggaggtgggacaggcactggtggagcacctattattgcagggattgcaaagtccatgggtatattgactgttggaattgtcacaaccccattttcatttgagggaagaaggcgggctcttcaggcacaagaaggaattgcatcgttgagaagcaatgttgatacactgattgtaattccaaatgacaagttactgactgctgtgtccccaaatactcctgtgacagaagcattcaatttagcagatgatattcttcggcaaggtgttcgtgggatatcagatataatcactgtgccaggtctggtgaatgtggactttgctgatgttcgatcagttatgtcagatgctggctcatcattaatgggcattggaacagcaacaggcaagacacgagcaagagatgccgcactcaatgccatacagtctcctctacttgatattggtattgaaagagcaactggaattgtatggaatatcactggagggaatgatctaaccttgacagaggtgaatgctgcagctgaagtaatctatgatcttgttgaccctggtgcaaatctgatttttggctctgttatagatccgtcatacactggtcaagtgagcataactctaattgcaactggtttcaaacgccaggaggaaagtgagagccggtcttcacaggctggagaagacagcaaccgcggtcgctcgggctggttttctcccacttcccaggaggaaggtcatgcattgcagatcccggagttcctacagaggaaagggcgtccagggtttccacgagtctgaacacactttggttcaatgtttttcttgtcatagtttggtacgatgtaggtttggtttctgggtctcttagttagcaaggtagagcagatgttcctgaaccgcatactaatctgtgtgcaaacttcgtcgcctgagtacattggctgggctgctttgcttctcaggaacctgcagtaggtctcaatttgctagttattatgattaaaagacatcgctgagaccaaattataacgttccgtgtgaagaattactggctcactgccaatttcctttcctttgcggcatacattgtttcattagtcgttattttggtttcgttcaatgttatgacaccaaaataggattataagggttagtttggaaaccattttctcaataaatttctatttttcgagggaaattagttcattttcctttgaaaaataggaactacttgaaaaaatggagtttccaaactagctcttagatggatc

SEQ ID NO: 35813 - DNA, 2005 bp, Zea Mays
aagagaggtagttgaaaaaaagcaacttttttacatctctgtcttatttttatctttcagccatgcatgaaattgttggtgaagctgttttgcaaaatatttttttcccaaaacagtttaaattcatcttagaaagctactcaacagcttcatggatgaaactgatgagattttgcaaacgggtcctacacattcgaaatatctaaatgagcggtcaagcatggtttctttggacgatgttgaagacttggatcagaaacgccatccgggacaccgtgaccaggtccggcggcgaagcgagatggtgtcatccaagaaagtgtgcgtggtcggcgctggcgtgtcggggctggcgtgtgcccgcgagctgctccgcgagggccacgacgtgacggtcatggagcagagcggcggcgtcggcgggcagtggctgtacgacccgagggcggacggcggcgacccactcggcgctgccggcgcgcacagcagcatgtacgcctccgtccggctcatcagcccgagggagctcacgggcttctccgacttccccttcttccccagagacgacggcaccggcgactcccggcggtacccggggcacgctgagttcctgaggtacatcagggacttctgcgacgcgttcgggctcatggacgtcgtcaggctcaacaccaaggtcctgcgcgtcggcctggcggcgccgcgtgccgctgatgacggtgacggcatcaagcggtggacggtgagttggtctagacatcgtggctgcgatggcgaggtggtcaccacggaggaggaggtgtttgacgccgtcgtcgtcgccgtcggccagtacacccagccacggctcccaaccatcagaggcatggacaagtggagcaggaggcagctgcactcccactcgtatagggtccccgattccttccacggcgaggtggtggtgatcgtgggcttccgtcatagcggcgtggacatcgcgctggagctctccaagttggcgagggaggtgcacgtcagcgtcaagtccatggaggcgctcactcccgccgtgtccaaggccgtcgccaggcacagcgacctgcacctgcacctccagatcgagtgcttgcgcgaggatgggcaggtaacgttcgccgacggctcgcgtgtcgccgccgactccatcatctactgcaccgggtacgactgctcgttcccgttcctggacacgggaggcctggtgaccgtcgacgacagccgcgtcggcccgctgtacgagcacacgttcccgccggcgctggcgccgtcgctgtccttcgtggggttgccgaggatggtgctggtgccgcggttctacgaggcgcaggcgaggtgggtggcgcaggcgctgtcgggctggcggccgctgccgccgtcggaggagatggcgcgctccgccgaggagtaccaccgcgccagggaggcggccggcgtgcccaggcgcctctcgcacgccctcttcttcgacatggactactgcgacgagttcggggccaagcactgcggcttcccgccggtggaggggtggaagagggacctcctgtcgttgtctctcgcaagcgccagcgacggcgccgtggagagctaccgtgacagctaccatgacagcgacctggttcgggagggattgcgctccgagggctggtggccgtggctcccagatccacaatgaagacgacggcgcagagattcacaactaccgccacgcagcgctgctggctgctgcactactctagcgctgtctcaaagaagatcaagagaagcgagaaaggaaaatgaagaactgtcatagacatcggcgagatgatgcccgttggatcaaccaagatgttcttcatcatgttctagtaaggatcgtttgttcctcttgcaactgcggtgatctggattagcctacctctcacaaacagctagccaaaagggcgctgtggccggtagtgcccgtgcctgggctacgtgtgtccacgctgggtcacccgcactgagg

SEQ ID NO: 35814 - DNA, 1491 bp, Zea Mays
cgtgtcaccgtccatacgcacaagaaactacggatggttcccaggctcccagcacagaatccacctccgccgtcaccaccgagcaacgcgcgccggcgcccttctatttctccagcccccgctccgccgccgccgctctcctcctccgcacccccgccctgtttcgccatcggcccatcgcgcacctgcctgtgccacctgcagcagcagcagcagagataaagttggctggtagttggctgcccacaccgtctggttcccgttcccatgtcagagggccacgtttcccatgctcctcggtttgtgcctgcaatcgcttgctgcttagcctccgtgctgctgctttgatccagaggctgggaactccaaagaggaacagcgtccatggaggctggaggcgcaggaagtggtttgaatggggcggtgcaggcaaaggggactggggctgatgatggctctgccaagcggctgccgccttgctgcgtcaaggccagagccgccgcgccggagtccgaggccaggtgccacgccaccgtcgtttcaggatggttcactgaaccgcgatcgcgctgtggcaaagccagcaaagttcagtattacaataacccgatgtggccaggagaggccaattctttgaaagtggagaagatcttataccaggggaaatcgctataccaagaagtcttagtcttcgagtcgtcgacctatggtaaagtccttgtgcttgatggtattgttcagttgactgacaaggatgaatgtgcataccaggaaatgattactcacctgccactttgctcaattccatcccctaaaaaagttttggttattggtggtggtgatggaggtgtacttcgagaggtatccaggcatagttcagtggagtccattgacatatgtgagattgatcagctggttattgatgtgtgcaaagatttcttcccacacttgtctgttggatttcaagatcctcgtgttcaacttcatgtcggcgatgctgtggagttcttgagaaatgctcctgaagggacatatgatgctatcattgttgattcgtcagatccaatagggcctgctcaggaacttgtagagaagcctttttttgatacaattgctagagctttgaggcctggaggcgttctttgtaatcaagctgagagtatgtggttacatacacatttgattcaggatatgctttcaatttgccgtgaaactttcaagggttctgtacgctatgcatggacaagtgtcccaacatacccgagtggggtgattggatttttactatgtgccaaagaaggtccattggtgaactttctgactcctataaatccaattgaaaagctggaaggagctacaaaagctggaagggagatcagattttataactcagagatgcatagggcagcatttgttctcccgacctttgcaaggagagagctagaagcatattgcgtttccactgaaacaaatttgtgcgcaatgtcacag

SEQ ID NO: 35815 - DNA, 682 bp, Zea Mays
atacttctggtgaagtatcaaaatatgatttataaaaatgcttagccctgcttagatcttgtggatagaagttgtctttcgcaataaggcctagctcaggggttatcctgaggaaagatggcttctacctgcaagaatattttcattgagagcgtggtgggatcttactataaagttccctttgatgctcttttcatcctaaggaatacaaacaatcctaagggtggaagtacttaaatcgggacttgggctaggaacaggtgatgctccgcccagattaattaatgattggatgcgtatgtaggcctgttgatcaaggactatcttaactagccacatgccctggaaatgggacaggataagcttgaacccgactattccatacgtgaaaagacaaccgcgcactaggcgtgggagatggtgggagtagcgtgtaccctcctggctaaaggcaggatggaggagtactgtgctcccgggtagcgcggacccgttcacgttgtggaggatctgtgggaacggttgacatatgcaagggttaagtgctacatatgtcgtgtggttagagatcctcagctgagtaaatcgattcggatcgccgttatatccccggagagtggagacttgatctccgacctgcaacctaagtcaggatgtgaacctcatgaataaaaatgatgtt

SEQ ID NO: 35816 - DNA, 2576 bp, Zea Mays
tggagataatatatgatactcacaacgcactgctttttcatgcgtgctatgatgagagcgatggccacgcattgtgttcttcagctccgcaagctttctggtatggagctgaacggcactcttggctatcagttgtcaagcctgcaggctctgaaaacgatggacttgagcaacaactacttgcacgattcaattccttaccagctgccatcaaaccttacctatctgaacctggcgaaaaacaacttctctggtaatcttccgtactctatatccaacctggtctcgcttgagtacctgtaagttactatccattgcagaagatgagatttgctttgtgatggtctctttggttagcacaatctaactccaatgaaccactgcctgcagcaacctcagccacaactcgttgtttcaggaaatcggagaactgtttggaagcctcagttcactctcagaactagacatatctttcaacaacctcacggggaatcttcctttctcaatgggctccctgtcaaaactttctagcctttatatgcaaaacaatcagctgtcgggcacagttgatgtcatcagcaacataagccttgcgacactagatattgcaagcaacaatttcagcggcatgataccccaagagttcagctcgatcccaaacctaatagttgcaggaaactcatttgtcaatatgcctgcctccccgccacaagctctgacgccacctccgaatccacgtggccggccagacgatcgtcggggaccaaccagcgctccaactgtcccggagactcccattgacccggacgacaagaagatgcaaacgggacctcttgtagggatagctgttggctcaatagctgctgcctcgtgcgttcttttcgcgctggtgttgtgcctccacaacgcacggaaaaaacccgatgatgggagcagtgaagcgaaagcgtctagcagggaagtcatggacagtagccatgacaacgctgctgtggcaacttcagacctccaactgatccagcctgctggaaagatgactccggacgacagagcgcatggtccaaacggttgtaccgccaaaaggccaaagcagcaggttactgtgacgacagtgagttcctacacagttgctgctctccaagtcgctacgaacagcttctgccaagactctctcctaggcgagggctcgcttgggcgtgtttacaaggctgtttttcctaacgggaaggtacttgctgtgaagaagatagacagcgcttcgctgtctctgtacgaagaagacaactttctcgcggttgtgtcgaacgtgtcccggctcaggcatccaaacatcgtgccccttgcaggctactgcgtggagcacgggcagaggctccttgcgtacgagtacgtcgggaacggaacgctgcatgacatgctgcacttctctgacgacgacgggatgacgatgccgggcaagactactaggctcgcatggaacacccgcgcgaggatagcgctaggcaccgcgcgcgctctagagtacctgcatgaggtgtgcctgcccccggtggtgcacagggccttcaagtcatcaaacatcctgctcgacgacgagtacagcccgcgtctgtccgactgtgggctcgctgctctgtcgccgaaccctgagactgagagggaggctttcgctggagtggttggctccttcggatacagcgcccctgagttcgccatgtcagggacgtacactgccaagagtgacgtgtacagtttcggggtagtgatgctggagctgttgaccggccgcaagccgctagacagctccagggagaggtcggaacagtctcttgtgagatgggcgaccccgcagctccacgacatcgatctgctcgccaagatggtcgatcctgcactggatgggctgtaccctgccaagtccctctcccgtttcgccgacataatcgccatctgcgtccagtcggagccggagttccggccgccgatgtccgaagtcgtgcagcagctggtgcgcctgatgcagcgggcgagcatcgtgaggcgacaatcggacgaccagctgggctactcgtacagggttcccgagcgcgacggcggcggcacggtaggcggcgacgtcgtcgtcgcctgagctagctagctagctagaggccgcgacgagaccaaagctggcgtacactcctactcctacacaaagcgctgcacagtttatatatattcataaacaaaagagcgagcaaaagaaaagaaaagcagttggatatggatggatccttcacgttttgttaaaaagtcacccgtaaacgacatatatgtatagggtttgcagcgtactgggacgtttcttcgtgagctgcgagtgtcatgtatagtgtgcgctcttgccagtggtagatatataggataggagaaaaaaaaacgtgtcttcttttgttggtgtgttcagttcttcgaccatacacgccagccgcagacggtgacctctgcagccttgctttgcggcgagaggcaaggcagttttctccggtttgcgatgcggcaattcagcgggcgccttgtggcttatcgcatggaac

SEQ ID NO: 35817 - DNA, 3763 bp, Zea Mays
tccagatgtgctctgattaatcaatgagctaaccagaaattaactagcacgtactagtggcttaacagtacggtggcacgagcaaagcgacactgtaattattgccatttccagcgagcgagagagcacgcgcggttccgagccgagcttggcaagctatgccggttgtgggcgatggcctcatcgtgagcgtaaggtagcagcatctatgcgaaaggatgcagatgccaaaattccgagctatccaaatctctcatctaagcttatatgcatactccgtagtgtcactatgcttgctgatcctgacacagatgaggtttacgctcgaatgactctccagcccgttagcaatgtgacgcattgtgacaaggagacgttgctggcaacagagcttgcactgaaacaaaccagaccacagacagagttcttttgtaaaacactgactgcaagtgatacaagcactcatggaggtttctctgtgccacggcgtgctgcagagcgaattttcccccatcttgacttctcagtgcagcctcctgctcaggaactgcaggccagggatttgcacgatgcaatttggacattccgtcatatatatcgaggccagcctaaaaggcatttgctgactactggctggagcctatttgtcagtggaaagagactccttgctggtgattcagtcctgtttattagggacggaagacagcaactcctcttggggataaggcgagcaaataggcagcccgttaacctctcatcatctgttttgtctagcgacagtatgcatattggaattcttgctgctgcagcccatgcagcagccaataacagccaattcacagtattctataacccaagggctagtccttcagaatttgttattccttttgccaagtaccagaaggccgtctatagcaaccaactatcacttggcatgcggtttagaatgatgtttgaaactgaagaatctgcaacaagaaggtacatgggaacaataactggtataagtgatatggatcctttaaggtggaaaaactcccaatggcgcaatattcaggttgcatgggatgaagcagcaccaagtgagagacgcaccagggtttccctttgggaggttgaacctgttatcgctccattcttcatttatccctcgccattgttcactgcaaaacgtccgaggcaacctggggtaacagatgatgatagctcagaaatggacaatctttttaagcggaccatgccatggtttggtgaggaggttggcaagagagatctgagtactcaaaacggtttagttcctggattaagtttggttcagtggatgaatatgcaacacaacccctctcttgccaacacggttatgcaaccggaattgctaaattcgttagctggaaaacctgtacaaactctggctgcggctgatctatctaggcaaattagcttccagccccagttcctgcaacaaaataacatccagttcaacacttcgctgctacctccccaaaaccagcagaccgaacagttagcaaatgtaatagctacaccaaaccaattgggaagtgttatagtaccacaaaaggcagttcaaaattccagttctgaacagaaacagaatctggttacacaaccactgcaagtcagccaaccaatggttagtgtggcacagcctcaacttgtccatactcaactccagcaacctcaagtagttctccaggctcagcctcagcaacctcaagtcattgtccaagctcaactacaacaacagcaacctctggttcaaaatcacaccaccatacaaagtggccttcaacaaatccagcttctgcagcaacagcaagttcagcagtcagtgcaggaacaacagcaaataaagatacagccttttcaggtacctaatgatgccaacatggtaacacagttatctgatcagatgaaaatacaactattgaaggctctacagccacagcagcctctggtcatggaacagcagaaaatgatatttgatttgcagcaacaagcagtaaattctcagtcaactgctcagcagtgctcacaggtagctacccaagtggttggtttgcatagcagtagcactaatcagtacccgacgcagcaaaagactcaacctctcaaaacatttcaagattttcctgggaatgctgtttctattgtaaaaccagaaattgtcacctccgtgggtgctcgctctttgcatgtgcctggtggagtgcagtcaatgaagatggatgaagttccctcttcttcaacatcgccatccacaaacaacaatcctgttattttgcgatcaactccaagtagctccaagaaccaatgtttacctactgcagcaaaggctcctcagtcatctgttgtattgggttctacacttgaacagggtatgaagccttgtgacagtacacaacacccaatggtgattcccaagctggctgaagaaaggccagctactggacaagactacatgaacagcactcagctggattatttggatacgtcatcttcagcgacttcagtttgcctttcacaggctgacggatcgctgcaacaaagttttccaccttcatccttcaatcagcatcaaccgttgagggaagcagttccagatagcgagtttgaggttacagatgcaggaaataactttctatttggggcaaatattgatggccatatggagcctcttaacgaagacgatttgcttggaactgccttcgaagctgacaagtacatggaacagatgccaggaaacggcatctctaactacatttcatcaaaggattctcagcaagagttatcatcttcaatgatctcacatccatttggcgttgctgatatcgcgttcaattccatagattcgtcgatcaatgatatccaattcttaaacagaaattcccgggctccaggtcctgttcaacaacgtatgcgaacatacaccaaggtgcacaagcgtggcgctgttggaagatctatcgacatcaacagatattctggttacgatgaactgaagcatgacgttgcccgtatgtttggaattgaggggcagctcagcgaccaaaacagagttggctggaaactggtttacgaagatcacgagaaggatgtcctattagttggtgatgacccatgggaggacttcgtgaactgcgtgcggtgcatcaggattctttcgccgcaggaagagaggcaaatgaggctggccagcgactacggagacagctttcttggcaaccaagcgtgtagcagctcggacgggggtcgtccgtggagggtcaccggcgactagaaatagcaggctatgcctgagcacaaatgtttgatataatccgtcccacgatagcaagaaaatgatacgcgatttctgagcacaaacttttgcactcagatgatcgtgcaaacagttagcattttaagaaaaatgttgcagttcaatgtaactgcaggaatgtctctgatgtagcctcttcgatgtggcagccttaacaatcgatgtgctacagttactctgcctatgtatttactatactaccttggccttgtatatccttttgatgtaggcgcagctggatgctgaaccccccggaggctgttagggacaattacaaccgttcataatttgccacagatacaaatctgagtggacaaatggattcagtttacgtatgcttcattgtttgtgagcctaccttgatggccttttattttgttcagttccactaaaaaacgccaggtggacgtatgcagatttggg

SEQ ID NO: 35818 - DNA, 1174 bp, Zea Mays
cttttggtgttgctctaaccctttcggctgcgctgcgcacgtcccctcccacgagaaacaccccacgtctcaagctgcccctttctcaccgccgcggccgccacgcgcagcagcaaccgagcaggagcgcagccagcaagctcaggcccgagccctactgcaaccgccgctgctaccgcactgaacaccatggccgacccggcggagcaccgtccagcggaggaggacgaggaagccgcggcggccggcgaggatgaggacaccggcgctcaggtcgcgcccatcgtgaagctggaggaggtcgccgttaccaccggagaggaggacgaggacgtacttgtcgacatgaaggcgaagctctaccggttcgacaaggaggcgaaccagtggaaagaacgtggcacaggcactgtgaagctgcttaagcacaaggagaccgccaaggagcacgcagggagcgacaagtcgtgcgtgtggcacgcgctggacttcgccgacggtgagctcaaggaggagatgtttgctatccgttttggatctgtcgagaattgcaagaagttcaaggacactgttgaagagatagctgaagagcaaggaaagaccgaggtgaaagaaaacgaggaagtctccattgccgccgcagatttggtacagaagttaacagtgacagaggctagcaaggagggagatgcagaggaagaggaggctcctgcatctgaccataagaaggatgctaaagggtaaagattgaaggcaaacaaggccaaatgattatgattccattcatttcgttgtcaaggttcatcttccccacaaattttcattacaaagtttcattgcattttctcctgagatgatttgtgtgtgtgtgtgtgtgtgtgtgtgtgtgtgttgggtgaaatctgagttgtcagtcatctacatgtctttcttggttgttagacttattctcagtcgcctgtttatctgggatggctaggtacatcatgtttgtacaattatttggggttgattttggaatggctctaaagctcgagatgagatagatggtatcatggtagttattagtgatgatttcttttcgcttcttgttcgttcgttctgaaataatatgggatgctttgttatacttgttgatccattattagcttgatgcatcgttgattcgttatca

SEQ ID NO: 35819 - DNA, 3738 bp, Zea Mays
gtcagaatcatcttttcccactcctgccgtctattttcccgactactctacgtgcgctttctctctctgcgcaactaggtgaccgcgaccgcggccaccgccctacgtcacgtacgtgcttgctagagtctagcctcgtcggttccttcgcatggtctcgttcaggcggacccttcgccggcgaccaacacccaccagcaatttactggaagtgtggaaccacttctgatgctgtctttgtaaatattgatggagctagctgagtagaaatggactgcagtcaagatccccaagaagaaagccatcaaagaagggagaatggtgaagaagcagaaaagacggctgactatggaaatgctttgagtcgtaaggaggtaacagaagagcttcttggttgtgtggttcatagtgaggaagaggcgtacaggttgtactgtgattatgggcatcgaatcggttttagcgtgcggaagggcaaacagtcttactttattggtaccaagaatattcgaacaaaggattactactgctcaaaggaagggcttaaatacgatgagcctgttacagaagcaaattttaatcgaccagacacaagaactaattgcaaagcaatgatccgctttagagttgacgagaaggggcggtggacagttatacgctttgttcctgtacataatcaccagttggcaaaacctggagaaagacacatgctgagatcagccaaatcgcttgctgttggcaaatcaggtgttatagatccattagcatctacagaggcacatccaattaatggtttctctgatatgacaggtgatatagttgagaattcagggtatactataagggaatgttacaatcaagtgggcatgcagagtataacagtaattgaggcaggggatagccaaagtcttgtcagctatttcaagcataaaactaatgaggaaggcatgttctattgggacgtccaagttgatcaagaagggcgcatgacgaacttcttctacagggatggtaaaagtagaaatgattatggctgctttggagatgccattatatttgatacaacctaccgcacaaacaaatataacttgatatgcgccccatttgttggtgttgaccaccattggcaaaatgttgtttttggctgcgcgttcttgttagacgagtctgtaacttcctatgcctgggtatttaaatcattcttggagtcaatgggagggcgatcaccaaaatcaatattcactgatcaggatgaagctattatgcaggcagtcaaacaggttttccctaatacgcaacattgtttttcctactggcatattctgaagaatgctcaatctcatttaggctcactaaatacgtctcaagcatttcaaagtatgtttaccaagtgtatgcaaggatctgactcagaagaggattttaaggaatcatggactgcaatgatccaggaatacaagctacaggataataattggttgattgacctttatacattccatcataaatggtgctcggcgtttaacaaagatacatttgatggtggaattaattcttctcagtggggggaggtttcaagtaatattctcaatggaatttctgatgaaaatacctctcttacacgttttgcccttttgctagaaaaggttgtcaaggatctacgtagaaatgaatctgaagaggattttcgatgtagccaaactgctccagtccgtgcaattaagcatagtaccgttttgaagcaagctgcagaatcatatacacataggatctataaattatttgaagcagaatttctggatgggtgtggagcaacttcatgccatgaaacttcgagtggtggaaatttattgaggtttggaattacaatgcaggggaggggttcaaaagtatgggatgttgttcttgacacttccaccatggagatcagttgtggttgtagaaagtttgaaaggatgggtcttctttgttcgcatgccctcaaagtcttcaccctgcagaatgttgacacaattccagaaaagtatgttttgaaacgctggacaaaagatgccaggagaagcatgtatacacttgctcaggatgattcaacccaacaggaatgcacagaggctgaacttgcatatcgcaatcgggcaatgcagtatgcatataacctaattataaagagccaggaactggaagaatcacgaaaaatattctgggactcccttgaaactggagagaaggcactggaagtgttctttgaaatgagaaacatgcgcactcaagcagccaaggatgctgataagaatgtaaagaagaagaaaaaaacatcaaaaggaacaaacccaaaaaaagctaaacaagccccaggagtttcctcaactggtccagagctgatagtccatactaatgagcatcaatttcaatcttcacaagatgctcagggtaatgcaaccattggaagaccatattactatcaggcttttccaaatgcccctatacaaccaaaccagatgtacatgcatacaaatatgcacacaatgcccctttgcacaccgcaggagctgtctgcatatgctgcaatacgccccaattcaatgtttggtggtgccaagaacatctgaaggatattaaggtccagattcatgtggatgtcattggaaaaccttattgagactttcgctatcaactccgctttgatctctgtggacccatttatggaggcctggtggcacttcatgtttggttggttcaggggctcttcgttctgatctttagggaagcggttattctggctgttgcagtgcaggctgtgcagccccttatccatatagcagtggccagtggcttgctattaatatcactcacaggcaattttagggttgtaaactgtaaggcctcaatccgctgtgggcgtgagtttctccccttccaaggcagtttcctgcatgggttcagcttgagttgagctgctgagttgtgaacgaggaagcaaccaaagcaactgggagcctgggagagtgggagtggaggagctggctgccggcactggccgaggaactactcagtccaagacgtgtgtcgatctgaagtgacgctgacggctgacctatcacctatgttttgggaggggctcagggccggcaacagccatggccgggcaggtctccacacagtggccactggagctagaactggacctggaacggcgccccacctgccaaacggcaatgctgatgaccgcttgacagctgcttccgatgggctggccacctcccactgcccacatatgaaagggaacctggaactgtgtttgctcggcaaccagcactggtttggggaaacagaaagggtacataattgtagattgagagaaaaattagaggatgcagctgttgcttgggttcagtggtgaaggaagcagctagcagcttcttgggttcattcaagagagattggagaagggggaaggattggaaatgttgcttctgattcgcttgaactctgaatttctgattgtttccttgttcacagaatgtagtgtcatgcataacctgggttgccacgccttgtttctgaggcgtgacatgtgactgtcgtgatggtgtttttgaaatttcggttggtaagaaatgctgaaagaagaaatggcgtcattacgttcgttgcattgctttgcctattttgcgtgtttaatggaatatgattgttgtatggcacttcactctgaatgtgagttgttttatgctgagg

SEQ ID NO: 35820 - DNA, 2662 bp, Zea Mays
cttttgcatacacaccgctacgcccccggctccaaccctacccccctccgcctcctcgccggcgcgctctaccccgcctcactccccatcagtgtctctcatcggcggctctccggtgcatgcccctcgccctccctctcacctatacacgcctccttccacttattgcgcgtcaatttcaccttctgctctcggtctcttcgccttagggcttcacgttggtccggggtacctctcgtgcgatccgcgcgcaatggagcaagatcaaagcccagccgtcgacagcgcggattctggcgccgcggcttttgattttgcgactggcaatgcacctagctcggctgtgaccagcggaagcgccgtggcccctgacggtggggctcaggcagctgatacttctgcctaccaggccgagcacacggagttgaatgggacgactggcgatatgtctaattaccaatctgcaggagctgcagagaatggcacagccgtcaccgagataggcgagccggttcctgagccatcctacgaggaagctgtgctttcagcagaagaggctagattgtggagtgttgttactgcaaattgcttagatttcaatgcctggaccacacttattgaggagacggagaaaaatgctgagaacgatattttgaagatacggaaagtgtacgattcatttcttacggaattccctctttgctttgggtactggaagaaatatgctgatcatgaagcgagacttgatggtgtcaataaagttattgaggtgtatgagcgagcagttcttgcagttacttattcagtggacatttggtataactattgtcaattcgcaatttcaacatatgatgacccagatatcgtccgaagactgtttgaacgtggcttggcatacgttggaactgattatcgctccaatattttgtgggatgagtatattaagtatgaagagtcactggaggcatggagtcacctcgctgttatatatacaagagtattggaacatcccatccagcagcttgatcgctattttaattgcctcaaggaattggcttcaaagcacagtttttcagaaatacttactgcggaagaagcctcggtgtatgttgtcacgtctgagaccagtgctcaagcgcctgatggtgacacacatcctgatgatatcgataaggctggtcaaccagaactttcatctttggcagatgcagaaaaccttgcaaagtatgtctccatgagggaagagatgtacaagaaggctaaagagtacgaatctgagatcattggttttgagctagctattagaaggccatattttcatgtcaagcctcttgacaatccagagcttgaaaattggcatagctaccttgactttatcgagaaggaagaagacattaataagtatttggacgaagcttcctttgtaatgggatgttgaactgaggatagagcgtggacataatgtttggtttcgatgaggctaagtactccaaactttcatttggcagtggtcgttctgggttcatgatatatggtaccaaataccagttttgaatttttaatctcatatatgcaggttatcaaattgtatgaaaggtgtgtgattgcatgtgctagttattcagaattctggatccgctatgtgcaatgtatggaggataaagggagtctagacctagcaaacaatgccctggctcgtgctactcatgtgtttgtcaagaagcagccggagatccatctatttagtgctcgctttaaggagcttaatggggatatttctggagcacgtgcagaatatcagcatctttactcagatttatgtcctggctttctagaggccatcgtgaagcattctaatatggaacaccgactgggagataaagaattatcttgttcagtttatgaaaaggccatcgctgctgagaagggaaaggaacagagccagctcttgccgacgttgcttattcagtactcccgtttcttatttttggccatccgagatttggagaaggcaagagaaatattaactgtgctgcatgagcagttaaatgtaacaaaaacagtgcttgaggctgtcattcatctagagtcaatttttccatgcgaaaagcgtattgattttttagactcacttgtggagaagtttgttacacctgaatcatctcagggagaggtggcaagtctagttgacaaagaggaaatatcttccatatttttagagtttttggatctctttggggatgcaaagtcaatcaagaaggctttaactcggcatacaactcttttttcatgtaagagaagcattctgccatcaaagaaacggaaagcagatgacactgttgtctcagacagggacaaatttgctaaaactgtggttactcagtcagccacgggaactgatccaaatgcttccaatcctcctgtttggcctgcaacttctgaagcatctgggcaacaatggggagcttcttatgcacagcaggctgcatatcctgcatatggaacttacgactacagccatcaaatgccccagcctgctcctcaagcagctgcctatggtgcttatcctccaacatactctgcacagtccagtttatctactggtattcagttacgaaatcaggaattgggacttagggtatcaatttgagtttaaatggat

SEQ ID NO: 35821 - DNA, 1287 bp, Zea Mays
cgcgcccagcgtcctccctgctcctctgcagcgtgcgtcccggtgccctatctactccagccatggcgtgtctctgctccatctccctcgcggcgccctttccaggcgtgctctctgctgcatctcgccatcgacgctggtcgagtcctcgtctccaacttcctcacgctcggctcccaggttttccacttcaccggctactgctcttcctggtcgtttccatgctgcactctttcatcacgtcgctcctcaagctcgtcctggtcactgtctttagctacaccgtcgccttcattcttctcgcaagctcctcccaatctgtcgtccctgtctctgattcctggcgtcattttccaaaccccgctgctccgcttccctctctcgtgctcgccgtcccacagcttgaagccgacgaggtggcctcagcacaagcgcgcgtagccttgacagttgctcatggtggcaatgttgtgtgtttatctaagaaagttgaatttctgaagcttcaaaatggcagtgacattcgtggtgttgctgttgctaggattgaaggtgagcctgtcaacctcacggaagataatccagtcactcatggaatcactgctgctagacacgatatcctacaatttggattggcttcaacacctgcaatgttcaatagtacacttacagaagatgagagtagtcatttacctgttgttggagtcataatgatgacatattattcagtcaaggggagattccaagagtggtggattgaggagaaagtgaagctcagttcaaagttcgtcaggtgttcgattgaaggcttcaatcagagactgtcgtcattcttgcaaatattaagtcaagttgattatgcagccccttactcctcgtcgtcgatccacgccgcgtccacgacatgcccgtcgatcccgacgatctatcttcctatgcgcgccacttgcgttgagatccgaagctcccctgtcatgctcgaccctggaggtctccaacttgtcgacatcccttacgtcgtcttaaaatcccaagagtttggataaaccaacaaatcccgtgtggtgcttgccgggtgctccgcaaaaaggtcttaacaagaatcattgacgtctgcgcgaatttatggtcaatatgcttaaacgcgtcgtgggtgtatttgatgcatgataaaggtcgtaattgtatgctgcatggttaccaccataattatgaagtagtcgagaggtgtggtgaaatataggtttgaggtatgaatgatatgaagaatgtgttggaaaatttgta

SEQ ID NO: 35822 - DNA, 2892 bp, Zea Mays
tccctctcaaacaggtccttatatatcgttcttcttcagaagctgtgtcaggaagataagaagaatgtagcgtcccctgaggctctgctggcaatgatgcttgcgtgtctgcagagcaaagaggcagagagcctgaacaattcgtttggcccttttcttgtgcttggcagcctgatcagatgccaatgcgatcccatatctccccatatctgatagggaaaataaaatctctccgcgtctgctgcactaccggctggtggttgtgctcgccagcgcggttgaatcccatctcacctcccctcatctgccgtcgtccggtgactgacaggacgaggctccttttccgcaccagcagcgccctctccacttgatgatggcctggcctgctagctcgagaagaagaaatgggcaagcagtggcaatgagatggatgttcttggtttagcagttcttggtcgttgcctgaatcctgcacattttactactacagttgtgagccagaatcgcacagatctgcctgaattcttcttctgaatatccacagcaatgcgaaattggacctgcggaaaaggaatgggcaactgattggccatgaacagtccaagggcgtttgctgtaatctgctcgcgtccaaattaatccaggaggatgagagtgtgagactgacacatgcacagggatcacgccaggtatataaacacgcaagtggcccacccaccggcgacggcttcgatccgagaacaatccgtcgtccgagttggcatctttggccagaccagtatcattgcccaatcacggatctctcggatctctccctcctctttctaatctctctctctctctctctcacacacacatttcccactacctgctcctgcttcttgcctgttcggtgtgcgctgcgcgaggtgaggagcggagcagggaggtgaaggggatgaaggaggagatgatggtcggcctgtcggcgccggagccggtggggaggtggggcgccgcgccgccgcaggcgatgctggagaggatgaaggactacggccaggagggcgccttcgcgctctgggacgatctctcgcccgaggaccaggagctcctcgtccgggacatcgagagcctagacctctcaaggatcgatcggatcatccggcgctcccttggatcacaaggcatcccattgcctgctgtcgagcccgtgccggaatctagtgtctccaaggtggagggcaggtctgcagaggacaaagaaagatggtggaagaaggggttgaaagccatctcggaggggaagctggccgttgtccttttggccggtggtcagggtactcgactgggaagctcagatcctaagggatgtttcaatatcggacttccatcaggaaagtcacttttccagctccaagctgaaaggattctgtgcgttcaaaagctggctgctcaatctagcgaaagcccgagtaacactgtgccgatccactggtacataatgacaagcccctttacagatgctgccaccgccaaattctttgaaacccgtagatattttggcttagaccctgaccaagtgacatttttccaacaaggcacacttccatgcgtttctgccgatggtagatttattatggagacaccatatagggtagcaaaggctcctgatggcaacggtggagtttatgctgcactgaagtccaagaagttgatggaagatatggccgcgcggggtgtgaaatacgtagattgctacggagttgacaacgcgctggttcgagttgcagatcctacgttcttagggtacttcattgacaagggcgcatcttctgccgccaaagtggttaggaaggcttatccgcaagagaacgttggggtgttcgttcaacgaggccgtggtggaccgctctcggtggttgagtacagcgaaatggatgcggctatggctaccgaaatgaatcagtcgacagggcgactccgttactgttggagcaacatctgcctgcacatgttcactctggacttcttgaaccaagtggcaaacagccttgagaaggacagtgtataccatctagctgagaagaagatcccttccatccatgggttcacgacgggcctgaagcttgaacagtttatattcgacgccttcacatactccccgtccacggcacttttcgaggtcatgcgggaggaggaattcgcgccggtaaagaacgccagcggcgcaacgtatgacacccctgatagcgcgaagctcatgctgctccgcctccacagcagatgggtagtcgctgctggcggcttcttgacgcactctgtgcccttgtatatgacaggcgtcgaagtttctccgctctcctcctacgccggagagaacctggaagccatctgccgtgggcgaacgttccatgcgccgagcgagatctcgttttaggaggtagacctgttcatgggactggagtagcagttgtgtgatcatctgtaaaacgagcgtaaaggatgggcaggctgttgtgtactgcgtgttgtagatgtaacatctcggacggacaccaaattcatctcgagttttctctccatctctgtgttgctcccccgtaggctgtagatcgtttcgacatttgagtcaccctattaaaaacagaaagaccgttcgtccaatttaatttgctaggctgaccagcaagttgaaacaagtcatacgagaggattgcagattggcaggtacaaatgatgaagaaccgtaaagcttcgttctcccatttcagcacatgatagtgttgacgtatgatcttaaacacagcgagaaacataacgaatcggtaaaactaatacaaggatcggccaaatcaacattgacccaattcttcgtcagtaagctctcgaatactactttctagaaagacc

SEQ ID NO: 35823 - DNA, 1885 bp, Zea Mays
aggcggtggagtatgccaccaacttcaactggaaactcgtaagaggaaaaaaaaacacacccgccccgccgtccacctctccgcctcctccggtgccggcgctggagcggccgacccacgcaatctatgggcaacatgacccgctcaaactcgcccgtctcccgccgcatcgtcctctccttcctcgacttccttaactccgtcgaattagctcctggtgttgatcctgaagctctggaagttgctaaggattgtctggagtccatttttagtgttaactcaacagccactggtgacgcaatacaaccaggactgttgtttgagctatttgcttctctcgaagcaaatgaaagagaccagagcgacagccaggtggaggatacatttgaactaggagatgaactatttgcaaaattttatgctgcacttgatgaaatcaatttctttaagacatcacctgctggagctgaagatcctggtctactttcaaaagcaacacaatactttgatgatgcattactggcgatgcagaagttgggaaagaaaagggcaagcttagtagacattgcagagtcctttaaatcaagagggaatgaattcatgagatcaaaccaacaccttaaagcggtagagctgtacacctgtgccattgcattgaaccaacaaaatgccatttactattgcaacagggctgctgcatatacccttcttaatatgaacaacaaagctattgaggactgcctgaagtcaattgaaattgaccctcactacagcaaagcatatagccgactcggatctgcttattttgctatggggaattatcacgatgctctgtacaagggatacttgaaagccgccgagcttgatcccagtaatgaaaatgtcaggcagaatattgaggtcacaaaaaagaaactggctgaacaacgagtcccaccagaagagcagaacacacatgcaggccaagctcaaggaccacatccaatatttacaagtggtggtgttcctttcaatctgtttccaccaggaaatgaaggaacgcaggcacgccaagcttctaatggacttgaaggggaacatggtgaaccaggcatacacagggatgatgacgtccatataaatttggctggacccgagcaggctgcggaggctttgagagctgtgatgcagatgcttgggccacagatgggtcaacatgagggtgcacctagaggaccaggttaagcgtgggaggtaggaaaatgtgttacgtggcgtattgtggtctgcaggagtcttatacgggacattattttgtcttctccatcctgacgaagaatggagattctcgtgcgccttattattatagcagcttatctgtgtgctacaacaattccaccgtaatggttaccggcgttcaacttatctgccctgttcatattggcgtaggtgtgtcattagctgtgctggggcctgggtcttgttttgttgagacttgtctcgtaatggctgtcggtccatcatgtgatcttaaattaaagcctttttgcccccctcccctgcttttccgctgcttgtcggttcccagttgatacttggaaaatatttgcaaggttggtgaaaaaaaactgtcactggaatgaagttcatcatcgttattggctggctggcttgctggataaatcataaatgttggaattggtaaatcatatcctcttggactggagggaagttattattacgttactaagctgggtatatctaagatgtttggttcacatgtttataatgtgatgtttataatgtgatgggtaactgataacggtaaatcatgtttgtttaaatccaacgtaatgagataccatgctaagaaatgatgttggtttattcaaatttgttaccgctg

SEQ ID NO: 35824 - DNA, 3926 bp, Zea Mays
gttgttccgagatgcgtgtcattgttaaagagatatcttatccggtacattccaagggtgcaaactctgcgacaaattgatctgttttgtgcgaatacgattgcaaaatgtgaaccgatggcaaataatagagcagcatcttttgccaagaataatgtatcagcagcagctgcaataaattcttcatcccttgccccaccaatatccaactttgcttcagcatctcttgtgaagtctttaaactatgttcgctcattggttgcaaggcatactccaaagttgtcattccaatcaatagtcgcggcaaagcagtcacttccttcactttcatcatttctgaataggtccttactttctcaactaactccagaagttattagcaacagagaacatcttgaatcgaaggaatgccatagctcacctgattttatatcatcagcaagtgaaaaagttgatgtgggtgaacctgtagatgatagcaaatatatatccttcgacattttaagctggcgatggcatgtgtatggcgaacggcagtcgtccttatctgccaaagaaagcagtgattttgtgggtcttcaagattttcatatacatggttttcttgaagtcggtgctgcagctcttctagttggggatatggatgcgaaaattaatgatcaacagtggaaatattctgttatccaggaatttccagatattgatttgttacaaccttcatcttctgccgcaagtacttttgcgtcatcacaaagtcatttaaaagcaataactgcttcaaaacgcatgagatcagctccaaatcaagtctggatgaacataccaataaacacattccagcctcgagcacggcctctttttcagtacagatactacagtgagcagcaacccttaagattgaatcctgctgaaatttctgaagtcatagctgaagtttgttcagaagcaacttcaaatgcaaatcagttgattgttccatcaagattgagcacccagagtcggcaaccttcagcagatgtggcattcagtgtccttatcaaacttgtcattgacatgtatatgatggactccgagactgctgctcctctgacactttatatgcttgagggtatgctgagctctcaaaagtcatcagccagaacgaaggctcttgatttgatcctaaatctgggggtacatgcacacctgctgcaacctatggttattggagatgcgccgcttatagataaaagtgaatctgtgaaccgttcttatctgagcaatgaatacggatcaagtataaatgaaccgagggaagcagaacctgaagtagaacagaagatcagtcctgctattgatcaatttgaatcatggcttcttaaaatgctttttgaggttctccttctcctagtacagatagaggagcgacaagagatcgtgtgggcctcagctttgagttgtctattttactttgtttgtgatggaggaaaaattatcaggagtagactgggaggtctggacataagggtggttaagactcttcttgagattagtgtggagcactcttgggcaaaagtagtgcacagcaagctcatttgcatgttatcaaatatgatgtaccaagtatcagatttaactcagaatggtgtttctgacacacattttgttcctgagcggattgatcttcttggtgggattgactacatttgtcttgagtattcacgagccaactcaagggaagagaagcgggatttgttctttgtcatttttgactacgtagtgcatcaaataaatgaggcatgcttggctggtggtatttcaacctatacttatgatgatgcccagccccttgcttcccttcttgcctttgctgatgctcctgaggctttctacatatctgtgaagcacggcgttgaaggcgtcggagacatgctaagaaaagctatatcagcagcattatctcagtctgctcaatatgaccaattgaatgtgcttctggataaggttatgaggaaacttgatggaactgccagcacattttccaggattgacaatgagttttcttatatgatccaagtaacgaaatcatgcaagtgttttggcagcattaaagatggatgtgatgatgctgatgtagcgcttagagccaggctttgctgggcaactttgcactcacttcttcactcacatatttcatcatataggcaccatggatatatttggttagttgaattgctcctttcagaaatcagtgaagaaacagatggttctgtatggtctaaaatccaaaagcttcaagaggaaattgaagttgctggtagccaagacctatcatgttcagaagtctctctgcctgtttgtatgctttgtgggcttctaaagtcaaaacacaatttcattaggtggggattcctatatgtgctggacaaatttcttatgcgttgcaaattattattggatgacaatgacatgcaagaccacacaactgctgatcataataaaaattgtcttgataaagcttttgcggttatagatattatgaatagtgctttgttacttgttgttcaaaacaatgagacggaccatatcaacatattaaagatgtgtgacatgctgttctctcaattatgcctgagaattccatccacaaatgcgatgcaagttaggggtcttcagtcccttggtcaactttttggttatacatctaagaacatcgatagtcatttggaaacccttgcatctcaccaaagtattggaaataagaatatttgccggagtgagacattgcaagatattggcatagatcaatctggtcaatccacttctttctgtgaagcatcaatggcagcactgcttctgagagggctcgcgatagccccaatgcagcttgtagcccgtgtaccaacctctttgtttttctggccattgatacagcttgaaggggcagccagtgatgacattgcattgggtattgctgttggtagcacaggaagaggcaaccttcctggtgctacatcagatatccgagcagcactccttttacttttgatcggtaaatgcacagctgatcaggaggcactgaaagaggtagaaggcaatgagttcttcaggggtcttctggatgacacagattcaagggtagcatactattctgccgcttttcttttgaagagaatgatgacagaggaaccagagatataccaacggatgcttcaaagcctcatctcaaaagctcaacagtgtaacaatgagaaacttctggagaacccataccttcagatgcgtgggatattgcagttatcaaatgacctaggagttcaatgataagatcgtgatgacatttcaatggataaagctctaagttagaatcactacttctggctgtgtttattgcagagaacctgaagatgttccgaactaagatgctatgtgaatcatgtaaattattgctttggccagatgcatgtacagatccatgaatttctttattctttgttagactagtcacagtccaagggagtcacagattaacaagataatctgatgatcatcctgtgttatggacacagtgcattgtggtttaccaacctggacgacttgacaaaggtttaagccaaggtggcgtagatgtgactccctacaattttgtattgcagaaaccgttgagatctgaggcaaggcattatatatattttttgggcgagacatgctcggttcaataaatatttgtgtgttcgctttgcatatatggtaactgatcagaggagtgtagatttgtattgcggagtaacaatgtaaatgttaggtttgaatatactgatttcgagatgatgtaatccttctatactagcttagcttccatgttggttgtttaatttcgataagaggttgtttacttttatatgctgtttggtttacatatttgtgacgtgatgaataaccgataa

SEQ ID NO: 35825 - DNA, 245 bp, Zea Mays
tgagttacacctttttcctccttccttcctcccaccaattctccaattgaaaattgcacccacacgaagaagatccgacgaggaagaacgacacttggagaagaggagatggggggggtggcggctagggttgaggagatggctgctgcaagaaacttgagaatggagggggggcggatgcagaacttggggaagagagaagagggaagatggggggagggtggcggccaaaggagggaaggggg

SEQ ID NO: 35826 - DNA, 1756 bp, Zea Mays
gcggacaggccgacacgttggagaagaagataccaaaattgcctcgcgaggacacaagaaacaagcaagtgatgaatagactctccttcctggtcacataaggggcaagaattaggatggggaagacccctcttagcgagccgaaatcttaccaaaaaatttatgattggcaatacatattctgccttgagctttggaccagtgttgtgtgcggatgtagttctgaggaagaattccgacctctagcttatccgttgacacaaataatacatggtgtggcatgcctcgtacctagcgcacgttacttccctgtgcgctttaggtgtgtcagaatgcttaattgtattgccgaagccactggtaccttcattcccgtgtcctccctgctgcttgatatgcttgaaatgaaagaacttagaggacgtccagatggtgttggcaaagccgtgaatttgttcagtgttaaacaggttgacaagaaaacagtaaagacacgtgcctttcaggaagcttgcatttattctgtggtcgatgagctggctaaacatttgacccaatggagctactccattgccttctttgagatgtcctttattccacttgttcggctccgaagtttttgcaaaaccattaaagcggacagatttaggaaagagatgaaggatcttatctatcagatagaggccaatgtcgagttcattaagtcaaaacgagtggggattgcattttcacccaatgacccagctgtagagtcatttctgcagaccgaaaaggaagaacgttgcagccctctctcaaaatttgttgctactttacaccagagagcgcaagacaggatggatgctctggatgagaccagtgtgattgtgggtgccgagtcctcaaccttctcacggaggttatcagaagcgcagaagcaacaggatgagcaggacgatgatgaaggcactatcgctttcagtaagaactggctgtctgaaaataagaaacccaagtatgttctggcttacctctttttttttcccattacttggcgtggaaaacacaatcatactgttgttcggtgtgcagaaccccaaaggaggataaaaagcgaccccgggaggatgatgatgtcgcgactgaggaggatcgggttgaggatttggtcttgagctcagatgaagaggatggcaacaatgaggaagcagacgatggttttgttccggttgaaggtgatagtgatgaagactttgtagaccctgacagcgaatataagaaacaaaagaaggcgaagctgaagaagaggaacaagcgccagccatttctgcacaaggcgccctctagaacaaaaagtaattcagggcccaagaagaaggccagacattagttatgcctgatagggcttggcaaatatgctgccgttgtgatgtatgcttctgagttccgaccgataaaaacattgtcccttgagtggaaaaattattatattttttcaagaaaaatttcaagtctttttttgaccccaacaggactgagatagaatttccaatctgagttttcatttcagtgctcaagggtttacatgattcaaatgtaaagggtttacattgccatggaaaaaattgtacaccaaacatcacaaatatctacctgttcctggtagtgtttatatacgtctagcatgggcgaatgtccatattattgtctgatttgattcatggatcgtcctttcagttctaaatgaactgccaagggctttccacggtaacttgac

SEQ ID NO: 35827 - DNA, 2909 bp, Zea Mays
acttttgtacttttcccccccctgccctccacctccactccacccccgctacaaaaggtgagagggaggaggagcctctgcacttaagttttattagtccttctcatcagccatcagagcccctctatctccgggtttctgttaacgagtattgtattttaattaggagggagtggttcagctggtgcgcgcagtggtagctctcctcatctttgccgccttgcccatttgctggcgcagtgactgagcttccttgcaaccccacttgagaagaaaccaatcctcaagcgcaaggaggcaaggcaaagcctactcataggggctgccgagctgaaggagcaaaccggaggaaaaggcagtagtagctagctagcagcaaccaccaaagaagggagaatcctccaccttgctcttggtggatgttcttcactgcattgccttcagccactccgtcctccgcttgcttcttgttcgagagtggtacctgctgctgcttcttcttcttccctttttatctctgaaatcttttgccacacatccatctgcttgctgctgtgtgtctgtctgtctgtctgattccttatttccttctccttctccctctcccacctaccctccccaaccacacatcacacccacacactgtatgtttactgccattggtaagaaaataaagaaggggggagtcgagtgagcagtgggaggtgcccccagctcgcctctcgggtctcggcaattattgccacctttggagtttggagtcctccaataggagtctcctccgtcgtcgtcctgttcctgtgctgtctgcaaccactggcactgccccgcccccttccctcctcttccttgccttccctcgcctcgtccgcctttttctcggaggagaggaggtgcttgcttccatccatccatccgtgtcctccgctcgctttaaagcttaacccaccgctctgcccggcgggcggccgagcacccaagaacccagccccttgtctcgtcccttcctttcttgccgctcccgcccgctgctcttggattctttaattgcatgctgttgctgttgctgccgccgccgccgccgccgctgtgatctctctctctctttcccgtcctccaaagctttttggttgccatcaactttgcttttgctctctgggcgagcagtacacagctgttgttccgtctccaacggcctgcgcacgcagcagcagccagcagagcagaaaggcctcccaaaatccaccatttcggagccggccgccaccagcgacggaggtgcctgcctgcttgggttgagtcccgaggagagagctgctactccctgtgcaaggatcccgacaacaggcaggcacgtacacgcgcgtcggcctggggacgggctgtcgccatggactgggacgccaagatgcttcctgcctgggacctcggcacggtggtcgggcccagcagcagcgggggcggcgcgctggacctgaagctgggcgcgccgacgagctcgagggcggtgctcacggccgccgccggtgccgcgcccgcgctgccgtcagcgaaccctcctccgcccccgcctccgccgtcgtcgtccgcgccggcgaagcggccgcgcccggggctcgcgcggcaggcggtgcccgcgtgctccgtgcagggctgcgacgccgacctgtcccggtgccgcgactaccaccgccgccacaaggtctgcgaggcgcactccaagacgcccgtcgtcaccgtcgccggccagcagcagcgcttctgccagcagtgcagcaggtttcatctgctcggggagttcgatgaggtgaagcggagctgcaggaagcgcctcgatggacacaaccgccgccgccggaagccgcagccggaccctctcaaccccgccggcttgtttggcaatcaccacggagtgacaagattcacgtcttacccgcagctcttcgcggcgtccatggaacagcctaaatggtcggtggtcaagacggaggccgacgtgttccaagaccagtactacccggccgtccacctcaatggcgctggcggcggcgccatcggctcccacttccacggcaaggagcagaagcacttcccgttcctgaccagccacagcaacggcggcggcggcggcgacgtggcgaccgccgcggccctgggctgccagccattcaccatcaccaccacggcgtcctcagagagcgacagcaagcagagcaacggcaactgtgctctctctcttctgtcagacaacccgacatcagcacagacggccatgatccctactaccgcgcagtccctcgccgcggcgatgcagtacggcggcagactccctggcagcgtcagcgtcagcggcggcggcggcggcgacgtctccctcaccgggatgtcgtacatgagggtgggagacagcaggcaggcgtccattctgacggcgtcgtcacccggccacgctgcggtcgcttcccctgtcccggccaccaccgcagccgcaacgccgccgccgccgccgcagctgctgcagtaccaccatggctatggctactaccatgtgagcggcggcgagcagggcaacaaccccgacggcgccgccgttcacgcccttcccttctcgtcgtggtagacgagctctcctgatggaatcatgtgcgctaggcaagcagttgctctcctgtggttcaccaaacgtatcggttgtaatagtaggctcgatcatactggaaaccgtgacaagttgtccattttccaacttatcctgataggtctaatttatggaaattcttcctaagttattatgattcggaaccgtgtaaagattccaatcctgttttgtttgagttggcaatccgcttgctcattagagcatctccaacagaatgggtaaaagctccccaaaaccatttttagcacaa

SEQ ID NO: 35828 - DNA, 1314 bp, Zea Mays
tctcccagggacaggctcgtaatttttccactggccatcgcacccattcataaaaccctaaacccaggacccaggtttatcggtgaggcgagccgcgagtggaactgtggaagcgttgagcttttttcttctttgtcttgctgcgcaagaagaagggaaacgagaggcgggcggcgatggcgaagaggctgctcccgtcgctgaaccgggtgctggtggagaagctggtgcagcccaagaagaccgccggcggcatcctcgtcccggaaacatccaagcagctcccacctcctgcattcgtgaagaacgactgaaccagccgccactcgcccgtccgactccggctccggccagctgcctctgtccctccgccgagctgcccgtccgccttcgtccctccggcccaggcgagcagaactccgcccccacccgccccgagccgagcagcagccagcagagccgcatcgccgccggggaacgctgagttgccggtccgccgccctgagaagatttccgtcccagcagcatagccgcagcgccgctgcccgtcgcctcaaggcaagtccgagcgccctgtcacaggccccagattaggttgatgtctttcctgagactgttgcctcaaaggctaccccaacttatcaggcaggtggagcaagatgttgagactgtaatccacgttctccagccgggtccaataggaattgtggagcacaaattcacagacgcggagatcttagaggccagggctacagtgaaaagagcagtggataattggcgaagaaattggacccttgagagaaatgttagcagataaatggaaaaaatatacccctggtgtcttctatcaacagtaattgaaataaatagggtgccatggctggatgcagttgttgccattagttagatttgagcacgatctgcttatcgggagttatgttaactgttctaaatgatcagtctgtttctctttgtttcatggttcgactccgattcattccttgtttggaaatgatctttttttcatcatactactatatgggacattttttttttgttcattgcattgtcggtagccggctggcatattggatgtgatcctttcttttgatgcttcagtactttaactgtagtatctgaagagatacttgaagatcagtaacttcatgatccttgaccattgtgtcataatgccatactattttcactaactatcttcacctgctcatgtacaatcctggccctctgaatcggtttttgaagacaagaaggtttttgaagacaataaaaatctaaaagactgcatgatataat

SEQ ID NO: 35829 - DNA, 2354 bp, Zea Mays
cttgggcaacgtattttgttttctttccgccctaatttacacggctgtttttttatatttaagctcacgaccacctccaaaagcactatagcgatccttttaaaacccttattattcggactttcacacccaaaataaaagaaaaaaagacatccaaggaaggaaagggtggaggtggaagccgcaaaccaaaccctctctgcctcgtcctccctcctcctgcttcgtgcttccccttccccttctcgtctgcggcgccaagctcgagctcatcgccaccgaggtcgtttcgatctgggttttagcctatccgcgaggaaggtaaattagttggagacttcgtgatggctgctgcgaagtcgggcgtagacgtggaaacgagggacggcggcggcggcggctccttcagcgaggagaggtttgttgataagctcaacaagctcaacaacacaacagcgagcattcagacactttcacattggtgcatttttcaccgcaagagggccagaaggattgtggacacatgggaaaagcatttcagtactgcaacaaatgataagaaaatatcattcctgtttctatcaaatgatatcttgcaaaacagtaagcgcaagggaggagattatgtgcatgagttctggagggttctacccagattattgaaacatttctacgaaaatgggggagaagaagcaaagaaactagtggcaagactaaaactggctgttggtggtatgcctgaaaagattgtgactgcataccaatctgtgtttgatcagcattttgatgaagacacagctttaaacaagtgtaagagtactgttagtgttctggaaaatctaaagaaggatatagaccttgctagtaccgaaggtgatccgcctgcctcaacaatgatttctgacctacaagaacaggaaacaatcctgaaacactgcattgcacaacttggaagtgtagatgcagcgaggatatcactgataaaccaattaaaagaagctctcaccgaacaggagtcaaagtcagaggttcttcgcagccagttgcaagttgctcgagcagaggctgaacatgccattcaacttaggcaacggtttggtggtgccgttgtcgcaaatggcacaggatctagttctagtccgctgctgatgtctcctcagttacagtcgctgaatccagcaccctcactcgcccctccaatcggtgcagccggagatgagcccaagagaacggcagcagcaatggccgacaagctggcatctctgtcagcgccggtgcaggtcctgagctccatcttctcatctttcgtcgccacacacggcgcttcgctatcttccatgaacagcggatctcctcccagagaccaactctccggggcaccgccgggcttccaggtcgaaaagaggcccaggcttgagagaaccgtgctggccagcgacatgggcgcgcctccattctccatgcaagcaccacggctgcagcagccggttggatcgatgcccacacaagcagcgacacagatgaaccaagcgccaggcctattcgcaccaccgcctccaccaccgttgccgcctcttctgccaccgctcctgcaacagttcggtcaaagcgctggaggaatgatggggatgggaccgttcgggatgatggctggctccatgccgcctcctccgccgatgtccagcatcatgccagcaggttttccagcgccaagcggtccacctccacctccgcttccaccggctcagacccaaccccagcagcagcagcagtctcctcctcagccgccagcgccgcagcagtcagcagggttcttccagacatcagcaggcatggggtacttcccagcagtgcaggtgcagcaatctccgtccgcccaacgacaatgactctatggtggcatgacatccatcggggcgggcttataaaaggcagcacctcgtgctaaattttgtacattagacataattacctggtgtcgagcttatacgtgactggccctgctgcaagagaagcagcaggaccaatggtcacgattagaaaaaaaaagattgtagaataggcatgggggcttttgtttggtccgagttgttttaactcttcctgtttgtgtcgtgtgtgcagtagttagactttgcattgatcccctgaggcgcaagaaagtggtgctggaattgttgcttaatagagctgccctctgatatagcagtgcccttttaggggctggggcgctgggctgaagcagtgttagaacttaactggtcatagtgtcatagatatgatgtgaactgcaaatacttgtcctttttgtgacttaaatttattttctattttctatttagttttgaatagag

SEQ ID NO: 35830 - DNA, 772 bp, Zea Mays
ctagctctgatgctgacggtgccacagagatgacgctagaggatttccttgccagggattcctgcgctagggcggtggtgatggaggggaacatggcgttggggttccctgatggtgatggagatgtggcagggagtgtggtgggggagtgggggacatgaggagcggcaggaagcgagcccttctagatcccacggaccgcgccgtcatgcaatggtagaagctcatgatcaagaaccgagagttcgatgtccagggataggaaacaggcatgcatcgtagagacggattcgcaggttatgcaggtcgaggaggagcatatagaaccattaagggagcaggtggcagcaaattttgatagacaaccttgttggatatgatactatacctacaaacagcttggtgatttctcctggtcatggttatttatacaactttgagatgaaggagctttatggtcttagttataggcatgaaacaccagaaggtcctacaagatttggagactagcttggatcatggtgctacgttttcaagagctgctagccaacgccaatgcatctcgtttaagatcgtgcatgtgacatttcctctcctctcctgatgttaggccttcacaacttgtgttatgtgcggggcaaaaaaatccactcttttatatagcaaccacctgctgttaagaccttttgactctagatcctaaggttgtaaactgtgttctctaagtatctgtgcagccaacatcttttattggcccaaaaatatatttgat

SEQ ID NO: 35831 - DNA, 2629 bp, Zea Mays
cgcacgaaatccaaagcagctaggccagatcggcgaagggagtgagtgacgccactcagagcttgctcgagccaccaaagaggccaagagcttagcttttacctaaagcagctgaggtacctcaccatcaccaccaccgacaccaactgcgccgaggccggaggcggagtagagccagaccagaatggtattggggggaggccctctaggcgccatcattggccgctacccctcctcctccgccgccgccggtgacgatgaacaaggggacccgggacccggaggaggcgtcattcgccatgaccgcaagtgccgggactggcccttcctcgtcctcttcgccgccttctgggttgccatgattgtcaactccagcttcggattcaaccagggcaacccactcaggctgacatacggactggactacaaagggaacatatgtggcagcaggcatgccgatcctgatttgtatcagttagatgttcgctattgggtgaaccccaaccaggtctaccaaagtggcctcaaaaccagtcacatcgagctacctgatgctaaaaccatctgcctgatggaatgcccacttcctgccgaagatggcttgaattttgtttgtgattatccagaaggtgacatacgcctctctgtcgacgactggattgacagggactacgattacttcgagtacctcacaccagacatgaggaatagttctcttcagctgcagggtccatgttaccctgtcatatttccaagtgtaaatgtctactggagctgccagtttattgcacgggcatccaatgcctctttaaagcattggaaggacatgggtggtgtcaccatcgacgaaaacatgctaatagacagaacaattcatgatgcaattaatagcaaatctgccgtcatgaagtggtggtcttcaatgctcttgtggtatctgttacaatgttcttctatataaaagctggttggattggccatgatcctttgactgttgtaattggtgaaagtgatccttacgttagcataggtggacgagagataaatcaccttcatgctgcttccgtcttgatgacagtgataatgatacttgctttcctgacttcaatagctatcgctcggcgcattatgaaagcaacatcagtcctaaaggttgctgcaaaggtcgttggcgaagtgcaggcacttattatttttccagtcgtgccatacttgatcctcgctatcttttacactttctggttttcagcagcacttcatcttttcagcgccggtcaagttatacaaaatgattgcaatacagattgctgttcctacgatctgaaacttggcaaagtaaattgtgacagatgttgtggctacactatccattacaccccacatattggcatcgccattcttttccatctttttggctgttactgggcaacacagtttttcatcgggtgttcttcgactataattgccggatcggttgcttcatactactgggcacgcggtgaaatatcgcacgatatccctttccataccgtggtatcttccctgaagcgcttgttgcgctatagcctgggatctgtggctctgggctcactgatagtgtccatcgtagagtgggtgcgattcatactagaatcactacgccgcaggctgaaatttgttgactctgcccgcggaagccggttcgggaagacggtatcatcctcatcccagtgctgcttaggctgcatcgattggaccctgaaatcggtgaatcgaaatgcctatgtcatgattgccatcacagggaaaggattctgcaaggcttccgtgctagcgactgggctgatcatgaacaacgtgttgcgcgtcgggaaggtgaatgtcattggggatgtgatcctcctgttgggcaaactttgtgttagcctgttgtgtgcgctgtttgccttccttatgctggacgagcacaagtacagatctgggcataacaagatctcatcaccgctggtccccgtgctgctgtcgtgggcgctgggctatatagttgcgaagcttttcttcgcagtggtggaggtgtcgatcgacacaatggtcctgtcattctgccaggactcggaagagcatcaggggaacgcgcggtatgctcccccgctgctgatggagacattggacgaggagagcgagttgcgaaggctgacacaggggccatgatcgatcttccaaataggagacactgaactgaatggctgtgatgttggttgcatgtcttttttatatgaatcatcactggggttgatggatggagctataggtgcaagcatgtctttttatatgtatcagctaaatacgaggaatagaatagaatagggcttagtgctggaattgaaacccaccgtctgtaatgtatgttcggctttatttgatatgtcttttttgtttatatattgttagactatgtgtgtggaccgacaccactgttgggctgccgacccattagggttagggttgtgagtctatatattgcactctatcttatatcaatacatcaaccaatttaggacttgttcggttagctctcaatccatgtggattgagtgagattcatggattgagtgggattggatgtgtttaaatctcaagcaagttaaag

SEQ ID NO: 35832 - DNA, 4336 bp, Zea Mays
atcgtcaccttcctcttccttcttcggttcttcgccagccgtgcgcgcttctccactgccctggagacaaaggagcaccccgcgatctcccggcgggacccggccccacctccccgcccgcgtgcctctgaaacggagaagctgccggttcccagccggccaggctactccgactcttcctttccctccagccggcgaggcgtccaagcggattagcggagagcgtcggggcggcgacatgtgggtgttctacctgatatcgctgcctctgacgctgggcatggtcgtcgtcacgctccgctacttcgccggccctgccgtgccgcgctacgttgtcgccaccgtaggatacgcatggttctgctccctctccatcatcatcctcgtccccgccgacatctggcagacattaactgccagtgcgaaggggggcattggattcttttggagctggtcctattggagcacatttatcctaacatgggctgtagttcctactatccagggctatgaagacgcaggagatttcactgttaaagaaaggctgaaaactagcattcatatgaacctgcttttttattcaattgtgggagccattggccttattggtgtcatattactcttaatcatgcatagagcttgggatggtggtattgtgggatttgcaatggcatgctcaaatacctttggattggtgactggtgcttttcttcttggttttgggttaagcgaaattccaagaaacatttggaaaaatgcatactggtctcaccgccaaaaagtactttctcatagagttgccaaaatggctgtaaagcttgataatgcccatcaagaatattcaaatgcaattgttgttgctcaagctacatcaaatcaaatgtcaaaacgtgacattttgaggccttacatggatattattgataacatgctgtctcaaatgctgcgggaggatccatccttcaaaccttctggtggtagattcggtgaaaatgatatggactatgatacagatgataaatcgatggccacacttcgacgccaactcaggagggcccatgaggagtactataggggcaaaagtgagtatatgacttgtgtcatggaagccctcaaactagaagacaccataaaaaattatgaacgccgtgatgctagcggatggaaatatgtatcaagttttagagacagacgttcgggcacacttggaccaattttggatactattgagttcatttggcaatgtatactgagaaagcagcttcaaaaagcatttgctgttatccttggttgcatgtcagctgctatcttgttggctgaagctactttacttccaagtgttgatctatctctcttttctattcttataaaagttgtaggaaaacaagaggttttagttcagaatggttgcaagatatgcacctcctatctcttataactttctgaatctcatccgccttggtggcaatgctaaaactacatttgagaagagaatggggaacattgatgatgcagttcctttctttggcagaggcttcaacaagatctacccactgattatggttgtttatacgctattggttgctagtaatttctttggccgtgtgattgactttttgggaagctggaaaaggttcaagttacaacaggaagaagagaatatagatggtttagatccctctggaatgattattgtacaaaaagagagatcttggatcgaacaagggtgcaaagtgggtgagcatgttattccattggcaaggaatttcaatggcgtgaacacagatattgaatcacaaaatgtgccattggtgcgtggaatgatttctttgcttacataggagattcaactatctgttgttatcttttgatctttttgaaaccctctcttctccctccttttgtgggttcagagaatttctgaaaattgcatgcatgatcttttttacccactggttatggaaggtccaaatgataacccttgcccttgccccaaaatcctggtgggtcacataacatctaatgagattacatcatgttcatactaaacggaggcttctttgctgttttatgtagtcctgtgtcgactaggtgcgcgaaccatgtcaacatactctgaaaactgaattggatcagcacatcagttaaactaagggggcctttgagaagaggtttatttggtctttttgtccaagagagatcttggatggaacaagggtgcaatgtgggcgagcatgttatcccattggcaaggaatttcaatggcgtgaacacagatattgaatcacaaaatgtgccattggtgcgtagaatggtttctttgcttacataggagattcaactatctgctgttctcttttaatctttttgaaatcctctcttctccctccttttgtgggttcagagaatttctgaaaattgcatgcatgatcttttttacccactcgttatggaaggtccaaatgacagcccttgccccaaaatactggtgggtaacataccatctaatgagattacatcctcttcatactgaaccgatatttggggaggctgttttatgtagtcctgtgtcgactaggtacacgaaacatgtcaacgtactctgaaaactgaattggatcagcacagcagttaaactaaggggcctttgagaagaggtttatttggaccaattatgtttttggaataaaatatttgatggatactccctccatcctagaatataaggacttcaaatttttggacaaattaagcagcaatgaagaagtctatgtgcccccttcttaaatagccaggccaactcctgttggtttaatttctggccatcttgggttaatccatggcacaaaatggctgattttaagaagattgcacagatgagttctcagaagtccttatgttctaggacggaggagtatgttttagtctagggatagtttagtgggtgagatgagtgatggactgatatctttcctttggtcatttgcagctgaaatttaccttatttttgttacttggtatctactggtttctatttccatttggctactgtgttgcaggttggaaacacagtggagatgaaagtaggggcagcttcttccagaaatgatgggagagctggccagttgaaatatgcaaacagcagggagactatcgccagcaaatacacttctattagggaacagaaccggcagtcagggaaggcagtgaaaaaggaaatttcatcaaactctgtatctttgcttgaagaaagaagttctgagcagtggtccaatactggtataccaccaactggtgtgtctgcaacatgggcctcgatgaagataggttttcaaaatttcaaagccaatttgggttcgaagaagtttcttcctttgcgccaggatccaggatttgttctaaatttgagtgtctcttcacctgaatctcttgatgacatattccaaaggttgaaacgacggcctgcaaatgtgcttgtggattaccttgatgacgatgacaacaacaacacacgagatatggatgtgcatttccaggatcaatgaaataggttgtgatattcttttaggttcagaatatgcatgcacagaaaaactaaaaggattggtatagcattagacgctcaaagaagatatagaggatgtatagatctgatgatggtttggtgtgattcctggaatctcaagacgcctgccatctgaaaaaacttcaaaatggaagtaagatatgatgacaagctgactgcctttgcagaaaggcttgagatttccccaccaagaaggtttgggacttctacttcactatatggggaaaatatcctatgcaatcacttatcctggtgcaaacatgcaatcaagcgatctgatgcatctgatctagatctaattatgactgttattttatatttaaccccttccacctaaaacatagtacctattttacttttaactccttccatgaaaccgttggatctagattggatgctctcgatagtttgattgcacgcttgtaccaaaatgagtgattgcacaggatatgtcctccactatatgcaggtaacattgttgacttgttgattatcttaccttttttgaatctgtattggagatgctgatctgtgatcgaagccaaaggatgtaaatgtgtacctaggattccatgtgaaggttaacgtgcctgagttgtaacctgtaaaaacgtactatcaaatatatacctaatcgggacaaaaaccccaagtgtttctgtgtagcagacgtcagacctgtatttgacggcaacttgtggacacttcttgtctactgcctgacataaaaaatgcacatttgtacttcat

SEQ ID NO: 35833 - DNA, 735 bp, Zea Mays
cgggcacatatctatactatatattgttaacaagggccaagcattgcttatggattgtggggaatggaaccactctgttcaacagcaattttgtttggcaaaagattgtcaaggacacaagggatagaggttgtttttaaatgccactgatgagaaggagttgttgaatgcaattttcaagcttgctgttgagtatcctcacgcggacaatttagctggcgaggagacaaggcagcgattgagtaccaggataagtctattcaatgtcgctgaggcaacagttacaagatcctagaagaaaacccgtggcagctctacactacaataaaggtgataaatatgtctcacccaatggaagacatgatcaaggtagcaagatgttgaccccatgggtccttttggtggaataatgatagagtgcggcaccaatcaacctattgagaaagtgcttgcagctgaagatgcagcgcgaggatgttgcagcattcgaacaacgccaacgagctgctcttgcgccggaagctggaggagcagcagcaggctgccgaacttcagcacgccattgagctccagagccgccgcctcatgggtctccagctgctcgacctcaaggctcgcgcagctgcgacagcagcggcggcatcggcactgccaacaccagttgccaatgccttcgcgtccagccatcctttgagcaccatggcagtcgagtcgccactagagtccggagagtag

SEQ ID NO: 35834 - DNA, 1778 bp, Zea Mays
cagcccaataacatcttgtcgtcgtcccgactcaccgccgccgtcatcatgagttcatgactggcctaccgatcgccgcaccaggccctcgcgcggggcaatagaactatagaagtcctcaccccctccgacgacagcgccgatcgttacgccgccgcgatggcgtcgtcgttcaagccgcacgccgcaccgaagaggcgcgccctcgccacgttcaacatcggggctctgcccctggacctcctcgtgtacgagattctgctgcgcctccccgccaagctcctctgccgactgcgcacggtgtgccggttgtggcggtccatcctctctgacccgcacttcgccgcggcccacgccatgcggcacccggggccgctcatcatcgccgccatcgatgagagacccgacgtgcacgtcaacatcatggatctgtcagggcaaatcttaaagcaggtgcgcggcgtgccgggtcagagagtcgtgagcacggcccttgacctcgtctttgtcaagaaaaccgatagcagcagcagcagctaccgattctgcaacccgtttagcggagacgtgcattacttaccagatcaattgctcaacccagcaactggagctgtgtatcaaataccaaacagcttcgccgaagaacacatagatttcacatcgagctttatttcacagtccagatatctgtttggtcaggttagcagcacaggggaatacaaggtgttccggaagctttaccatctttccgttcagtttggaggcaggcagctgctcgagatctgcacagtcaacggtagcaaccacacagggtggagggcagtcacgcccctcgaaaaaaacattcagtttggtgtgttcaccagtgtggtaattaatggaatcatctactcccaatgttttgatccgcaccattctatcacttatgattgtcgagctactgaggaagacttgataattacatttgacattgagactgagaaatgggggccatttatgcgaggaccccccatcagcttttctgatgctgctgctcaggtgttcaatgaccttcggcttccacctataaagcagctaacattagccaatctgaatggctctttagctgttgtgcatggcccagctcccagtatggacatttggattctgatggactctggtaagggtctctgggtcaaacaatacatcatacagttcaaagagtatgccagttttcaatatgtgcatccattggtggtattacgtgacggaagggtggtcctatataaagaagacatgcagcttttacagatctatgacccaagaactaacacactcacagattccgtggaggtgtgccatttttctgcagttgctttgtttggaggaaatctactgagtttataatatgtcttgcaggatcgcatctattgcttcttgtgctcatcgcagggctgtctagtatcagtggtggcaatatctttagctatattctttctctttgtcttggccttgaccttcacagctttagatgctggtgctgcaccacttgtgtgctctgtagatgttcaggttgatttgagccttctttggatctgtaaaaatgcattcattttagttaaacttcgagagttataccgtttagtaccaacaatttattgatttaaaactgtgagaaaattagatctactcataagccaatttttatgtgaattttcatgcatttgacaaaatcagatatgtttacaggatgtttccctacaagcgaaaatattaaatcagggtcatttgcctttaaa

SEQ ID NO: 35835 - DNA, 1477 bp, Zea Mays
cccggcctctctgcgctgcggcgatgcggtggctacccaggctgctctctcactccatcgaggtcgggagggcctccgcggcggggaggtccaaccctagtctcgtcaaggcaggatcccatgggttcgccagcggcggctgggatgggtcaccagcggtgccccgggagtggctgcggaagctgtgggtagacgtgctgaagaagcagaaggaggacgcgaggaggtggggcatcggcgcgtcacccgggaacgccggcagcggtgcggagccttcgctatgcgcgttcgcgaattctgtggaggctgcaggagcgaccagggaggcaccttcaaggagctatcagtacgaatacaggggtctcgccggctactcagaacaagacggccatttgttgcagaaataacggatgctatgggtaacgagatatttaaggttcgtaggccattttggtggatcaacagctcaatttatgcagaagtggatggagataggcgtagtccacaggcgttggcacctttggcagagaatctatgacctgtacttagggaataggcaatttgcagttgttgagaatccaggattctggaactggacctttagcctagtggatgaagatgacaaactgttggctcagattgatcgtaattggaggggcatcggctttgagctcttcacggatgctggccagtatgctatccggtttggtgatgatgtacaaagcgacaagtttgctcacttaccgtttattatatctggctgactttgcctgaaagggtagtggctcttgctctcgccatttccttggacagtgattacttctctagaagaggtggctgaggacttccgtttctgattgccacggagtaggcacacgaaccaccatctgccgtatacaaggaatttctttattctcgttcctgaagaggctagcagttacactcattactgttgtcaggtgatcggcatcatcgccagaggcagaaactgtttctgccgttctgcgtgcttttgactcattactgctgtcaggagatttccgaagccttcctttcccctttgtttctgctatggagatgcacacatgcgtggcttgtttggatggctatggtcatatattcctctcactccagatgtgttgaaatagtttggtgttagatacaggctaaactatttcatgacacatggattaaaagatacatggacatccaaacgataccgcatttaagttctagtacactggagcctgatgtttacagtgcaactcgtctgctaggctacttggatgtgaatgtatattgtttaggaattagatccattcggttagcctggctagacagttagacctaaaagggccatttctggtactcgttccgacgggaacaaaacgaggcctgatgtagctgtcagctgtgagtactgaattgatagttccaaacgattctgggtcagacaattcagaacagtggaagccac

SEQ ID NO: 35836 - DNA, 1871 bp, Zea Mays
  misc_feature (1871)..(1871): n is a, c, g, or t
atcgactttacaaattacacttggtcattgcgatttccagtttcctacacagcagtcccggactcccggttcccccactcgcgcaagtcgcaagctctcctctgcggctctgcctgtctttcgtttgctttgccattgcctgactagtgcttactgcctagccgcctagggacgcgatggtgttcaaggggcgcttcttctcgtcgcgacacaagtcatcggaatcctcgtcaagcccagacggcagcaacagcccgcgcacgcctacctcggcgccggcctcggtatccgcggcgtcgccggcgtcgtcatcgtcttctaaatccgacaagaagaagactaaattggagactcccaaaaagcgcgacaagctctttggttccgcggctaccgcccccaagagcgccgcgtcgtcggccccgtcaagcctggcgggtgacgggaggaaggggcccgtgctgcatcatagggacgcgggcggcggaggcgggggtggcgcatcggcggccgcgctgtcgccgatcctggcgtcctcactggggctcaaccggatcaagacgagatcccggccgctgccgcaggagggccaacgcatggctgccgcgctcgccagcagcaacctctcgcacgggcagggccaagcggaaccgtcggctggctcagccggagacggcgggagaaagggcgtcagctcctcggcggacacgagtagtagcagccgcgggatagtgaaaacgaccgagctggcgatgcgaagtgcacctgggacgaacttcggagcaggagggaagaacgctgtaaaagtgtgtatatgatccgtgtgagacaccaaaggaatccgagtctccgcgctttaaagcaattatgcaggctactagtgcaccaaggaagagactccctgcagatataaaaagtttttcacatgagctgaactctaaaggggtgtgcccatttcctttttggaaacctcggggcatttacaacttaaaggaggtaataaaagttatccagatgagatttgagaaggcaaaggaagaggtaaattcagatttggcagtttttgcaggagacttggttagcgtaatggaaaagtatgcagactctcatcctgagtggaaagaaaccttggaggacatgctaatacttgcacgtacctgctgtgtgatgacacctggggaattctggcttcagtgtgaagttatagtgcaagatttggatgaccatcgtcaggagctctcaatgggtgttctgaagaaactatatactcggatgctttttatccttacaagatgcacaaggttgcttcagttccacaaagaaagtgggtttgctgaggatgaagttgttatccatcagcgtgataagattatacagtctgcagataggcaggttttaactcaaccaggtgcagatggtacaatatccagagccagtaaaagtgaggcaagaaaatcatacagtcaggagcagcataatttgaaatggaagcgcagccaggagataaagcctgttaagcttcttccaccacttgacacagatgttaagaaagatgctgtttctccaagcaaagaacggatatcttcttggaaaccttttccatcgcctaatacaaaggtcccaaaggaatctattcctactaaatcggaatcacctaataagaaaactgatgcacactctacagttagtagccatgttgaattaagcagtcaagttgaatctttaccacaacaacagcttcctgacaagcatcaacataaaacttcatggggacactggtctgaccagccaaatatttctgaagagggttcaataatgtgccgcatatgtgaagaatatgttccgacacactatgtagaagaccattcaaaggn

SEQ ID NO: 35837 - DNA, 3713 bp, Zea Mays
ccacactagcactgacacgtcggcaggccacggaaggaggcggaaccattcgaatttcgaacgccgccggtcgctccctgttccctagctctctcctccgcggctccgcctccggcctccacggtttcgcaggcagagatgaagaaggcgtccgcggcgtcgcgctacgcggcctacgactccccgtccccttcgccgcgccgcgcggcgccttccgcggccgccgcgaccccgggagcagcgcacggcagcagccgcgccctggtggtcgcggggagatccggccgcgatctactgggcgccaagccgcaagcccacggcaacctaggctccgtgctacggcggctcatctccatggacaagaagccgccttcctccaagaaccagctcccggttccccctgccgccgccgccgcagcagcagcagcagcgaagaacaacggtggcgggaagctgccggggctgtcgcggaagttgttccagaaagcctcgtccaccgaggcggcggcgcccaggaagacgaaggccctgatggaagtcaagaacagcggcaacaacgccaacacgcggacgctcggcatggtgctgcgcagcgagcgggagctcctggcgcagaccagggcgcaggaggacgagatcgccgcgctccgcctgcagctcgagaacaaggaccgggaggtggagcggctcaaggacctatgcctgcggcagcgggaggagatcaggacgctcaaagacgccgtcctgttcccggacgtggagccggagccagagcccgaccgccgcctccgacacgagatttccacgctcaccgaccagatccagtgcctcgcgcaggaggtcgcccaggttaaggccgagaagcactcggcaaggtcgtgctttgacgaggatggatacttctcttcccctaggacgcctgggtttaacgaggagaccgctttctctctggagtgcagcattggggaagctgagacgccgaactacggtagcccagacgaaatgttcagcaaggatcttaatccttgcttgaccccgtgcattgccaagagcagatctgatgtatccgcacaattccagtcgtcttcctcccagttcacaaaggaatctagcggttctcgtcgcagcagcggcaaggaaagagcagaccgctcttatggttcttttggcaggccaatgtcaaagagctctgaccatcacaagccggccgcctcaggaagcagcaacaagcgacgagtatacagatccgatcaagacaaaatcaatcagaacctgttttgagttcaccatcgtcatcagcttgccagtgaaggtagcctccagcttctactaggtgaaatatttataagcatgtggactttttatggtccgtcgataccggtgctcgtgatctgtcagtgaatgaaacctttggtttgtgctttttttgtgttatgctctagcttgcccagctatttggaatggaatgccagtttggctctgctatgtcatcgataggtgaatatttggcttctcatgttctccgttctctcacgaatcacgatggcggctccaacatccgtcggtgcgagtgcgcggtcgtcgggtcgaagcggaggagagtctcgtcgggcggggatgcgacggactccatttcagcctccatcgggggagctggagagggagggggcaagaaggcgctctatcactgcaactactgcaacaaggacatctccgggaagatacggatcaagtgctccaagtgccctgacttcgacctttgcgtggagtgtttctctgtcggcgctgaagtcaccccgcaccgcagcaaccatccttacaaagtcatggacaacttgtctttcccacttatttgcccggattggaatgcagatgaagaaattctcctccttgagggaattgaaatgtatggtctgggaaactggcttgaagttgcagagcatgttggtaccaagtctaagttacagtgtattgatcattacacatcagcatacatgaactcaccttgttatcccctcccggatatgtctcatgttaatggcaagaataggaaggaacttctagctatggctaaagtacagggtgagagtaaaaaagggactttgctgttacctggagaactcactcctaaggttgaatctcaattttctccctccagggtcaaggtggaagatgcacttggagaaggtccagcaggtcgatcaccttcacacatggctgttggtgcaaataaaaaagcttcaaatgtgggacatattaaggatggcgctactgtatcaaaagtcgaagagatatgctttctcaagaacgtctttttctgtaatttgagttctattaagaaatgaaatggtgatagtctcacgttacgacatgatgttcatgtagatagaagtgttggtgtgaagaagcccagatattctgcagatgaaggcccttcgttgactgaactgagtggatacaatgcaaagagacatgagtttgacccagaatacgataatgatgccgaacaagctcttgctgagatggaatttaaagaaactgattcggaaactgatcgtgaactgaaactccgtgtgctgcgtatttacctctccaggcttgatgaaagaaaaagaagaaaggagttcatattggaaagaaatttgttgttccctaatcccttggagaaggatcttacgagtgaagacagggaactttaccatcgctataaagtcttcatgcgttttctttctaaggaggaacatgaagccctcgttaggagtgttattgaggagcgaaaaattcggaggagaattcaagaactccaggaatgccgttctgctggatgccgcacactggctgaagcaaagatacacatagagcaaaagaggaaaaaagaatacgagctgaatgcgcaaaaagctaaggatagcagtcaacttaatgcaaataataaatcagtacaaaagatgaatcgacctatgaaaattgagtccgatgggaatttggatccaaagaaaggtggtgctggcttggattctcctaagacaacaggacctacaagtgttaagcagtgggatgactgggatatagttggtcttcctggggcagagctattaagtgctagcgaaaagcttctatgctgtcagaacagattgctacccagccattacctgagaatgcaggaggtgctgatgcaggagatattcaagggtagcgtcctaaagaaggaagacgcccacgtcttatttaaggtcgatcctaccaaagtagatagtgtttatgatatggtatctaaaaaactgggcaaccatgaggaggccccaaccgtctagcttacgcttttgagcttgcctgctgtgacatgccgaaggaaacaaatcttggtctggcccttcgcagcgtgtctgaatcagggctgaaggtggtggaaccatactaaatcgaatcggccatagttagctgaaattcatatcagctgtcagtagcacagtaaggcattcccgccaagctgtaaaattattgccccgacgagaatgtgtagcatgaatttgaatttcttttctgctattgctgtgtactgttgcagggtagtgccttattgtagtatatgtataggtgcctgagttttatgtatcatcgtgtatgtaccatttgggcgctctatttatgccattgtaccaaccccaaacatcgattattataattcatctcgcagccaaattcttgtctct

SEQ ID NO: 35838 - DNA, 1511 bp, Zea Mays
aggttcggtgtaacctcgcagatgggaaagtacgttgggttcatcggcgaaaatctctctctccctccgtcttcagtcaaccagtaggggcgcttcccctcctggtgcatgtataaaaaagttcgaaggaagagcagtttgctgaaaattttactcccaattatactgtgtgtgctgctactcatgcttggagcccttgtctggacatgtaaaagcagaggcaaacggcaaaagaagagagttcaaaagagaaggatgctagaatacttgagttctactgatgacgctggggacaagaacataaacttcccatttattagctttgaaaacattgtcacagcaacagataatttctctgaatctaatttgcttgggaaaggaggttttggcaaagtgtacaagggaatgttggaaggcacaaaggaagtagctgtcaagagacttagcacgggttccggccaaggcaaggaggagttcaaaaatgaagtagtcctaattgcaaagttgcagcacaagaacctagttaagcttctcggttgttgtattcatgaagatgagaagctgttagtttatgagtacttacccaacaaaagcttggattacttcctctttgcttctgcaagaaaatcaatgcttcagtggccaacaaggttcaagataatccagggggttgctagaggaattatgtatctccatcatgactcaagattaactgtaattcatcgagatctaaaagcaagcaacatcttgctagataaggagatgaacccaaagatatcagatttcggcatggctaggatattctctggtgatcagctccaagcaaatactaaccgagttgtagggacatatggctacatgtctcctgaatatgcaatgaaaggtgcattttcagttaagtctgacacctacagctttggtgttcttatattggagattgtaagtggattaaagataagctcaccatatcttatcatggatttttctaaccttataacatttgcatggaacatgtggaaagatgggaaaccagaagattttcttgactcatctgtaacggagagttgctccctcgatgaagtttcacgatgcatccatataggactcctgtgcgctcaagacaatccgagttgcaggccactcatgtcaacagttgtgtccatgctggagaacaaagcaacaccactgccaacaccgaagcaacctaaagattttgcacttcgggactacaatcctggaaacgaaggtgtccacagggaattgtccgtaaatgatacaagtctcactatggtggagggccgttagattattgtttttgatactacgatgggggagcacatagcccaccagaaatattcattgaagacagacgtttagtccctattttgtttatgggtatttctgtttagacaaatttagtatcaatttaatctataaaatttattatgcaagaacaatctattggaaaggtaaagtttattatgcaatttatcaatttaggtttagattca

SEQ ID NO: 35839 - DNA, 266 bp, Zea Mays
atagccgaggggatcatcgccgtgggaaggttcgctgttgttggtaactcttgcctgcaccgccattaatggatcaatgggagatcgggcaggatcgccagcacgcagggattgtaatcgaggtcgattgagagcacgaaaggccatggcgcgaaccacattttcattgattgcgcagcatccgcgcggtgccgtgggacatcctccccaggatgattttttttatcgatgctcggtaatgattacctccctaaattcgatttcat

SEQ ID NO: 35840 - DNA, 2707 bp, Zea Mays
aaaacattggagtaaaaatatgtacacaaaaaaaggtgcgtcacaggagtgtaagccccgttctgttagtccaatagtggaccaagtgaataactgtgagacaaagttggccatttaacccagagccggctcccttttaattgggctccacacgtgtctcagccccccaccgaagcagggagagccagctcgtgggccgtacacgtgtccgtgggcgcatcgctgcgcattaaggcccggggactttccagggctttgaaagcccgctcacttcatcctgtgacgcggccaagaatgccaccacgctccttatatacacggtctcatgtacctgaaccggcgatacgggactaatcgtccttgactgggaatgtggcatgctatgcctgtgtccactccctcccaccacctccaccatggcccgaagcagcttatgggccgctcattcccgccgtttattcttagggctcttcctcaactctcgcactgccgccgccgctgctacgcctacgcaaccgtcaccgtcatccccatggcttccacggcgaccacgcgccgccggccgcggcggggttccaagggccccaacgccgacctctcgcgcaccctaaccgactgcacccgccgcggggacgcggccgccgccatggccgctttcgacgccgccgtcgacgctgacgccgacgccgttccccgcctctccgctcaccagtacaaccaactcctccacctcctcgccgccaccgaccgctcctccttccccagcccccccgccgccgccgcgcgccgtgtcttcgcccacatgctccaggccgcggcgccgccctccgaggccaccataacctccctcgcgcgcgtcatcgccgccgacccggcgtcggccgccgatgaggcgttcgagctcgtggccacaatgaaggacaagtacggcctctccccgcgcctccgctcctacggccccgtcctcgcggcgttccggcgtgccggggaggccgctaaggcctacgctgtcgaggcgcacatgacggcctccggcgtctcgcctgaggagcccgagcttgccgcgctgctggatgtcagctccagagccggggatgcggacaaggtgtatgagtatatgcataagctgaggcaagccgtccactgtgtcagcgaggagactgccggagttgtggaggcctggttcaggagcgacgaggcggcaactgccggcaagcctcaatgggatgccgctcaggtgaaggacgccattgtggcgaacggtggtggctgcccaccgccttgggtggcttggaacccggcccttgaccgtgcagcgggtaagagtggggatgctgatcagtgtgggggatgtagattccatcttgcttgcattgacattgacatggagagacacagaggtttgctgattccgttgctgggtttggccctcgagagggagacaaaaacaaatttcagccgatttcaggagtggttggaagcaaataaagactaccaagctatagtcgatggtgcgaatattgcactatatcaacaaaattttgcggagggcggtttcagtttgacccagagcagctggatggcgttataacagagcttcgggatagatatcatggaaaatggccacttgtcatactacacaataagcgaatttccaagcttatggaaaattcgtctaataggcatttgattgagacctggagaacaaatggggctttgtatacttcaccaagtgggtcaaatgatgactggtattggctatatgcagcgatcaaactaaattgtttgcttgtgactaatgatgaaatgagagatcacatattcgagcttctagggccgtctttttttccaaagtggaagcaacgccatcgggtaaagtacacctttaataaaggaaaagcggtgcttgtgatgccacccccttactcttcagaacttcaagagtcggagatgggatcttggcacattccaattgaagagaagtctgggaatgagagaggcaggatttggctttgtattggcaggggaggttcctgcaaagaacatggcgaagttccttcgactaatggagctgtccacaaagttcctcaaactgaggcatctaacgtggtgcagcaggggctgacagaaaataaggatgaatcgataactggtaaaagaaaggatagagattgatcaccttcacctatccaggagcaccatctgctcttgagtctgccatcttgtgagcgattgtggccacttgttgttgattcagctgaggcatttcaagaatagggatgcagcgataatgccatcccagatatgtagggtgtgataattattaatcactttcgctgggttgcagactttcattcttcacaaattgggtgtgatcttagacgatttctgtgctatgtatctgactgcatccatgatcatctagtgttaactccagaataccagctaatgaacttttttattaccatcaaactgaggcacatttgcaagtgcattgttgagctactgcaccagaatggtaccgacgctattgatgttgcagcactgctggagctattagtgtatactatgtaggtttgatggtgtagcagcacttagtattactattagtgtatactagttctataatcccctcctgttcaagtcgaattatcctaatcttcctatgtttaccgtttgctattaccaaaaagacttagtattacag

SEQ ID NO: 35841 - DNA, 2908 bp, Zea Mays
ctcacctcacataactacataagagaccgaaacatatttccctccagaatccctcaacggaacgctgcagcagtgcaggtcgctttcttccccaaaattttgaaccccgaaccctagctctgctcctcagttccccgtctccatggacatcggcggcagcggcggcatcatattgtcgcccggatcggaggatgataagtttgcgcggaggcgctcccgccgtgtgagcttcgcggacaccaccgcggtgcacgtgttcgaccgcgacgaggacttcgagacgcctcccgaggagcgcgagcccgactccacccccgcacccccttctcccaggaggtcctcggttggccgggaggttgaggacgacacggaggaggatttcaaccgcccccctgtcatcttcctccacgacgtcgactcgtcgtacccagacagcgccgctgaatccatcgcctccgccgatggtagtcaggttgctgcatttttcaactggattatgtcagatgaaaacttttttggacctgtgtcggcaagctttattcaaacaggaagaccatcagattctggaatgtcagaggatgacaaccatgatataactatggattccaggacgttctctttgcattttcgcaatattgctccaccagatgactgtacagcctactcagctgggagtctaatgacacctaatactgcatctgagggacccctgaaggaacttactgcatctaatcctgcaagagcatcaattaatggccgagatacattgactgacatgagtttgttgagtggtaaccccagaacttatggttatgataagttgtcacccacgttgaacagtatgatgaagaagataaaagggagcaagcaaacaaactctcctaaacttggtatttctgatgtaacttctgattgtgtattaaccttgtctacatctgaggaagaaagtagggaagaaaatttatgcattgacaatggtgtatcttctgatgagctggtcatggttaatacaattgcagagcacatttctatgagaaatccagtttcgaccagcacagatctgattcaagatgacaatgaaatgataattgatgtccaggagaattcaaagaactgcaaccatgatcacatggatgatgaccctggtgccaataatactgcagaacctcctgcaaagatttccccagcatataagtcattcatgattaatggtgatgtgcaatcccacctagtcgatcaatcttcgtcaaaagatcgaccatctggatcaaattgcactgcaagtgtttcctccatgtgtaatgttgacatggaaacccatcttttggatcaactacctggtaaggataacacatatgctgcccagtcgtcaagtgaagctactgccattttgctgatggatgctgagcagctgcggcagaaaaatgaggtgatggatacagaaacagttctacacactccaagaactgcaggtctgcagttgcaagttccacgaggatccatatcctccttacgctcaaaaaggcataagcttttcactaatactgtatccaatagtaaagtagcaagacaggagggttgttcttcgggtactgagtttgttcaccatgacaagagactttcttctctgaagcatcaagaattggctgcagcttcccagttacaattggttgagaagaatgaacttggtcatcgagcaagtgacatgttcagcaatactgaagatcatgattctacgttatctgtttcttctcattctgttccaaagctgaagaaaaccaatgaatcttttgtcctaggcactcctcgaagacatgggctaaatgagtctactaaggtcctagatacattatgtcatgcctttactttggatagccaacctagtcgtgaatgcaactctcatgtggatttaaatggtgttggaagaaagagaactgctgaggaaaatggttatgctgtgcaagagtgtcctgaaaaaaccactaagacagcaagaagccctagaaaatctagaaaagagattccttgtgtatctcagccttctatgattgaagaaaaacagaatggtgctcatgataatggaaagtccgtggatattgattggagcaaggtagtatgtactataactaatgccacggagcaagttttgccagcatcaataagcaagtataatctacaacagcttgacatgctaagcgataggttggatgagattcatatggctagaaaatataaaaggctttctactgctgtgaaaaaggctcaactatgtcaagatggaattcaagagtgctgctttctgaaatccaagattttgggcgctggacacatggaggattcttcacttcctgcagctactacagtcagtgctggtgatagacaggaagaacttgatatcatttctgaaaagaggcttgaactcaaaattattcaacggaaggtggagaaattaaggagttcccttgaatgttttcacaatattgaaggtggcattggtagtgatagtgttgtgaggtatgctgaagagcagttgatgatgagaaatcagcatcgcatcatccactggcaagcagggctctgcaagttgaatgacatagttaaaaggggcaacaagtgtgatatcatcctcaactatcacaatttgttgttccaaaggatcatcttaaacatcagtgatacatctagcatatttgtgaacaattcactgaatggaaaccaaattggaaagacatttccaaatttggatgcatctttggcattcaattttgttttcgaagccgaggagaaccaaagagttagtgatttacagtccttgcagaagaagacaatgctactctaatatacaagatatcctagaagatgctaagttatggggacttgttggagcttcagatattagaagactgtg

SEQ ID NO: 35842 - DNA, 1910 bp, Zea Mays
atcttcctttccttccctttcccctcctctctcacgggcttctctctcacatctcgtcatgccgcatcgtcccacgcgtccctccttccgtggtctcaccggcgaccccctcagcacagcaccttgcccggccggctgcccctccgcagtgccttggccccatcgttgcccgagctgcatctcccgcaccctcgtcgcctgagccgccactgtgccttggccccacgagccgtcatgcctagccccgtgtgcagccgtgctcctagtccgtcgtcgtgccttggccctacgtgccgctgtgcctggctcgcgcctgcctgtattcgccaaccactacggcgaagactagtggttgcttgagatcagcgctggttgcctcgatgttgatgtcgaatggattggctaggcgggcgttaacctaccagactgatacactgttgctcttattattaggcactagcatagctaaagtaattcttttgaccttgagttgcctgggtgcctcttcaatcttcatgttcagaatagcacttgttgttcagaatagctcatcgtcactatgttgtttggttaaatgtctacaggatttagtggtcaggtagagtgagtaggattgtgcaattatattgtaagcagtaactgtctagctggtggtgagcatcattgaaactctatcccttcaggaacgatcgtggataggggatgctgaacatggtagctggccttctagagagcacaactacaattagcagcggctctaggcaaccgtttgtcatggagacagtgaaagatgatgatgctgcaaaactgggtttgatatcaggtaaacatctgctattcgacacttctgtaatagtaagcagaaaggagcaagtcctcattttttatatgtgcaatgttgctttcatgctacacgagaggggtgaatgctagttataaaacaatggattatttgacataatgtagatgagattttcgcaactattcttatgtactgcaatatttgaaataaacagcccttgcaagatgttagggtcctcctaaaacatatgaatgaccattggattagtctaacattactctttaggcttcctagaccatgtaagcagtctttcacaagtccacgatgactttatttaaacatggagttagcacacataggtagagatagtaatggagtggtagttgttaattcttgaactattgaatttggcaaggacatcggttattgaatttggcaagcaaagatttatccctgatttggcaaggacatgttgcagaaatttacatggcgtccgttttcccatattactatactggtaaactaaagctacaaaaatggaggcaagcatattaactcgtttaatgccacgttcacaagtgatatcctagaactttagttttaaatgttaccggtgccagcttccaatgtttattatacttgtttgcatattgatatatttgttcaagttcttcaagctgatggtggtaagtgtgctaccttcctactttcaagcttacaaccttgtttaaatggaattgttttgcgcatgaggtctgcttttggaaacatcttcagtgctaatttgagacaagctcctgcaaggcaagctgcactgggcacagggatactaaacactgttgtttgtgctttttatgattgaggaatacttgaagaagagtacttgtggtctttatcttgtgctgagatgcatgttctttacctaccgaacatcagacccctccagctaccttgctgacgcgtgaacgagaagacgggttagactttgtcgaaaccctcttcgctagtggaggtatcgaccatcactcgtcactgtaccccgatggtgatcgacgatcatgagcttccatattatgtgttgtgatacttgagacttttattatgacta

SEQ ID NO: 35843 - DNA, 2739 bp, Zea Mays
cgggagccaccaccggttcgtgtcgggaccggaaaccacgatcagccttgcacagttcccggcttccagccgccgccgccgcggggagcaccggccgttggttcttcgtctccgccccgcttgcgagaagagcgacgcgtttccccttcgaaccctcgtgtatcgtgggtcatggtgacgcctcgtggtagcggcgggagatggtgaagatagtgacgtacaacgtgaatgggctgcggccgcgggtggcgcagcacggctcgctccgctgcctcctcgacgccctcgatgccgacatcatctgcttccaggagaccaaattgtcaaggcaggacctatctgcggatgtaattatggctgatggatatgaggcttttgtttcatgcaaccgctcttcaaaaggccgtggagcatactctggtgttgcaacattttgccgagtaacatcatcattttccagccaggaggttgctttgccagtagcagctgaagaaggctttactggacttcaggactatgcaaaaaatagtcaaactgttggggatttcagtattgcaatgcctgttgaggaggagggtcttggtgaactcacaagagaggacctcttaagggtggacaatgaggggcggtgcatcatcactgatcatggacattttgttcttttcaacatatacggcccagctgttgacggagatgataaagagcgtgttcgttttaagctactattttacaagatactgcagacaggtgtgacgcggcacctggcttcgagaagcaaatgttccgggaatggctgagatccatgctgagagaacatggaggtcccttttttgatgcttttagatcaaaacaccctgaaaggacaggagcatatacttgttttaatcaaaaaattggtgcagaagagtataattatggttctagaatagaccacattctcatttccggttcctgtctccatcgctgtgattctgtggaggaccatagcattttttgttgccatgtagaagaatgtgagataatgaatcatttcaaaagagggaattctgaaaatttatcaaagtggaaagggggaagaagcagtaagctagaaggatctgatcatattccagtttatattttactgaaagaaatacctgaacttccggtccataatatcccaccatcagctgcaagatatcttccagagatccgtggaaggcaacaaagtatagtatcgttccttgataaagggaaaatttatgagctgcaaaatgctgcaaatttgattcaatctgaagatacagtacttgatagttactgtagtgatggcttggaaaatacaattctagctaagaaaggactggcaactggtataactgagtttgcaaaaggtggtaaccttcctagtttgatgtgcaaggggacagatctgaatcaatggataaatgaaggtttaatgggcatctctcatgtcagccagaaaaaatcactgtctagtaccaagtttgtgccacaaaagaaaattaaacgcaacttatcatcccaaccaacaatcaagtcattttttcaaagaccagggtcaaagacagtaaatgctagtaccagtaccttagttactccagcagaaacattagaccttacaaatcaagcatgtgtttcaaatggtgatacactgcctgaaaacatgcagtgcacaacttcagctgcaaaagttcaggataacacagatgcatcgtcatgttcactttcaacagacaagtctaatgctgcagcattggagtggcagaggatacagaaaaagatgaagatgacactaccacgttgcaaagggcatagtgaaccatgcattccgaggtctgtgaagaagggccctaatataggccgtttgttctatgtctgtgctcgtgctcagggacctgcatcaaatccagaagccaattgtggccactttcagtgggcacctggaaagtctaaagagaagagctctaaagagaaacgtctgtgacttcatttttctcccaggaatccaggacattttgcttccaatgagtctggtacatcaccttgtcccagcatactgatgacgtggcgatgtatttgtggagaggtaagctgatcaagggcctgtttgggaggtctggctctgactggctccttgctctagtaaccggaggggccacaaaacgtgtcttcaccagctccccattgttttgaaaaggacagaaaacaacttcatgaacattgcagccacagtgccatggataagctacagtagcgcatcagctggaacagccaagagctgtcccaaacgtggcctgaacaagcacttctctcaggcaggtacatattctaatcctgtaattagttggttgacactaacatgcagccttccgttggttggctaacaactaagggcttgttcggttagctctcaatccatacgtacggattgagtaggattgggtgcgtttaaattccaagcaagtcaaacttctttttaattttttctaatctctcagggatcttctcagaagttatttatttttccgcctggtttagcgtattcaaattcttaatagacaagtcacaagtggccatcagtggagaaatcttacagtcctgtagtaatgttttatatgaaaactaatatggacattatagtattattgcccatatctccccagaaataaagtgccagtcgtgtaagtttttgtttctttcctttttcaaaacaacgagaaagagcatatattaggc

SEQ ID NO: 35844 - DNA, 2469 bp, Zea Mays
ttcgattccgctttgtctcagcctctctcttccgtactgcttctcctctacctccgtcgccagccagccactacctcgattcgctcccctccggccctcctgtcgcgcgcgctctgcctcactggcgccacggtcgcccgcgccggcaggctcgagtccctcgacgccatcgcctagattgtctactagctggcccccgctcgccgcgaggtggtgcttgcggaggtggcggcgatcgtgcctgcatggtgctcgacaaaaagatatgggacgccaagaacatgatgtgcatcgtggacccgcgccacggttgctacctgacggcgtccgccatgttctgcgacaagatgagcaacagggaggtggacgagcagatgcttaacgtgccaaacaatgactcctacttcgtggactcgatctccaacaacgttcagtccacggatgtgcctcttttgagagtgaattatacttttactcaattaggatattgtgtttctttggatctttgtttgattaatgatttttttggatgagagtgtggctacaggatgaagcaatgcattttttgatggaacacacatgtgcagtatacaaatggaccatcaggttgcgggtaccctttgttctaagttgttgagtgagcagaatgaaggctagaagtagaagctacactggccggtttcaggtcgcgttgtctttttgtatcattcttgtccaaaagctatataaaagaagcatgggcaaccagtgacatccatctccatgatctatccacaaaacaaacaatggcgaagcagactgagagctacgagctgcacaaactgcggccccaggtggatgacctgttcaaggagttcgacgccctggtcgacagacctctggatgagagggaggacctggctgcaatcttcaaggtcctcgaagagatcagggacaagatcaagatcaaacacggtggcaagaaagtagacgacgacgagctccttccgcggagcaagaggggggacctggccaacctgctccccctcatcaggactgcactggagctacgcagcaagccgccgccgccgcctgtgcagcaggacgccacgggcggtgcccacgacagcaagccgaccggctgcatcccctgcaagccccggccgtcgcagcagcacaaggaagaaaaagaaggcagcaaggaagtcgtgtcactcaagctgctgctccggctgacccagaacgtgctggagccggagcagtactacgagtggacgaccagctacgtggacgaggagaggatctacgggtgggacaaggaggccggcgaggtgatcgacgccctcgtggccgccgccgacggctcgggggcgcggatgttccgggccgcgggcatcgcgggcatccacggcagcggcaagacggcgctggcgcggaaggtgttcgtgcacgacaaggccaaggacaacttcgcgctccgcctgtgggtgtgcgtcggcccgccggactcggaggaccgcttcaacctcctctaccggatgctcgacaacctcggcctcgacaccgacaaggtcgaggaggtcgtcgacaagtccagcgtcgtcagagacgccaggggcagaacggaggcggagctccggaaggccgcagccagacctgccgagcagaagaaggcgagggcagcgtcgtcgtcaccgaggccggcgccggtggagatgccaacaggcaggcaaaggacgaggagctgctcaaggagaaggtagagaacagccgcgccgtcgagaaatccaaaatcggagtgctgctctacatcctcaacatggtcctgtccaagacgtcgtacatgatcgtgttcgacgacatccgggcgtaccgccacgacgacgacgacgcacagggatgctggtacagcaacctcacgctgctgccgccggcggagggcgagtggggggaccgcctcgcctacggcctgcccaagacgaaacacaggggcgccgtgctggtgacctgccgcaaggaagacgacgccaagaccatggcgcgcacgggcctcgtggtccgcccgcccaagctcgaaggtgatgacgcctggaagctcttcagaagagagtacgaccaggccaaggacgacaagcgcaacaaggacggcggcggcaaagaaggcagcaagggggaggaggaggacctgctcctcaagcagctgcaggagatgaagaaggagatcgtgggcaagtgcctcggcctgccggtggccatcatcgaggcggctaggggcttcgccgacctcgagcccttgccggatgatactagtcccctcaaaccggtgaccagcaaggacattgacaaggacaagcagctgtctcaagcaaataagtaacagattagttgaattcgtgctgtgtaatgcttctgcgttgctttggctctcttctaataaaatttaattatgggctataaaagtcaaaaattttaatttgaaatataacaaat

SEQ ID NO: 35845 - DNA, 1457 bp, Zea Mays
ctagtctacaagattcaccgtgaaccttagcagcacaaagggcaacggccgcctgccgctccaaagcagcccgtggttacgtcagcgcccgcgtactgctcccttcttcctcgttgctccgcccccttttgtcgtcgcgtcctcctctcgaggcctcggcagtcggcacgaggacgcgcgatcccgtcaccgctcacctccttctccaaacactgactccgcttcccgtccccatcccgctgcgcaagatcgggaggggacgaagagaggtcgaccgggaggagatgcaccgagaccgaggcgtctctgcggcagcgatacccggtgaccggaagcggatcggcgagcctatggacagatcgtctccatctacgtcgtgggggttctccggagggcgcgagaaggagcggatcggcgtgggcaagcagccggagatgcctcgctccggcggcggatccaccgccatgtccaagagcaagctctctgacgaatcagaaactgacagcgaagaatcagatgtgagtggttctgatggggaagatacttcgtggatttcatggttctgtagcttaaagggcaatgaatttttctgtgaggttgatgatgactacatacaagatgatttcaacctctgtgggctaagcaaccaagttccatattatgactatgcacttgatctgatattagatgttgaatcttcccatggtgatatgttgacagaagagcaaaatgaacttattgaatcagctgctgagatgctctatggattgattcatgttcggtatattattacaagtaaagggctgtccgcaatggaacgttgagttcggcagatgccctcgagtgaattgcagcggccaaccatgccttcctgttgggcaatcggatgttcctcgttcaagtacggtgaagatttactgccctagatgtgaagacatctacactccaagatccaaatatctaagcaacatcgacgggacttactttgggacaacattcccccacttgttcctgatgacatacccgcatttgaagccccagaagccgctgcagcaatacgttcccagggtatttgggttcaaaatccgtaagccatgacaaatttgaaggttgaatgtataaaaggttcaaatagcgccctgttatctgctggccccgcagtgttcacacgacacgtcatcggaatacacctgacccgcggctgacctccctagtctggtttcttgctctggcctgaaattctgattgatgcttgtggtttgtttagcctagtgaatcaatccatatttttttacgatcatacgtattatggctttaatggtttaacaaccatctatatttttgttggcacggttcatattcgttttttactctgattgtttactcgttcgcttactgcttctacactatggattgcatctgtaacaatccaagaacaaatcagttattgtgtgccg

SEQ ID NO: 35846 - DNA, 3062 bp, Zea Mays
gccagctgtatttgtattagaagccaatagcagcttgtggacttcggagagatgggacccattcggtgttctcgttgcaaagcgtacataaaccctttcatgaaatttgttgaccaagggaggcatttcatctgtaacttatgtggattcagaaatgatactcctagagactacatgtgcaacttagggcctgatggtaggcgacgtgatgctgatgacaggcctgaattgtctagaggaacagttgaatttgttgctacgaaggaatttctggttcgtgatccaatgcctgctgtatacttcttccttattgatgtctctatgaatgctatacaaactggtgcaactgctgcagcttgcagtgctatttctcaggctatttcagatctgccggaaggtcctcggacaatggttggaattgcaacatttgattctgctattcacttctacagtcttaaacgtgctcagcagcagcctttgatgctcatcgttcctgatgttcaagatgtatatacacctcttcagactgatcttattctcccagtttctgagtgccgggacaatctggagcagttgctagaaagtatcccaagcatgtttgagaataatagggttgctgattctgcttttggagcagctatgaaggctggcttcctggcgatgaaatctaccggcggaaaacttctggttttccaatcaggtatgcttgttaacttatcagagataagatgcatatttatgctgactctgttaagtggtttcttagtttacttgggcgctttttttcctaatgcatgctggcttatttggagagctatattttcaatttgttagtttggtcttcgtagtgagtatatttgcattctacttcaggaagttttgcctgttattggtaccagattggaacggcagtgctatatcaaatgacctagcgctatacacctgccacataaatttatagttggtcttcgtaagatatttgacagttttactttaagggctagtttgggaaccccaattttccaagggattttcattttcccaagggaaattagttcattttcccatgggaaaatagaaatctcttgataaattggtgttcccaaactagctctaagtctggcaagtggactcatgtttgttttttatcttaataaaggatttgtttcaattgctgctaatttgccgtacatatttctgtgagatttttttttaagtcttaaatttcgatgctcttgtgttaataatgtggcaatgtgcactgttggcacttggcagtgctgccatcacttgggattggttctttatcagctagggaagctgaaggtagagcaaacattacaactggtgacaaggaagcccataaacttttgcagcctgttgacaacaccctcaagacaatggcactagaatttgctgagtatcaggtctgtgtggatgtattcctcaccacacaatcctatgttgatattgcttctatatccgttgtgcctcaaactacaggtggccgggtctactactactatccgttttctgctctttcagatccagccaagctcttcaatgatctcagatggaatatcagtagaccccagggttttgaggctgttatgcgtgtaaggtgcagtcagggtctccaagttcaggactattatggcaatttctgcaagcgtgttcccaccgatattgatcttccagcgattgattctgacaaaactgtgatggtcacgtttaagcatgatgacaagttacctgaaaatgtggaatgtggcttccagtgtgcacttctctatactactgtatatggacaaaggaggatccgagtcataaacctttcactttcatgcacaaatttgcttgccaatcttttccggtatgctgatttggagacacagttttcatgcttcctgaagcaagctgctaatggcatcccgacatctccattacctcgtattcgggatgaagcaacaaatacatgcataaatattcttcaatcttaccgcaaacactgtgcatctgtaacttcatcagggcagttgattctcccagaggctctaaaactgctgcccttatatactttggcactggtcaaaagcttaggcttgagaaccgatgggcgattggatgaccgttcctactggatatctgtagcctcgtcagtttctgtagtactagctgttcctttggtgttccctagattgattcctatccacgatctcacatcaagggatgacgatgattctcttatacccagtccccttatgctcaatagtgagaatgtacaagaggatggagtttatttattggaaaatggtgaggatggtttaatttatgtaggaaacatggtaaatccggctaccctggaacaaatattcggtgtctcttctttggctgcattaccagcccagttggcgttggagcaatttgacaacgaactctcgaggaaggttaacgaagttgtaaatgaaataagacgccagaggtgctcatacttgaggttaagacaatgcagaaggggtgaaccatctggtgattttttccggtcatttttagtggaggacaaggcgcctggcgtcttctcctacgtcgagttccttgtgcatgtccacaggcaaatccaaagcaagatgacctgagggcccaagatcctggttgtaacatttcggtcagtagatggattgtatgtaccccgggagtttgatttctgcataaggagacagcaaagtggcgattccatatcaatgtggagcataaagagtgctcggataatagaactcaggaatagaggcttgtggtgtttacagcaccgtttttggagtgggtggtatatgtgttgtatacagagatgagaggggtggagctttagtttttgtgttgtcttttatcatcgtgcatccttgtttatctcatgtgcaaaaagtgttggattatgttggttggaaggttatagaggtttcgtaataaaatgcacctagctaatcgatagtatgaatcagatatactataatttaactattatgtttgcctattcgaatttaaccctgtgatgatgttttgtgatt

SEQ ID NO: 35847 - DNA, 2245 bp, Zea Mays
ctgttgctgcggcgcgtcggtcctccccattcacggcatcgacagaaaatagattcatcaatcatcccgtttcgcggagacagagccatcccgctccatctccctcccagccaaaccctacctgaaacaacgacgcactcttgcattggccgttggcgtcccgctcgctcgctctctcttccactcgctgcacccgtgcgtgacaatgcccacgcgtctcccactccgtctcctcctcctcgtcctcgccatcgccggcgccgcacatggccgccgcggcatctctttctccgacgatgaccgctctctcctcctcgccggcagcagtgatgaggttgccgccgcgacgtcggtcctacggctcccgtcggcggcgggggaggatccggcgcctgaggcctgcgagatgacgtacggcttcctgccctgcaccgacaccgcgcccggcaacctcttcctcgtcctcgcctacggcctcctcatgttcaaggccgccacctacctctccgccggcagcgagctgctgctcgaggtcctcggccctggcgtcgtcggcggcctcttcctgcccatcctcggcgcgctacccgacgcaatgctcatccttgtctctgggctcgccggaactaaagaggttgcgcaaagccaggttttgatcggaatgggcctgcttgcaggttcaacagtcatgctcttgacccttctctggggatcttgtgttgttgttggcaaatgtgatatgtcagaaaactcaactgcaactgattctcaagatacaaaaggcttcagtctttttggatctggtgtttctactgatgtgcagaccagctatgctgcaagaatcatggcaatatctgtgcttccctttatcattgttcagataccccaaatttttaggctccattctggccatcgtttgacagtcctgcttggacttattgctgcagctctacttgtgctcgcttattgcctgtatcaggtctttcagccatgggtccagagaaggaggttagaatatgcaggactaaagcacgtcatgtctggacttctacgacatgctcagacacacatttttggtcgtcttcttcgcgaagatggaaccccgaatatacctgtgatcgagaagttgttttgtaagattgatctggacaacgatggaaaacttgaacgtggcgaactacaggctttcatccttggtgtcaagttcgaagacgttgatttggatagtgacctagctgtagatcaagtcatggcagactttgatacatctcataattctgtcattgaaaagggggagttcatcgatggcatcttgagatggctagaagaagctaaacgctcggttgctacctccggttctgactcgagaaagtttctgcaggattttcacacgagaactagggatgagcgtagtcagctccttgggaaggacgacgaggacggtgaggctattgaaaacccaacctggaccagcttcaaggccattctgcttttgctcctgggaactgcaatggcagcagcgtttgcagacccacttgttgacgccgtgcacggtttctcaaacgctacgagcatcccttcgtttttcatctctttcattgcaatgcccctggctaccaattccagtgaggctgtctcagcaatcatatttgctagccggaagaagcagcggaccctgtcacttacattctctgaggtctacggtgcggtgaccatgaacaacacgctctgcctggccgtgttcttgggcctcgtctacgtgcggggtttgacgtgggatttcagctcagaggtcctcatcatcttcagtgtctgcaccataatgggcctcttcaccagcttccggacagatttccccctctggacgtgtgtcgtggcctacctgctgtatccgctgtccctcgtcgtcgtctacgtccttgacttcaagttcggctggtcatagacctgcatgatcgtctgaggccggcttagcttcaacacattacatatacgttgatatatataccatgcgaaatagtacggctttgttacgtatactagtaaagtatactccggttgtgtatgggcttttttgaagaaaaaaaacttaagtatttttctcagatcaaagttttttttttgaaacgaacatgccagtagagctgctgtcgattatattgacaaagaggaaggtaccttcagaagagaactataacaaaattacagcaaaaactactgtaacactaccaacaaaagcaacacc

SEQ ID NO: 35848 - DNA, 1303 bp, Zea Mays
gcgcggtggtgttctgagattccgtaatatctttggggcagatcttccgtgctccttttgtccccccacgctttgtcgttcgttcgttgtgatcagccgatcaggtcatgtcatcactcaccaccaccaccactaccacctccccacctacgcgtttctttagtctctcgcctactacagtctactgctcttgctctttacagcaagtaaaaaaaaatttaaataaatcttgcagcagctgcatattctgcacagcagttgggtactaggcgagttcagtgttgatagtaccaagtcctaaaatatgctgataccattctagcagtacggcctcaccatctgacgttctgggccctgggtcataaattcaggggtccaatgccgccgagctcagctgtgacttcatgaggacaggtcgaggaccgtctgctcactagtcactacgtctacgcattgaagctagaggattcatctttgggccagccattgcgctagccataggagcaaagttcataccactacgtaaacctaagaagcttccaggtgaggtattttctgaaagttatgtacttgagtatgggatggattgtttggagatgcatgttggagctattgaacccggggagcgcgtagtggttgtcgatgatttggttgcaactggtggaactctttctgctgcaataagacttctcgagcgcgcaggagctaacgtggttgagtgtgcatgcctcattgggcttcccaagtttaaggatttctataagctcaacgggaaaccggtttacatcctggtggagtcccgcaaataggacgcagtaaaatgaaaaagctttctagcttcccgtccaaagaagctcacagcttcactcatttgcacgcgcaagcaaggtggtatgggggcaccgagaaactccgcagtaatctgtgttgaggccacggccagatgatgctatgtactcctatcttcatggagagggtgatggactgggtgaaacgtagtcactgtacttttgtagcacgtcatgtctagtgtttcttagtagccatggctgaagagagtttgtagcttattcccggcttcctgcagccaggaacatcagtgttagccagagaagctaggaaaaaggatcttatgttgctgctcagttttctaccagaatcgtcttcctttttttcccctttgcagaatcaactctttggtaaactttactaagctcgttttgcctaaacggccgttcaatcatgaagaaagagcaatcatacgtaatgccagcatggttcccaaaccctatgccgtcgaacc

SEQ ID NO: 35849 - DNA, 1486 bp, Zea Mays
cgggtctgcaattttcattttaaaaacagacaagtatgtacaatacatagaataatttgtagtctaaatatcgaaattagacgcactaacataagttagaactgaatttacgtataaaacaaagtcttatacttaaaatccagaattaaaatgataaaatatgccattatgggccctcagaagcagcccaggcggcctgccaggcgggccaggcagcggcctggtgaccagcacgccggcccagcctggctggccggcctaagcggcccaactgagaccacaaagcccattagaaatatgagcagttaggttttccaaaccctaactgccccagccgtcgtctcccagggagcgcccaagccaccgccagggccctcggtggcgtgtgggtgtcctctcccggcggtcagggcgaacccaaaactccggctcaccggcgggcggcccgtccaggcgggcgcggcctcctgccccgacctcggtccggcgcgcgcgggcacgggtcctccggcagcggccaggcggtcagcctcgaccccagcggtacgcggtgcaggccccggcgcgcggccccccggcggcagcgcgggcagacggtgcaggcgtgcggacgcgcggtctcccggcggcggccgggtagacccggcgctcgagggcgcgggcgcgcggccccccgcggcggcgcgggcagccccggctcgcggcctttcctggcggcggcgtcgcggccccctggagtcgagcgggcgcgacggctcgacggcgcacgggcacgcagcccgtctcggtcgcggtcgaccgaccctgcgtagacaccggcacgcggcctcagccccaacgatgcgcggggcggaaggctcggcgggcgagcgaccgttccggcggcgcgggttcggccaaggcacccctggcggcgattcttccaagccctcggccagggcgcgccggccccgaccccggcggcatgggcgtagccacagcggccctggcggcgccggccccatgggcggctcgggcgcagcccggagggcacaagcctcggcgcttggccgcgcggtcagaagcgcgagcacgcgggagtgcatcccggcggcgcgtggctacggcagcacgggcgcggctcatgcccaggcgcacagacccggcaacggcaacgacaatggatttgccaggagtaaattgaaagaatcaagcgcaatttgagattaatacttacaagtattattcaatttccattgctgctacgcttgatcgaaaccaaaaattcctccaccttgtcatggctgatgatagcaattaccgccctggcggccgtagcgtaccggcgtgtgcagtggttcaccatgacggccttcgttgagagcaaagtgatgacggccttcgttggagagcaaagtgtctgataacatgttggaaaactcagcgttccatggccacggtgcacctgcgctgcacgcaacagctcacctcacacacacgctgggag

SEQ ID NO: 35850 - DNA, 1595 bp, Zea Mays
attgcatgctcccaggtcccagcgcacctgctccatccaggtttcaggcaagccgtcgaggccggccggcgatggatcgccaggcgagccgtcgaggccgccgccgggggcgccacgtccggctcggctcgcttctccgcctccgtgtgcggctgttcggcggcctcgccggcctcgttgcccggtgcctggaggagctcaactgctgccccacgaggaggactacgacgaggaggaggaggagtcataagatggcggtcagccacggcgacaggcgccaccaccgacctgcgccagcagagagggaggagaactccctccatgcagaggccattgccgattgcttggagtttatcaagagatcctacctgcctgcggcggctggagctggtggtgatcgcaagccggatcgctagctagtagctacccttcttgccccggtttcggaaccaaaatttggcacccacttcctcccagaattccttggtcccagacagaccaggtcccaagtgctctgctcctgtagttttttttttttttttttgtacaaaaaagattgtattgcaagatttataaggctaccttttggagaacagttcatgggacacaaggaggatagaatgaggtttgagaatactgatgacaatactgatgagcctggagcaaatgtctcaaaacgactacgtctcactccactagcagatgcaagcaatccgattatggctcaggttgcatttttatcagccattgtgggttccgatgttgcctcagctgcagcgcaagcagctatttctgcccaatcccgtgttgaccttaatgacggcgagattgaaacttcaataaatagcattaagcaagaagaatcatctcacacaaatgggctctcagccaacgtgttactgaaagaggcagctgctaatgcacgggcacaactcgagaaggaaaggaacagcatagagcaatctttatcaaacatagtagacgtccagatgaaggaaatccaagataaaatatgccggtttgagcagaaggagatgctgatggagaaagagcggcagcagctccattttctaagggatctacttttcacagaccaattggcagtcatgcagcatcaacaaaggagtccagctgtagccacagagtgcaagggtgatgagaagccaaagcccgtggctagcatgagttgatacgagtagatcctcagcgtagcatggtttcacttcagatgtagcattggagccgcgttcatccgcatctgccgttggtaggattggaactaatttaatatactacatataggccctggttctctattggatggtgtttctgttaaatttggcgtcccctttcccttcttgcaccacagatgcctggagtgcaagggaagttatgatgacgactaccgattaccacatgcttcactgcttgtgcgctaacacgttgatatctttgccagtggcgcaacaatcgtgtatttcttgaccaaaacatccacgcaaagctccggtagattcgatggtgactagcaaggaaatacatactctctgttaatttatattttatttgattttttgccctaagtttgactgact

SEQ ID NO: 35851 - DNA, 2817 bp, Zea Mays
ccaacacctcgccgtctactcgtctcccactcccccctgcaccaacaccaccaatcgggtcccccaccacttccgtcgccctcgcccgctccgccgcgccccgtacagcggcgacatggccgagtaccgcctcggacttcagctgcacggccacaccgacgacgttcgtggcatctgtgtatgcggcgatgctgggatcgcgacatcatcgagggaccgtactgtgaagttctggacccggaacccagaaaaggagagcgaatatgttctctccaagacactcgcaggacattcgagttttgtcggcccattggcttggatacctccttcagaccgttttcctgaaggtggaatcgtctctggtggaatggacacatttgttttcctctgggatctgcaaaaaggagaagttgccgagacaatgaaggggcacagttcgcaagtcactggactcgctgtggacactaacggtgacatcatctcttcatccatggattgtactgtaagacgttggagaaatggcaatgctatagaggtttgggaagcgcacaaggttgcagtgcaaactgttctaaagctgcccacaggggaactcttcactggttcaagtgattccactattaagctatggaaaggaaggacttgcctacagactttctcaggacatgcagacactgttagatttttagcctcaatgccaggtctaggaattctttccgcctcacacgacagcactgtcaagttatgggcgttgtcaggtcagcccctgctggacatgatcggacattcttctcttgtatattctgtggatgcacattcttcaggtctaattgctagtggtagtgaggatcgctctttgaagatatggaaagatggtgtctgcgttcaaagcattgaacacccaggatgtatatgggatgctaagttcttgggaaatggagatattgtaactgcttgttctgatggcactacaaggatatggacagcagattctaacaggttctgcagtgatgaggaaattgcagcttatacagatcttatttctcaatacacacttagcagaaagactgttggtggacttaagttgatggatctaccaggtgtggaggcgctgcaagttccagggaactccgatggacaaacattaatcgttcgagaaggggataatggtgttgcatattcatggaattcagcagagttaaaatgggacaaaattggtgaagtagtggatggacctggtgaagctgctcaaggccaagttcatgatggtgttcggtatgattttgtttttaatgttgatattggagatggagaacccatacgaaaactaccctataatcgttcagatgacccatacacagtcgcggacaagtggctcctgaaagaaaatctgcctttgacatatcgccaacaggttgtagaatttatactgcagaattctggccagaacaactttgttccagatccatcttttcgggatccctatactggggccaatgcatatgtgcctgggcaaccatcatcatcatccaatggtaatactccggaaccaattttcaagcacataccgaagagtggaatgctgtcatttgagacagctcagtttgatggaatcctaaagaaagttgcagagtttaattcaaaactttcatctgactcgaaacaattatctctgtctgagacggagatgtcaagattacctgccatagtgaacgtgttgaaagagacatcattttatcacacaagtaagcttgcagatgctgatatgacattgttggtaaagatattgaagtcttggcctccacaaatgatgtttccagtcattgattttctgagaatgttcgtgttgcatcctgatggagcttctttacttctcaagaccatcgaaactggaaatgatatacttttggaaacctttcgtaaagctgttgcgtcgcctgtacagccagcaaatttgcttacagtcctcaaagctgtgacaaacttgtttggcaactcatgcttgcaccagtggctgaggacccactgtgctgagatcattgattcggtgtcaaactgcaagtcttcttttagcaagaatgcacacttggcatatgccacgcttctactgaactacgctgttctttcgattgaatcaaaggaggaacagagtcaggcgcagattctttctgccgcccttgaaatcgccgaagatgacacccaagatttcgactcaaagtaccgggcacttgtcgcaatcggttctcttatgctcaagggccttgtgaagtcccttgccctcgaccttgatgttaagagcgttgcaagcagcgccaagtcttcaatggaccagaagattgcggaagtaggaggtgacatcgaatcgctaacaagatgactacaataggtttgcgtgcacttggtcgttgcggacattgttgctccttcgctcgaggcgctaccatgcataacttaaagccggtctgtgttgcagaccaattcagacgccctccacgtctctaccgaaaaatcgcaatgggttatgattattttttcacctttgtaaccatcatggaagtgtggattttgggtggtagcgcttagattttgtaaattgaatagctgggctactctgcagatacagttcaatatttctcgcggagggatgcagatcagacacgcaacgaatatttcgatatcatctgcatttctatcaggcacgcaactacacacaaaggacctcctaaacgtgtcacctaaagggcaagaaacgaagcaaatggaagaaaaacgaaaaggaaaataaacaagtaaatcatcacacaaaaaacaaaaata

SEQ ID NO: 35852 - DNA, 864 bp, Zea Mays
ttctaaatgttgcaaactgtgtatatcaccaccccgttgaaatgtcgccgccgttgccttggtatattggtggctgcctcttcacaccaagcagcgatttctcttggttgggcctatggtctaactatatcggcatcaaagtaggcatatgctcttcggaatttgtccaggtcagacaccccaagtcctccaagctcctttggcttggacactattggccactttactaagcagtatccttcgttggcgttctcttcccccttccaaaggatcttcagattttgaggggaagatggtgaggtgatatatagacatggacaacagaaccgagcttgatcaaatagtggttgaaaatgttctggcattcgacgcaggtttctgggttcgactggcagctagaattgatctctgcaaatcagatgatgataaaaaagattatgaagagctggcggaaaatgtcatgaacattgttgaccggcttgttcacaagactaatcaaaagattgaacaatcaactgatgtgctgaaggcaattattagtcctgcaatgcatgaaggagatgtgaagtggccaccaagagatccagatacactcaaattgatggagaaagaaataacacgccgagaacaagaaggacaacttgatgagggatttctgtcagaagttagtgctcagttgaggctaaacaagacggagataagccagggcttcaggctatgctgcaaaaggtgttgcagttatatgcttctaaatctctccaaaaacgtagttatgcatacaaaggggggcaagttgtagttcctgaaaagtttctcgaatgtgtaatacagggtctgtatttccacgtagagattttcttcgtt

SEQ ID NO: 35853 - DNA, 1189 bp, Zea Mays
ctggcagtacactacttgttagaagttgagccgcatctcttcaagctatttttttcagcttgatctggaggttaaactgtagaatgcatggtcttggctgccatttctgtgtcacgaaggatttgcattttcacactgcacaacttgcaaagctcagtttcatcttcgagtggaaacctgggaggataactcatggcgtaaaatgaagttcaggatctttgttgcaagggatgttctactcgtgtttcttgctgtacagcttactattgctatcatcggtgcgattgcatactttttagacagggatggaagtttccggaacagttttagcgatggttgggaccgcttcttgtcaaagcacccaatacccttctactattgcataggtgttgtggttttctttgtgctgcttggattcttcgggctgatagtacactgctcatccttcaacgacaaccaggatccatgcctagctgggtgccggaactgctgctatggttggggcatcctagactgcctgcctgcttccctggaggcatgctttgccctggttttggttttcgtcgttgtgtttgccatccttggcatcgcctatggcttcctcgctgcaaccatggcggtccagaggatttggcagaggcactatcacatcctgaccaaaagggagttgacaaaggaatacgtggtggaagaccttcacggcaactacacagcgccgaagcttgatccggagcatgaggaacggctgaagatgctgaagcttctttagagagaaagaggtgcacgccttcctgtatccgtggcaagtgcatcaacatggggcaatcctctctgcgtgccagattagggaatggtcatcccataacactgtacaaaatgatgaaatcctgcttggacttgtatgaattctctatcagacgaaacaaacagaagttctcagttttaccttctcggtaaccttcctcgacaacttggtctccgaaagtgtacgtgttcttctttactctttcccctttttttacaattgaaagtttgttgtctgaattgatctagcgatttcaatgatttcaataccttttagcgtccgaagcgaagatctcttacaatgtgcggtttgtgtaagtactgtggtaatatgcattctcataccattctagtgcctttcgcagttattcatttggtagatagg

SEQ ID NO: 35854 - DNA, 5876 bp, Zea Mays
cgctctgcaccgcgcgcctccttctctgctgcggcaaccgggaactgcggctgcggcggcggcgacttaaaccctcgagctcgctccaaggccgtcgctggtcgatcgggcggaagaggcagaagccagccagccagccaatggcccccaaggccggccgtggcaagggcaggggcggcaaaggcgacaagaggaagaaggaagagaaagtggtgcccagcgtggtagacgtcacggtggtcacccccgacgagtcccaggtgacactcaaggggatatccacggaccgcgtgctggacgtgcggaagctgctggggtcgaacgtggaaacgtgtcacctgacaaactattcactctcccatgtggcgcgcgggcaccggctggaggacggcgcggaggtggtggcgctcaagccctgcgctctccggatcgtcgaagaggagtacgcgacggcggagcaggcggaggcgcacgtccgccggctgctggacatcctcgcctgcaccaccgcgttcgccaggccccgggacggcgccgccaagcacagggcgtccaggcacggccgccccgcgacaccgccctcctctcccacgcccgcctcgaccggggcccatggcgtcgccagcggcgaggccgcgccgccgatatcggaggcgcacgacatggccgccatccggccgccgcccaagctgggggagttctacgacttcttctccttcgcccatctcaccccgcccgtccactttatcaggaggaaggaggcgaatggcgcttctcaggaaggcgatcacttcgaaatcgaggtgaaggtttgcaacgggaagcttctgcacgttgttgcttcagtaaagggtttctacttgtcagggaagccacacaacgttagccactccctggtggacctgctgcaacagctcagcaatgcgtttgctaatgcatatgaggcgttgatgaaagctttcgtggatcacaacaagtttgggaatttgccttacggattccgtgcaaacacatggcttatccctccaatatatgttgactctgccacaaggtgcccagcactgccagtcgaggatgagaattggggtggaaatgggggtggctgtggacgtgatggaaagtatgatcgcagacggtggtcaaaagagttttctgttttggctagaatgccttgcaaaactgaggaagaacgggtgatcagagaccggaaagcttttcttttacacaatctgtttgtagatacagcaatttttagagctgcgtcaacaataaggcgactcattgatcagtctatgaactcagttggttcacatagtggtacacatggttcaaacgtatttgaggaacgtataggggacatgaatataactgtgaagaaggatggtgctgatgctagtttaaaggtggaggacaaggttgatggtgttgccttctgtcaaacgggtgctatggatattgcacaaaggaatcttctgaaaggtttaacctctgatgaaaatgttgttgctaaggattcttcaacactcggggtggtgattgtcaagcattgtggatatacggcaactgtgaaggtttctggacgtgcaaaggacagtaatgatgttaaacaaacaaatgacatctctggtaaatttgatggaatgctgaccattgatgtacatgaccatccagatggaggttctaatgccttgaatgttaacagtctaaggataccactcccgagagttatccatccagaaactgttgttggtaaccagcaccatagcccaaagtctcatgctagtaatcctgcaaagaaattggcacgtaaaatactcaaggacagcttggtaaagctggatagcatgcctagcataaattctagaattattagatgggaactggggtcctcctggctgcaacaattgcagaaaaaggatactccagcgtctgagaatggtaaggggaatgcgatgaagactgacaaagaaccagctgtcagaggtcttggaaagcattttgaacaattaaggaaacttaaaaagaaagaatgcaacaatgaaggttccagttctgagaaggaagaatgtagcaataactattcatcaatgaatggtacacaagtatcagatatgatagctgctgatgaagcaaataacggggctgatattagcaagttaatgtcagaggatgctttccttagcttaaagagtttgggagctggccttcatgaaaagtccctcgaagagctcacaaagatggcccataatttctatgatgatactgcactcccaaagctggtagctgattttgcgtcccttgagctttctcctgtggatggaagaaccatgacagatttcatgcatgcaaggggacttaatatgtcctctttaggcagggtggtagagctagcagagaagctcccacacatccagtctatatgcattcatgaaatggatctcccagacttgaaaatggtgctgacacggatgcccatattgacaataatttgcgactgaaatgggtagagagcttcctttcaaaaagattctgctggaaactgaaagatgaatttgcacatttacggaaatgtatcattctgagagggctttgcagcaaggttggactggagttagctgcaagagattatgatatgaatagccctaacccattcgacaaatctgacattgtcagcattgttcctgtgtgcaagcatgtggtctactcatctattgatggtcgaaacttgcttgaatcatcaaagatggcattggataaaggaaaattagatgatgctgtgagctatggaacaaaggcactgtccaaaattatagctgtttgtggtccataccatcgactggcagctaatgcatacagccttcttgctgtggtgctttatcatactggagattttaatcaggcaactatatatcaacagaaggcacttgatatcaatgaaagggagctgggtcttgatcatccggaaactatgaagagttatggggatttatctgtcttctactaccgccttcaacacattgaaatggctctaaagtatgtcaaccgtgcgctatatctgcttcagttttcatgtgggctttcacacccaaattcagctgccacctacataaacgtagctatgatggaagaaggcatgggaaatgttcatgttgctcttcgatacttgcatgaagccctgaagtgcaataagaggttgctaggagctgatcacatccagactgctgcaagctaccatgctatagccatagccctttcaatgatggatgcgtactccctaagtgtgcaacatgaacaaacaaccatgcagatacttcaggagaaactaggggaagatgacctccgaactcaggatgctgctgcatggctagaatattttgagtcaaaagcattagaacaacaagaggctgcccgaagaggcatgccaaaacctgattcatctattgcaagtaaaggacatcttagtgtatcagatcttcttgacttcataagcccagtccaggaaagaaaagaaagcaatgtgcaaaggaagtgtcggcgtgcaaagaataataccagagctcatcatggtgaatcagttgaagaaaaggagaatttccagcatgactcaggatctcttggagcaagtaaagacggttttgaagaagaaaaacctgatgtgcatcctcctgctgtattagaagaaaattatgctgcccatgaagagcagaagcaatgtgatgttttatcaccagaagaatattctgatgaagggtggcaagcagctaatatgagaggaaggtccgcaaatgactggtttacagcctcgaacaaaaggggagaaagatgattctgcaactgctcctagccagatttcatttggtagctttttaaaaactgacaagttgaatggggatcccagcattgctgaagataagtctttgaatggtactgctaaaccagaacaatttacaaatccaacaggaattaacaggccaaccagcattgcttccaagtttatatcatacaaagatgtggctgtttcgccccctggcacagtattgaaaccaattttggagaagaaggaagcaaaggagaagggtagtggacatgatatttatctaacactgtcatccgaggaagaagatccacagtttacagaaaatgagaaggaaaagccaagtgaggacagtagcaaagaggttctttcaagtcagcaagacttagagagtcatgtagaaacacctgacagcaacagtgatgaaaacccatctgcacctaagaaggcatctggaagcaaactgtcagcttcagcgcctccattcaatccaggatcactcttatcaatgtcccacccatacagcacggtggcaatatatgatgctagtgctgttattcaggcagtaccaaaccaagcaatggagattctccctcatgccattgacactagagtgcctcgtggccctcggtccaccttgtactatcgtactgggcattccttccaaaggaagcaaggttacacgcacagccagagcactattgtaaggggtagttactcccccacaaccatgaacccccatgctgctgaatttgtgcctggaaaaacttcgcagcaatctgatgtggctgacagagaacccagtcctgctaatcatgtggccaattctgatctggatgttgtatcacagaccacagatgaagtgaaggctgaaacacctgccactgaaaaggcaggtcaagttgagaaagtcgtttcaggtaaaggaaaggaaaacagagggaaagacatcgtgagaaactcatacaaaacagaacttgcaaggcaaattttgctcagtttcattgtgaagtcagtgcatgacagtttaggttccgcccaagctgaaccagagaggaagccaagtggatcagatgaagctagtaataaacagagcagcaacttagtcaagaatgcttctggtcgcaaagattcagataaacaagagaaatccatggaggttcccaagggcctgaaggatacagagggatttacagtcgtttcaaaacgtcgaaggcggccccagccattcatgaaccccataaacggcctctgttctcagccgtctatttgcacctctgtcagttaaggtctcattgcattttcaaagacctgcaatagtttggaagatggaccattgcttttgcttaggggttggtagaagaattttgccgtatccaagcgagcagcgagcatgtagtcaaactgtacaaaattttccaggataccctttgtaataataataaaaaaaaactgctgtaatctgcagtagctgtagcgctgaataaagtattcctttgtatgttagatatgacagaatcagaggaaatagcaagcagatgtttaggttaatccaatatcccagtagtgcttctcttatgccctagtgtttctgcagtttctcaagatgtcgtggggatttatcgttgcaatctgcaaatgctgtcagagcagaagaaactgaatctgctaggcgccaagagtttgttcatgaaggcatgtcttttattgcttctttcccctgtgcccagactgctcagtgtggtcattggatgccttgtcagaggacggagcagcgtttcaccgtgaagcaattgcagctgcagaccagatcaccagaccactgaggccaggcgtgaactgggccggcagttttaaagctgttggcagctacgtatactgtacgagtctaaggagtagcctgcagctaagcgtagctgcagagaccacacaaatgtgaatcaaatcagttcagttccaaactgtcattgctgggagccaacatccgagactgaaaaatatgttgtgcatacgtatttttcttttgcatttaaatttgaaaccggctcattgtgtccattgc

SEQ ID NO: 35855 - DNA, 2645 bp, Zea Mays
gttttaaggcattctaaacttagctctggacctcagttttcaaaactgcggtattataaactacggtattgtcataactaaagtatagtatagtatttcaaaaactgtggttttcaaaaactttgttcccaaacagggcctaagtgtgcaagtgcaagtgcaaccgcgagcgcgaccttttcccgtgggcgcctaggaaaaacagccgtttcctgcgcccgtccctcaccttcacgtcggcgaccgaccggcagaccgacaaactcgaggcaggccccaatggcgttggctcgcctccgcctcctcgaccgctacggtctcctgtcgccggcgctctctgcgacggcgctgcggtccttgggagacctgcgcgcgctctgcacgctctccaccacgctgcggtccggcgccggcgaggacgagatcgagcgcatccgccgcgagttcgatgacgccaagcgcaactacctcagcattcccgccgccatcaaggacatgcccaagatgaatccgcaaggcatttacgtcaacaagaacgtcaagctggacgacctccaggtctacggcttcgactacgactacacgctgtcgcactactccgagcacctgcaatgccttatctacgatcttgccaaaaggcacttggtcaatgagttgaagtatccggagagttgcttgcagtacgagtatgaccgcaccttccccatcaggggtttgtactatgacagacttaaagggtgcctactcaagcttgatttcttcggctctattgaaccagatggttgcttctttgggcggcaaaggctgagtttgagtgagataaaagagctctatggcacacggcatattggcagagatcaagctcgtcatcttgttgggctgatggatgtcttctgttttagtgaggcatgtctgattgccgatattgttcaacactttatagatgcaaaactggagtttgatccatcttacatatatgaggatgttaatcaatcgattcagcatgttcacagaagtggtttaattcacaggcaaattctttccgagcctgagaaatttctgataaaaaaaagccaggtgttccgtttcttgaagatgctgaaagagaaagggaaaaagctatttcttcttactaattcgcctttctactttgtagatggagggatgcgttatttgctagaggttttgtttctaaatctaaatctgcttgtatgttttgtccatattgttgagcatccaaaggaccaacattttgatggaaattcctggagggaactgtttgatgttgtgattgcgcaggcaaataaaccaactttctataactcagatcacccattcagggtgtatgacactcaaaaggacaccttaacttttactgcagttgacaagtttctgccagatcaagtatactatcatggctgtttgaaatcatttctacagatcacaaaatggaaaggctcagaggtgatatattttggtgaccatcttttgagtgacttgagaggaccttcaaaagctggttggcgaacagctgctgtaattcgagaacttgaggatgaaatagaaatccaaaacggtgacagctaccgattccaacaggcaaaattgagtataatacatgatctacttgggaaagtccatgcagctgttgttagcaccgagaaaggccaagtctataaagcattgctcaatgagttgaatgcagaaagacgtcaatgccgatctgggatgcgagatttgttcaatacctcttttggtgcaacatttcttacagacacgggaagggaatcatcattttcctatcacattcatcaatatgccgatatttacacgagcaagcttgagaacttcttatcatatgcccctgaatcttggcttcatccacctcatgacataaagatcatgccacacaatgcgaaggtcccagcgagccttttcagtacctcctagttcatcctttctctatttcggtggagaaccaagccgtagtacccccacctatggtttctgtgcgtgaccacgtgacaggattgtggactgctgctgcattcgcttgcgttatactataactgaagcaccatatgatgcatcaatccagcagaccagcaagttagcattctctagaattgccatggaattatcagtcatgtgagtagttaaccgactcatttgcctgtatgacgaagcctctgttttccgtttaaaataaaaaaaggaagcatctgagaggccgcatacttgtgttcccatgaaaccctaccaacctgtaatggccgccaataaaacagtcacacgcaacccatctcgtttccccattttattcgcattctgctacactctttgctgcactcatgttacactgaactcgcctggtggcatctgacaagttttttgggatgagcagaagataatttgggttcgggcaacggataaattataaaatgcttatttgtccttgtctggaacaggaaggctatcttcaattctattgtttatggtcctagagactggatggagttccagttcttgctttgcatgaatgtggagatctggaatgtcaagaataatggcaattagtgcactcatatgaacacagaaaacataatattctgattcttcactgacgaagattttgttaaaaacta

SEQ ID NO: 35856 - DNA, 3285 bp, Zea Mays
cggcccaaatagcatgccaaggggcaagcgcccaagctcacccgcgacgtcaagcctgccctaacctcgtgtttcccttgctcggcttcaccccatcgccgccgtcgcaacgtgcccgcctgtttcccttgctcgacttcaccccatcgccgccgccgccgtcgcaagcgacgatgctcgacatcaacttgttccgcaccgacaagggcggcaacccggagcttattcgtgagtcccagcgcagccggttcgcctccgtcgagctcgtcgacgaggtcatcgccctcgacaaggcatggcgcgaaaggcagttcgagctggacaagatccggcaggagctcaacgctaccagcaagaagattggcaagctcaaagccagcaagcaagaagaggaagcgaagaagctcatggagagcacagacgaaattaagaaaaggttggcagccaaagaagttgaggtgcaggaggccaagagcaccctcgacgccaagctcacgacgattgggaacatcgtgcatgagtccgtgccagtcagcgaagacgaggcaaacaataaaattgtacggacatttggagagaagagagtagaggaaaatttgaagaatcacgtggacctttgcaggatgcttgacattgtcgcattggagaagggtgctgatgtggctggtggtaggggtttctatttaaaggatgaaggtgtcctccttaacctggcattgataaattttgggctagcctttctgagaaaacggggatttaaaccaatgcaaactccctttttcatgagaaaggaaactatggcaaaatgtgcccagttggcccagtttgatgaggagctttacaaagttacaggtgatggtgaagacaaatatctcatagctacatcagagcagcctttatgtgcttatcacttaggtgatagaatataccctgctgaacttccaatcaaatatgctgggtactccacatgcttccggaaggaagctggttcgcatggaagggacacagctggtatcttcagagtccaccagtttgaaaaaatcgaacaattctgcattacaagcccaaatgacaacgattcttgggagatgcatgaagagatgctaaaaaactcagaagattactataaggagattgggctaccataccaagttgtttccattgtctctggcgctcttaatgatgctgctgctaagaaatatgatttggaagcatggttccctgcatcaaagaccttccgagagttagtatcctgttcaaactgcactgactttcagtcaaggagacttggaattgggtatggccagaaaaagaatgatgagcagtccaagcagtttgttcatatgctgaactctaccttgactgccactgagaggaccctctgttgtattctggagaatttccaaaaggaggacggcgtcgaggtgccaaaggcactgcaaccttatatgggtggaatagagtttcttcctttcaagcaacctttggatgtcaaacaagcttctgactccaaatcaaacaagtccaaatcaaagggaaatgctgcttgagctggatgaggaacactatgttaatttttgggcctaccagtacacaatacccatagcatgactatggcgttgcagagaggttgggcagcaccatcagcttctcagagtgtggagggattgagatcgaggagaactgggacaaagttaagactatttttcttcctactgagaagccaacgaggcaacgacgtctgattcatgtgctcctttgattgcgacccatccattggaggcacacagaaaaattggcgacttcattaaaggagtatttgctgtcttccaagatgaatccgttcactatggtcaacggggagacatatcctctggacatcagaggagaactagatgacacaacagccttcaaaaacttcaagaagtgaatctgataaacagggataccatttcttgttgtcattgttggatttactcttatcaattgtgcaggtggggaggtatagaattccctctaccttttggaagagtactcagccctacagaaagtttcatccatgaactagatgagaaggtattgatctctgggctatatttttatctgtatttctttccctggggtctatcacatataaaataatcagtttccatgagaaatacgggatctgcagtgtattctgttgatgtgtgttaattcgccaaccttgttatttcagacaagtgcttgttcttttgtgctactttgcatgtcctgttgatgttataccctgatttaaggctgttcttcattttccttgcgactggatttgaacctgaggacgatgtttgtaggaccatgcatctattgtatttaaagtttaaattaaacataaccacctttttctaatgaaaatatgatgctgcgcttacctgtgttaaatttagtagttcccctttcactgagctaataaaaagttgctttgttgtgatgccatggctagcaagttctttcatctttgtttgccattctattgttgatagtgagagtgagcatgaggtgcacgctgatgtactcaagcggttcaaactgccagcgaagatcatggagttttccgtaccgccgacatgtgaacgatttatatagggacttccctactactgctttaacacttctggactatctacttgcggtgtttgtcaattgagataatcttgggaaagagtgacaaattcgatgagttgatggttgctgccgccgccgagaggcgagaagttgaagatgaagagcaggcttgaaaaaacagtgccgaccatccctgccacgcgtgacgcctccgccggcccccgtaggatcctttcgtctcctgctgtggcctcttcattcgcagccgccccatcagcccatcctccacggctggcctgaatcgccttgcagccccttgtcttccccgtccgcctcttttactgatttgtttgaaaggtaacagtgtgttgctcttttgttgttttgatgattctaactgaatgtataaagaagtcccctctccgatgcatcctatacatgttccttcccctcattgcatgtctccctactctttgcagtcataaccattttattgtcttttgttgctaggtcgaaaccttatatagtgctagatgtcttagcagtaacatcggtactactggctaatactggctactgagctaggtggtcctcaacattgcgacctaaagctgaaaacattttgctatgtttgtttggtctccttgcatgtaaaaatggctccctaaaaacttttgtttt

SEQ ID NO: 35857 - DNA, 1136 bp, Zea Mays
acaaaacgtgcctttcctcatagcccaagcccaccgtcagcacgcttacactcgctcgtttcccaacgcgcacccaacatggccgctccgaccgccgccgtcgacactgccgccccgcctcctcctccctcggcagaggccgcggctgcacctgtactggatcaaaaggtctctcctgctgctgcccctcagcccgatgcgcccgcgcccgcgcccgcgccgaagaagcggaagctcgaggaagcggggttccacacctccgaatactacaagatccgtgccgtcgtcgccgatctgcgtgttcgcttcgtccaggttcacgaagctactgatttccgcaacacggatgctgcacgtgagattatgagagaaataaatgtggtaatggatctatccaagaaaatgaggctcaagcttggtgctacttctgaacctgtaaagccaccggagaagccttcagctggacctgtgaaggacgagcctatgaaaccatcggagaagccttctgctgaacctgtgaagaacgaacccagtgagccagctctagctggagaaaacaatcgagctcccagggtaagccagactacaagttctccaaataatgcaggtattgatgcaccagtagtcaagcatgataactcagaggcacggaagtgaagacgatagaggaagcccaaagtaccgatccatcgagatagcatatcacgcaaatctgctggacaaaaatgcagagtgaccggttgattccataggggctcagatttttcttgcccctatcgggggtaaaattattcgctttgggctaatggacgaagagtcgtggacacatcgagatccaaactagattgtcttcagttgttcatatccattcattcagtactatgttgctaatttcccatgaacaattttatcttcaaatagctactctctaactgcatcattctatacatcacattggcctgcagcctgctgtatgaagttaattgccagtcaatttcaagtcgtgcttgagaagaggtgatggaattgcaagcgagttgtaaggctttctggctcacctcacatttcaaacttcattctatgtgcagtccatggtgtaaaacagtattttgcacaaccatataactctactggag

SEQ ID NO: 35858 - DNA, 1062 bp, Zea Mays
tttcggtgcagtaggatgcaggggagtctgattctgatagtgaagcatcggatgttagcggctctgatggagaagacacctcatggatttcatggtattgcaacttaagagggaatgagttcttctgtgaagtcgacgatgattatattcaagacgacttcaacctttgtggtctcagcagccaagttccttattatgattatgctctcgatctcattttagatatcgagtcatctcatggtgatatgttcactgaggaacaaaatgagctcgtagaatcagctgcagagatgctttatggtctgatacatgcacgatacattctgaccagtaaaggactggctgcaatgctggagaagtataagaactatgactttgggcggtgcccgcgtgtttactgctgtggtcaaccatgcctgccagttggacaatcagacatccatcgatctagtaccgtgaagatatactgccccaagtgtgaagacatctactacccacggtccaagtaccaaggcagtatcctaaccatactcttatcagactgtcttaatgcgtatatgtttcaaacttcgacctcttgacatcgacggcgcatactttgggacaacgttccctcatctgttcctgatgacatacgagcacctcaagccacagaagctctcgcagcgctatgttcctcgtgtctttggcttcaagctccacaagccatgaacctcatgtatttgtcttttaaactcctcaagacgtggcactgggggcatgcgggagttttgcaatccttgaagacttgcatataagagcgccattggcaggtcagtggattggtaaaattctatcatgctgcagcgtgcttgtaccttagctggctggcacctatccaacatttgaatgtagctctaaggatatcaatgttgtaacctaactgctattgttctttgattagtaaaccaggagccccccctacaatgtagaatatggcaattatttatggctttgcagaaaataacaacccttcatctgcttggttctccaaaaagctatttatctaaaaaaatatcaaaa

SEQ ID NO: 35859 - DNA, 1820 bp, Zea Mays
ttccgcctccgttttcctccccctccgacaccagcccaccacgcgagaactcgtcagatatttatgagcgcagccgcgggttaaccttcccttctcgctgccgtgctcctgctcgtgcgcgcgttcgcaatcgtagcgctggggttgagccgcgagtggataaaccctagccggtggtgtagctgggttggtggctttgatgccggcgacggcccgcttgtccccggaatggagtgaggtgacgaaggctgccatgggctctaactatgccacgattggattataggatagtagctggcagctaccagtttcctagaaccaatttgtggatagcgagaggagtgactgttgttcagtactttcacctcgatcatgggtggtgtctgctcaaggaagagaagccaattggtggatgaaggtgacgctctccagacatccccaaggttctcaaagaccagcagcttaaaatggctgttgcttacactgcctcgcagcagttctgatgtttccgggaagggacagggaaatgaacctgggcggtgcccgtccctcatggagctttgtgtggctagagtttgccaggatatcgacaggtattctacttttgcaatgctgccaagggatctcagccagcagattttcaatgaattagtaaattcaaaccgtcttacagaggcatcacttcaagtttttagggattgtgctctgcaggacattggcttaggggagtaccctggagtaaaggatgcttggatggaagtagtggcatctcaaaagcagtcattgttgtcggttgatatttcttgctctgaagtagctgatagtgggatagatcttcttagagattgctcaagcatgcaaagtttggcatgtaattactgtgatcaaatatccgaaagtggtctgggagtactgtcaggattgtcaaacctatcttctttaagcttcaagcgaagtaatgctgttactgctgaaggaatgagagcctttgcaaatttagttaacttactaaatctcgaccttgaaggttgcctaaagattcatggtggccttattcatttaaaagatctgacaaagctcgagtcattgaatatgagatattgcaattatattgcggattcagatatcaaatatttaacagatctgacaaatttgaaggaccttcaattgtcatgttgtaagatcacagatctgggggtgtcgtatatcagaggcttgcagaagctcactcacttgaacctagagggctgcccagtgactgctgcttgtttggaagctatttcaggattgtcttcattggtattgttgaacttgaaccgttgtggtatatacgatgatggctgtgaaaactttgaaggtcttaaaaggttgaaggttttaaacttggggtttaactatattacagatgcttgtttggtgcatctgaaagaattaatcagtttggagtctttgaacttggattcgtgcaagattggagatgatggtctatcacatctgaaaggtcttgtgctactgcaaagcttggagctttctgatactgaagttggaaacaatggactccagcatctatctggtcttcgtaatctgcaaagtattaatctctcatttactttggtcacggacattggtgtgaagaagatctctgtgttgaattcgctgaagtcagttaaccttgacaatcgccaaattactgatgttggcctggcagcacttataagtctcactaggctgactcatcttgacctttttggagcttgcataactgacaatggcacaaattgcttcagattcggagggtggcacacaggacattgatgtct

SEQ ID NO: 35860 - DNA, 251 bp, Zea Mays
caaggaagagatagtttcgccggggacgcataggggcgggttgctgcatggatgcaggtgcacaggttgatggacacggtgtagccttgcaagcagggattagtggttgcacggtagcggtggccatggccgccggcgtgtggggtagacaggcggaatggggtagacaccgaggttatggtggctcggccaaggagaggtgttgttcgccgattgctagatcaacaactgcatgcacattttgagaaaac

SEQ ID NO: 35861 - DNA, 355 bp, Zea Mays
tgttgattggttgctattgttttaatgatggatcaagactgcactgatgcatgcgtgtcggcatgggcactaggaggtggtgcagatgcttcttctcttcagatgcaatgttactagggcagattacttgagtggtcgaacatcactgcattttgctacacatgatggatttgttcggtgtattaggcttttagttgcagactttgtcccgagtgtggccttggaggatattgcttcttctgtggtggatggtggtgattgccagacaaacagtgggagcagtcctaattcatcgtcggggcagaagtttaatgaatccctaagaagtcggaggtggttgtggactgaagacgga

SEQ ID NO: 35862 - DNA, 1624 bp, Zea Mays
atttgctacaacttataaatattatttttgggggttatttggtgttttttgcccctgttgtataatgcaattgtgattatacccctacttttctaactgtgattttactctcgcgatcatgtttttgaagctttcgtttgcccctagtttgtactggcacttggtactgccgcattaaacgaaaaaattagaaatcgaaattagggccacacaaaaagaccaaagtaccttatatcctttgacccatgccttctctcctgtacccgttcacctagtattgatgcaaaatcctcaccctaacaagaagcggtgatgcgtcatgcgtagggatgcaagcaaaaaggttgacaccgcagaacaaggttggtttcaacgggaggtgttaccgaacgcgttagtggtgtgcgggacgaccaatatcgattgctgcgttggacggttcggtcgttatcgacttgaaccggtcggtaacggttgtctttagtgacgtcgagccttttgatttgtccatgcgcgtgccacgtcaggctgttccactcagcgcacgaaaaactagtggaggtaactccgaaggaatagcacatttcttgcagctgccacatttcacagaagcaactgtgaaaaagattgctcgcaagaaaatccgtgccttccaagaactttgtgacatgtctgtggagggtcgtgctgcattgctcacacaagttgctgggctttctgaagaacaagttcgggatgtggagcttgtactggagatgattccttgtattgaagtagacatcaaatgcgagactgaaggtgaagagggcattcaagagggtgatgtcgtgacaatgtatgcttgggtctcgctacgacggcgtaatggactgactgctgctcttccccattgtcccaacttcccattccacaaggaagaaaacttctggctgcttctagccgatgcggcatcaaatgatgtctggttgtcacagaaagtgagcttcatggatgaggccactgccataactgcggcatcaaaagctatacaagatacccaggaagcactaggtgcaagtgcaaaggaaataggaaatgcagttaaggaggcagttgacagggtgaagaagggcagtaggctggtaatgggcaagttccaagccccagcagagggtactcacaacctcacctccttttgtttatgcgacgcttggataggctgtgacatcaagaccagcttcaagctcaaggtcctaaagcgcagccgtgctggaacaagaggccatgtgcctgaagaagggtcagcagcagccgtagaagatggtattgaggacgaagaggaggaagatgaagaggagtatgatgactatgagagcgagtacagtgatgacgaggaggatgagaagaacaaggggaaagggcaggggaaggtcgtgaacggatcggcccatcaaggggctgaatctgatatagattcaggcagcgatgagtgattctacactgtattatgttgagaaaatcatagaacttaaccccatctattttttttaatttgaacatatccctattaagttgcatgcatcaatctaacccaaaagtttaatccgataagagttgtgcaattcacttatattatattccaaca

SEQ ID NO: 35863 - DNA, 1071 bp, Zea Mays
gctcaccgccaccagctcggctgatccaggccgtccgtccgcccggcggcaggcgcgcacgcggaagcctccaacgcacgcaaaccggcggcgctcgcttcccccttcatcaccgggcccgactccagcatctactgggactgggatcccgtaccccagccgggccccgccgtgcgcgcgcgcgcgtcagagtcgcaccaacctccgccgccgtgacgcctggcaaggctggagcctcagccagtcagccactcagcctccacccgaaattcccgtcccccctccaccatctcgccgcttttccaccctcgtctgctgctgttggtaggagagtacttgtcaattgcttttccaccctcctcctccgccaacccaattcttgccttccggctaccgctgctcctgttaggagtacttgccaattactattggaatcaccttcgccgcctcctcgagaaccaattctagcctaaaacccgcagtgatccgcccaactcccgacccactcatggtcgatcggcgcggccgctgaactgcctgcggcgggggcgagaggacgcgggtcgaggcgggcgatggccgggctggcggggaggcctggttcctggggcggcctggtgctgcgggtggggcaggctctcttcgccgccgcctgcatcggcgtcatgggcagctcgctcggattcgccagctacaccgccttctgctacttgattgcgtcaatggggcttcaaatgctgtggagtttcggacttgcatgtcttgatggatatgccattagagccaataaagatctcaccagtcccattctattgagcttgtttgtcgttggagactggcagcactaatgaaaaccaatctacggagtgtaggtaacagcaatcctgtcattcgccgcatcaagctcagctgccggtgtagtaatcctatttcaaaaggacgtgctcttctgcagaaggtatccccagctcccctgcggaaaatacgagctcgccacggcgttcgccttcctgtcttgggcgctcagtgcgacatcagcattgatcatgttttggctcctggctgcgttct

SEQ ID NO: 35864 - DNA, 1698 bp, Zea Mays
cactcccccacttcgacccgggggcgccctctctctgtctccggaacccttccagccttctcgctcctggaacccagacctcaacccttccgtccccgaccatcgacccccgaaggacctggcggtgtccagatttccagaagcatcccccatccagcccccggcgatcgtgcggaacctggcggctggggacgcgggagaagcggcgagggctagctggagatggacacggcggagaagatgcggtggcccttttcggacggcagcgtcaccgatctcctggacgcccgcagcctccacggctcccccgacattaagaaaaaagcacagtttcattcttctctagtgcaaaagcttgctttggaaaaggagatggagggtcatgttggttgcgtgaatgctatcgcgtggaactcaagtggttcgcttcttgtatcaggatcagatgacactagaattaacctctggaattataataatcgagagctggtgcatgatattgacactggccattctgcaaatatcttttgcaccaagtttgtccctgaaacatgtgatgaagtagtagtttctggagcaggagatgcagaggttcgtgttttcaatatgtctcgattaagtggcagaaggcctagagaaatttctatggaaccaacaatggtttaccagtgtcactcaaaaagggtcaagaaactagctgttgaacttggcaatcctaacgtagtgtggagtgcaagcgaggatggtactctgagacaacatgattttcgggagtgtagttcctgtcctcgtgcaggatccgctaatcaggaatgtcacaatgtgcttcttgatctacggtgcggagcaaagaagtctttagccgatttacccaaacatccattggcactgaagtcttgtgacattagctctgtttgtccccatcaaatcattgtcggtgggagtgatgcatttgctaggctgtatgataggagaatgcttccaccattgagctcgtgccaaaccaaaacgaagccgccaccgtgcgttaaaatgttctgcccattgcatcttgctaacaaagacatatttgcaccttacacatgttgcattcagcccaaatgggaaggaggttcttttaagttacagtggtgaacatgtttatctgtttgatgttgacccagataatctgagttcagttagatacacagcagactatgtacgggaacaattatttgtacccccttttcacaaagtaccagcaaaagaacatgcaaaagaaaagaagacttcagtaaatacagctccaagaaatttgtctaggatatgtgcaagaaatttatgcaagttgcaacaagatctctggagataggcaagaacttaatgcacgggattgaagcatgcagtgaagttcttgaatcaacggaaccagatattgatgatgacatgaggcatgggtttttgtgtactcgagcagcattgtacctaaagaggaagtggaaaaatgatgtttacatggcgattcgggattgtaatagagcgcggaagattgatgccacatcatatcaagcgcacctacatatggctgaggcactattgcagttaggaagactgaaggaggcatctgagtatgcagaggcagcaaataggcttcttccccctcattgtcaattgagccagcaggtggatgatttcaagcaacgcgttgcttcaggtgag

SEQ ID NO: 35865 - DNA, 1937 bp, Zea Mays
ctcggtatcattggagggagagtgcgagacagagcggattacgcacctccacggctccccagtccccacgcaggccgctctgttctgccagcagttggcacaagcagcttgggcgcaaaagaacaactgcgatcgagcaagggacaatggcccgcaccgcggcgccggccgcgggctacggagaggacggagtgtaccactccgccaccggccaatccctcaccttcgccgcctttcgctccgccgtcctcaccacggccgtcgccctctcctcgcgcgcgggcgtccggcgcggcgacgtcgtcctcttcttcgcccccaactgcttcctctaccccgtctgcttcttcgccgtcaccgccctcggcgccgtcgctaccacggccaaccccctctacacccctcgggaggtcgctaaacaggccaccgactcgcgggccaagctcgcaatcacggtctctgaactccttcccaaaatcgtggacctcggcttccccaccatcctgctcgacggcggcggcgacggcgacgcggccagtgccgccgcctccaagcctcagggagccagcgtgacgctttactcagacctcgtttccggggcgcgggagacggagtaccgccgcccgccgacgaagcagagcgacacgaccgcgctgatgtactcgtccggcacgacgggggcgagcaagggcgtaatcctgacacaccgcaacttcatctcggcggcggccatgatgacagcggaccaggacgcgctcggagaggggcccaacgtcttcctctgcttcctgcccatgttccacatcttcggcttgtccgtcatcacgttcgcgcagatgcagcgtggcaattccgtcgtcgtgatgtcgcggtttgacatggactctgtgatggccgcggtgcagcggcaccgtgtcactcacctcttctgcgtgccgccggtcatgatagcgctcgccaagctcgggagcgttgggaaatatgacctcagctcgctcaggttcatcggctctggcgcagcaccgctcggcaaggacgtgatggagggagtggccaagaattttccagaagctgtgattgcccagggttacggaatgactgaaacttgtgggatcatatctttagagtacccagaaaaaggacaaattcgtcaatttggttcaactggagcacttgtctcaggagttgaagcaaaaattgttgatgtagaaacattgatatgtctgccaccaaatcaactaggagaaatttgtgttcgaggaccgaacataatgcaagggtatttcaacaatgtgcaagctactgaatttacaatcaagcaagggtggttgcatactggtgatattggatactttgatgagggaggtcagcttttcgtagttgatagacttaaagaactgattaagtacaaaggttttcagattgcacctgccgagcttgaagggctacttctgtctcatccagaaattctggatgctgttgttatcccgttccccgatgctgaagctggtgaagttcctattgcttacgtcgtaaggtcctctgagagttctttgactgaagttgatgtccagaaatttattgaaaagcaggtcgcatactacaaaaaattgaggagggtgacctttgtggacagcgtaccaaaatctgcttcagggaagatcttgagaagagaactcatctctaaagtcagatcatccaagctatagcaagccggcttctgtgttcagaagctagaacgacttccaatttgaaaatttgtcagattgagcgtaaaggtttacatgttactgagcggagcttatcaagcaatacattcagcttgacacagtttgtgggacatgtatacatggtggtgtcggatgacttgtatcgaatattgggcctgatttacattcactattcgaaaatagtacagatataaaacaaaactaaaa

SEQ ID NO: 35866 - DNA, 321 bp, Zea Mays
cgccgcgtccagatattcaagctcgccgtggagcccttgcgcgtgcagccgcgtcccctgcgtctctaagccgtggagtttttcccctacgcacgcccgacccaaagccgtgggcgccgtcgagccgtcgaccctgctccattttccccgtctcagtttttgcagatcggacgcctttgattactccagcttcaacgtcgaggttcctcgctggtggccgcgtctgagtggttgtgttctttcgtgggaacgctcccttggccatggtcctgcgctttctgctcggcctggcgtgggctttagttgtcggtcgagcgcgtc

SEQ ID NO: 35867 - DNA, 1375 bp, Zea Mays
ctataactattttgggatggtgtttcttcaatattccttacaccttacatataagaccacctgtgaaggtaccattgtttaacatactgaagaagttcgatggtgagacagttacagaggttgtccgaccttccattgcccgaatgagttaattttcctgtgaagaacttggagttgaaggactacattccattacctaagccgaaagagaatcataagctacgttcaaagtatgacctcatagcaaacattgtccatgatggcaaacctggcgagggatgctacagagtatttgtacagcggaaatcagaagaggcctggtatgagatgcaggatctccatgttactgagacccttcctcaaatggttgctctctcagaaacctacatgcaaatatacgagcaacacgaatgagtaatggacagtggtcatcctatggtcagtctgtttgcttaacagagatcagaatatcacaaactaatccttatctttggagcagctttttttggggcagaattttgtagtatcttcacacatgtccagacttaatttcttgacaagcagagatcgagggaatgtacttgggtcatcaagtcaatgctatggaggctgaaacatcgtgaattgtttttagagctgctttgatagaggaacgatttcccacatatttcatgtttgtagtgcagcactgcagcctgtatctgttgtgaaccggtacgcttccaaccgttatcagcaaacttttgaagctcataaagtataattttttatgctacgtgctactcatttctgctttttttttgctacgctttaggtagagcagggttccagctgtatggtttagtattgcttttcgaagccttgagtttgtttctgtacaggaccggcaaatcacagtttcaaacaattgcggcagggtggttctggtccagttgtttcaaattagcttatccaccgatcaaattttgagcattaccaaagcaattaaagacgtattagttgactgacgaggaggcgggctcttctagaaccgagtcagcacttgcacttccagccctggcaaccttcacgacaagccaccaatgtttgtttgatccattgataatacacggcattaggatatcttaatcgttgtcacgatgatttggagcctctttggtagggcttcagctctagcttttttctgaaaaaagctagccctggcaaacagcttttcttaaaacggcttgctacgaaaatcgccaaaaaaatagagttgttttctatactacagagaagaaactataaatattagtttctatggctctagctctgacactaacactttaatacaggaaaataacttttgctttaagataaatcgtttctgacaaat

SEQ ID NO: 35868 - DNA, 752 bp, Zea Mays
gcccacgtctataataagaaagagagtgcctcgcgttgcgcttgcgccgaggaaaacagaaggaagctgaagctagcggccggcctaccgcacgcaacgcaagcagagtgcagaggaggattacagatcgaggcgtacggacgtcgagcgaggagtggtacatatggcagcgggaccgccgtcgtcggtgagggcggagcgcgtcctgcgggcggcgtgcgcggccatggcggcggcgggggcgctgctgctggggttcagcgcgcagaccaagaccgtgctcttcatccagaagaaggccgtccccaaggacgtgcaggccctctgggatgcgcgtacatggtgttcgcgacgacggtggcggcgctgcaggcgtgcttcgtggggctgctcggcgtcgacgccctgcagtggagcaagctctgcaacatctacacccgcttctgcgagcaggcggccgccggcatggtctgcagcctgctggccgccgccggcatggccgtcctctccgcgttctcggctcgggacctcttccgccgcccctgctccccggagtatagatgaattccagtagtacaagaaacctcaccaagatatatagccacactttctgatgtgtaagaattggcgcttgggctttgatcaagttcataagaaaaatgagaaacagatctttatggaataatactttaattgcttctaagaccctgtttggcaactcggaaaggattcgattttccgaacagtaacag

SEQ ID NO: 35869 - DNA, 1212 bp, Zea Mays
tgaacagggagatcttttgctctcacgcagaaaaaatgtttggatagaactttctgcttctccgtccttaagcccaagtggaagaaggaggagggggctttgacgccggcgagccatggcgggggctctgctctcctctccccattatctctggagccccacttctcagccctcgcttcgccccaggagcaggggaccgctcggcactggggcagtgcgtgttctgccgccgaggaggagggcccgtgtgctcgcttcgtgctctcgcgagcctgccgccatgaaccgcggtttggaggtggagaggaggcgccttctcatgtccgggctcgtgtcttctttcacaatcgtgctcccgatttcaggagcatatgctgttatggagactaatgaagacgtaaaaatgaacacacaagttgatgagatcaatgcatactcttttctttacccggtcgaactgccaggaaagaaattttccttcaaatgggtagagtccagaaaaccagagcgatattcctcagcagcaccactatcacctgatgcacggcaacgaattgtatcggagcgagttgacatgatacataatgttgtcatctcagtctcgaaggtgacgactggccagcgcatgacagagagttctgtccttgatgcacatgctacagaggttgacggagaaccatactggtattatgagtatcttgttcggaaatcaccaacaaaatctgcatcagaaccaaatttgtttcgacacaatgtaacgtgcactgctgagcgtgatgggtacctgtactcactgaatgcttccactcttagcaaacagtgggaatctatggggccctttctgcaacagactgttgcatcatttcgccttctcccacctacagaaaactatgttcctccctacaaggatccttggagattttggtgaatggagatccttttttgtagttaccatttttttcctcttcagattcaggttttagaccatatgtttttcacaccatatgtttagtgagtgttgtcctttcaacttgacagataaaattcagagacccattttggttacaccaatcctgtccgttctgattaattaacagtcatattcaccttaagagttactctctttgtcccaaaataaattaacttcttgaatcaccctaagtcaaactaccttgagtttgaccaactttatagtaaaaataacaaaaaaaa

SEQ ID NO: 35870 - DNA, 2493 bp, Zea Mays
ctcgcctgtgcctctatttcgttgaagccgcatccgtcgcgtttcataatgtcaaatctctcgcgagcgaggcagacccacgggccgcggccatctcacggtggaagcagccaagcagccggcctggcgcccctccccttccgtcccgccgctgctgccgtgcctcgtgcctgccagcggcggatgccgccccgccccgctgctgaccaccgccgctgctgagcatggccgccgctcccgcgggcgctcagaaccgctgcgtcttcgttggcaacataccatatgatgcgacggaggagcagctcgtgcagatttgcgaagaagtcggcccagtcgtatccttcagattggtgattgacaaagagaccggcaagccaaaaggttatggcttttgcgagtacaaggatgaggaaactgctttaagtgcacgccggaaccttcagggttacgagattaatggtcgtcagttacgtgttgattttgctgaaagtgggaggaacactgatagaaatagagaaaaggtcgacaatcctcaaaattattgtagaagagcctttcctaccactttggagttctctgttaatatgagaagttgtatagtctttgttcctgtgaataataatagttgtgccttctctgaccaccctgtgtctcctgttgcaatttcttacaagcatgtttgtggtcgtggaggaccagggatggcatctaatgttgatagtcaaaaacggttagctgggacttctgttgttggagagacaaactttcatcagcctgttggtctcccaccggcaatacatgctgcatctgtgatggctggtgtccttggtggagctcagactgcaaatgttcaaaacggtttacctgtccagtatggacttggaaacgaccctcttactcattatttggccagaatgtcaaggcatcagttgcacgaagtcatggctgaattgaagttcctaactactcaaaacaaagaacattccaaaactttgctgcaaggaattccacagctgccaaaggccttatttcaggcacaaataatgcttgggatggtgacaccacagatgatgcagatggcaaagagccaacagccgttgggctccttagcacaatcttcatctcacctcaatgagccatatccacagccagagccagatgctatggttccagtagtctcaagaccatcaagtttgccaactaacgtactaccaaacccagttatcctacaggaacaaacagctgcaatacatagttttcctcagcatcaacatgcatctcagccccaagtcaaaatgtttccacatggacaaccgtctgggatcaccgcacaatctccaatgctacatcagccccttggtggttcttccagtgttcctattcaatctcttgtgacctcagtaggcttaacctcacaggttcagcctccatttgtgccagagcaccctggaccacctgtcatgcctacaagtgtacaacagctacctttgacccaccctcatcttgctctggtagccgccgcacctgagactctaccaaatgaaataagggttgctgatcaagcaagtcatttgacagagtttactcatccttcaaaattgagaaaattggaggatggaacctcggtgcctggaatggtgaacagcagccatgctatttatacagctccactgcaagcagtgggccctagtggaccatcagggagctatagtgctggtgctggtagcttacaacaaccagggaatgaagggcagattacgcctgatgtggagtcagctcttctgcagcaagtcttgcagctgacacccgagcagctgagttcgttgccaccagagcaacagcagcaggtgattgaactccagaagatgctttcagctggtaaatagaagcaaccgagctagtgcagcaatattgccggtcgaggatctggcacgtcacataatggcgagttggcaactagtggaagctggaagtgatcctcagatttgttatcaagtcactaggccgcttcataacctgtcagcattttcttgtgggcatcttgatgccatcagttttgctcagaagtatccatatggctttctttcttcagatcagagataaaagaaatgttacaggagatggtagtttaaagaaagggatacacattatccatcactgctgtatcattatagggagaaaataacaataatctgtatccaaaggagctgtttttttttctgcttctccaaaatgggatatagcatcagatttttgtcctttccatttcgtgcaacagttgcaggtaggaaatgaattttgcgtaagcttgttatgttatcgagtagcatcctttatatttattctttatatcccttctttttctttatatcccttctttaccatttcttctaatgctccgtttggatatcggtattggaggacatgaagttgaattgatttcaataccaaatcagctatgatattaaaatgagatgcaatttcaattctatt

SEQ ID NO: 35871 - DNA, 233 bp, Zea Mays
cctctctcccctcatctatcacgagcacatctatcacgagcaagcatcgaaggactacgtgccgccgtaaaccgcggcaagaatagtcacccactgtcgaaacctacgccgtccaccaggaacctacacgcggtgatgtcgcatgcgatgactactcggagccgtggggattcctcaccgttatcggacccttgccgccacgccgcctcagatttccggtaagatggtttatg

SEQ ID NO: 35872 - DNA, 1078 bp, Zea Mays
ccaatttgagcaattaatttgttctctccgtgttagcttttatgtcttctgcataattttactttaattctttactcaagaagaggttctgttttccaccaccattaaatcactttgtgtgaattattttttcgttgttactctgactaatgcgtcaaattatttttgatgcatcgacacacattcctatgggctatggctatgctactatccaattcaattcctatcctcctaaaaacagcttttcatggagggtgttaaagcaaaacagtcacacgatgctttgcatttggaagtgtgctcgttgcaaagaaatttgcagcatgcaagcactttgatggatctgtgcaaccagaaacttatccacctggaggacaagctaagaggttggtcagagcggttgaggagactgtcagaggatggaatgcagcaatctatttcattgggcatttctcaaacaaagcttaccggtatgcatggggaagctccaaagctcgggcaggcattgaatgttctacaagcgaaggttgggagcaatcggctggaagttgctgagctgcttatagaactagagacggagaggtggttcatacacacatttgctttttattctggcaactggtttcttaacacttggtctaacaagttcagtttttcctccaggtttagtaaaaagagattagacgatgatttggatctaatgtcaagcaaagctagttctctaagagagaaggcggataattctcaagtccttcaaaaacttctccatgaggctaaggagtacaggggaatactgaagtgtggtatttgtcatgacaggcagaaagaggttgtgattgccaaatgctaccatctcttctgcaaccagtgcatacagaagtcgcttggtagccgtcagaagagaaggttggcgcctgtgtcgcacacaccagaactgcctggtgctctactgattcccggtatatgtgcagcatctcagaggctacgttaccaaaaggttcttaggtctactgagaagcattcacagttcagtagtagatcacagttgccagagacattttccaacaagcagagatag

SEQ ID NO: 35873 - DNA, 1394 bp, Zea Mays
acggatcaagcagcactcaccaaaccacatttgatggccacatcacccctgagctgcttctccgcgcgtcccagacccagatctccgggcaccgccgtctggttgcttccggccgccgttctcctcctcctcctcaaccggtggtcgcacatggcctcttacccttctgtctcccctcgtggctccggctcggtgcaggtcgggcgcgccgagctttactcgaagatggcgcgtgacctcgacgagcgcggcgcggcgttcctgaagggcggcgagacgtcgcagtcgctcacgctctcggacctcttcgacaccgcagatgacggcgccgtcgtacccaggctcaaggccgccgacccgccagtgcgcgcgaatgtgctctatatggaccccaagttcgccgctgtgatctcgaaagctgtaaaggacgtgtttcttccttattttgaccaagctatctggttccaaaatacgagcatgtatcacttcagcatgtttcatgcctcccatcacttggagcccattgtagcaactgaggatgagccgaagtggaggcagtaaaaggtgtcaccaagaatttgtgtccgcttaaaattgtattggacagagtggttttgacctcaaccggtgtgcttcttggcctgtggcaggttgaatctggtactgatcctgcagaaatccgctcaagattgagagaagctcttcctcgtgcacctcaaaagcaactgtatgaccctgttctgcttcacacctcgtttgcacgaattctgggacatcccaggctccctaaagagcaaagtgcatcatcgtttgataatgtcaagttcttccatgagctagttgctcaaattaatgagaagatctgtggctttcaggcgacgatatcagagctatggtatgtcgaagagtacgatgttcttgcattggcactgaatggaaagatgaaggtgcggaggctccaccttggctgcaatcgtcagggcatctgaagctagagaggtcatggaaacgggaaaggattaggagatgcacagccaccaaacagacttttttcgcttgcatgtctcgccgaaagggccaccttggtactgcccagctgagcgagatgtgctacaatctgcctttacataccgagaactgacaagttatattgacctagactatcttcagcagattatctatcatcatttctatattcaaatttcactttacgaacattagtctatagtacagaataaactgttggacacagactaatgtttatgtaggaacagtatgcatgttttaacaatatataatacaattatttgagcacaacaactattaaagtgatgtttggttcagacattgttaagggaatggtaatgaaatctcttactggcggtaatggttac

SEQ ID NO: 35874 - DNA, 2712 bp, Zea Mays
cttgattgtgatataggagttcatagacatgaatgcctaggtcctatttaaacttacgttgtgttggttgctcttgtacggtcaatagaagaacaaatgaacgattaaggtgagcgtagtaaatgtgtgtacttgtgatgtcgtggtcatgttgcgtaaataaataaaatgttgtcatctttttaatggtgttaatgttgaacgccgacgacgtgtagataactaaagctaacatgtagttatctatggtgtcttccactttaatgtttagttcgccactgtgtctttgtatatcttgtgctatttttgtgctactttcattatattcatacatatgcatcttgcacctcatataggaccgagagatgatgatcgagctagtgatgtggtgccaaccacaagatgcagtcggtggacgacccaaggaaggatggacttaaccagtggatgctcgccaagcgagtacctccccagcaaacactctctaagtgttaaattaaaggcaagccccggttttatgcataaccgttatatatgctattttactgcacttaatgtttgtaggcttgtactgtgcacttaagtgtaggagttgactggaaccttagttgcatgaactcaggattcctattgagatgaatactagtatgctaggtcgagtagctgctttattaaatagggatctcgatagaagtcgagtgatttttctagcactcgcgcgaggtcaggacattgattgtacccactttcatatcatactgatgttggtctgtggacacggatccatggggatgcatggtctacgagatgaaattggaataaggattaacgtgcggatacctgtgtcaagcgtttgaatgtactaaacatatgccgagaaatatggtaaatcggcaagcctagtacctgagtgaacctggcagtggacatatcccctcacgcgtcctgagacgaggtctcccattccggttatggtgggtacaagtgcggtcactgcacgatggccagtcggggtcagtgaggcattgtacgccaaggcggtgagccctgatctgctgacggggaatcgatggggacggttgatgtgtgtggggacggagtgcccctacatgtcgtgtgtttaggtttaccttgcaaggataaaaactcgattcgaatcgtctgcttctcgcagctaatgagactgcttgatccattgtactgcattgagtaataagtggaaatgaggtgactgagaaaagatgttgattggtaaaaatgtttgataccatgtatgattagctaggtacacatctagtctaaaggattctactaaaacttgaaaagctaaaacttgtttttagacttagctagtgcttttggcaaaccaaccccctcagccaaatagctgcatgtctagaggtagaggagtagactcctcacaccgggtaagtctagctgagtattagtatacccagccttgcttgtggcacaatttttgcaggtactccttaggatgattggttgatggtgcgacttggccttcatccctgccaccgggatagatggtcgagtgggttactgcttccgcaggagaggaccaggaggagtagtgtggccaggcttcgccatgttactcggttcttctccgttagttatttccgctgcatcaaaatttatggttattatttctgaaactccgataatgcaatcactattgatacttattaaatttgtggtattatgctttattgtctttctctgtgcctcaccttcgagtgagctagtggtattcgatcctggataagtggctttatcggactagatccgagggactgacgggttattcctgtttaagtgtgttgctgcccttaagggtgcgacttgggcacttaagctggaataattcgggcggttccgccacagctgatatcggagcgaataccatcacagagaagtcaataagtcatgattaccaaccttttctaaaagtaaaacttgctagaaacccaggttggatagatcgtcaggacgatcaggatagacttaggacgtgaagccttaggaaatagatgggtagctaggtggctagttatttaggccataaaggctactactactattatgaaggatgttatagcaagcatccgaaaaattagttaggtctgagaagacgactagaatgagcatgcatgcatcatgattgtcgcataattgtctcttgtgcactaacatgcttctctcacctatattccaataataagaacttgtgaattgttggggaccttcggcgtccgaaggtcctcaaaaacagaatttaacagtatttctgtagtacaatatgtgaacaggtaccctcagactaaaatcggcattgcagcagaccggaataatacgaagcttgatacagagccgaaggtgttgagcaggaaagcttcggcgtaacggcagagagtgaaaccgacttaaagatgaaaaggctattcagacctcaatagattactatagagttattgtcagatgtaaagggcatgaatgtaattttgtaagggctgtgtcccgtgtctataaataggtgaacagtatccccgtactgttcacgctgacttggcattcgctttttgcgtcacgcttgtacaatcatttccttccgattgaaggtacacctgttgttcaataatatttttgtttatactcaataataataaatgattgttcatgttttcctttaca

SEQ ID NO: 35875 - DNA, 1875 bp, Zea Mays
ggacaagtttcatgcaaggagatggtcctgttgttatgtaaagttgagagataatggagctgcaaagtcctctgtcagaaatagtgagggctgttcagttaagttgagactgagtgtttggctgtttctgctatactttggaacaccacaacttcagttctgagtagtttcagctttggagtgttgtgccaaagtggaagacctatggttggagaataaggcttgttaagggagatgggtctgttgtcatatgaaatggtgagtaaaatgctcccaaacttgtcctgtcaggtttagtgctgtgccgtttcagacagtgggaattggacatttcagtgcttgctcaaactttggtgcaccatagctgctgtttcaagtattttcgacctaggagtgttataccaaagtaaaagagctatgtttagagaacatttttggttaaaggaactgggtctcttgccatgtgaatctgtgaaataaaagggcaccaaacagtgaggagagaaaggggagcagcaggactagtgaagtaaattcagatttgggatgaccaactgaagactgaaattcagaaaagtgaaatggtaccagtgttttgcagctgatttttgagcaccataacttgtaatccataaggattaggtccaagagacttataataaatttataaacccttgatatgggaacaagttctattaacagtaactggtctgtcttaattgaaaatcaagagaacagactaattgaagttgggtgggtcagtccagagctgtagattccaaatacagaaatatctagctgtgatctttttcctccttgccgtgtcctactttggtatgatgggggagagcaaagatattcagatttaggcacatctctgaattatcatctgtaagaaatatctggctctaatattttcttcccctgtcgtgtcccactgtgaaatagagcggtggttgggataagaaggagcagaaatatccagactcgtgcatagctgaaatatcatcagtggaaaaatctgctacagtgcgctccacccttaccccctcctttttccatggataatcgtcaccctgcatggctgtattctgtgaatctgcgtggatcttcttgaagcaacaggggagggaaagaaagcagaggctagttcagtgatccgtgcttcgatcatcaaccatagtgagtagcttcagtcagcagtattgctcttccttcccaaaatcataccctggacgcgcccaattccatcgattaaggcactgaacgtgtctggtgaccacacctgcagatattccacttcaccgtggccagaacgtgaagaagagatagaagtcaccgaagacaggacaccaccaccttcggaatcccaggccgggaattgtttctactttgatatctgcggatccgagcctgattcacctgtgaacgaaggcaagccccggtgcatgcaaccccttccttgtgtttttaaatacttttcgcacactctaagtctagtgaaatgtgcattaagtttataggagttgcttgaaaccctttgatgcattgctttccttgataaccatacctttttagatacttctgtgaagtatcaaaattatgatttacaaaaatgcttagccttgcttagatcttgtggatagaggttgtcctcagtctaacccgggagaggatggcttctacctgcaagaatattttcatttggagcaatagtgggatcttactgcaaagttccctgtgatgctctttcatcctaaggaacagacacaatcctaaggatggaaatacttaaattgagacttgggttaggaacaggtgatgttctacccaggttggttaaggattaacgtgtatgtaggcgtgctgaccgag

SEQ ID NO: 35876 - DNA, 1907 bp, Zea Mays
ctgacgcttcgggccgtcgtcgtcacagcgagccgcgcctcgcctagtcgcttcccactgcgcgccgccacgcaccagcccagccagccatggcgttcgccgcgcggaggagcatcgccacccggctctctcaccatctcacgcgacgcctccatccctgcgttccacattcgcgtacctccgactccctcgacgagcaggcgtcgagaccctcgccaccgctcccgctcccgctcccaccacttcacgtccagctcaagcaacgttctagagaagtccaaatcctaggcttcctccctttctcgctccgcctcgcggggccaacccgccgcaccttctcgtcctcagcccccgcccccaacctcgaggcggcaccagccgccgaggtcgatgccgcgggcgtgcttgcggatgcagcggaggcggcggcgtcagtgccagcgccgttcccaggggaggtagccgccgcggctgcggactcattcccccctgttgccgcacttcagcacattatcgacgctatccatacctttaccgggctgaactggtgggtgtgcatcgcgctgacaacatttattatccggatcgccacagtcccgttgctcgtgaaccagttgaaggccacgacgaagctaagagcaataaatccagagatggaagtcattaaagaccagatgaatagtatggatccaaaatcagtgcaggagggacaagctaaaatgaaagcgctgttcaaaaaacatggtgttagtccacttactccaatgaaaggactcctgatccaagggccaatattcatgagctttttctttgccatatcaaacatggttgagaaagtaccttcattcaaaggaggtggaacattgtggtttactgacctgacgactccagattctctttacatcttgcctatgttaacaggactgaccttcttggccacagtggagcttaacttgcaagaaggaatggagggaaatcctatggctggtaaaatgaagtacttttctagaggagtagctgttttgacagtcccatttacaatgaactttgccacgttttctgttactggacctcatcaaacatattcaccctgttatatggtcttgttatccggcgaccagctgtgaggaagtggtttgatcttcctgctttggaaaatacgcgttcgctcacggcaaagccagtattcaatatgtttggtggatccaaggcaataccagccgcacagtcaccagtagcgatcgcaggagcccagcaatctggtctggaccaacctgatgcttctgctcttggctataaggtcaaaaatcttgagaagaaagtgaaatccaggggtaaatctcggaaacacaggtaaaattttgtgcatctgtgccccagatgagcaatctgtacttccaccatcggaatgatggatacttgatttgtcctgatatgccccccaaaaatcagattttgtattaggaacctatcttttcgtcgtttttggctgcttttgttttgatttttcaggggggggcgggggtgaaataagccacataaatgtttgacttagtaccagagttgattatacacaaaatgtatttcagtaacttgtgatagttaaaacattggagggtcatcttccaaggattggtatgaaagctacgttgaagttcagggacagtcaatcaacttttgaggcaccattcgacattctgtagcaattggcaattaggttcaaagtgtgctgggcagaattttgtggcctgaatgaatattgagtttgtatgtactaaactgtcttagaataccatttacaggacgtttggatcctttcattttagaggaattggaattcactcaataaagtaacttatttagtttggaatttgacattccaccactttctaaaattcagatataaa

SEQ ID NO: 35877 - DNA, 1783 bp, Zea Mays
gattattcattcattcattcctccttgctctcgtccttaactcgaaagctcacagctcaggcgtcgtccctgcttctcagacagaggatgagaaccttgtccgcgtgatgacacagccggcatacgtactgtggatggcatgattagcgccatcagtggcatcatggaggacgtcgtcaggatcgggagcttcgacttggacgccgtcagcggcgcgtacccgacgacgctgcccagcccgaggatggtcgccgcaggacgagagctccagctcatccactcgccacgccagccgtcgtcggggttcagggagagcctcaacccgatctacaccgaccacgacaccacgacgacgaccacgacgacggcaaccacggattcgtcaccgttggccgccgcggcaaaccacgctgcgacggcggcagcggcagcggcacgggccgacggcggcggcagctcggtgcccgcgcgtcgccacactgccagcgccgccgggaacgggcgctgggaggccatccgcgtggccgagccaccgctcagcctgggccacttccgcctcctcaggcgccttggctacggcgacatcggcagcgtctacctcgtcgagctccgcggcggccgcggcgcgctcttcgccatgaaggtcatggacaagggctctctggccgggcggaacaagctgccccgcgcgcacacggagcgggagatcctgggcctgctcgaccaccccttcctgcccacgctctactcccacttcgagaccgacaagttctgctgcttgctcatggagtactgctgcggcggcaacctccacgcgctccgccagaagcagcccaacaagcgattcaccgaggacgcagccaggttctacgcctctgaagtcctgcttgcgctggagtacctgcacatgctgggcgtggtgtaccgggacctcaagcccgagaacgtgctcgtcagggaggaaggccacatcatgctctccgacttcgacctctccctgcgctgctccgtcagcccggcgcttgtccgctccccgtccggccgggtcagcggaggcggcggcctcgcccacggctgcatgctcccgcgcatcctccaggtgaagaagaagaagaagggagacaaggctaataaggccaataagctggacaacgagacggtgactagcaagaagccgtcgtcgctggagttcacagccgagccgacaagcgcgcggtccatgtcgttcgtgggcacgcacgagtacctggcgccggagatcatccgcggcgagggccacggcagcgccgtcgactggtggacttttggtatcttcctctacgagctcctgcacggcgccacgccgttcaagggctccgggaaccgcgccacgctcttcaacgtcgtcgcgcagccgctcaggttccccgacgcgccggtggtcagcgccgccgcaagggaccttgtccggggactgctggcaaaagagccgcacaaccggctcgcgtcccggcgcggcgccgcggaggtgaagcagcacccctttttcgaaggcgtcaactgggcgctcgtcaggagcgcccagccgccctacatccccgacgccgccgttgatcactgttcccacttcgcctgcgacggagcggcgcaaggtgccacgcccaagagctccgcacggaaaaccggctcgcgtcgcactgattcctcgcatgtcgatattgagtatttttaggatcataggatgtgatcacacgttttaatttgagatctccatttgtatcttatccttggatgtcctcctgga

SEQ ID NO: 35878 - DNA, 1177 bp, Zea Mays
ccaccgcgtctcctccttgtcccgcaccttctccatctccatcgccggcctccatttcttgcctcccgtgccagccagtcactctcgtccgccgcagatcgagaagccaccaccaccaccaccaccaccgcatggccatggcagcccagcagcaccggcaccacaagcgccgccgcatcgccctctccccctccccgtccccgtccctcgcgcccatccccggcgcccccacgccgccgctcgactcgctggccgacgagctcctcttcctggtcctggaccgcgtggcccaggccgacccgcgggcgctcaagtccttcgcgctggcctcccgcgcctgccacgccgcggagtcacggcaccgccggacgctccgcccgctccgcgcggacctcctgcccgccgcgctggcgcggtacccgtccgcgacccgcctcgacctcaccctctgcgcgcgcgtccccgacgccgccctcgcctccgccgccgtctccggctcctccgccctccgcgccgtcgacctctcccgctcccgcgggttcggcgccgcgggcgtcgccgcgctcgccgccgcgtgcccggacctcgccgacctcgacctctccaatggggtccacctcggggacgccgcggcggccgaggtagcgcgggccagggcgctgcggaggctctcgctggtccgctggaagccgctcaccgacatgggcctcggatgcgtcgccgtcgggtgcacggagctgaaggacctctcgctcaagtggtgccttggactcacggatctggggatccagctcctcgccctcaagtgcaggaagctcaccagcctggatctctcctacaccatgatcacaaaggatagcttgccttctatcatgaagctacccaatcttcaagagctgacactggtggggtgtattggaatcgatgatggtgctcttgttagtcttgagagagaatgcagtaaatcactacaggtgcttgatatgtctcagtgtcagaatatcaccgatgtaggagtttcatccatcctgaagtcggtacccaatctattggaactggatctttcatactgctgtcctgttactccttctatggtgagaaacttccagaagcttcctaaactgcaggccctgaagctggaaggctgcaaatcatggccaatggactaaaagccatt

SEQ ID NO: 35879 - DNA, 3114 bp, Zea Mays
gaagtttgcccattttggttccaattattgccttgttacttctctccgactggaaatcattactgtggttgttggaaatatcccaagttctgactcttctggaagacttatcttactaccaaaagcttcagcacagtattcttccctctctgattctaaaagggctaagaagaaatcaggctacaaaattgggtcacttgttgaagcagagattattgatatcaaaccgcttgagcttctactgaaatttggtggcaatcttcatggaagaatccatattactgagattcttgaagaggattctgctgagcatccctttagtgaactcagaatagggcaaaagcttactgccagaattgtttcagaggctgaaccttctggaaagagtggcaaaaaattcaaatgggaattgtctattaggccatgtatagtcaatggagagtttgctcaaaaagaacaaaatcacaccacaaatgggattgtacgtgcttatgttgtcaaggtggataaggaatgggtctggttaactgtatcaagaaatgttatggctcatttatttttacttgatagttcttccgagcccagcgaactgaaagaattccagcagcgctttagtgttggccaagcagtgaaaggtcgtgttatcagtgtgaaccaggagaaaaggttacttcggttgaaggcacttgataaccaatgcacacaaccgaatatagatgaaacacaagaaccaaagtcctctgtgtttggacaaacaaaacaaggagatatcattggtggacgtgttcaaaaaattctacctggtgttggtgggctcgtcgttcagattggacctcatctccatgggagggttcattatactgaaattgttgactcttgggtgtctgaacccttgtctggattccatgagggccagtttgtgaagtgcaaggtcctgtctgtgagccgctcatcagaaggatcacttcgagttgatctatcactccgttcatcaaacctgatcagagactctaacaactcaagactagatgatctggaaacctgtacctcccggattgagaagatcaaggatctgctccctggaactgagattaagggctatgtgaagaacgtgaattccaaaggatgttttattatgctttctcgaatggttgatgctaggattactctatcaaatttatcagatgaatatgttgaaaatccacagaaggatttccccgttggaatgcttgtacacggaaggatcctgtctacagacccatcatcagggagagttgaggcatcacttaggaagaccactggttcaaaattggaaaagctggatgatattagttatagtgacttgcatgttggggatatcgttgatggccaagttaagcgggtggaatcctttggattattcgttacaattcggagaagtgaattggttggtctgtgccatgtatcagaactttctgatgaacctgtcgttgatattaactcttgctataaagctggtgatatggttaaagccaaaattctgaagattgatgagacgcggcatcgagtatcacttggaatgaagaagtcatactttgattctgatctgactgctgacacaaatgatgatgaaagtgctcttatggacatcagcgttgcccctcagatggttgaatatcataacagaaatttagttcaccgcaaagcagaaccaagggcttctgttctgcctcttcaggtttccttggatgaatcggaaggttccgacctagaggataatattagtaatacatgtcttgaaattgctaatggaactgaagcaaatgctaaaaagagtgataaacagttaaagaaggaagcaagaaaacaaagggaactagaaatcagtgctatggaggaaagggctttgcaggaagatataccacaaactccagatgattttgagaagttagttaggagctccccaaatagtagttttatctggataaagtatatggcaactttgttagatcttgcagatgttgagaaagcacgtgcagtagctgagagggctttaaaaacaataatccccagagaagaagaagagaaactaaatgtttgggtagcatatttcaatctggaaaatgaatacggtagtccaagggaggatgctgtgaaaaaggtattccaaagagccttgcaatattgtgatcccaaaaagctgcacttggctcttcttgcgatgtacgagaggaccgaacagtatgagcttgcagatgaacttctagacagaatgaccaaaaggttcaaaacttcctgcaagatatggttatgccgcattcagtttgctctcaagcaaggcaaggatgttgagtacatcaaagccattgtaaaccgtgcacttctaagtttgccacacagaaagcgcataaaattcctctcacaaactgctattctagaattcaaatgtggggtgcctgaagaaggaagatccagatttgaactaatattgcgggagtacccaaaaagaacagacctttggagtgtttatctagaccaagaaatccgccttggtgacgtagaagttatacgggcattgtttgagagggtgacttgtctgaccctacctccaaaaaagatgcagttcttgttcaagaagtatcttaatttcgagaagtcactgggtaaagacaacgaaagaattcagcttgtgcaacagaaggcaatcgaatatgttcagagttcactgccgtcacaagacaactcttgaactacatggagacttaataagcccacaaacaatcattaggaaataccagtcgtactgtagatgtgatctctttgatgactccttgaacattattgtgaaaaggtcaatgtaaaatgtgggctgttcaaaattttgtttgaaacctttatataagttatgagtctagtatgtcatgtttcacccaattttttggaaggaactattctaagccggatctggttcgaatattgaccttttctatctgtggtattgactgatgaggcacaattgaatgggtaactgtctgtgctactctgtcacacccgggtttcggacaccaagacacgggcgcgaacataatcacctggtgttgctgggatcaggtcttacacatatgatgaatcatg

SEQ ID NO: 35880 - DNA, 297 bp, Zea Mays
tgtgtactcacccttgctttaaaaaccactcaaccctaggttgtccccattgtaatcagtgctcaggagaagatgaatgcaacatggaggactttcaggagcttcaggacttcgatgagttctagttgtgtttagtggaaaacctccagtaagttgcctataaaggcctaatcattctacgtttcatatctgcactttgattatgttaatgactatgttaagttaatgactccgtggatgacatggacatcttgatgtaataaagtactatttccacttttattttgagcaatgtgt

SEQ ID NO: 35881 - DNA, 1002 bp, Zea Mays
gcaaaactacaaatctttgttcagttgttcacataaactgacataaaaatcacttgaaggtaaatgttttcactgatgcaccaagccaataccttctgcaaatatcacgcgcttcgaatatttcgcctaactgtttctgaattagtatagctgaacaagctcaatttagcatgatgtcttacagaatagtgccacatgtatctcatataaatgcagagaagtgccagtatcaacaatgtcacctgggatctactttcgtacctgagctgcgtggatacttcttggcaactgaaaatttctattttacatcaaagttctttggacttaagaagtcttcatcactctctgatttcatgtttgctggagaacaattttgcaatcaggatttgtccacccttagaaaaaaacatcctaataggtcagatgaagatttttcacggtattgcttctcgatggcatatattgtggctctactgcatgacagtcttggtgtatcactggatgataagaggattgagtattcaaaccaggttggagacattcaggttgaatgggctctaggagctttcatcacactgattcaaaatgcaagtttaaagccattacacaccgctgtggaatcaacccatagcaatagaccattgtttgctgtgctgggaatgtttcttttatgtggagtactttttgtatcaagatggaggaagcacaagacgaaagtcatatacgacttagagaaaggccggtacatcataacacacatcagctgatgctgaaccttgtgcagaagaactatatttatacgacaggaatagatgttgtgttgtacaacaatgtaccagttcaattatttgttttattttaggtagcagagctgggtgggtagagcatgaaatatagcacaaatgcgtatagaagaatgtgtagaacaagttgccatgtgttaattgaattattttggtgaataattatacctgttttgtttatcttatgagctccacattt

SEQ ID NO: 35882 - DNA, 3133 bp, Zea Mays
ggatcctgtccacaagttcatgacccgcccccccacccccagtggcggtggcggcagacccgccgggcagctggaccgagccgatcggtccggtcccatctcagcggcccgcggcgcctgcccaccctctcagccaaaagccccctgcacccagtccatccaaacctgtgtccgcagctctcgccagccagtcgccgccacgagaggggatgtcgacggcgagcggcgtatccgctggctccgtgctccagctgccctcctttcgggtgccggccaagagatttctgcctcggagaacagccgctggtgctccggctggtaacttttttgtgaagagagatattatatataatagaagctaccaccaattcttaccattgaagcatataggaggcttgcaagcagcagtacttccagttactccaccactattagatggtgaggggaaaaagaaacaaatggctgaagagtatgggttcacacaaattggagatgaactaccagatgatattactcttaaagatgtcatggatactttacctaaagaggtatttgaaatcaatgatgtgaaggcttggacatcagttttgatatcagttacttcttatgcgctgggtttatatttcattgctaagtctccatggtatcttcttcccttggcttgggcttggacaggcacagcagtgactgggttttttgtgataggtcatgattgtgctcacaaatcattttcaaggaataagttggttgaagatgttgttggaaccttggctttcatgccattgatatatccttatgaaccgtggagatttaagcatgaccgacatcatgccaagacaaacatgttgatagaagatactgcatggcaacctgtttggcaaaaggaaattgaatcatcaccttttctaaggaaggcaattatttttggctatggccctatcaggccatggatgtctattgctcactggttgatttggcactttgatctaaaaaaattcagaccaaatgaagttccaagggttaagataagcttagcatgtgtgtttgcattcatggcgattggatggcccttgatcattctcaaatcaggactagctggatggtttaagttctggttcatgccatggatggtttatcatttttggatgagcacttttacaatggtacatcacacagctcctcatataccattcaagtcatctgaagaatggaatgctgcacaagctcaattaaacggcacagttcattgtaactatcctcaatggatagagatcctttgccatgacataaatgtgcatgtcccacaccatatttctccaagaattccaagctataaccttcgtgctgcttatgattccatcaaacagaactggggcaagtatgtcaatgaagccaactggaattggcgattgatgaagacgatactgacgagatgccatgtgtacgacaaggagagatactatgttccgttcgatgagctcgcgcctcaggagtcccaaccaatcaaattccttaggaagttcatgccagattacgcatgatgccatcatcacagctgttgactagttgagattattcagtattgtcggcacaggtggacagtcacattttcagtgattacgcatgtcccaaaattttgactggaatactccatgttacactattattcgtgcagtaggaaagcacgtagcgtaccaaaatatttatacttcaggaaatagacaaagacattggtgatgaaaacggacagaatcgtgtggaaaacatctcttctcttgtcatttctatattttttttccggaaacagaaacacgttcaaaattcccggaattgaaaacagggttgggatatgtggttgttcggaaacaaactaatttactaataaaatacgacttgcacaggcctgctgggccgccgcaacctaagaatggacaccgtcaaatgagcccaccccttaataaaccctagcccgcctccgccgccctataatccgacgccggacgccccatgatttcgctttcttcttcccgtcgagacccaaccataccagcggcgccgcaggctgacgaggaggcggagtagagtggccggactacctcgacacctccactgcaaccatgggtatctcacgtgattcgatgcacaagcgccgtgccaccggtggaaagcagaaggcgtggcgcaagaagcgaaagtatgagcttggccgtcagcctgctaacaccaaactgtctagcaataagacagtgaggagggtccgtgtccgtggaggcaacgtgaagtggagggctctccgattggatacaggtaactactcgtggggaagtgaggctcttacccgcaagacccgcatcctggatgtggtctataatgcatcaaacaatgagcttgtgaggactcagactcttgtgaagagcgccattgtacaagttgatgctgctccattcaagcagtggtacctcactcactatggagtggacatcggtaggaagaagaaggtgcctgttgctaagaaggatgcgactgagggacaagagggtgaggctatagctgaggaaacaaagaagagtaaccatgtgcagaggaagattgagaagcgacagcaggaccgtgcactcgacactcatattgaagagcaatttggcagtgggagattgttggcctgcatttctgcccgtcctgggcagtgtggccgagctgatggtggcatttccttttattggccagctacatccttgagggtaaagagctcgagttctacatgaagaagctccagaggaagaagggcaagggtgttgcatcttagagcattcttttagctagaactgcaaaatatcttctacttgggggttttgttgttagtctttatgcatatcatttgcggacctgatgaacacttcataagtgaatcaactctcgattccaagaattgataattttcacatgcggtggttgtaattgtgatatttaggtttgctatttattgaaacttcttgtctaaagcagttttagtttaccttgaagatgattgttagaaacgagatcctatccaatctatattgctgtttggttttcactttatagctgctaacatttgattgcatagtaagaactggtcacgcgtacgacaatc

SEQ ID NO: 35883 - DNA, 1653 bp, Zea Mays
ctgtttgccgttttctccctttacacgctcgattccccccgccgtttccacgggggccaggtgcctgcattactgggtccgggcctagcgtcagcgcaaccgaacacgccggcgaccgctgccgcccttctcccagctgcccaggaatcccgttaagtttatttatgctcaccaatttaagggcagaacttacggacctcaagctcttggttactcctgatcttctctaggcgactaggcacaattgccctctggcaaaatgccatcagtttatctttacatccctaacattatcgggtattttaggatcatcataaatttcattgcatttgcggtttgctattccaacaaggctctctttgctatcctgtacttcatcagctttgtccttgatggtgtggatggttggtttgcaaggaagttcaatcaagcatcaacctttggagctgtgttagacatggttacagatagggttagcactgcttgtttgttggcccttctctcccagttttacagacctggtttagtcttcttgatattgcttggattggatattacgagccactggtttcaaatgtacagttctttcttgtcaggtaagactagccacaaggatgtaaaacacacaggcaattggcttctgaaattatattatgggtacaggccattcatggccttctgctgtgtttcttgtgaggttttatatattttcctgtttctctttgctgatgaggagtcaacaagcttgcttagtgtatgcaaaggcatcctgaaccaaagtcccgtcgttatcttggtgtttgtttccactctagttggctgggcagtgaagcaagccaccaacgtcatccagatgaaaactgctgcggacgcatgcgtggtgtatgatctgaagcgcagcaaatgaagcatgaaggcagcttcacggtttagtatcgacatatccaagggaaaactctgcgagggggcgggctacgtcttgcgtgccttgacatctttctgatgatgcggtcatatgtgggaccaggggatgacatgccgtggccaatgcaaacaattgttttgtgaaagcagcggccgttaagttgttgtcagtgtgagagtggtgatgcgatcatgatcctttttacctagagtagctcccctttgtgttagcctgaacgatgttttgcaagccgcatgttccgaactctaggattatttggattacaaaacttacatattccatcctcaaggccagttccctcgagagttcgatagttacttatagtcgctggaataggcactagctactgttcgaatgatttcccttttgctccttaagcatcctttgggtcagctttatcgataaaatttctttttttatgtgacatccctttgcttagaaggggattgaatggaataggagaggattgaggaagaaataaactaatttatctctcaatctcttcgaatccctttctaactaaataaactgctttaaatgataaacaatacctctatcctaaaatataataattcgttttagattaattatataccaatggagtttgtatatatatctatattaattatcatttgaatgtatatgaacagaaaaaatgggctagaagtaactatattttaggagaacggaggaagtaccaagttaac

SEQ ID NO: 35884 - DNA, 1185 bp, Zea Mays
ctccgccgaaaggaaccatccccaaagacaaagagggcatcggtccggcccatagctctggttctgtgcatggtgcgctggcgcaccttgtggtgcatgcacagcagagagcgcggcgtctcttctccctgccgcccgtgagcatccactcacgggacgaatacgaccaaaacgcgcacgcccccctcccaccaccctggcctgtaaatcagcgccgccaggcagtcacagcggcaagtccgcaccgcaactgcagttggaaaaccagctcgccgccactagataatctcgtctcgccagggacgggaacggcaggccgtgccgtcacgagactcctagcgaccgagagagagagagagcgcgcacgcgcgtggtggaagagacttcgttctagagctcccgcgaggatggagcgcggcagttcctggcgactcccggcggtggtcgtcggcatccttgtctgcgcggccctcttctcgccgcccgccgccgcgctcaacatcggcatccagtccgccggcgacggggtggcgtgcagccgcacgtgcgagtcggaccactgcacgacgccgccgttcctgcggtacggcaagtactgcggcatcctgtacagcggctgccccggcgagccgccgtgcgacgcgctggacgcctgctgcatgcaccacgacaactgcgtccaggcaaagatggactacctgagcacggcttgcaacgaggccctgctggactgcctggccaggctgcgggagggcacgtccacgttcaacgggaacaagtgcatgatcgacgaggtcatcgacgtgatctcgctcgtcatagaggccgccgtcgtcgccggcagggtactgcacaagccgtagccgcgccgcgcgcagggacatgtgaacagcagcctgcggttggtgggcgatacatctttttcgtgcttggtttagggcgtcctttccggctggccggggcccgggctctgcgtcggctcacatggcggcatgtgtgctactagctggcgagctcccaggctcccaacccggccaaaactgacgacaaggtatatggagattattaaagatatagcttgtttggttttgagcatctcgtgttcctatcactgtattaccgtacaaaataagtataagaaagtttcctcatgctgcttttcgcttcttggacaatgtaatctac

SEQ ID NO: 35885 - DNA, 8089 bp, Zea Mays
cttctctggacgtctggtgggctatgtacggaacacttcagcatgcgacctctcctgcagcgggccggcccatttctacacaccagtccatcccgctttctgttcagagatctcggacgttggacctgaggcccgagccgggtagccgagcaaagcgagagctcccctctccctgtctcctcgtctgtgactgtgcgccgccatcgcccgtcgaccagcgccgtccgcccgctcgaaaactgagacgcacgctgcccgcgcatcgccgtggcctgctccagtctgtggaaaagtgacgaaccaactcggggaattctactctcgaggccgccacctccgcctccgcctccagccctccaccgactactgtctggaactggaagtgtaccactactattcaattggccctagccctcgcatagcacgatgccgccgccgctgcttgagttcgcgatcctcgccactgcctgcaggttcagcaagccccttaccgttctcaggaggcttggcgttcttggcccaccaaccgttcgacgcaatgccgcagaggcgttcgtgccttcaccgtttcgccaggttgtcgttcagagtggaaagcttcttgggacaccaaggttctgccacaccactgccggcatgtcagaatgtctcccggacgtctacgccagtcaggtactgaaggttctcaagtccaccagtgctgacaacacggatctcagcggtgctcttcatcagttcgcggtccacatggatgaggatattatcctcatggtcctccagaagcagcggtccaactggcaggtcgccctggcattcttcaactgggcggcaaccctgccggggtatgcccacgggtcaagggcctacaccgagatgctggacattcttgggcggatgaagaaggtcagacacatgaggcagctgtttgacgagattcctgaggagcgacgtcaggtggtcgtgacgaataagatgtttgccgtgctgttgaaccggtacgctggtgcgcacaaggtgcaggaggcgatagaggtgttctacttgaggaaggattacgggtttgagcttgacttggtcgggttccagatactactgatgtcgctgtgcaggtataagcatgtcgaggaggcggaggcgctgttccgtgagaagaaagatgagttcccgcatgtcacaaagagctggaacattatactaaatggttggtgtgtcaagggaagcctgagggacgctcaaaggatttggaatgatatcattgcatctaaggttgaacgagacctattcacctttggtacgttcataaacgcattggccaaaaatggcagaattagtgccgcggtgaagctgttcaaacagatgtgggagaaagggatcaatcctgatgttgcgatttgcaattgtatcatcgaccagctgtgcttcaagaaaaagattccagaagcacttgagatttttggtgagatgaatgaccggctttgtcaagccgatgtggctacctacaacactttgataaaatacatgtgtaagataaaaaggatggagaaagtttatgaacttttggatgacatggaagcaaagggctgccctccaaacaataggacatactcctacattctgaagacgactgagaaacccaaagatgtcattgccttgatgcagaggatggagcgaaccggctgcaaattggattctgatatatacaacttgatattgaacctttatatcaaatggaaatatgagaaggggatgcaacagatatgggatgagatggagagaagagggtcaggcccagatcagcggtcgtttactattatggttcatggtcttcattcccaaggcaagctcgatgaggctctgcagtattacacaacaatgaagtctagagggatgattccagaacctaggaccaagatactggtgaaagctatgcacatgaagaaggacggggctgccactgaagatgactcggcaagtatggcagggaagcatctaaaattggatcatcgttcaagactattcaatgttcatagatagtctgcttccaggtctttgttctataatctgagcaggggatgctgtccatataggtttatgggttgaaagaaagaaaaacagttcttttttctatgggtgtctaaatcacaatggctgcaccttgggctaaaaagaatcatcagcatagattcattggcaatatgatttctcagtaacttttgctcagactttcagtgccaggatcatcagtcagctgtgaaaacgttttcctagcaggtgaaattgggagttcaaggtgcgtaccgatatccaaatttatttaatgtgttgcgcaagaaacaaacaaatgtggtgggagcacttaaattctacaccttttaatgtggaatggcaaagttttatttattagattaaacaaggatatggatatttttatctagaacctaaataaaaacggcttgttctctatgaggtccatgtgttactgtttttgctacttcaaacactcgtttgccagtgcgctgaaatgtgattctgtagggctacaaaattggaacactatgttcgtacacacatttccacttttgggtactctagtattcactctcagtacatatagattagagtaccaaaacaaagccgtatacacggtctcaggcttcttacacagttacctagatgcagtaggtttaggcatcatttgcggtgtggaagtttaagaatgcggaagaagccgtgatttatcgactccggcatggacattgttgttttgctattccggtgcttcaaatgtaaacatatgcagactgttaaaggagtgacaatgattttgagtcactcatctaacttaatgaacaatctccacagaaaggagtgatgtattatgtttttcacttagattccttcataataatttgcgtagcaactaactgaactactaagcacaagatttattaactaacagtaagatgattcagctgaagcgtattttaagcaagagatgtttctgctactcgagttctgtgacaagagatctggcaaacttgcagtaggaatctctgatatcatgcatttggatggctgcgacctgtatcggcgtcctctctcttggctgcttctttgagcaagaaactccgagagcgacgacagaaaccaagcagttctcagtttcagctgtggcgacatggttggtgtttgtgtgcaaccacatttttgcatcggctatctcccagattctctctgggagagcatcctctgaaaacctgtgcaagtccaatgatcctctgaacatctcatcagttgggctccttcccgtgaacatctcaagcaacagtatgcccacgctataaacatctccaagagtcgaaacacaagacccttcaccgtactctgttatatatattacggaaaaaagaatcgatcaaaaaccaaccagttttatacaagaaacaaggaacaatgaatagaaacccaaacacacgtatagtttcagtcacctggagcaacgtagccgatggagcctcttattccagctgtgctgcttgaattctgcagggtgttacttcttgcaatctctggaaggatccttgatatgccaaagtctccgacccgggcactcatgtcctgtgcgagaaggatgttgcttggcttgagatcgcagtgaacgattggtggctgacagtggttgtgaagtgctaggttttggatgaagccagtcacctaggctaccatttggcatgaactcaaaaaccagagccttgaactcccggccctggcggtcgatgctcgagcaacacgtgatgatcttcatgaggcaacggtgacgcacccttcgcagcgcctcgcactcggccacaaagcttctactagatccagattgctcgaggtcgaaaaccttgaccgcggcaagagtagtcccctcctcgtcttgaaaggagcatctatagactgtcccaaagcttcctctaccgagcaagttggtctctgaaaacccgccggttccgttttctaatgcatggtaagaaaccttttcgtactgttcctcgatcattggtggccggaacgagctctgcttgaccctttgtcgtctgcgcttccagtagatcaacccaaagacaagtgccataaaggccagaaacaggaacgctgatgttgttgctagagctatcgtaagagacttgacccgcctcttcttgcttcctttcttcagagagttcttgcggcatggctgtaaacgaagctgaggtatgccgccacaaagcccactgttcccggcgactgaaaagtttcgggaaatcctgaatattcctccctctggcacttggccttgtagactgttgaaggacagatctaactctgacagtgatgtcaagttctgcaacgacgttgggatcggccctgacaagttgttgtgtgctagatccagttgctgaaggttgcgaatggcaccgatgccttctggaatagtgccggatagcttgttcatggacaggttgagtgcgagtagatccgtcatattcttgagagactggggtatctccccctccaatgagttatcctccaaccaaagcccctgcagcatgatgcactccccgatgctgtcaggtagctcgccggatagctggtttccagatagatccatgctgttaaggttcaccaagctaccgacttgaggaggaagagggcctgacagcgagttagacgacaagtccaagtacttggagaggagtggcagttcgaaaacctctgcggggatcgaactgttgagacggttattagctagatcaagggatattaggttcttcagctgtccgaagctcgttggaattgcgccctccaggttggcatgctgcgcgtacagctcaatcaacctcgagaggtttccgatggatgtcggtatgaggcctgacacctgagtgttgtacagacctaaccgagccaagtttcctagcttgcccatgctgtccggaagcacgccggagacggacgtgaaccccagaccgaggagttcaaggctggccaggttgccgatggctgaggggatgcttccggatatcccgtcgttgtattctaaacggaggatctgcagggccgtcgtcgagaggttgcctaccgaacctggcagccgccctgtgaagctgttgtcggcgatgtttagatcctggagctgggtacagtttgacagggaagccatgaattcccacccgtttctgtcgtctgcttccagctcgttttggaacaagtacaggagctgcagacctctgagtctccccagcgccggaggcacgcgcccgtggagcatgtttacagagagctcgacccgctggagcgtcgtgaggttagtgagcgaagcggggatggatcccgtgaactggttccaagagaggctaaggatcgacatgctgggaaatctgctgccgatctcggcggggatggtaccattgagcttgttcgcttggatctgcagtctttccagcgacgacaggttgtacagagagcgtgggggctcgccggagaggtagttgaaggcgaggtcaagtctcgtgaggcctacgatgctgccgaggctacgagggatggcgccctgtagctggttgaatgcgagggacatgacacgaagcgacgacaggttgcctatggactccggtacggtgccagtgaggttgtttcgaaacagtatgagctcctcgaggcgtgcgagcttgttgccgagctcagagggcaggcctccgcggaggtggttggactggaggcgcaagtccaccaggctggtgcatgagcttaggttggcggcggagagcttaccggagaaggcgttgtagcttaggtcaagcgcacggaggtggcgcaggcggccgaggctcgcggggatggcgccgctgagggcgttggagctcaggttgagaagcctcagggacgaaaggttaccaaccgccggggagaggacgccggtgagcccgcgagagggtaggaacagcgccaccactcgacgccgcctgccgctgcctcggcacctcaccccttcccagctgcagtacccgccgccgccgcctgcgctaccgttccacgaggcaagtacgtctccatagccgccaggcccgccatggaccgccgcgaccttgatggcgtcaagtgcggcctcgtcgttggcctgtgtggccgccgcgagagtccaaagcaggcacatggaggcggacagcaccagcaggttcactgggtctcggtgctttaccatgtcagccggcgtcgagtattgactgagactgactgggtgattgactgggtgtgcggagacggagagggtccgctgcgctccaagatggtatgcgagctgctctaaatatataggtgtgcgcctgcattgtcaaagtggtggggacctacatgcatttaccaggatcgaacgtcgaatccatttagattttaaagaaatgaaattcattagcccactcggctccgattgtcttcgttaaaaaaaaactagccaattcaataacaaattgactagtcatctacggcagccaggagcggagccaggattatagtataaaaggggtcgaacaattcatcaaatattataagataaaaaaatattatagaatatataaacatgtgcatactaatttacgtatagcatagataataaattaataaaaaaagacttacaccatataattgtatattaattaactccaacaaaggtcaattaatttgcttttacgatgatcattcaaattaaaagctttgattatatcacgagagttgattatagctatcaattccatatgaatatagattatgaagtaacttcacacaaaataatcttccatttatttcgtagatgtgtcttcataagttttgtagctaaaaggctctcttcgtgattgcagttgagaccagaagagtgtccattaaccttaataatccataaactattttatatatgaaatttttacacaatttgacaagactttttatcaaatcgacaagtgatcataatgtatttggttttagatggttatatattcaaggtgaagcacaaaatttgacgtgcacatcaactatccactgacaactttgggctgaaatttgcgacaaattttatgcttaaaatatgtgattttttttacttggatacaaatttattttaacaaaaaaatctatatttcatattgtgtcattataaatatatagtaaattttattgctcgcccccttgtctccggatccataaacatgttatgttatgccaaggataacccatataaggctaaaaatcttactagccgtagagtattacatgtagcatagtttcaaagaaaacatatataacgatatcgttttaaaagctcaaacaatatgtaaaaattgatgctagaaaaagtaccaaataaagagtcttagacgataaaaaaaatatatcttaatcatcttacaccatttgtgccgacatctttggtataaaaaacatgcggtcctttttgttgatccacatcttttaattagttttggcattactctttgacgtgtctttcttatcatatattttctattctagcgatgtaccttatgtaacctaagatatagaatgttgtattgcaaagcaagttcaatggataatgaaaaccatcaaattcaatccttcttgtcgttgtgaacgtcactgttgggggccttcggcttccgaaggacctcaaaaacatgatttaacaatgtttctggagtaaagtacattaacaggtatcttcggactcggatcagagccacggtatgaagaagcacaaagaacacgaaggttggcgcaaagccgaagctgcgtgtagaagagcttcgggacagcggcggaaaaggaaaccgacttaaagatgaaaaaccatattagacctcgaagaattatcatagagttattgataaatgtaaagggtattaatgtaattttgcatgggctgtgacccgtgtctataaataggtgaatagtatccccgtactgttcacgctgactgggcattcacttttgcgtcacgcctgtacttttctccttcaaaccgaaggtacacttgtaacttattcttgttcaaataagcaataaaaagaag

SEQ ID NO: 35886 - DNA, 831 bp, Zea Mays
agaaagaaacgaccaaattagcaagcaggcagttacagacgcggccgcgacggcacatcgccgccgtagtccttgaccttgctccacaaccccggcccgactcggcgtcctccgccaccctcctcctgggcagcgccgacggggggatatggcatcggaggacgtggtgggcaagagcaggggcgacacggccgtcaccaccatcgtcaacctggcggaggaggccaagctcgcgcgcgagggggtcaaggcgcccggccaccagatcctcaccatctgcaagtcgctcgtcgccggcggctcagcaggcggagtgggaggggcactagcggacagctcggcaacggtgaaatagtcgacaggtggttcttaccccgcgcgcgagctcagtgtctatgtcttcccccgccccttgtaggaacacacctgtgctgatctgatctgatctaacaacttacgtctcaccatcctgaggacacgcctgtgctgatcgatgccctgagctcagacggttctgcctgcaagaagctggagtcatccacgacagccccgttcgcaggtctggttcgtcgtcagactctgactctctctactctcttaacaaatagcaaatggttcctcattgtaatctacgcaatattcgggtgtcctctttcatacatgctttggtaaagactgttgtaccatgcgatgaggtttctcttcaatctattccaggtttcgatcattattgaacaacagttcatggatatgcaaattttgaatttgattctctgatgcccacagaactgaaagcgtggcgtccacaatttgcatggcgcacggttctgc

SEQ ID NO: 35887 - DNA, 3108 bp, Zea Mays
tgtatgaataggatggaaaatagcacaagacaccccaagacacatggtagcgaactaaacattaaatcgtaagacacagtaaacaaccacacgctagcgttagctatctacacgtcatcgggtgcacaacatcaacaccaccggaaggacgacgattactacctataattaaccaacgcaaacacgacatcacatgtacaagcatttaccacattcactttaaccatttatcagttactctattatcaaactacttaagcacacatacattcactgtgacttctaaatgtcatacagacaaacttagtttaatagggaataatcacttaattggattctaccaacattctcaatattctaatgcaagcacacacccaagagaacacgtagaaggtgatagactaatcacactgcttattatactaccctaatgaggttggttatttagcaatgttgattgaagctgattacttactagacttcaacaatttaatttactacatagagagacgtgcactagttacttacatataacccaattatattagttactatcattattactcatattcacttaaaaccaaaacaagcaagcagtcactcaagataaacacaacagggtagagtaatcaatcacaatcaacatgattaagacagtagcacatcagttacttgtttcagtcataactcacaagatattcatacaaaaatagtgatcaaatactttttggaaagtttaataaatgctctacaaccttggtattatcatcttaatgtgattggacacttaacaaggttaaatagtgataaacgacagctctgtccagatttggacagattcagacttcaacttccaaaaaatcataacaaaacattcatgcatccaaaacaattgatcctagactttctagaaatataatgaaattgtctaccaatcatttataaacaactcaggttggtttagtatgtatcaagggtaaaagacactatgaagaccttgctgtctagaattggacagattcagtcttcatacttcaaacttctataacttgagctttagaccaccaaaaaggatgatccaagacattttggaaagcttaataaaagcaatacataacttttataatcaccaagaagtggttccaattttaatcaacccaaacaatatagttttcgaaatatgtcccaaaagtggacataacacaacaatcattttgtaaacttcataactcttaaactatcaggtctatggtcatgaaattttaacacatgcaagataaggaagttttatacaactttcatatgatcatcaagaatttgattctaagcttaacgtaaacaaacattgtaatatctgaaatctatacagaaaattagacagattcaggtactgaacttatgaaaaatataacttctaaaccattaactcttagctcatacaattttaggatgagctagacatttaagttaaatacaacttttatatagcacatatctacataaaacatactttaatttactagattaatcgcacaaccaaaactgtacacgtaggaatttcagtttgctaacacaagaccactcactaaatcaccaagcaaaatcatagggagatactaccaccaatttctcaagtctaaatcattatgacttagttatcaagtttcaatttatattgagacacttaagcatttcgagaaacatgcacacttttgtttacttctaatttttcactaactcttcttataattataaaatgggtgttattttggcaccatatgaaactatctaatttggggctggaatgtttatgaggcataggtaataacaaattatgactaatgtacaaagttcatatgctcaggttttatagtttatttactacaataataacaaattgttaatgcaataaagcatgtgagagcaagttaaatctaaaactaattattttctgtaaatgctggaccatattaagttttcttaggatactataatatcatgcaaggacaatggaacaccattttccatttttacatatatataatatttgtaaatcatttaaaactacttaatgtgcatcaagcaagttaaatcactaacttagtgatacttcgaccataaattatgaaatgtttaccagtcaccgatcatcgcaccaagagtctactgtaaagatttcaatccatttagagcaatagagctacagatccaaaaataacaagcaaatcaattatatttttcctatttaacatgatttaattgacacaccaagaaaagagtaaacaacataggggttttatatttttcttggttagagtatgacttcaactaactaacaaaacaagtctcatcatttgtggatttttaaaattaaagctatggagagaaacaagttcatttgttttcgaaaccacttttaaatacgaatttgtacagaagcaattttccactgtgacatgccaaattatagatctgactaacaggcagagaatttcataagtaagttaacaaaaacaagtttcatgattttaggagctaccaaactcaaggtatgaatttttgaacacaacacaaaaatctataattttatgcacttttagacttggccttgggcccactcgtcataggcacgggggccttcttttaccttacgtaggatggagcagctctatcacttggagcacgtacggatggaagagatgaccgtagctggtcgaagaaccagcaaaggtggaccctggggatgtcactggcgccggctcaggtgagggcaagagttgttgccagtgttgttagagcaggcaagatgatgccaagcgtgcgtccatctcggcgtgtgtggatgctggttcggcgtgcgcctttggccatctgtggtgcgtggcggagggttgccgggctaggaagatggccgacgaggctcgccgctgcggttgagagcttctgcgcgcgcaggggctgatgtccagggctgctgcttgttctttcgttggcgagcactagcaagagacggagcagggtgcttgccgtccatggatgaggaaggagcagggcaatggcgtgtgcgatgtgagccagcattggggaatgaaatggcgtggaggaagc

SEQ ID NO: 35888 - DNA, 2224 bp, Zea Mays
gataaaatgaaaaaagttgggaaagaaacccagaaccctttccccccaacctagccggcacccaccaatggcgaggccgccgcctgcggcgcccgccccggtgaggcttcgtctgcttttcgaaaacagtcgcctcctccagcgtgtacagagggatgaaggccttcggcgctgctggcttctccttagcccggagctcgacaccgtcgccgaccttgccgctcatgtcgcagcccgtttccgcctccgccgcacctgcccgcgcggcgttgtgctctcgatggacgggtttaccttgccaccattcgagtcaacctgcatcttcagggataacgatattataagggttaaacaaaaatcctgcaggaagcaggcacatgatgatcaccagcttgaagaaaatgtcactgctagccatagcatagaaaacaatggtacaagctctaagaggaagtggaacgatggggttgcagaaatacctgagagctcaaagggaaaaaggccgaaggtgaaaaattctggaaaacatatagattgcagcaaggaagaacagcgtggatctaaaaagttgaagttgtcagttattgatattgaagataagaaagcaactctaaatcatgaaactaccactaccttggtggatcagcaaaaagcagaggggaacaataaaaccgaattgaaatgtgaggcaaatgtggcagactacaatgctcaaagtgatacaaaaaagttggagagtagaagtgctcgtcgcaagaaaaattaaaaggctgatgagacagagaggaaaattacaaacagataagaatgtgcatgaagattcactaatagctcctgattttccatcatcaagcaatcaagatggcttgcctgtcccatcaagcaatcaaaatggatcacatgttcatttttcaagcatcaaagcagatgaggaagaatctgatacatcggatgagattgtcccagttgtggttcggcctggtcacattcgctttgaaccagcaggtggagaacccgacaaatcgccagcacaggagttacagggcacgttccaatggagtgcaacaatgagcaaaaagaagggccagaagtggggaatgaatagctcaaacaagaaaaatgctgatatcggctatcatgcaggaatagctggatgcagcacagaagttaacaatcatgtcatggacattaaggttactgaaaatggcttttgtgctgtcaataatcgaaggaacaatgaaggcagtaacattgagatgtccagtgtgcaaaatattgctaatgaagaaaagtctagcgaacctttcaattttgagagcttgtaccccctaacacgacttccaaaggagggagatctgattgcctaccgattggttgagctgtcttccatgttgtgtccggagctctcttcgtaccgtgtgggaaaagttctggtatatgatcccgtatcattgcgtatcattctcgtacccgttcaagagtatccaatcaccaccgaggaaaaagaaaacaaggacgagtcagatatgcttgtggatttgtcaccgtacaaggaagatggctccttggagatcgagtactcttcacttgttgatgtaaggctactgaagggtatcgaaacatgcaacgaagttggatcagcaccggccggaaggccagttaccttgcacaaaaacgaaggcaatattgagagccagaaatcacccttggtgtcaaacaacactaaaggcgaagaacgcgcactaggaaagtcagaaagtacggtctgggaaaaaaatggtgagcccagtgataaggttgatcttctgcaaaatggctgggcaacatggaaacaaaatgctagtacgtcagcttggtcttacagagccctcaggagcagcgcccttggcccgacgatggcaattctacgagggaagaacagccagagtaaaccacccaatcgaaagaactccaagtgatgcctaagtatttaataacttcagtgatacctatgtaatccaaagttgatccgatcctttggagaaggtcaagcaagtcgatgtagttggtcttatatatgtaactgcaattactgccctgcctattttgaaaattccaaagtggtgactgatgcaaagggaactttttagaccagtcaagactcgttactatgcaatgtcagcttatttaatgttgatgaaaattcactaaaattgatctttattgtacatcactcagatcttca

SEQ ID NO: 35889 - DNA, 633 bp, Zea Mays
agcagcgacgacgaccgtcctccccgctgccttctcaccaatccctacaacaccgattagagttggggaaggcgaacctcctccttcttgggatccggtaccaactccaaaagagagactttcatatgtgcatgtgaagcggatcaagaatcagctttgatttggctaagaaatgagatggcttagtaggtttgggtaatcaatcggtgatgcttcccctttgagaactttcgattgaggagatgcatcgtgaactttgcagcttggtaatatgctttattccaccaatgtctacgcctcagcctccaggctctgtatttaggtcctttgtacaaagtttggtgctcaaagctagaggtggagatcataggatggttgtcaatgggactttcaacaacactgtgcttgtttcattgtacacagtaatcctgcatttgttgtctgctggtgcccttccatcatggtggagcctaagattcaaaaggaatgatgcctatcatagtacaggaatgataccagagttggataaaaaaaatttatcacaattttttttgttgtggtccgacatcgcctactaccgctgtcagtgtgtggctgaaaatttgctttctttcaactgaagtgacaggattc

SEQ ID NO: 35890 - DNA, 314 bp, Zea Mays
gtgcagttctcgtgcccctgcgaccgtgagcaatagcgggttgcagattgccgtcactggcgttccacctactcgatggcccaggtgctagagaagtgttaagctggtgcagtagggagtgtagatcgtgtacaaggtgatttcagggcgcatgagtgggtgcttcatcgacaattcctcgccggaggcgggggagccccatggtgccgcccttcgacgagaacgagggtccttgagtgtgacaccccttggccgacggcgagtcgccccgacgtgagacaacacaggatgaacgcgcgcaactctcaggtgag

SEQ ID NO: 35891 - DNA, 1645 bp, Zea Mays
atagcccctcacgccagccgccaatgccccaatcccgtaatcgcagcctcgccccgctcgcatcttcctctccctctcagcactggtgctcaatctacaggttgtcccgctccctacacacccgccctccggtgtgaacctccatgacgtccacaaccactctccgatctgctgtcgtgacctcatccagccgtgctgtggcagtggatcgaagttcgctccagctctgattgggggaaaatgactagggtatcaagtggaaaaacataatggtccaggttctactgcggcacctctttcaggctaagcatctaaacaacaatatgaattccactactatatgtgccacttgaagttgttatgtcaaaataatatggtgaaaacgagcgtctattgggatctattttttatcttgcaaatgatcttcctgaaggagattgatatgtcaagatacgcttgtttcatttgagctcaatgttatctgaaaatatatagactgccttcgtccccttcatcactgctaatgaccgtgacttggagacccgacagcggccctcgacgttgtcgccgccgagcccatgctggttccaccagtggtccaccacccggatgtggtccgccaagacgagcagtaacggtggcagcgaggcgaggtggtagatccagcaccgcttctgcacgaccatccattcctccacccagagcatgtacccaggcttgcctctcctcggggaacatgccgaggtcgtccgactggagcagaaggcgacatcgctcaacaagctggtcgaggagcagtgcgagagcataaacgatctcaagtccaagagccatccgattctgggcccagaacactttgccaaacaaaaagttatcgctcttcatccttgataggctacagaaagggaagctgaaccttgttcttctgccatcatctagcatgcggcttacctttgtttgtgatgatggttatccagagcaactagctctcttgagcaacgactttgaattttcggaagttatgattgaagaaatatcagctgataattctggacgctctttcctaatcagaatttcagaatctaaagtgttttactactggtgtgctgagaagtcgaaggaagattgaatggaacttcttgcaaaggtcttcaagggagaagcggcttaaaatgtgtgagcaggtattttcggactcgtaccagaaagggaaaagctacaaaggttgacacagcgccgaagctgtgaagcaggaaagcttcggcatgttcgcagaaaagggaaccgacttaaagatgaaaaggccatttagacctcgatagagtgctatagaattatcaccaaatgtaaagggcatgtatgtaattttgtatgggttgtaccccgtgcctataaataggtgaacagtacccccgtactgttcacgttgacttggcatttgcttttgcgtcacacttgtattttcatctccttccaaaccgaaggtacatttataatttgatattgtctctatttctctataatgatataataaagttaaatgaatgatgttatatgattattcgtgctatcttttatgtttcatatgcttcgtctttcattaatgtatactgtgatgatgaaggttcgtccttcatgaccttcg

SEQ ID NO: 35892 - DNA, 4015 bp, Zea Mays
gaaaaacgtctccggagtccggagtagttgccgattctgcctctcctgtctcctcccctgcccgcggtcccgcacccacgcgttgccggcgaccagccgcccatttccggcggctatccatctagccgccgccgcttcccgtgatggagaagcggctagcgtacgcggccttgctcccactgctcctcctcacgctccgcatcctccccctgccctccggctcccccaactgcagcggcggcgagggggaaaccccgcccgcgtccaggcacgtggtgcggttcctggagtaccgccgcgcggaggagcaccgggagtacctggacgcggggctccgtgacggcgcccccgcggcggcgtggcgctgggtggagcggcggaaccccgcggccgcgttccctaccgacttcgcggtgctcgagatccgcgacgcgcaccgcgaggccgtcgtggcggcggtgcgggcgctcggccgcgtgcgggacgtgcacgccgacgccacctactcgcgctccgccctttcggcggcgccggatcggtcgcgtcctccccggcgggggaagctgttcaccgccatgtcgttcgagggcgaggaggagggtggcggagagaccggcaattcgtcttctgctgcctgggggcggaagcttcttctgcagagatcacaagttacatccctttttggagctgaacggttatggggaagaggcttcactggcaagaaagtcaaaatggccatttttgacactggtattcgggccgatcatccacattttcgcaatattaaggagcgcacaaattggacaaatgaagacacactaaacgacaaccttgggcatggaacatttgtagcaggagttattgctggccaagatgcagaatgccctggatttgcacctgatactgagatatatgcttttcgagtcttcacagatgctcagtgcagatatcttacacatcatggttcttggatgcatttaactacgcgatagctaccggtatggatgttttaaacttgagcatcggtggacctgattacctggatctcccctttgtggaaaaggtctgggagctcacagcaaacaacattattatggtatcagctattggaaatgatgggcctctatatggcacattaaacaacccagctgatcaaagcgatgttattggtgttggtggtattgattacaataaccatatagcttcattttcctctagaggcatgactacgtgggagcttcctcatggttatggtcgtgtgaaacctgatgttgttgcatacagtcgagatataattggatcaaagatcagcacaggctgtaagaccctttcaggcaccagtgtagcaagcccggtggttgctggtgtagtatgtttgcttgttagtgttatacctgaagacaagcggaaattgatcctcaaccctgctgctatgaaacaggcccttgtggagggtgcttctaaactttcaggaccaaacatgtatgaacaaggtgctggcaggcttgatctctggcagtcatatgaaatcttaaaaaattaccaaccacgtgcaagcatatttcctactatgcttgacttcaccgactgtccatatttctggcctttttgtcgtcaacctatgtatgctggagctatgccagtaatcttcaatgctacaatcctgaacgggatgggggtgattggttatgtaaaggatcaacctttatggcaaccttctgaggatattggcaatcttcttagtgttcacttcacctactcagatgtcatctggccctggacgggataccttgctctacatttgcaagttaaagatgagggttctcagttttcaggcataattagtggcaatgttactctgactatttataccccagcagctcatggagaaagcagcccacggagtagtacatgtattcttcacatgaaggtcaaggttgttccaacacctgttaggtcaaaaaggatactgtgggaccaatatcataatattaagtatccttcaggatatgttccaagggattcccttaatgttcataatgatatccttgactggcatggtgaccacttgcacacaaacttccacattctgttcaacatgctaagagatgcagagtactatattgagacacttggatcaccacttacttgctttgatgctagcaattatgggacattgcttatggttgatcttgaggacgaatactttgatgaagagattcagaaacttagggatgatgttatacacaagggacttggtattgctgtttttgctgagtggtaccatgttgatacaatggttaagatgacattctttgatgagaacacccggagttggtggactccaattactgggggtgcaaatattcctgcaattaatgaacttctggcaccatttggcattgctttgggggacaaaattcttactggtgacttctcaatcaatggtgagcagacccactatgcttctggaactgatatagtgcaatttcctgcgggaggtttcttgcatagcttccagctccaagaaaactcaaagacggtgcaagatcacataggaacactggatacagaaagcacccaggggaaaggcaagctctcctcaattcttggagtaatagaagcaggggaagggaggattgcagtgtatggtgattcaaattgtcttgacagtagtcacatggtaacaaactgctattggcttttgagaaaaatattggagttcactggaaacagagtgaaagataatgtccttttctcagaggcagcacagttaaagtttcctgtttttgagaatatccatcatccatcacgtagaacggatgtaaacttttcaacatactcaacagttgttggcaaggaattaatctgccaccaagattcccggtttgaggtttggggaacgaaaggctatggtgtccaaccaataggcacatcaagaaagcttccagagtaccagatgcatgaaagttctagttctcccaatgtaacaatacaaattgctggcagtagacaagataaagttgaaaggcttcaaagaaatctttcgataccaaatgctgctaaatttgatgataaaagagattattttggatttattggtcatgaggaggttgacataggaatgttaatggcaagccaatggatgataccttgcttcgctgccactgcttgccttatgttgtatcttagttgtagagtgcaacaaaaacgccgcagacgaaggaaggggtcggtggctagtgctaatcggctaacaagtatggtataattcgtcattcgcgcggtggtgctgaaaaggtttttttagcgtatctaagtttcaggcctccagccatgatggataaccaggaagcgccatctgcgcagcatgacagaattttagtagccagaaatccctggtagtgaagacacattttaactcggcaactagaggctgaacttgagagaaagctggctcgtcacttctgtggtcacatggaaagcagcttgtcttcccagattcagccattcgtggcatctactgctgttgcttgtagtcgctcacaattttgttcttcgccacacgtagttgtagccacaaaaatcgctgctaagggctagtttgatgaccagagatcacgagaggatccataaatagcaatgggattcctctgacatggatctcctcgtcatccctggccaccaaattagcccttagatcatggagatcggaagggattgagagcaaaattagttcatttctcatcaatctcttccaatctctcccaatcttccgtgatcccctttgtcactaaatcaaccctaagagccaatatctagggtagaagctagagctagtcatttgtcatctccttggaatatgtgaaggagatttgagcttctctgtagatccatgagcaataaggggcagggggactcggcatgagcttggcaggtacaaaggaggcttaggcttattgggaactttgtaaagtaaattttgtattgttaatttaaaaaaaagaaccaggcc

SEQ ID NO: 35893 - DNA, 3344 bp, Zea Mays
ctggaagccaaaggctgcaatcgaacactccggtacttcgccacaccgcgaaagcacggcggctcctatcccgcgcgggcatcgccatgcccgctatccccctcgtgatccccaacgcactagctggctaggcgctcaccgacgttcctctccatggcggcgtcggagcgggaggccgcgctcctcacacgcgtggcagcgaaccacctctttctcgcgcagttcgagcccctgcgtgcggtgctcctcagcctccgccgccgtgacccggtgctatgtgcggacttcctccgcgcggtcgccgctgcgggcggccgcgtcccgggcgtgctctggtccgctccccctgcctgcccgtccccatcccacctcgcctggcttgccgtgctcgaactcgccgccctcccctccactcccaatcccgaggcgctgcgcctgaaggcagagttcctggtcctcctccagcccatcgctgacgaccccgccattggcgccgaggccagagaaatcctcacgaaactgctggatttgggggtgacgaggttgaagctcgaggtcgaaggcggaggggacgcaggtgctagtgccgaggaagcctccgtgaaggatctgagagggctatgggaagtgttcctcgacaacgcctttgtgtttgatgcgttgtgcataggcgtctcgaggcagatcgccttggacaggggtttcggtgtggatgtgctcctatggctgcggcggaacgtgcaacttgcccatttggatgccgtgaagactcttgtcacggaaggtgatctggatgctgctcctggccatcttcggtttctttgccttgaccatggactggagaaggatgagtacaaggttgtcatagcagagcttctcagaaagggatgggcaaaaacatccaattatggtggaacatggtctgagttgcagaataggataactaaattatatggagcagctcttcaatctactagtcccgagctcgtgcaacttgttcagctcattctggataacattctttctgaagaaattgaagatcatgatgtctctgatgctaatgggatgcctcttcctttcgaaaaatttctcgaaacattgttgttggagagggatactgactcagatgacaaggtcttgttggatgcggctataacgtcctgcaaaaaagatctgtaccattattgccgattgtctggaaagcacatgcttgaagtagtcttggaaactgctctatcatcaattaagagggagcagcttcttgaggctgttgatgttgtttcgttgttcccccttctccacccactggttgctgtcttgggatgggatattttgaagggtaaaacaggtctgcggagaaagctaatgcagctgttctggacaagcaaatcccaaggtctacgactacaggaatattcacattaccgtagcccgacagatgagacatcctgtgaagagtacttgtgtgatcttctatgcttccatctggaccttgcacgttttgtttcaagtgttaattctggctgtttgtggaatttgaggaattcattgttgtttacccaacaagagcaaggttcagatgttaacaatgcagaaatattagacccttttgtcgagaacttgatacttgagcggttagctgttcagagtcccatgagagtgctatttgacgtagtcccaggaataaaatttcaagatgcgatcgagcttgttggtatgcagccacttccttcaacaactgccgcttggaagaggatgcatgatattgaactgatgcacatgcgatattctcttcagtcagttgcgcttgctctaggagagatggaaaagtgtacaggtgatgagaatgagtgttattatcataaagcattgtcatatctcagggagatgcaaaattttatggaggctatcaaaagttctccaagaaagattttcatggttagcattattttatccttgttacacatggatgattgtgccaaattgtctcaatctgtcccttctgagtgctatgttagtcatgaatgccatgatataaatatcgaatctgagggaaagaacgtggtggtatattttgttgggcttttacttgatatacttcgtcataatctcgaatcaaaaggctctgatacggatcacctttcaagtactggtctgtcgcctgctggtagacaagcgttagaatggaggctcaaacatgccaaacattctattgaagacctggattggcgtctatctgttctaaaacgtcttccacctctgtctgagcggcaatggagttggaaggaggcattagttcttctacgtgctgctccttcgaaattactgaatctatgcatgcaaagggaaaactatgatataggagaagaagctgtgcaacgattttctttacctgctgaggataaagcttcccttgaactagctgaatgggtagctggtgcatataaaagagcactggttgaggatgctgttaatcgtgtcacagataatacaaatgcagcacatgaattggatattttgtcattacgcacgcagcttggttctttaactacaattctgctttgtgttgatgttgctgcaacatctgctaagtcagttcatatgtgccgatttcttctcgatgaggcaacaagcatgttatctgaaatatttccaggaaggtcccccaaagtaggaccaacttactgggatcagatccaagaacttgctaccatatcagtgataaagcgcatacttcagcgtctgcatgacatcttggatctggatactcttccatctcttcaagtgttctttactgagatgagcatctcttcgtcaacggaatgtagcagagttggacaaaagcaacgtcctcttgggcttctgcaccaaatgattgatgacgccttcaaaggaaagcgacagttcttgagtggtaagcttcacaatgttgctagagctattgttgatgaggactttgatactgtttattcgaaagaaggtgtcaacttagaaaagaaggatattttgagctctgaaaaaggcatactccttggtcacgggcttagaattctaaaacaagcatctaggagtgaccttgcatcttcaaatgttgtggatagtggtccagaacacaaaggttctgcaaacagatatctgggccctctatctaccaagccgtcaacatatttatcaaacttcataatatatactgcaaccattggtgacatagttgatggaactgacacaactcatgatttcaactatttctcgttagtctatgaatggccaaaagataataatgcttgcccccttaaatctctctccctcaagttcaaggctacagccagggggctacagcgatg

SEQ ID NO: 35894 - DNA, 1681 bp, Zea Mays
actgtagtggagctggagcgcgcacgcacacacgagtacacgacacgagacacaagccgggaattgaagcatcaagccctttctctgagcgccgatggcacggtatcttctcgcccccacttccacctcctcctctacctttctccccaaggatggagtcaagaactcgccgacgtcacggcccctccgcctccgtgcgctcggctccaggaccagcaaggcgcggcacatcatggcggtggcgtccgagcaggccgcgccgccggccaggtaccccaaggtggccgcccctaccaccggcccgatccccgccgccgagctgctcggagtcatcgaggccgccgcaaaagctggggccgatgttataatggaagctgttaataagccacgcaatatccactataaaggtgttgcagacctggtgacagacacagacaagttgagtgaatcagtcattttggaagttgtcaccaagaacttcaaagaccacctcatacttggggaggaaggcggccttgttggagattccctatcagagtacctctggtgcattgaccctttagatggaacaacgaactttgcacatggttaccccagcttttctgtgtccattagtgttctcttccgtggaaagcctgctgcttctactgtggtggaattttgtggcgggcctatgtgctggagcacccgtacaatttctgcatctgcggaggagcttactgtaatgggcaaaagattcatgtcagtcagacagacaaggtggaacaatcacttctcgtcacaggttttggatatgaacacgatgatgcctggacgaccaatatgaatctgttcaaggaatttactgacattagcaggggagtgcgaaggctagggtctgctgctgctgacatgtcccacattggacttggtattacagaagcttactgggaataccgacttaagccatgggatatggctgctggcgtcctgatagtagaggaagctggtggggtggtaactcgcatggacggtggagagtttacggtcttcgatcgctctgttcttgtttccaacggacttgttcatggacagcttttggaccggatcggccctcctactgaagaccttaagaagaaagggatcgacttctcgttgtggttcaagcctgacaagtacccgactgacttttgagctgcatcaagggcaccaccaccagccatgggccaccataataaagcagccatcatttttttttgggaaatttggatctgtaccatcaaaagattacaactttagatatataccattgtatctcacttatatgtggggtccatatgaggcaatgacatgtggagccaatggtatatatctaaagttgtaatcttttaatggtatagatccaattattccttttttttggggggtgtccttcaagaagaaacaataatgtttttagttcaatagcactgtacttgtaatggcaatacgatgtacagttcttcgactcgagtttcaaatcagagtttcaagagagccaagctcctgaaagaacagagcttcacaactgaacatggaatgtgcccccattgctctggcttttcgattgttacatgtatcggacgagatcgagattttggaagaggccagctcatttctacatctaagaattgattccatcgtgagccgctttggcctgcta

SEQ ID NO: 35895 - DNA, 1385 bp, Zea Mays
gtttgtcctcgtctccctccgctgtccgattgtgcgctgtcgcagcctctgccctctcccagcccgctcctccatctccggtgagacgcgaattgaatcgcatcgaatccatgggcagctcctcgaataccaacacgagcggcggggccagcgacaaggaggagaagaagaaggaggacaagatcaaaggcaaggactcgtcggggccatccttcaaggagaacgaaagggtcctcgcctaccacggccccctcctctacgaggccaaggttcaaaggatcgaaaaccatgaagatgaatggcgctactttgtccattatctcggttggaataagaactgggatgaatgggttgcaaatgaccgcttgttggaattgacggaggaaaacgtgcgcaaacaacaagagcttgataagaatcaggtagttgacaaaacaatgaagtctggacggtcaacacagcataaaccaaaagtctccaatgcggatgcaaaagctgataaagatgacactaagagtctcatttcagtgaaggggaagaaacgtaaaagtcagcttgggactgagattcaggacaaggaaaaaagatcatcacatagtctactagtgttgcagtttcctttgccactgaagaagcaacttgtggatgattgggagtttgttacgcagatgggtaagcttgtgaagctaccacgatcacctactgttgatgatattctaaagaagtacttggaacaccgggcaaagaaggatggcaagataaatgactcctatgctgagattctgaaaggattacgctgctactttgataaagcattgcctgcaatgcttttatataagaaagagcgagatcagtatgctgaagaagttaaaggtgatgtctcaccatcaactgtatatggagctgagcatctattgcgcctttttgtaaaattgccagagctacttgcttctgtcaatatggaggaagatgcgttgaacaagctacagctgaaactgctggacgttctcaaaagaatcagatcaccttctttacctctgcgtacgatggttcttgtaaaggtgcagatgaggataaaaccaaatgattgcatgtgaacgttttatatcatgtaacatctttcgatggacttgtctggcactattgttgatatgaatgtcgcttaggacaacaatcggtttatgtaggatagatgctgcagattcctgaaagacggtacttgaactgcccggagcatgttgtattttcttaagatgctggaactaagacggcttagttgaattttcactatcaagtgagtctcggtcttgccccaaaaagaatgttttgtacctcctctgtcccaatttatacgacaatttataattcgtatgacttttttggac

SEQ ID NO: 35896 - DNA, 1814 bp, Zea Mays
catcgagcaaggcagcaatcacaaagcggaacggcaccctagggcagcgggagcccgcagcgcacaccgtcgtgccgccgtccgcctgcccccccatcgccctgcgccggtgctccaggcgcgtctcgcccgactcagctacgcacttccgctggccacccgcggcctgttgggcggctcgacctcgttcccgcccttaccctcgtcgcatcggcctcgcagcctcgatcgaggccgacgacctccagcgacctactgcccaggcccaggtagagcgctaggggcctccagtcaaacccatccttgccgttgccggccgatttggtttcttgctttagagatgcaggaggtttctgatccaccagaaacagtaaggaaagcagaaacaaaaaatattacttccattgggaaggatgtgattttcgagcaagatccatgctcttcatatcagttatggggcagtatgaaatttgaagaagatggccatttgctgtctcaggcaaagagggatttgtcacatttggattatagagcacagtctgccgacaccaaatatgttactgaacttgggtcacatgcatgtttgaaggatccattgccaatgggaagagattatcataggcagaagctacaattttctacttcagactgttcttttgagaaggcttctgcattagaagcagcatcaagtagcccagatgcattagggacaatgagaaccaaaatcaaatccagcaccctcagtgcaagtccagattatctttcgtcttatcctactgctgctccttgcatgcggaagtgtccaggagcagttgaacttgatcacggtttgggtcattcagaacattccaacagaagatcagaccaatttactttattttcaagccgtaatggtcgatctgtagaaaaatgcaaagagatggttcaatatgccagagggttccaccatgcagatgagatcaatcatgttccatttcaatggtgctttgaggatgaaggtccttcagtatcaagaggcctgcagtatggcgatgagatcccttctttatctaggaagaagtataacgtggcaccttcacgctcaagtcagtggcactatggtcctcaaaccgcactgtcctcaaggagacccgactatggtgatgagatcccgtcactctctcttcactatggttaccgagataggacccatttgcgttctggtaattggtgccatgatgctgaggcacgtataccgtcaagataccagcaaggtacttctcatggcaatggtcactcaaggaattgtttttccaggattaataccaacgagcaagccaaagttatcacaagcaaacatacctttgcaaaacctaggatgattaacagaaactgtagtgaccaacataggatcaatatgaaaggtaatcgctggagaaattctgaggatttaatggaccaagttcgtgggccgagggcaaataaattgaacaatgcttcagtatcctccactgtgaaagatatcacaagtccattgatccgtagaaatcagtataatagatcagatttttcagttcaatataatcaggccaagttttttatgataaagtcatatagtgaagatgacattcataaaggtatcaaatacaacgtttgggcaagtacaccaaatgggaacaataagctggatgctgcataccatgaagctcaaaatttaatggacagtggggaaaggtgccctgtcttcctattcttctcgttgattttcttagaggactactttaaccttattctggatcagactgttctgccattagaataagtgaagcagttca

SEQ ID NO: 35897 - DNA, 1167 bp, Zea Mays
ccagcccaggcccagcccatgcaaggcccgcgctgcgctaaactcagagacgggaaacgggaaaagaaaagagggctaaaaacctagcaatcccctcctcgccgtagctgtcggacgaggtaaccatggccgcggggggcaccgccgacttcttctaccgcgagtcgcagcgtctgggctacgtcgcccgctctgcgtttaagctgatccagatgcagaagcagcacaagctcatcgcgccgggcgccgctgtactcgacctcggctgcgcccccggcgcgtggcttcaggtggcttgtcagaacctgggtcccctcgagaagggtggcattgtcgtcggcgtcgatgttaagagcagaaggtgaaagtgccctctgcgcactgtgactcacgggtcaggacggtctgtgcagatgtcatgacgctgatgaagcggcaggctcgggcaatgtcgccacaggaacgaggattctctgtgatactgtcagacatgtgccccccagtttcagggatcacgactaaagatggagctatatcttgtgagttgggcatgcgcgctctctcgttggcagtagggaagataaagttaaaagattctaattacagtgataccctagagaagtatctgagctccactgagcctgagtctgacgaggatggcgttcttcgacgtggaggcaacctggtagtgaagtttcttgagaatgaggacatatcagggtttggcaaattctgcaaggtgaagttcaagaaagtatcgttgttgagacccaaggcgactcgacctagctcgagggagatctacatgatctgcgaaggtttgcggtagaaaggagggctcttcagaaggcaagcgaagactccaagaagctaggtcagttgagttgccctgaactgggcgctgttagttctagctgctggtgcaggtgctggctgattggcaatgtgatacagctgtttgatgctgatagcctcccagagcaagttaccacaaagctttgtgtgattgaaccatgctagtagttcgtctagatgttacctgtaataattttgttgaactgtgatactagttcgtctaggagaaacaagcatttgacttgagccctttctgagaacctgaaacacccttgctttttatgttgcaaatttccattatttcggccggat

SEQ ID NO: 35898 - DNA, 445 bp, Zea Mays
gaagatacatattcaatgtttttccagctctatgaggggttacattgaagacaggagagaaatgtttgagttgcttctgcatagattaagaacgaagtcgatcatggaggcaatggatgcactaccgagtatctttggagcttgccggttgaagaacaggccccactgcaaatcaacatctatgagcttagttttttagatatttcttttgtctcataggttaatccacaatcggtggcatgttgttgtttgttacttagaatttgagtcctctttgtgtaatgttctggagatatatgatcacaacatgaatggagatatatgatcacaacatgaatgaacttgaggaaagtgattaggaggcaatagaaggtattatatctaacaatggttattttactttagctggattgtttaggacactaaataatttcaagtgtatttg

SEQ ID NO: 35899 - DNA, 2033 bp, Zea Mays
catatttcgcaatccccttctcgtccccttcgcgaagaagcatcatcctccatacatcccctcgtccgcggtctcacatggcagtggcatgagctgcttctccccgaaaaaaacgtttaaataaaaaacaaaacataattataaaccaacacgcctgccaccgaccgatcagacgaccccttccaagaggaaatccaccaccgcggccggggcctcccaggagatctcgccggaggccgcggcagcggcggcggtggggggcgatggcgctcaacatgaagaccctgacgcaggcgctggcgaaggcgtcggctgtgatagagaagacggtgtccacgacggtgcaagaggtgacgggcccgcgcccgttgcaggactacgagctgctggatcaggccgggtccggcgggccggggctcgcgtggcggatctacacggcgcgaccgcgggatggcgccccctcggcgccctaccccgtcgtctccgtctgggtgctggacaagcgcgccctcgctgaggcgcgggcgcgggcggggatgtcgaaggcggccgaggacgcgttcctcgacctcgtccgcgccgacgcggcgcggctcgtgcgcctgcgccacccgggcgtgctgcacgtcgtgcaggcgctcgacgagaccaaggccgccatggccatggccactgagcccgtcttcgcctccgtagctaacgcgctcgggtgccttgacaatgttggcaaggtgcccaaggaggtcaagggcatggaaatggggctacttgagattaaacatgggctgctacaagttgcagagacgttggattttcttcataacaatgctcatcttgcccatcgagctatatcgcctgagacggtatttataacttctaacgggtcttggaagcttggtgggtttggttttgctctttcggttgatcaagcagcagttggtttgagtttgacttcatcacaactatttcattattcggactatgatgtcgaggatacagctttacctcttcaaccatcgttgaactatactgcaccagaattggtccaaagtagagattctaaagttggctctgcttgtgatatgtttagctttggatgtttggcttacaatctggttgctcgtagaccacttctggactgccataacaatgttaaaatggttcttctttcttccgggatgatacgaggttgcgcgctcttcgtttccttgaccatttgcttgtatgtatttattattcccctggataagttaaaaggttgcaatctcttgtttttgtatcagtctttcttctttgctgtctgagaatcacctttgactagaattgttttcagttgtacctgtcaactcagcagcaagagtcttgcctgtttgactagacaatgaaacgacacaatttagtacctgacaatggccctaaattttaaggcaccattcctttcaggagagagataatatgcagaagacagagtttttgaaggcattatcagatatgtggaaggattttgattcccgagttcttcgatataaagtgcttcctcctctttgtgctgagttacgcaacatggttatgcagccaatgattttgcctatggttctaactatagcagaatctcaggataaaggggattttgaactcgcaacactgcctgcgcttgttccagtgtttgcttcagcgtcaggccactcaggaacatttgatatcacatgttcttccaatgctggtccgggcttatgatgacaatgatccccggttacaggaagaagttctgcgtcgaacagtaccactgtctcgtcaacttgacaccaagctagtcaataaagctgtgcttcctcgtgtacatggattagctctaaagacaacagttgctgcggtgcgtgtgaatgcgttgcgctgtttaggagatcttgtgccatccttggacaaagaaggaataatgggtatcttggagactgttcggcgttgcacagctgttgaccatactgcgccaactcttatgtgcacacttggtgttgctaatgcaatctataaac

SEQ ID NO: 35900 - DNA, 995 bp, Zea Mays
ccccgccccaccacctgcgcgccttttgcttcctcaacccctcatcatggacatggaggaggatccagcaggcggcgaagacctctcttccacggccgccagcggccactcctgctccggtgacgacggcgaggagagtggctggacgtcctacatcgactacttcatggagacgcagcagcgacgacgacgcaagcagggggacgtgagccgtgctgctgctggtgatggtccatccaccgacgacgatgctgggcgccgccgcagctctacggcggagtgcagtagtggcgctggagtgggagcctcgtcgtcatgcctggcgccaccggtgctcgtcgacccgccagtagtggtggtgtcgagaaggttgagcctcagggagggctggaggaggaagaaggtcctgcacgatgagtccttggaggataccgccacgtctcctatcagtagccctaagcggaagaacagtacaggcggtgatgtaaacaacggggcaaacacaagaacagacacggcggcggtcaaggaagacagtgcagcatatagcaacgacgatgaagctgaggaagaaataagcaggcctaatttggtcggcccggcctatgcctgcttctcgtgtatagctgatggcgatgccaacaaattcattggttgctagctgaaaacaacaacaccctacgtacgtacacacatgcatatatacatgtagtacacactggcacacatgagaaaattaaaggtagcagctagagagtcttgtgaaggttagccattccgttcctgtttgtgaaaagggtacaaaagctactagctttcacttcacacatgagagaagaagctaaggagaagaggtacaggctgctgtgggtgggttcgatggtaggtgagacatcgcaatgctatgttagatatggggtctattccatctatcttgtgaccaagattgttatcatcagttacactcttctgttctgttcatgtgcatgcctgag

SEQ ID NO: 35901 - DNA, 2448 bp, Zea Mays
ctcgctgccacgtcggtccgaaccaaatccagcaccctgcaccctcttcctccatcgcaccctatcctcctcctccccggtccggcggtccccaccggtccaccacggcaccaccgtctccccgccccccgcgtccgatcaccgcaccggcgaactcggcgagccgctcgtcgctgcacgctaagctgggaatggccgctgcgctcgccagctcaccgcttgttcacctatccacctcccgcctccgcctccccaggccccgggcctcctccagttccgctccaggctgctcgatcggcgtgtgcttgggatggaggctgaaggtcgggtggagggctctgaggcggtgcgaccggcttcgatgcttctccaccgacggcgacggcgtggaggagggggagaagcgtggcgaggaggaggcctcggcgacggcggccccggccccggacccagccccagcggagacacaggtgggcgctgcggaggagctggcgtctgagcggagccgatcagggagcttttcgtcctcatcctcgtccgggaatcctggtgtatcaagcgagccaccactgttgagttttagtgttgataatatcgatacagttaaactattggaacttctaggcccggaaaaggttgacccagttgatgtcatggcaattaaggaaaaactctttggttatacgacattctggttgacaaaagaagagccttttggtgatctcggtgaaggagtccttttcattgggaatctccgtgggaagagggaggaaatctttgcaaaacttcaaaggcaactacgcgaacttgctggtgaaaaatacaatctttttatggtggaggaacccaattcagaaggggatgacccacgtgggggaccacgtgttagttttggtttgcttaggaaggaagtttctgagcctggacctactaccctatggcagtatgtcatttctctgtcacttttccttctcactatgttctcctgtgttgagctaggaattgcatcaaagattagcagtcttccaccagaaattgtttcatatttcactgatccaaattctactggaccccctcctgatatgcaacttctgctcccatttgtggaatcggctttgccagtggcttacggtgtcttggctatccaattatttcatgaaattggacactttttggcagcatttccaaaaaatgtgaaactaggcattcctttctttattccgaacttcacccttggaacttttggtgcaattactcagttcaagtccattcttccggatcgaaagacaatgtttgacatatcaatggctggtcctgtggctggagctgcactttccttttcaatgttctttgtaggcttattactctcttcaaatcctgttggggcaagtgatttagtagaagtacctagccagctgttccagggttcattattgcttggactcattagtagagcaacacttggatacagagctatgcatgctgctacagtttcgatccaccctctagtgattgcaggctggtgtggtttaactactactgcatttaatatgcttcctgttggatgtcttgatggtggaagagcattacagaaaacagggttgtactcagcttcgcatgatgacggggctaccaccttctgcttttgagactgccaggttatgatgttgctgctgaggaagaacaggacactagagtggtttctcaatgaatctgcttatgtaccccattgagaacgccaaatctggccttgaattcaccaaatagcacagagaaccaacaatgaacctataccgaggagcgtcaacagcagggacaaagcttgacttagcttcaacctgggctccattggggtgttgcttggattgcagcctgacaaaccctagatcactcatctggcttacagtgatccccatctcagattgtgccacctccaggccaagggtgcttttggcaaggatgctttgtttggatttggcctcacaacatactcgttgcttggactaggagtgagaacaccggagaaaccatgcttgaacgacgtaagcgatattggaggttggaggaggacggccttgatagcttcagtgtttcttgttgttttgactctcatcccgttgtgggatgaactcgcggaggaactaggtgtagggcttgttacttcgttctgagatacggtccttaccgatagaattaggccgtgatgtagctcaattttgtattgaaatgtagcgtcccatagcgggactgctgtaaaggcatgtgcagtttcctgattaggtgagcaatgatatcacctatgcgagtgtcatgaaattgtgccaagacgctgacgattattatcaattacatacatgtacgcacattttgaccatacgagtacagatacacacaacctacccttctatgagcatcttcaaacgattgggcgtgaagccatgaagtcag

SEQ ID NO: 35902 - DNA, 3019 bp, Zea Mays
cgcatacgcccgcagccgccatcaacgcccgcggacccctcagcctcctccttaccgccgcgatccgccagaccaccgccccccccccgcacccgccgcagatctcgccatggcggcgcgcacgccccccaggtcgcagccccgtcaccttcctcccccaccccgaactccgtccccgccgtagatctcgccatcggtaacacacctctcgttcgcatctgacgcgagcggttgggttctcccgcgcgagcggccggcgggtgcgacagaggggtcttgtgaaggccatcggcaacacacctctcattcgcatcaacagcctctccgacgttacaggatgcgaggttcgcgcgtggactcggcgtcatctccgcgtggtcctcgccccccccccccgagacacccgctcgcaatgttcgggagtccgcgcccgccgtcgagaggagtgctgcatctgccttgcgtagtacggggagaaggaggaggttcggcagctgccgtgcacacacgtgtttcatctcaagtgcatatacaggtggctcaggatcatctcctcttgccctctctgcaagcaagagctcaagtgaactttatattcattacacacatgacattctcgcttattctttggatcaaggtgttagtatcctagacacaacagatattttccagctaacaagggaaatcaaggaagaattgatctttatattagcaggcggatgcaatcactaatcaaaaccacgatgcaaggttctacgccgacgccttcaggagggattcacagaggccatggtgaggatggccagcttgagtcggctcaccgggagcagcgcgagatccgctacaactaaatgataggaggtttcgctgccatttgcagcgactgtgttccagttcgaccgtttggggaaaaggtgagtcctcccatttcatgtagatgcatgggttgataaacatttgggagaaatgtcccctctttaattcgaaaaatagttgtgtatttgttcgacttatctgcggcgatgtacctttgtacgcgtacaaacatctatagacaaaaacaaaatgacacttcatggatgtagcaagagcgggctacgagaaactagcagatcatgcctaaaattcaattagcattagggtcagacaaaatactacattttctggattacaataatgtataggtgcatgaaaaaaacttgattccaatgtgtgacaaagtgtgaagatgaaagtgcactttcacgctgtcataacgcggatttgttttccttgctcatggaatgtgcatttgtgtgtttgcgtctactgtgcggctacaggcaaggaaacaggatctgtcacggaaggtatgtacacattacagtaaacgttgttcgtagaacatgcactttgtggagtggtctttgaatgagatgcgtttagaattaccttttcatgcagatctcttgttcagaacctggttgcttagtccattcttgttttgggttgctactacaaaaaagcggcaatgctttatatgaatcgcctcttactaatatccagggtcaaatggtggtccttcagtgaccagactaatatttgagcattaatcttatttgtttcacagtcatttcttgtttatcaatatgaatgctatttttttgcgagtggacttgttaactaataagctcatagatatttgaacaaaaaatagtgttttgttctaaaactgtcataaagagtgcatacatcatagctatggtttcaactgtgatttgatgtcctataatattgagtgtcctatagtgtgttgttctgaaacagtcacaaagagggcctaagaagctgatggaatcctcattcaccgccgctaaggagtttgagcgggatcggagaggagacgtcagttcttcctcctctgctcaatgcggccattcgccctgtcccccaaccctgaactccacactgccactccgtgctcattttttctgaaggggaaatattcatctccttgttgttttgtaccatggatactttagcatcattctcatactactaggagtgtaggtaaggagtccacacacgagtttgcaaacaccattaagcctattttgcttgattagtgccctgcaacacttcatatgttcaagacaaaatccatacccatgtctattgttgtatgatattatttgcattgaccgttgctgctcttcttgattgcagtcactaacattgcattaatctatgtgatacatttattcaggcgattcccatttctcagtgatgtcgatgtcctgtactcctgtatatttggattcaacaatatgccattagtatgctgtcaagcgtcctatttgcaagagataaatggcttacgcccgaggggcttattcttccttatcatgtgcattggtgccacaacactggatgagtataggaagcatatagagaaagatcctgccttggaaagaaggtttcaaccagttaaggttccagagcctactatggatgaaacaatacagatcttaagaggacttcgtgagagatatgaacttcatcacaaactgagatacacagatgatgctttaattgctgctgcacagctgtcttatcagtatatcagcgatcgttttctgcctgacaaagccattgacttgattgatgaagctggatctcgtgttaggctgaggcatgcgcagctccctgatgaagccaaagagctggacaaagagctgcggcagataagcaagcagaaaaatgaggctgtacgtggccaagattttgagaaggtatactgttgtttggcacagcggtgacaaagccgatccgctcccacctctctagcaacgtcgatatggttaataccaagcattatgttgtttccttttgagataaatattttgttactgattttaccttttgtctcctcttcttgttttttgttctagaatctgtagcaaatggctaacgatgaggatatccattactttgtttatgacaataaaactgatatgttcaagattccgtagcaacgcac

SEQ ID NO: 35903 - DNA, 2463 bp, Zea Mays
agcagaccgcaggaatttgtgtggtccgcgcctcacttccacgacgctccagcggcatccgccacttcgtcgtcgtcgtcgcacggattggcattggctgccccccggccctgttcctcgtcctcctcatcaattcccgtctctcagtcctcccaataatggtggcgtggtgagaaatccttccgtccggccgtcgtcttagaagatgaactgttcctcttgctgcgccgctgccactccatcttctccggcgcttctcgccaggccgcgggggggtttagctgctagctgctccacgacgacagcaaatcagaaggtgcttttcctgggctcaaaacagtttccacggatcacgtatagccgtgcgtcgtcacggttgtcgcggagagaggtaatagcttttgccgggcaacaaccttgggacatcggcagatttgtcaagacgctgtatttcttcaacgggcctccaaaccttctcaagattgtagaatctatcatcagcagtttcactggacctgcttctagtgaagtgccaaagaaaatggaaacgtcggatgtggtgctggttactggagccaccggtggtgttgggcgacgggtggtggacgtcctgcagaagaagggagtacctgttcgagtattggctagaaatgtagacaaggcaaggagcatgttggggccggatgtacctctgatcataggagatgttacgaaggaagatacacttgatcctaagctattcaaagggataaaaaaagtagtcaatgcagtctctgtcatagtggggccaaaggaaggtgatacgccagacaggcagaagtacaaacaaggcatcaaatttttcgaacctgagatcaagggaccttcacctgaaatggttgagtacatcggaatgcaaaacttgattaatgccataaagagtagtgttggactgagtgaagggaaactgctatttggtttcaaaggcaacttatctggagagattgtgtggggagctcttgatgacgttgtgatgggtggtgttagtgaaagtacattccaaatcttgccaacaggaagtgaaagtagtggaccaactgggttgttcaaagggactgtatctacttcaaataatggtgggtttactagtataaggacaaagaattttactgtgccagaggacctgtcagcatatgatggtattgagttacgagttaatggtgatgggcgacggtataaactcattatacggactagctatgaatgggatactgttggctatacagcaagttttaacacaactaaggggggatggcaaagtgttaaagtacctttctcttctctgaaacctgtattccgtgctcgtactgtgactgatgctccacccttcgatgcaagcaacattacttcactacaactcatgtttagcaaatttgaatacgatggaatactcaacccaacatttactgaaggtccgtttgagcttcctttttcgagtattagagcatacatcaatgagccgatcactccaaggttcgttcatgtgagttctgcgggagttacaagacctgaaagaccggggttagatttaagcaagcagccacctgctgttcgattgaacaaagagcttggctccattttaacttttaagttgaaggcatgctcattctattagacacatctttatattaaaaaaaactatcttaaactcggtcttttaattcttctgacataacaaatcacaattgtacattttttgtactgcaaataaaccatcgatatgcatctaagtactttaagatatagactgaacaatggtgctcctcattttgtcatgttggttatcttggaaccattatataatgtctgaggtggcctttcagggagaggatttaattcgggaaagcggtattccgtacactattgtaaggccatgtgcattaactgaggaaccagctggagccgatctcatgtttgaccagggggacaacatcacaggaaagatatcaagggaagaagttgcccgtatttgtgtagcagctctggcaagcccagatgctgtgggcaaaactttcgaggtcaagagcactgttccattcagcgaaccgtatgtgattgaccctgcaaatcctcctcctgaaaaggactatgaagtatatttcaaagaactcaaagaaggcatcacgggttattttcagggcgacatattgggcacgttcttggtcgctgctgcttagagacgaggacgcgaggaccgatctgaacagggcatgccgcttattggagtcggtcgttatggaggtgttcgctaagtttgggtggaagttctcaaatagaattgcggcctagtcgtctagctgtcttgggtaaacttggttttttgagtctgtttgtgagcctaagcgcttgttggatgtatcgatacgctgtgtacgctgtcttggatggtgtagaggctgggaccttatttctgttccattatct

SEQ ID NO: 35904 - DNA, 606 bp, Zea Mays
tatttatatgatacatgaaaaacatagcaaaacgttgaaaaacggtaatccggtagcctagcccgttcctgacagagtgacagataataggaccgacgacgtgccctacactgcaaatttgcagggcatctttctttccgttcgctgttgctgtcgataggagaaacctaaaagggggtttcagtgtcctcctgtgcgtctgcgtgatgcacacatgcatgcatgacgaccacctcgccatgcatgcatatgtacagtggcctgcacacacgctgctgctccggcagcccacatatcctcggtcatcgcacggcgcataactctcgcaacacccttcagttcatccgacgtgccggcgtaccacggccgcacaattattgacgacgtacgcggccgcggccgcggggaccggccgccgtccaccgatcccgccggaccacaccggaagggaagaagacaatcgatcgggtgcgtggcgtggccccatgtcgtcagaggtggtcgtcaggcgacaggcggtgtgtgtgtctgtgggtgggctctgccactgcatgattcgagatccaaagtcgaaacgacgtggacgtgcgatcggatggatgaccg

SEQ ID NO: 35905 - DNA, 3247 bp, Zea Mays
cccatatgctttgcaatgcaagtaaccgaaaaaaaggaatttacaacagaattacttaacagggcctttgccatcgttccttggagaattaactgctttgcagcagatgtcgctttctggcaatgcattatcaggaactattccaaaggagctggggaaccttgtgaatctcataatcctgagtttaggcacgaacaatttaactggctcccttccttctgaattgggtaacctggttaaactagagcatatgtacattgatagtgctggcttaagtggtcctataccatcatcattttcgaaacttacacgattgaaaacattgtgcgcatcagataatgactttactgggaaaataccagattacattggaagctggagtaatttaacagatttgcggtttcaaggcaattcattccaaggtccacttccaagcactcttgctaatcttgttcagctaacaagcttacgaataggtgacattgtaactgggagttcttcgctggcattcatcaaattttaaggaattgcaggatatttggtactttggcattagtgaacttttcaaaatttacaggattaacattattgtaaggcatttcgtttcttccaaattttttgttaaatctgctttgtgcaagatgcttcctatggatatgcatcgcgagatgtttcctttcacacatattctcgtcttttacttacttatgcagggatttgagttttaataatatcataggtgaagtaccacaagctctactaaatatgaattcactcaccttgttgtatgttttgtatccctttcaatgcttattttgggggcataatgaatttcattgtttatcttgctaattgtagcacatgcattccgatcagatttcttgggaacaatagtcttacaggaggccttccaagctctataggaccttctattaagtacttagacttttcctacaactacctctcaggaaaccttccttcttgggctagtcataatttgcaatttgtcttacctgcggggctggagtgccttcagcgaaacacgtcatgctttcttggctctccacaatcttcctcctttactgtagactgtgggagtagtagatctgtatttgcttcagataattccatgtatcaacctgatgatgccaatcttggtgttgcatcatattatatttcaagcccaccaagatggggtgttagtaatgtcgggagattcatggatacatcaaacgggagttacatagtcaacagttcacgccggtttcagaataccctagattccaaacttttccaaacagcaaggatgtcagcatcaactttaagatactatggttttggacttgaaaatggggactacacagtcacacttcaatttggagaatttgactttgaagatttacaaacttggaagagcgttgggagaagggttttcgatatctatctccagggtgagcgtaaggagcagaactttaacataaagaaggcagcaaaagaagctggcgaagcaagcacatcgtacactgctgtcaagaaacaatatactgtacctgtcacaaaaaacatcctagaaattcatctcttttgggctggaaagggcacttgttgcatccctaatcaaggcgattatgggcctacaatatcagctttgagtgcaactctaaatacaaaaaagaagggtaataaaataggtgtaattattggagtcgtgattggtgcaacagttttaggactagcaatacttgctacactctgtgtgtggaggcacaaaaggagaaaagtatcactagagcagcaagagctctacaatattgttcgaatacctaatgtattctgttacacttatggtgaactaaggaccgctactgaaaattttagttctgctaatcttcttggtgaagggggatatggatcagtttataagggtaaattagttgatggcagtgtggtggcaattaaacaactatctgaaacatctcgccaagggaagaaggaattcgtagctgaaatagaaactatttcccgagtgcagcaccgtaatcttgtgaagttgtttggtttttgccttgagggaaataaaccacttttggtttatgagtacatggagagtggaagccttgataaagcattgtttggaaatggaagattgaacttgaattggtcaacacgatataaaatatgcttggggattgcaagaggcttagcttatctccacgaagagtctagcatccgcattgtgcatagggacataaaggccagcaatgtattacttgatgccactttgaaccctaagatttcggatttcgggctcgccaaactttatgacgataaaaagacacatgttagcacaaaagttgctggtacatttggctatctttcacctgagtacgccatgagaggtcacatgactgagaaagttgatatttttgcttttggtgtggtcatgttggagattattgctggaaggccgaactatgatggtaagcttgaccaagacatggcttatcttttagaatgggtctggcaactttacgaggaagaccatccgctggacattgcggatcccaagctcacagaattcgatagtgtcgagttgctccgtgccatccgcatcgccctcctctgcatccagagctcacctcgtcaaaggccatccatgtcgagagtggtgtcaatgctcacaggagacagcgaggcgcctgaggcagtgtccaagcctagctatgttgccgaatggcagagcaacactgaagggacgtcaagctcagtgtccacagcagaggctgtgtccgtggctccattcctaaaccccgttgtggacgatggccggtgatgatggccatcgctaagatcatcttatgtcaagcactcaagccacagattgttttcttggagatccacctttaaaggccccattatttaggttgaatgtggatgacagatttatgttgttgactggatgagatgtcctagggtttcctcacgttgtagaatacaactctcacaagtataagaatctaggaacatattccttcgatgtaacatacctcttttgtttaatctgttttgtaagagaaaccagaagaacaccttgtatttcggttgatattttgaaacccacagccaattgaatgctgggtgtgtaggcatatatatgaccaataggttgattgtaagctttactacaatagtggggcggtctcgaagtatattgccagatatgttgcagttcattttctaacacgag

SEQ ID NO: 35906 - DNA, 1851 bp, Zea Mays
cccacatgagggttgtggggaagggataaaacgaggtatcgcatacagagcgaccggaaagtccctatctgcagtgtgcatccaatggaacaagcaactattcagtgcctcggttgtctcaagtcaaaaatacctgttgctaagagctaccactgttcagccaaatgcttctctgatgcatggcagcaccacaaagttttgcatgaacgagctagtagtgctctaaatgaaaatggggctgaagaagaggagttatttggcagatttggcagtggtggttctggggttctaagtactgctggatctggttctttgtcaaattttggacaaagccctggtgttaataatggacctgtgcctttctatccctcaggtaccgataaaaattctggagaaacttggtttgaagttggacgctcacgaacatatacaccaactgctgatgatattggacatgcactaaagtttgagtgcgtagctgtggattcagaaaaaaagtctccaattggaccctcaacctcaatcatgacatcacgtgtaattcccgcgccaactcctacccctcgccgccttatccaagtgaatggggatgttttaggtcacttggatttagacagccaaatttcgtccttagggacattcactgtgttatcctacaatattcttgctgatgcatatgctacaactgatgcatatagctactgcccaacatgggcacttacctggaattatagaagacaaaatttgctgcgtgaaattattggttatcatgctgatatcatctgtctacaggagatgtttgtgcatttttctataaacttgctcaaaactagagaactaagagaagtttgaatcaggacaaagctaaaatgacttgcaatttggaactctgggagtaattggtacaagtaaaccatttcgaagattttttttcacctgagcttgacaaacatggatatcaggcgctttacaagaaaaggacaacagaggtgtattctggaaatcctatggccatagatggatgtgctactttttttcgtagagacaagttttcacatgttaaaaaatacgaggttgagttcaataaggctgcacagtctttaacagatgctattattcctgctgcccagaaaagagtggctttaagtcgattgattaaagacaacattgcactaattgcggttttagaagccaaatttggtaatcatggagctgaaaatcctggtaaaagacagctcctttgtgtggcaaatacacatataaatgtccatcaagacctaaaagatgtgaagctatgggaggttcataccctcctaaaaggattggagaagatagctgtcagtgcagacattcctatgttggtctgtggagatttcaactcaacccctgggagttctccacatgcgcttctggcaatgggcaaagttgatcagcatcatccagatctggcaatagacccccttggaattttacgccctccaagcaagttgaatcaccagcttcctttggtcagtgcatactctgcatttgcaagaatggtaggtgttggctatgatttggagcatcagcggaggacagaccctgcaacaaatgaaccactcttcacaaattgcacaagagattttactggaactattgattacatattttacacagcggactcattgacagtggattcattattggaacttttggatgaagaaagcttaagaaaagacacagctctcccatcccctgaatggtcatcagatcacatagcactcttagctgagttccggtgcaagccaagaatcagacgttgacacattagatgccaagcccacaatacgggcgccgcaagatccactcaag

SEQ ID NO: 35907 - DNA, 3041 bp, Zea Mays
aaacccgccgggtatagatttatgcccattaacaaacccatgagtatgaaaattgacccaaacccataccctaatggggtaaaaacccatcgggtttcgggtttcgggtacccattgccatctctaatcatgtttgcttactctaataaaactcacaccgaaaattgcctccaaacacgaaaaacacggaggtcgggtactagcggttggagagcgcagtccccggacctgaccggtcgagtccttcggccttcccaaaacgcggaggtcgggtactagcggttggagcgcaggctgcgcagtccccggacctgaccggtcgagtccttcggccttcccaaatcgcatctcttgacactgcttccgtcccgtcgcctcgccgccgcgacgagacgaccccgcccctacaaatacaccgccactttggccgcgtcagccgccgccacttcccagatcccgatgtcccgcgcccagattccactcccttgttgcatcgctactctgttcccagctcggggcctctgacgaggcccgaggcgcaggcgccaacctcccggcccgccctagggtttggggctgatcgatccggctaggtcttggcgggagctgctccaatgggggatcgggaggaggacgaggagctccagatggcgctccgcatgagcctccagggctccccgccggcgcagcctgagcccaagcgcagcaagcccccgccccccgctgcggagtcgccggaggcagaggcgcgccggaagcagcgcgagctcatggccgccgccgccgagaagcgccgccgcggtgcagcgtcaccggcctccgtctcggtggcgcggtctcttctgcagccagtggtggtggagtcagcccccgccccggaggtcaccaaagagcaggtggaggagccggaacaagctggcgtatctatggaagaagcgaaggaggtggaggaggaagaagaagaagaaaagggggaggagttgcctccagatgtcgctgagaatctatgggcaatggtgtttgggagaggtgtttcaaaggcggtcttggcgcagtggagtaatcagggcataaggtttagctctgatccagaaacaactatgggacttgtacaacatgaaggaggtccttgtggtgttttagcaaccgtgcaggcttatgtccttaaatatcttctgtttttttctgatgacttgagtaatccagagatcagtaacccgctgtatactctgggacaaagacgcttttatcagagttcttttgctgcaggggatgatttttcatcccttactgatgatagaaagacaagagcattggttcatgctatggtggagattctttttttatgtggaactggaaaaagagctgttgtagcatctgttgcacgtgccaatcgtggaaaaattgatgcagctttggaagatctttctgtcgaatcagcagtggatctgcagaaagttcttaaaacaagtacatttacttcaaggaaggatgcattcaacacccttttggctaacattcctttgtttcaaagtcgactgggagccatgctatttcttatttctgctttgctttcacgaggattggaagacatccaagcagacagggatgatccaagccagccattggtcactgctccatttggtcatgcttcacaggaaattgtgaatttattactctgtggagaggctgttccaaatgtatttgatggcaagatggaccttggtggtggcatgtccttgaagggcataccaaacaatgttgaagttggttttcttaccctcctggaatcactaaatctctgcaaggttggtcagtacttgaagtgcccaaagtggccgatatgggttgtgggaagtgaaagtcactacacagtcctttttgccttgaaccccaacgttcaagaggagaatgagctggaagagcgcgaatcaaaaataaggagggcttttgatgcccaagatcaaagtggaggtggaggctttatcagcgttgagggcttccaacaagtcctcagggatactgacataaattttccttcggataaactcgaggacctatgtaatgctggaattatagtatggagtgaattctggcaagcattgctacagttggataaaagggctggaggcatgaaggatccaactggtcttatgggcaagaagcaattcaccatcttccacttcaatggaattgccaagtctgtgccgaatgggaatgcaagtgcaggtggttcatgtcctatacagagacccaggttatgcaagctaaatgtcactgtccccccaaggtggactcaagatgagtatctggctgatgttgtaagcgcatcaaccagcagcagcaaggacgacagtattctttctctagctcccccaggtcagactaatcagcacgcaccattggtggactgcattaggacacggtggccacgagctgtttgtagctgggttggagatgttccaagcattgtctgacacagtggatgtcgtgtgcgcactagtcgctctagctatgttgctcgtaacctcgttctgaagaatctgctcagagcaagccacttggagcttcctgattgttcatgccctggaaaaaggaatcgcccaattacatggtttgttcggtcaaaatgagtgatgttttaaaatgcgtgttattaatcaagggcctggatattcttttttttttgcttttattgacattagatgtacacttgatttatggatatgttttgtgtcttgggttacattcttttctgtacacatatagtttcgtttgtgtttatcatttcatctgacacagtgagttgtctagccagaagccggttgagtaaacaaggatcaaacttcaacgatcatatcatgccgctgtactctttgattttatgtttgggtacatgagcttcagggatacttgatggaatgagagtagtgtaccggtgtatgtttgttgatatatatatactataaataaacacatcttttgtaataatagagatggtatatgttggagcttatggtaatgcttgagttaagttttag

SEQ ID NO: 35908 - DNA, 4404 bp, Zea Mays
tgcctaccaagtcacctctttgcccggttggccgccgcgcccagtggccccctcctagcctaccgctccccgatccaatctgtgccgtccgttctcccgccgcaaccttcgtcttgtcctcaaggccggcggcggccactgcccgccttacaccatgaaaccaccacggctctttcccctcctccgccgccacctctcatccgccgccgacgccaccgccgacgccgcggagctttccagcgcgctatccgtggcgccctcctcagatgcgaaacgcgatcttgccatcctgctccgccgccttggcggccgcggtctcgcctccgccctctcgtcccttccggctccgcttcccgcctcctccgccctgcgcctccttcagcatattctctccgacacccacgcgtccgcctcccgccacgccgaggacctcctgtctcctcgcgtctctacgctcctcctaccatcgctcgtcgccgatggcgcctcgctaccgtccgcgcgccgcctcatctcacgcctcctcttcttcaaccctctttctgtcgccgcagcggctatcgcggactccgactgcactgccacagcggaccttctcgtccgcgcctgcctcaactcgcctgcccccggatctctgtcctgtgccgccgatgcctttctcgagctttccacacgtggtgcatcaccgtccatcaagacatgcaatatccttgtcgaagccctaggttgtggtggccaactggacctggcccgcaaggtgttcggagaaatgcgggatggcaacgctgttgctcctgatgtgtacacatacacggtgatgattaaggcactctgcagggctggagagattgatgctgcttttgtgatgcttgcggagttggaacggtctggtatccagccgacggttgtcacttacaacgtgctaatggatgcattgtgcaggagtgggagggtggaagaggcctttcagttgaaggggagaatggttgaaggcaggctgagaccaagcattgtcacatttggcatcctgatcaatggtcttgcaaggggccaacggtttggtgaggttgatgcagtgctgcaggagatggagggttttgggatcacccccaatgaggttatttacaatcagctgatcggttggcattgtagggaaggacattgctcagaggcgcttaggctgtttgatgaaatggtctcaaaggggataaagcagacagtggtgacttacaacttgattgcgaaggctctgtgcaaggaaggagaaatggaacatgctgagcagatattggatgagatgttgttggctggaatgacggttcattgcagcttgtttaatagtgtggttgcatggcatcttcgcggaactggaagactggatgtggtgctaaggcttataagagaaatggttgcgagatttctgaaaccaaatgatgctgtgatgacagcttgtatccaggagctttgcaaaagagggaaacacgaagaagcagctgaaatttggttcctagtattgggtaaaggtttgggtgtcaatattgcaacatccaatgcgttgattcatgggctttgccaaggtaacaacatgaaagaagctactaaggttctaaaggctatggtggatagcggggttgaattcgatagaatcacatataatataatgattcaattctgctgcaaagccagtaaaatggaggaagcaatacaacttcgtgatgacatgatcaaaagagggtttaagccagacctcttcacgtttaatactttcctacgcgcttactgtaatttgggtaaggtggaagacatccttcacttgctggatcagatgaaaagtgagggtcttaagccagatattgtgacatatggtaccataatagatggttactgcaaagcgaaggatgtgcataaggcgaataaatatttgattgaattgattaaaaatgggttaagaccgaatgcagtcatctataatgctcttattggtggttatggtaggaatggtagcatttctgatgcaattggtgttcttgacactatgaagcataatggcatacaaccaacaccaataacttacaacagccttatgtattggatgtgtcatgctggtcttgttgaagaggccaaagaaattttcgcgcaatgtatactaaagaacattgagcttggtgtaattggctacacaattataatacaaggtttttgcaaaataggaaaaattgatgaagctgtgatgtactttaaggaaatgcattacagggatatacgtccaaataagatgacctacaccactttgatgtatgcctattgcaaatgtggcaacaaagaagaagctttcaagctttttgacgagatggtgagctcaggcattgttcctgatactgtttcttacaatacactaatttcagggtgttgtgaggtggattcattggataagattgtagaaagtcccgctgaaatgtcctcatgagttttggaacaaggtggttgtttgtcaacgtttttgataatggataactacaccctggagccagagaagctgtgtctagtgttgaattatgtgtaaccaaggaagatgtaagaaaggagactcaaactttgagcttgatatatcaccctaatgtcatcaggtcttagcgctcatttgttgtgggtcaaaacctttgggtagtagtgctgttcatgctagaaggttcatgtttgcaccaaatgaaggttggatatctgatggttttgaggagccagttattgcctctattctaaaggaaacactcaaagctctagactacctccataggcaaggacatattttcaccatgatgtgaaggcaggatatctttattgccatcccggtgtagtcaagcttggggactttggtgtctctgcttgcatgtttgataggaggcaaggggctatgaatacatttgttggaacactgtgctggaattaggatggctccagaagttctccagcttcaaactggatataatttcaaagctgatatggtctttggaataactgcactggaggtggcacatggacatgctccctttttgaagtaccctcctatgaaggtaatgggtcatttggtctttgtaaattaagattttaaatcctttgtccttcttgctcttatggaatagagcaaggtaataatagtttccagggagcgtggatggttgatgattaattgcatcggttttattttattttgaaatttttatgaagtggcttatttcaaagttagattgcaagcatatgtggtcttaatcattttgctatgggcacactagaaaaagagagaaatcctcgaatttctcccaagggcacacattcttgtgaatacttatttagacttgctgattgacaccagcttgctgaactattataggcgtcagatagttttatccatggagttaactatctaactttacaaactttctggcaataactatttccataaagttcacctaatcacgtgtgtgaattcagtgttaactggtgatttccttggtggctcgggttcttctcatgacgctccaaaatgctctccaagttgaatgctttctgattatagttttctgccacaatctttctattctagaattctgtttcagtcattatttatacagagtctggtctttaggttagattaccgtggttgcacttctaatgaaattttttcacttgtaaagttgtaatcagtctttcagggaaatgattgcaatgtgcttggtgaaagatcaaacaaaggccaacagccgataaaattaattaagcattttttcaagaattcacaacctccaaagctaactgttaagagctttttaactgatttgccccctcattgggatcgtgtaaaagcactccatttttgtttccatatacttctttcgtatttctgtttacataatgtttgtgatagtttttcttagttaatgactctatttccagctaaaggattcagctagctttgaagagaatgccttcttcagaaatcagaacaagaaacacttttcatgggtgagtgttaataaggggtcagtgcatgaaactttgatattgaggatctaaaaagccagccatcactgatttgcaatgatgatgcacctgaaatagaagaacatgatgacactgctagaataactgacttcgataaagtttgtttgagtcctttgtctttattttaaaaatgccttcgagtcctttgtctttattttaagaaatgcattagtcatgtgtactaggaataatgacataaatatgatgtaagcttcacagagtgatagaagaaatcatatataagatcatcatctgtcactaggtgagtacccgtgcgttgcaacggggacatataataacataataacttatatataaaatgtgtcttatattgttataagaaaa

SEQ ID NO: 35909 - DNA, 3352 bp, Zea Mays
cgagggcaaaggggcaacgcgtccaaccggccggacctcaccggctcatccctcatcgccctagtccccaagggccaagtccccaaccccggctgacgactgtgcccgtctccttccctgattcatccgcaagcccacccgtcggcgatcgtccatgacggaggatcgagcgcacaaggtcgccgacgagcccgccgcctcaggcaggcaaagacctgaaaggaagaagaggaagtgggatcaacccgcggaggacttggtctccgcggcggtgacggctgctgccgtgtcggggatgcctgtgatgaatttcggtgctcttcctggcgttgtactgcctggcgtcaccgcatatggagctgctacattgccaagtgtagtccctgttccgtattcattgccgccccatattgcaccatcggtgctccagaatgctgctgcagcagcccagaaattgagtcaggcaaaaataccagatgaggtcattgcacgggaaattgttataaacgatgcagatccatctgtgcgatataagcttacaaaacgacaaacacaagaagagattcagaaatgcacaaacactgtcatcattaccaggggaaaatatcaccctccaaatttacttcctgatggtgagaagcccctctatctacatatctctgctggatctcagttgaaagatactgctgagcgcattaaggcagttgatcgtgcagcttcaatgattgaggaaatattgaaacaaggaacaacctcagagtccatatcggtccctttctcctctagcactggacaaatccatcattgaatatcacagctcgaatccgtggtccaaatgatcagtacataaatcatatcatgaaagaaacaggggttactgttgtactaagaggaaaagattcggagaatcttggcagttgtcatagtgaagcctcacaacaacctctacacctatacctcacaagtatgcatttaaagaacctagaagctgcaaaagttttggcagagaacctcctggatacagtagcagcagaattcggtgcttccagaatttcttcttcaaaagtatatggtgctgttccacctcctcagcagttgttagctggtgtcgacacctcaggaacgaaatcagatgttcactatattgtagggcccaatgtgttatcgggagctacacattcctttgcatctactggagttattgctcctgttgttgctcctgcagtgacagtgcaatcaggggctccaacatattctggggttccactacccagtaacatggcctatcctattccaccagcaaacggtggggcattttacagtggttatggggacatttatccccaagcaactccgttgcagcagctggcattcacactcaagcatgcctcatcgtcggcaactcaggctgttccagtgacgtccacaccaacaagcatggctacaaaggggaactcaatcttggatgcggagatggataaacgatcccgaaggaaattccaggaactaccggtttcgaagggcccagcaacagaaagtcaggtacagtttttttttctggtatagcctcgactagttcttaactacaggagctacagcagcctcttcttttgtacttgttctgctgtctcctctattcacctagttttctctgtattacctctcaggcgattaatctaaattccatggcaaccccttccttccctgtgctgttcactagatgcctatcctgatttgatgagatcttccatatactcacatccttgtttgttctctcctttcttagcttagcttgtgccatctttttataccccatcaattcttaccaacacaacttccaaggcgatttcaatatcaggatttggaatttctggcatatttgcttttgtttgtaaattagatgtacactgttgctgtcaactatactaaaaactttgtatgccattgtgagtttgtgacatctattaacattaaaatattctgcataaaaacatttgcccttttgtttatgatggcaccatcaaacatgggaagcacttctaattatccaggagttttgatacaacacagcacatattccacatgcaattcatgatcttatgttttatacgtgtacctgaaagaatataatcatcttattgtttagtccttgtttagcactttggaaattaataactactgtataaatctactttctttgaaggaactttgcttgctcttgtagttcttgcagttccctcaacggagactacaattcaaatttgacattactattaaaaacaatagttggattgtcagattggcatcatcatgtttgttgtattcttatacctgcttctaacatctcatttcattccaggtattttctctgaccttgtctgaagctcacaggtggcaatagatatacataactcacaacaggggtccaaatttgttaagacaggtttagatagttcaggtaacattgggagctcatcaattgcacctccgaagaaagttcaccctggatcaaatggaatgcttccgcaagaagaagcggatatgccatcacatctctctatatccactaagatgctaccaccacccctgaagagcatgctgccactgccacccagaagcatgcccccaccaccacctaagagcatgcctccaccgccaccaaaatttccttcagatgagtttttgtcaagaaacgagaacaagttttttcctttaaaggagccaacagcacctccaaggtcctttgatgcaatatcagtcttgccatctgaacgacgaccaagggagcctaaggaggaaaaaacaaaaggcacacctgtgtctgatactttgctgaaacttattgattatggagatgacgacgatgacggcgatattgatgtgacagacaacacacctaagggcaatccaactcctggttcagagcagaaaccattttgggctgtttaaaactgggtctgctaacgtagtctagtgtgaattcttgttgataaggatgcttgctgccttggtgcatcttctgaattgaagaggcaatcgagctccttgttcgtgtactgtagtaattctaacaggcaatgagatttctttgaacttgtattcattctggcctagtcaaaatgaaccgtttgttgttttggttcagatacgatgatgtttcgtttttagattcgacgttggttgctgaactcgtagcattttaatgtcggtattatataattgttagagcctatgtcaattttgtatccactgtcgtgcaaatttaatttttgtaatcagcctaaggtcacgacattgcttggaaacactttttttaatgaaggaaaatggcaggacatatggtatggtaatt

SEQ ID NO: 35910 - DNA, 205 bp, Zea Mays
gaaacaagatttattagaactcggcgacaaaagttttaatgcaaaattaaatcggaccacactcagaatccaagaaaaaccaggcgtagaattataaactgagttgtttcctagtttaacccgatatcgtttagcttgatccggaaacctcaggctaaaactcgaaccttgataatttaatctattccttaccagataaattttt

SEQ ID NO: 35911 - DNA, 1065 bp, Zea Mays
gtcgcggctctcgcgcggcggctcctcacccgccgtcggtcgctcctcacccgccccacgcctgaccagcgccattactcctcatcccgcaggcagtctcgggtccctgttcccgctgtcgctcgtggcccgctccaccagcacgcaggcatcaccctcggccacggcctccgaccaccagccacgcttcgccgctaaccccctcgcggcggcttccattcggtccctgccctccacgccattctcttcctgacctcgccttcaagttcatgtccccgtcgtcgcccatgggcctgctccatcggcccgcctcaccctcggccacggcctccaaccgtcggccctgtttcaccgccgactgcacgccctgccctgtgatttgtccaaggagatggatttactgagcagtggtacatcttttgaagaggctgtcaaaccacggaagtggcttaatccaacggattgggggaggagagcctggtgccgttcgagattggggcctcatgaggtaaattcagaagcaaggatggcgacgacgatgaccccgacgacatcgtccccatggacacccaagctgaagatcatgcttgctgtggagcctttgataccatcagagggaccaaagattggagagcacatttcggttacacggaatggaaaatgtgcatatatggtgctgattgcagtgagattagcctcgtccaagttaggggatctgccatgaactagacaagattagaagtttaaagaggccttacatcaagagagtacaagatcgccataaggaagtacaagtctttgaggaaagtgaccttatgagaagcttgagaaaaatcaacttgaaagtgaccttcatgatgatacaataaattgtctcaaacgcaacactattgaaatggagggatacattcgccctcttgacgtagtcataattgtgttgcagaccagcattctgatggtgttgcagatgatcatcccagcgattccttattctctccaacataccatcatcacaaggttcgttatttgaataaataacctaacgaaaggtataaagataataaa

SEQ ID NO: 35912 - DNA, 3324 bp, Zea Mays
aataatgcaagtggggtcacggcaaaggtgtggcgcgtgcgtggacctcgccctcatctcgtctcctccggcggtccggcctgtccaataattctagtattccaccgccgcacacctcctgtcttccttcaccttcgcgctccgccgccgccgtcgattcgtgctgctctcacccctaacctgtccaacatcgccggggagggaagcagcagaagaagctccccttacctccggctatcgcctgaggataaagtggggtctgtaggggagtcttaggggggagcaaaagggataggatagggagagatgaagcaatcaatttcttcgtccgccttcgcccctgcttacgtccccgctactaaccctagttatgaggttgaacgccttcagaagcttctctactagattagtgtaaatagtagacttgttcgagtttagcttggctggaagaattagtctctggtccgtgtttatatctgctagcaataatggctgcgatgaacggagaggtattgggtgaatgtggaaggaacataaatagtctcaagagaaagcgggagagccccgctgcatatgctgctggcgtattctgcacctctgaattgcatcagcatactgtcaatgattctgctgttaggtttcatcttgataaagaccgtaaggcaaagatcgtgtgccacttcaacaagcaggttttgcagagctataagaaattcatgagtagtgcaccacctaagcgtattttgcttcgccaaggtgctgtctggaaagactttccagaaaagattgtcaaattggcccaagctgacttcagggcaaaaaagatgatcacagaaacaggatatcagaaccagctatttttgctggattttgcccatatgacattcatagacacaaagacaggttttcagaggccaattgcttggatcgatgaaaatgaaaagtgctacttcccggaatcatttatacaagatcagaagttatttatgaagaaagattttggcaacggaaatcatgagtacattagtgaagagcgaaatgggacacgagaaacgaatcaccagtttggagcatcagaaagttctgctgaaagctcaaactttgagtcaagtattggagatgtttctagtcctaagagagctagggctgaaaagaatttcattgtaaaaaaatattgtgatatgggagaagctattggagaaaatgagtcatgcactttgttgcctacagcctgtaacctactaccacaccaagctaatctgggtgaggtatcccgtgctcagcgcactattgaagccgtggagaagctgttgctgcaggggatgggttcagttattgaatccaaggacattattggaatctacaggactccattattggatgaccacggacaagtccgttaccatattcaccaaaagcaagtacaggttaccggatgtcatcgtggaaacgcaaatgtccgttatgcatggcttccttgctccaaaagcactgtgcatgtaatgatgctgaatggtgttttgcaagttgataagcctcccaataagtgtgcagcctatggagagggcactctccttacaccagcaaatcgttcggatgcctgtgtgaaatactctgatgttgatgaaaatggcattgtccgtatgatgttgtgccgtgtaataatggggaacgtagaaatagttcaccctggatctaagcagtgccaacctagtaataagtattttgatagtggagtagacgaccttaaaaatccacggcattacgttgtgtgggatatgaatctgaatagtcatatctattctgagtttgtagtcactgtcaaattgccttctaaaaccaaagattcctttgtatcgcaagaaaactgtcagaattcgtctgatctatcactggtgttgaactctagttcacctgattgtatttcacaggtaagatgctttacatggggtattaacaagatagtactgtaacactagagacaactgttgctaacttgatatacagaagagttccactgttggagcagcaagagtgcagtaattcagattctgtgatttgactcaataattgacatgattgcattattgagattataacttggagctgattatattcgttatctatgatagaaacctccaaatatgataagtttccctgtgaaaccatgctattttagccacgctggagttggttaaagcaccagttaacaacttccttttatgcataaaacaggagatgaacctggaggcacctccagcattgggaggtggatgtgcagcccccatgctaggagattcgatggaaaaggctccaagctcaccttggatgcctttctccatgctgtttgcagcgatctctaccaaagtgtctcctgagaatatggacgtgattattggttgctatgaagagtttaaggtctggtacacttttttcatcttttgacctgaagtcaccttcccttgtgtggtatccaaaatcacttgtagactgtatttgccagagcaagaaaataagccgaggtgaactagtgaagaagctgaggcatgtagttggtgatagagtgctaatatcgacgataatgcgtctccaagataaggtgtgaattgttctgcttgaaccttgctgatacagttatcttggattctttttggaagactgaaatccttttagccgtaaggtgtgtcagctggtggggttctgggatggaccgccagtccgccacgcaccgaacttctgaaggcctatatcttttgctgtgaacaagctacttttcaagagcatcagaacagcagtggtttgataacctgattctttttacactgttttctgaggaaatgcttcttttgtgtgtgtctatttggcagcagttacctccagtggataagcgtgaggaaccagacacatcggcgtccaaggtggtggcggaaccatgagatgggtgtcaggaggtgggcgaggaatgcagaaagggaggaaccagccgacttgacatagaaaaccctgtgggaagcagcaactatgaagcctcttgcatcagtcttgtgcatggaggctgctgtttgttctctgtatcgtaggtgtctacgtttgcgaggaaattgtatccggtgtttctctttcttcaaattaaaccacgcacatgcagctgccgtactttttggaccattgaagtgtttcgtccgtgaaaaaggctccttttaccttcccgtttgccttcctaagagcatctccagtagttttgtaaaataaaactccctaaaagacgatgtagagagttgctaaataataatagagagtaaaaaattgcatgttcttcaatag

SEQ ID NO: 35913 - DNA, 2452 bp, Zea Mays
gccagatctcgcatatcttcgtgagtcgtgacctccgctcgcgaagtcgctggctcaggcgctgctaccgttcgagacaagtctcgccgcccacaccgccactaggaaaccttcttctctcctcgccgcccgcggccggccccttctccagaaccttctagaacccatcggggctccgggatggagcccagaagacgagagcgcagggtcatcgccatcgccggtgcggcagcgctcgttgccgtgggcctcaatatcgccttctccgccgtcgtcgcccaccgtcggaggaagcgacgagagcttccagggtttactgctcaagtcaacctatcagcagctgcgattaaaagaacgaccgaccgtatcatctctaagtcaagggaaacttatgattcagtggctgcagtgcccctagataaagtcagttttgctaatgtcattgcaccattggcagaattagatgcgctgcaattccctctggttcaagcttgtgttcttcctaggatggtatcaccatctgaggatgttcgcaaggcaagtgctgaagcagagaagctattggattcccactttgtgctttgcaggcagcgtgaagatgtttatcgtgtcataaaagcatttacagtgaaaggcgagagaataggtcctgaagcaacaagatttcttcagtttttggtgcagaattctttcgctacatataaatttgatcgtgaagatgaactagctggaatgccctttgagttccttaaggatctggaaaaggctgatgggaagtttaaggttccgttgactagttaccatgttactccagttcttgagcactgcaaggttggctctaccaggaagcagattgctgttgcttatggacaaaaaggtgggaaggataatgtagccatcctagaaaatttggtccagctaagacacaagtttgctaaattgctggggtacaccaactatgctgattttgctattgagcccagaatgccaaagacttcgaggaagatcttagagtttttggaagagatgtctgaacaattaagtgatgtggctaatagagagctcaacatactcaaagacctcaagatcaaggaggaaggaaatgctcagtttggaatggaagatttgttgtactacatcaaaagagctgaagaattcaaggttgatcttgacgttggtgaaattaaacaatacttccctgttggcctggtcatatctggaatgctgaagatatttcaggatctatttgcactacgattcgacgaaattaaggatgttgatgtttggcatgatacagttcgtgtgttttctgtttgggatgcaagttcaagtgatcttttgggttacttttttcttgatatcttttccagggaaggaaagtatgcccacacttgtgttgtgacccttcagaatggatgcttatgttctaatggtacacgtaaggttccggctgctgtgatattatctcagtgtccaaaagagtttgatggtaattcagcattgctgcggttccctgaagttgtgaggctattccatgaatttagccatgtggtccatcacgtatccaacagagccaccttttcaagattttcaggccttcgactggagggtgactttgctgaaattccaagcctgctactcgagaattggtgctatgagagtatttctctgaaaatgatgtccggcttccatcaggacattacgaaatccataagtagtgaagcttgccaatctctgaaaagaaggcgtgatttgtttgctggcctgaaaatgaaacaagagatacttttgtgccttgttgatcagataatacattcaagtgagaatgtggacattgatgacttaatcaaggatcttcaccccaaggtaatgttgggtatacctttattggaagggaccagtccagcttcaagttttcctcgtattgcctttggctatgatgctgtgtgctacagttacatatggagtgaggtgtttgctgctgatctttttgtatcaaaatttaaagatgacttgctcaatcagcatgctggattgcggttcagaaataaggtgttggctccaggaggctcaaaagatcccctggagataataacggactacctaggaagagaaccatcactccaaccttttattcagagcagaacaaggaacagtctgtgagggatcatttatgatgtaaccgttgagttttttctttcttttttcctttttgaatttagctatagaaggcctgctgactgtctcgagttatttttttcgtaacggactgacaagtctgatctttgtgccattctgttttccgacgtcatttgtttgaccatttagttaagctggaatacaaaagatgtcgctagattctgctgtgttttcctaaccttagcatgctttcaagctcccatcaaaacgtctgagcacgtgaatcaagattgcacagaaagttagaaataag

SEQ ID NO: 35914 - DNA, 1324 bp, Zea Mays
ccccgcatcgccgcatctttcccccttccctcccctccactcccgcaatctcgtctccgccgtccgtcgccgcgccgtagcaaggttaatacatgatttgcctactgtcagccttctatggtagggcctaaaagctgggaacaaaaaacaaaagtatgaaaagatcaacgaaaggaaaattgctacttcaactgaggctctctgccatggatatcctaccgaatttgcttcttacttccattattgtcgctcactgcgtttcgaagatgcaccggactatcagtacctgaagagactgttcagagacctttttattcgggaagtcgaggattccagtgttgacgtatcagcagcgacagaaaatttccagagcttaagcctacataatgatgagttagctgcaaaaaagactgctgaagataaccctgtagtgttaattcctggtcatttgcaagttaccaatacagaatgtgttagtttgagctttggcagttttggatctggtgcattttctaggctactcccacaaaagaccactgatagcaatgtggaattccttgtttgagaggattctgcaacagtagatccaatagatgccaggaatcaagattactatgaaagtggtgcaataacttcaccagcagaagaaaatcttgaggccatgctaggaactaacatggagaagtcgatgcaccttctgtttcacaggctaatgagctcagtcaggacgtacttgatccttttgtacttaaatatgacgtgccatcagtttcaagtcatgcttattcaaacatgaacactccacaacctagcacaatagaggacccacaaggaaacaaccaagcacatactctttcccatttgtctaacatgatgcctacaacaacccaagttgccgacctgctttgctgtctgttagaggacatattcttcctcccccacaaccaggtatggcatattggccgccaccaccatggggatatcctacacatccaatgaggccttggggacgccccccatggccaacacaaccacttccatcaccagcggattatggctctcatcaagtgactcctccccctcacgatgactttgcggacagatgtctcaattctagtggtgcagctacgaacaacaatctgatgtcctgatcgagagcgatggagctaatgttcaaacttgtgtgtttgaacttgtgaactaaaaatgtgaactgtggatgtgaacttatgtgaatttgtgaacttatgtatttggacttgtgtgaaattgtgatatgaacatatatccatgtgtttgaaatctgtattgtatgtgatattct

SEQ ID NO: 35915 - DNA, 1614 bp, Zea Mays
gttaaatactgcttaatagataatatctattacaaaaaataggggaaggcctaagggccggttctaaggaacggatgcccgttccatagggtggtccggagcctgtgtggccggttagcctggttccgcacccaaaaccctgcacactccaccactcccaaacgggtgtcctagtatttaaaactataagtcatgtgcgtccaacgaactggaggtccggctttgaagaacaggcacttgtctcctggggggtctggaggccatgtagccgctcagcctggtcccgtgccgtgagcctgcatactccaccgccccacggcaggtgtcttagtacttgaagccaccatccagggggttcggatgcacaacttggcttcccaggctaaaatcctgcatacatacgttattacatttcacttttaagcagatgttattacattcccttacaaatgggacccagctccatctctgcaggaatggactacgctgcaccaacaagagtcgcgctagaagctgctccgggctgcctcaccagcggcggcgaccacctctgcattagcagcgacaacgacctccgccctgggcagctagacagcagcagcgatcgcctcatggcaagcgctgctacgaatagggcctcgcccccatcctcctacggagggggagcagtgaggccattaaagccaaagagtcagggactcagcggcaggtggccttgatggtcccggcagcggaggcaaccacctctgcaaggggcagcctcaccagcggcagccaccacctcagcaccgacgaccacggccacctccgcacaagaggtcctcgctcccgtcctcccacggagcgaggacaagaccatccaagaacgtcgccgccactcccgcagcgtacgacatcttggacggtccccccgtacggccgacggcgcgggagaagccgtggatgtggcggacccacgtacggcgtgaccgtcgcccgtgtggtggacggatagccatgccctggccaaacggcagaaggcaacgtcggaggcgacggcagggccacccaggccaagtgccaggcacgcggcagctgtcagcgcctgcacctggccggccccgcgtagccgaagttcgcctccttcgcgtggctggtgaacccctctcctccctcgaatgctggagaaagaagtgggccactggcccacgtgggaggcagaaccctggctcgacgcgcctcccgccccagcgaggatgatgaacatccttgaagctgagggcaggagggaagccgcagcccgacttgcttctccccaccacaaagctggtggtcatcctcatgggtggccgccggcgggggactacagccgggctgcatgatgaaaaaccttgaagtcgaatagtggcgaaaggatgccaacccccatggggttgcactcctccaatggcggcaggaagaagacaagatcgacgacaccaccaccggcacaccacatctggaggcccgaaagacggaagggcgcggtggtcgcaagagaaacgaggcatgcctactgcccgggggatcggcccctttttaaaggcagatcccccccactcgcgcccctgaagcgtcacgagtgaagtctccccc

SEQ ID NO: 35916 - DNA, 2354 bp, Zea Mays
tctatattcatagcaagtattcgtgccgtgagatcatttgttttgctttatgctggttcatttgtctacggacaatggactagttgctgcactgtttctgtgattcaccatgggaagcagtggagcagatacaccgtctaaggagcagcagccacctgctacctcaggtgctgcaataccacctgtttatccagattggtctagcttccaggcatatcccccaatcccaccacatggattcttcccctcacctgtggcatcaagtccacagggtcatcctttcatgtggggagctcaagctatgattccaccttatggaacaccgccaccatatgtcatgtacccccctggagtatatgcccacccatctatgcccccgggtgcacatccatttactccttatgccattacttctccaaatggcaatgctgatgctactctggtaatactgatggcaagccctctgaaggcaaagataaaagtccaacaaagcgatccaaaggaagtttgggcagcttgaacatgcttactggaaagaatcccagtgaacatggtaagtcctcaggtgcatcgggtaatggagtcacttctcaaaggtatttttgctgtaaccttaaacaccttatattcttgtgtgcatccgtctttaagtatatcagtgaatgagttgctgtttctctttgtagtggcgaaagtggcagtgacagttcaagcgaagggagtgaaggaaattctcacaatgattcacatcacaaggaaagtggacaggaacacgatggggatgttcgaagttcccggaatggtgtatcacgtttgcaatctgagggaaaattgaaccaagctatggcaatcttgcccataccatcaagtggcccagcaactgatccaactacaaacctaaatattgggatggactattgggccaacacagcaagctctgctcctgcaattcatggcaaagcgacgtcaacaacagttccaggggctgtggtcccagcagagcagtggacacaggatgaacatgaactcaaaaagcaaagaagaaagcagtccaatagggagtctgcacgtagatctaggttacgtaaacaggtaattgtttgttcaacttgactgtactgggtactactatgttaactagttgatgatgaacaatgagttttgcaggctgaatgtgaggaattggctcaacgtgctgatgttttaaagcaggaaaatgcttcacttagagatgaagtaaaccgtatcagaaaagagtacgaggaacttctatcaaggaataactcactaaaggaaaaacttgaaggcaaacaacacaaaactgatgaggcaggacttaacaacaagctgcaacattctggtgatgacagccagaaaaaaggaaactaatgctatcatgcaatgcttgcctacattggtcctaactagattattgggaggtgcaattgtagtatgcacattaactccttactttattgcagttaattgttaccaggttgtgataatgttgatgccaaccttttgtgtgggtgtttcctgtttcagatctatcttggcttatcttttagaagccaagatgtgactgaagctataggctgtgacccaattcactatatctgttagaaatagtggataaagtcaaactttcaaatttgaagtgctgactaatattgttatgtatacctggcaaaagactggtttccttttaattcagtctggttgaacattttgctgggctttcactactgcctagtttatgtacattgttgttcatatcggttgttcctagttattttttgtaataattaacaaatagatgagggacactgtctcaacctctgcaccaatatatatatggacacacacacacacacacacctcttttttgcgtctattttctgttttacttcaaagtttgcaggtttgtttcagccctgtttgattgtgagccttggcgctggcggtattttttttaagtttaaatgatccacctgctgtaggtaagtttggttaaaagacattcctatttttctgtttagtgacactgatattagtaatccttttttttcatccatctatttaagtgtcagcagaatcgtttgttaaacttgctttcctgaacttgctcttgattctggtaagtttttgggctcctggcactttacttttatgatcttattttgatttgctttttacaggaaaatggttctggactatgtcttagatgggaagcatagttcattagtatgtctgccttacaggttcttaagcagggatcgtggaagaacctgtgttgggaggtggtagagaagatgtgccaatgattggtttttggtcaatgtcttctctggtgc

SEQ ID NO: 35917 - DNA, 1355 bp, Zea Mays
cccacatgctgtcagacaggagggagtgcagaggactccggttattctcaatgatgatgcacacgtgaaagggcctaagcgtattggggcactctatgttacctgccagctattcaaaatttacttcaggtaaacctttgccgtagtgtcataagaagtatcgaaactgcaaggaattttgattttgaagactttccagtgaaagacaaggtcacttatatgtactacactgggcggttggaggtgtttaacgagaactttcttgttgcagatcagaagctaacttatgctttgatgcattgcaatcctcaaagcgagtcaaatttgaggagaattttgaagttccttatccctgtaaagctttcaataggtgtactgccaaaaaggactcttttggagcggtatagtttgcttgagtatgcagatgttgtcactgcacttaagagaggagatctcaggcttctcaggcaagctctagacaggcacgaagaccaatttttgaaatctggcgtctaccttgtactggagaaacttgaacttcaagtctatcagagattagttaagaaaatccacatcattcagagacagaaggaaccagctaaggcacatcagattaagctagatgttgtcgtaaaagctctgaaatggcttgaaatcgacatggatgtggatgaggtggagtgcatcatggcatgccttatatacaagaaccttataaaagggtactttgctcacaagagtaaggtccttgtcctcagcaaacaagaccccttccccaagttgaacgggaagcctgtttaaatacaattgtcacggagaaatcctgtaatacaatggtattttttttgtttagtatgcagagatgctttccatattaagtgaaactccaagcctgacaaggacatttagggcctgatcggttataccggaataagccaggattcattctagctcatcaaaatctatataaggccttgttcgtttgtgccggattggtgggtcggaacgattcctaaccggattgtttctctaaattatataaactttgattagctgaaacgatttcgggtgcaatccgacacaaacgaacaaggcctaaattagagaagtaatccagctaggaattaatccgggactccaatcccaaacaaccgaacaaggccttatatttaatcacctctggatgtaatgtaacctgtatcattattgcctcattgaccttcattttccatacgcgaatgcgctatgtttatttttctatcatgtttagaagagagttcttgtccggtacccaggtcagcaaaatcacttaaggccttgttcggttattcccaatacacatggattggatgtga

SEQ ID NO: 35918 - DNA, 1566 bp, Zea Mays
aaagtgcgcctctttgaccaccaaagttctagcagaaattactcaactgcccagcgcatctcacgacccggcctcgcagctccggcgacgatccctccaatggcctacgccgccgccgttactctccggcgcgtggtgcttgtgtccgctgcgctgcggctcgcactagtggtgttcggggagtggcaggatgcccaccttgaggtgcgctataccgatgtcgactacctcgtcttctccgacgccgctgcctctctggccacaggcggttccccgttcgcccgcgcaacctaccgctactctccaatcctggccttcctgcttgtcccgaactcactcctccatgctgcctggggcaagctcctcttctctgccgcagatttgctcgtagggttgttcataaacaccattctggaactaagaggaattcctgagaaaatgcggatgtggtctgtggtagcttggctgttcaatcccttcacattcaccattggtagagtgttgcaggcagctttctggtatgggtttattgtgcacttcagaatatacccaatcatatatgcaattccttttgtaatagttcttggcaagggctatgctggtcctgttggtaggcctactcttacgatgtggaggtccaaacaacagttgcaagatgataaagtcagtcaaatagaagaaccaacatcatttctggccactgtatggggttttctttcaaacttcataagcagaaatgggatcctgtttggattactctctggatccatgttctttgcctggaccggtgttttcttctatctgtatgggtgggacttcctaaatgaagcattactttatcaccttactcgtaccgacccaaggcacaatttctcgatatatttctaccacatatatctacaccatcagcaagggttctcaagtattcagaggctcgcttcgtttcttcctcaactgatcgtgcaactggcactcattctacgcttctctagggatcttccattctgcatgtttctccagacggttgcatttgttgcttttaacaaggtgatgacagcacagtacttcgtgtggttcttctgcttgttgcccctcattctcccttggagcagcatgaaacttaagtggaagggtctggcctgcgcggtagtgtggatggggtcccaactgcattggctcatgtgggcttacctgctggaattcgagggccgaaacgtttttgtgcagctctgggttgcaggcctcatgtttctggctgcgaacacctttgttatgctcatggtgatgaagcaccacaagtacactctgctcttctcaacgccgctgaagtctggcaacaaggttgctaccaagaaggaagaatagcagcgtttgggctctttccattttgccgactgatgtatgattaggacatggatcatgtttgtttctctttttttttgtgtttctgtcagatcacatgtgacttgaatcattgtagtttttcccgtacataatgtggtgacattgcatgagaatattttttggttaccagaatttgcaattggttcagattttattacctga

SEQ ID NO: 35919 - DNA, 302 bp, Zea Mays
cctggattagtaattcacgtacacaacagttatataaccagacatcatcacacagtgctcgaataataacataaaaaagggtaatagtcaattacatcatgatgtccgagacatccacatagtcaataacaattatcaaagtgcgaaaacaaaacatagataaacacggccttcacaggcagccgattgggggtttgccgctaacccatgcctagaactcatcgtactcttggaactcctggaagtcctcctccatgactccatcttctcctgagtagtggttgcaatgtggacaacctggg

SEQ ID NO: 35920 - DNA, 1589 bp, Zea Mays
aacctcaggtcaccagcaccttctccccacacccccgagttcgagtgcaaccgaagagccaagaggagctgtccgcgtcgtttcgactcccgccgccgaaaggccgagcccgtgcccgtgctcgcaaccctaatcccctttccccgttgcctctcgccgggaagaagagggagccgcgtggcgtcgccagccagcacgcgccccctcccttcccggctccctccgcgccgtgggcgaggcgcatccaacccgatccgccctcaccgcgaggcggaggacctggaggggagggagacaggtctggtgcaccctctctcgtccgcgccggcgagcgccaagtgtcccccacagagaaagcaaggattgaggctcaggtgaaggctgctgaagcagctgcacaacaaaagtttgaggaagaaatgagggtgaagcgagagcaggaaagggaagcagcacggctggcagtacgcatgatgaagaagactgttgatattgacaacagtgacttcctaaaggagctggagaacttcagcaaaacgtggcagtcgaatccacctggcaaattaatcgtggattttattgatggggacttgccaccggggttagggagccctctggagaggcttggcctgttcatgaagaacgatctcgaggatgaggtggaacaggaagtcgaggacagcgcatcaccctcgatggacgttgacatgaggaaagatttagcagggcatgaaatgcaagacagcatatcacccgtgaaggtcattggcacgaaggatgacttccagggagcggacattaacacgaggaaagatttccaggaagacgcagcagggcatgaaatgcaagactgcatatcagccgtgaaggttattggcacgaaggatgacttccagggagctgtagggcatgaaatggcgaacagcctatcaccatccactttcgttgacacaaagaaatattccgaagggacagaacatgagatggtggatagcatatcgcctttgatggatcctaacaccgaggaaggggagatcagctgctgacgttagctacacttgtcatccacatcatttgttgagttcgtgaggcagacatccttgctgggttgttggattaggcgacatcataagcagagtgacgaagaaacgctattcccctctggttgtgtcgtagaacaatgtggagaacatgtgtcagccgaactgagtagtggttttggctttgttgcggttttttttcctgtcgtggtcttgtcagtcgggcactccgctgtatgctgggttacctgagctcgtcagctggatgacctgtataaaaacatgatgaaattagggaggggttaatttagtgctagtatatattgtaggtgtaggactgtaggagcttatggtggagccggctgcagcacacaagctatagcattgttctcagatttggtcagcgcgccgtagtaccttgttactgtattcattctaaaacttgaataaaatgatgccagtcgcacaagttactgtaggagtagctatgacatgttatttgaaatactgtgttcggtttattcgatgaaagtgacgcttcctgagttc

SEQ ID NO: 35921 - DNA, 2655 bp, Zea Mays
agaattccatcaattgctctatacacgacgtcgtcgacgtgtaatgtaaagctacagcggttcaacttcgacggcggccccagcctcgctacactgtcgctatccattttccccgtcacgagctgccatgagcaattaagtcttcttcacttcctggttcccagtattggtcgaggcgatctgacggagggagcagccaagtcagcaagtaccgcagcaccaagcagtcgaacagcgccgaagatgccagggctcgccgcgtcggcgtccgcagctccggcgccgttctcgttggcgacctcgcgcttaaccccggttgcaagacctgctccaagtttcagaacgcaagcttgtggattgaggtgctggattgctgcaaagctgaaactccgcaaggcattgaaaaggcatcacggatggcaacttcaaagaaatctagatgctcgagggaatgataacgttccagattgcttggaggctgcatctctgactgaaaagagaagtcattggaacatgcatcttgcttatggttgtcactctattgggaaatccgttgtcttgagtccgttactttgcatgtgcagatgtgcttatcacagttgtcattattgtcttaatgccttatgatttcgtcagtgctgctgacactggattgcttcatacttttgatagttacattcaatttgcattagcattataagcaaaaaaatgctcaagagaaactttcttcgtcatattatcttacaactactttttactgcaaacttcttggcaatttttgtctttatgctttcatgttgccctgactgtttcccctttatgcagattctggaggtgaaatggccaacacaagctctgatactttggatagttcaactgttcaggaaaaaccagtggttccgggacacatcatctctgaaatcagttctcatgttcaaaaggaagagtctgctgtgtccaaaagacgctctaacaatgaaccatctctttgcattgctgtaattggagctactggtgagctggcaagaactaaagtttttccagcattatttgctctgtattacagtggttttcttcctcggaatgttggtatatttgggtattctaggaagaaattgacagatgagggcttaagatctataattgaagccaatttgacctgccgggtggatcaccatgaaaattgtgatgacaagctaattgagttcctcaaaaagacgtattatgtagatgccggacatgacaaccaagaagggatggttagattaaattctaggatgtcacaaatagagggcattggtgctgcaaacagaatattctaccttgctgttccacaagaggcactccttgatgtagcattgccactggctgacggtgcccaaactaagcaaggctggaatagaataattatcgagaaaccatttggctttactggtttgtcctcactgcgggtaacacaatctatgctgtcaaggtttgaggagaagcaaatttacaggattgaccaccttctggggaaggatctgatcgaaaatcttactgtcttgagattttctaacttggtgtttgaacctttgtggagtcgaacttacatacggaatgtgcaggtcattttttctgaagaaacatcaaatgaaatacaagggaggtactttggaaattatgggataatccgtgacatagttcacagccacattcttcaaacaatagctctatttgctatggaaccacctgtaagtcttgatggagaggatatccgagatgaaaaggtgaaggttctcagatcaattcggaaagtgaaccttgatgatgttgttcttggtcaacttaaagatatgtctggtaaagttgacagatacacaaaatccatgataccaacctattttgctgctgctatgtacattgacaatgcacgctgggatggggtaccattttttatcaggacaggcatgggacttatgacgaatagatctcgacacaaacgagctggttctacgcgatcaacctgaagaagcaatcctgttgaaagtcaacaacaaggtcccagggcttgggctccagctggatgcttcagaactgaacctgctttaccgggataggtacaacaccgaggtaccagattcgtatgaacatcttctactggacgtgctagatggagatagtcatttattcatgcgcagcgacgaactggctgccgcatggaatgtgctcactccgataatccatgagatagatcagaacagagtagttcctgagctctacgaggctggggacagagggcctatcaatgcttaccatctcgctgctaaacatggggtgcgatgggatgacgactggtgagtcgatacatggcaaagattctcgatgcgcaacgagattcattaccaatttttgtcgttgtatcgcagtcagatgtacaatatgccttctgtaatcggcctgatcaaggactttcaaggagacatgcctttcaaggagatatgcaaacatggtttctttcctgtcctgtagactgtagcactgttgattcaagttggaaaaagaaaaaaaggagaaaagaaaatatgcttgcgacaagccgaggccccatgtcttgtgcgtttagcatctcgtttgccacaagtatggcagtgtttggaaaatggcaatgaaaag

SEQ ID NO: 35922 - DNA, 2165 bp, Zea Mays
gaacaggaggccttgaaacacagaagacgtcctctgcacttgtgagaatggatgtcatcttcaatttaatagaaaagtcaaaggtctcaaggcagctcatgcccaggcagtccatcatattcttgtttcagctgggatgagcacacatatcatacaattgttacaaggcctgtgttctgatggtttatggaggtatggtgtcttctggtcattcaaaagtgagacgaatgggtggatcttgacttggggtgatggatatgtcaataaaatgatagaagactggcaaatgggagatctatctgctagccccactgttcgtaagaatcagacaataccttcttcgtggtgcaagaaaagctatccattttgccccattgaggcagcactgatgagaatgcctagccatttgtaccctcttggagaagggattattggtaaagtagcacttacaggacaacattgctggatttctgccaatgagctttgttcaacagctatgcataagtaccaagaagactggcagctgcagtttgcagcgggaatcaagacggttctgcttgtaccagtggttcctcacggggttcttcagctgggctctttagatacggttttcgaaagtgcagtgttggtggcactcataaaggacatgtttcataagatttgtgatgcttcggtttctcatgcttctttatccactgggtctgcctactcaaataatttgagtctaccaactgcaaccctatcaatcaatcatccagatgttaacttgatatatagttctgctcagatcgtgaatgctgatcaccacagtttaacacatcccttcagtacatcggaaattccaatactagaagacatcactataggttcttacagaactattccaacaggttggcctaatggactgttgggcgataatggcaccattgggcatgaatattttgaaggcttttctctgacagatatggcacattggaaccaagagaatactcatggcagcactattgttgtaaatgatggtgcaatgctttcgaatacttcaattcattcagagtttcacggagatgtcatggtaatgtccagggaagaacatgagctcttcacgtggcgttgtaggctgaaacaagaacctacaagccctgctctccctcaactgaatgacaacagtgctgatctttatgtgcagcttgaaaccaacaattatgcggaattgttactagacacaataatctaccagactggtcatacatcaaacattgaatctgctccctcagctgagtctccaatttcatgcaaaacacaagttaaaaaagatcattcattgagggtcgatgaatcgccaatttctgatatcccaggtcgtcaagacctttcacctatatccataaatgaagggtttataagttgtgcaatgactgatggacgtgtggaaatcaacaagaccatacctgaagaatgcttagttgaaaatacgcacaggataaattcagctgaaatcaaaagaagatgcagaaaagttgagctccagagaccaagaccaagggacaggcaattaattcaagataggatgaaggggttgagggagcttattccaaatgcatcaaagtgcagcattgatgctctactggacaaaaccatagcatacatgctgttcctgcaaagtgtatccgagaaagctgagaagattcagaatacattggaagacaaggaatcccacgatgagacaaagaagcaacttgaaaggtgcccactaagagtggaagagcttaaccagcctggccatcttctcatcgagatgttgtgcgaggactatgaagtctttcttgagatggcacacgtgctgaagggtcttaaggtgagcatactgaaaggagtgctggagtatcgttccgacaagttttgtgctcgctttgtcatcgagggttcggatggtttcaaccagatgcagattctgtgcccgctgatgcatctcctgcgcaggagatgaagtttgtgtgtcgttgaaatgttaccgagactcttcttactctctgtttgctttggcataaatgtacagcaaaataatggatggatgcattttttttagatcccagcgagactggaatgttgctatatatatatccatattcaatcgtgaacagcaaacaattcaatcgtgattcagc

SEQ ID NO: 35923 - DNA, 2878 bp, Zea Mays
ctggcttaattcatactccctgtaccgagtactgtgagcgacagcatcagcccagccatcaggtgtgccagtgcagtggtctgggccggaggagagcagcagcccactggattgcaggaagccgaatgcattgggccgggcctccatcacaacgtctcatctctaagcgcgcttgtctgtgctccaaatacacacacaaaaaagggaagtatcagtttctctgttcaaaaaagaagaaaaagaaaataaaaggaagaaaactcgagttgccgccgtcaaccaaacaagtcggagaagcagccctcgcaaaaccctcccctcgatggccggtgtgccaccgccgccgcggcagctcgatgtgcggcgcttcgcggccgcccgcgccagcgaactccgctccctctacgcagccgtatcgtcccgactcgacgacgccggcggccggcatcagccccgttcggcgcgccgccgcaccacagggcacctacccagcaagcgccgccgccggggagccggagaggtgggccccggggatgacgatggcctcccggcgcggaaacagtccaggagggtgaggcggcggcgggagctcgctgccaaccccgcggaggggttctcggtcgccggcgacggtgcgcggcggctgcgcacgcacctgtggtatgcgaaaaggttctccatggagaggcggtggacattcatcttgcccgtcggcgcccaggggaggggtaagggctcaaggagtgttctcaagcgtctgaaaaatgggacaactatccatgatgctggctacttcattccaatagagctggatggtccagaggacgccctgttatccgttctcagaatggttctgcgcccatcgcctgcagaaaaaacacccgatttgaagcatctacaggatcaagttatgcgaggtgtttgctatgagaatgctatgctttgggatgttaggagtatgcattctcaaattgttggaccagtaacatatatgtggcgtccattctcaagagcagatgacaaatctgggattgaaggagatcagtgtacttctcactgcattcacgatgaaagcggcaattcctcacgacgccagttgtggatatggattcatcctgctgcacttgatgatggaattagtgcaatacaatttgcatgtgagagacagattcaagattctggtggtgtggtcaaatgttgttcattagagggaaaaattggaagattggaagtcaatggatgcaaggctatgcaatctcttaagaagattttgcatccaaccagttcaagtaagatcaacacgatatcaacaagtgatatctccgcatcaactgatactctcctggattcctggaactgtgggactccaggcaaaccataaatcctcctgtgtcagatgaggttctctgtaaggagaagcactctgaacgtataaagtttttctgcttggattcaggaaatgatcaagagcaaacaacacaagagaaggacaacttcattcgatcctgcccggttattcttttgaaacatgccagagaaggaataccttctctagggtggtccatcattctacctttgagttgggtgaaacctttctggctctttctagtatctcatggtgcccatgcaattggcttaagagagagacggtggattgcagcaaagttgagaatgccatgctttccttatgattatccagatagcaaagcgtatgcatcatacatgtccaaagaagctgctggttttgataaagtagttgagcgccgccctgttgccaagagaccaccaagagttcctgtgcctcctttatggcactgtatcatgacttgttttcgtaaagattatgatggcatattgggtgttcttgaagtagacgacttggtgcgggctaacatggtattacctaaaaactcttctgcacattgcgaatctggagacgcagaaccatcgcaagcaaatgttgcatccttgcaacttcatgtgccaagaaccacccaaatgttgagacagtatgtggaagaatttgataggaagtatctgagctcatcatctgacatgaaagtggattctgatgaacccaacctagcttctgataacactgtcggcatgacacggttcgcgagtgaattatgccttacaagggttctgatccgagctttcaaggaaggttcttttgaagagggtgcagttgtttgtgccccattacctgcagaactttcagcttggaaaatcagatcaaaggaagaagaggaagaatgcgtagaaaaatgggagctccagcttcctcagtcccatgttagttcctatttctcgtggtttgatcccagcacgagcagcctccagttgcctacggatggcgtcgcacgggaggcgttcaggtggccgataggctttgtcaccagtggtttcatccatggaagtaacgggcaagacgcagtggcggtcgcattctgcgaggcaaagcttctggcagcgttgaggcgacagcaatggacgcatggaaacttgcagagccgggaggtgtgcgtccttgtcaggaacgcgagatcggctgcctaccgacgagcgctggccaccaccgtcctggagcatcaggaatcagacctagcgtttctgtagtctagtcgggaacctgttgacgttgattttttctctctctctcccttttggagttccatccatcctccactcatccgttgatgaacctaagtaatttactggtgattacagtttatttgtgcgatgcaaaatcattaaacagaagaagtaaatgcatctatctcatttgacggatttcaatgatttactgttacatagtatgaataataataaagcagctcgtccggaaaaatgaatgagtagctgttgtttgaaggcc

SEQ ID NO: 35924 - DNA, 3235 bp, Zea Mays
cacgcgccgccactaggtgtcacccgtccttgcgccgccgccgcatccttcgactttcgatctgcgagctagcgattctccgctgaggagtggggcccatccctccggagcccaaccccagggcatccgcccgcccccgccgccgtggctcaggccccacgcgtcatccccgcgacggacaacgtagtcacgcaggtggagcgcggtccactcccccccccccccccccccccgcgcttcgcctccgctgagaccgcgccctgctggtgcgagtacccgggagcttccaaaccctagggccgggcatcgagcgagcgagggggtgagcgcggagcccaggcatgccttgccgcccgcggggatccaggcagtgatgcgcggatcggcgcggcgggggcggcccggaagctcggccgcatgaggtgcctcgtcggcggcggcgtccaggacagcccgcgcgcagcggccaaaagagtatcgccggcgtcgtggcggctggacgccgccacagcggaggcggacgcggggagagctgaggccaagggggtcaggttctgcgtcaggccgccggacgtcatggagacggtgcacgaggtggccatttacatccaccgcttccacaacctcgatctgtttcagcaaggatggtatcagatgaagattagtgcaatgtgggaggaaggtggcaacaaaacaccggcttcacctgccagggtcgtgcaatatgaagcttctgatgttggtgcggatgatgcattaggcatttggaaaatagatgacgtcgacaatagcttccacacacagccgtttcggatcaagtatgccagacaagatatctatctgtcagttatggtgtcgttcaacatattcaacattgaagaggagcctcggcggtgatgttgaagtttgagctgatgtatgccccaacactagagaacgggtctgagcttcaagcttctagtgtcacatcttcagcagctgtgcatgaatttaggatcccccacagagcactcctgggtctacactcctactgtccagttcattttgatgcgttccactctgtgcttgttgatctgacattacacatagtgtacctgaaagctggtgcaactaaaccatcattgaaggtaccggaccaaggtttaggtcctacatcatatcatattgtcaaggcattattaacttctagaaagttgttgctggaagaactgaagaaaatcagtggtgctattggtaagacagtagaggaattagatgttgctgacttgaatcttggtagatatgagtcatttaatccatcaaaatctggattaccaaattctagtaaagtgttccctgcaactggcaagggtgtgggacagttgactggagttttacatgatttcttggagaaaaacaacgatatggttaatggtacagatgattctatgctggtaaataaaacaaagatattggagtacttgcacgatgcttgggctattgacaggaaggcagaatggtcaatatggactgttcactcaaaaattgagatccctcatcgctatttgcggagtatgaatgatgaatcatctcaccgtcattcacttcttagagtttctggatcaaggaagttccatgacgatcctgcacagaactctgcttcacgggctgaactacaccggaaaagcatagcacaaatgaagaacaacatgtcatggttgttccacagcatagttccagcaaggatttggcttcgaatgcttctgaacaaaaggatactattgtgctacctaaactacaaggagagcctctggtacccaaaagtagtgttgggccaccatttggatttacgtcttgttagaaaccaatggcttctattggaccctggagctgattgcctaatgtctgaggctaatgaagataaaacatctggagacttcaaagaaatgggtagcaggttggccggggaggtaattgccttcctgaagaagaaaatggataagctttctagatatggaggctgcaaagagctgaagttaagttttgtcggccattccatcgggaacatcatcattagaagtgccctggcagaacctgcattgcagccatacttgaagaacctctacacttacatgtcaatatcagggcctcacttgggttactgtgatgatcaagacccccacaatacatacttctataagctttgcaagttgaaaacattggagaacttcaaaaatatcatattgttatcatcaccacaggttattcccttttctcatctcaaatagtaatttacttgtgtacacggaatttgttttgctgcactaaatgatttggccccaatccctatatagtccttattgcatgtcatgacttgcgagcaatgcacatgtttttctttctttcaaggatggctatgtaccatatcactcagcgagaatggagctctgcccagccgcatcatcggacacctcaaagaagggtcaagtcttcacagaaatgctcaacaattgcttggatcagatccgtgcgccctcatctgacacccggacgttcatgcgctgcgatgtgaattttgaccagtccaaccacggacggagcctgaacaccatgattggcagggcagcccacatcgagttccttgagaccgacatctacgccaagttcatcatgtggtccttccctgacctgttccgatgacagacaacgccgctcgtctctgtaatgtctctgtaatactgctgcataccaaacctacaaaccgatagcgcacactactgagtactgaccaggcaaggaaaagtaagcttgcataaaggctcccccagaatccaacaccgccacaggcagagtagcgctgtaaagatcctagaagcaacggtttttccagcttgctagatctgattctgtataaatagttgattctttcgtcattccattcatagtgctgtagatgtgcacctttgctgtgaatttataatcctttgtcggcttgtgtatctaacgcttcggtttaggatgtgctgacaatcagtgagcttatgtccaaataagccccctttcttaatgtttggttttagtcaccttggtctttgtgctgctgtaaatccagggtgttgtttctgtttggtgaaatgactgctacatgaatatctggttctggcatcttgccatagccggatcttgcttctgctaaggttattcctatcagggatatataggattggaaaaaaatatgaaagattttgatttattt

SEQ ID NO: 35925 - DNA, 2331 bp, Zea Mays
tatattatcgcgaagtgatacgtttgaagtatcaaatatacgattgtctctcacgttcccacattagggaaaaaaggaagaaaaaaaaataactccaccattcccttccctctcgcgagctcagatcacgcgaagcaaggaaaaaagaaaaatggcgcagctggtggagacgtacgcgtgctcgccggccacggaacgcggccgtggaatcctcctggccggggaccccaagacagacacgatcgcctactgcaccggccgcagcgttatcatccgccgcctcgatgcgcctctcgacgcttgggcctaccccgaccacgcctaccccacgaccgtcgcccgcttctcccccaacggcgagtgggtcgcctccgccgacgcctccggctgcgtccgcgtctggggccgctacggtgaccgcgctctcaaggccgagtttcggcccctctcgggacgcgtcgacgacctccgctggtcccccgacggcctacgcatcgtcgtctctggggacggcaagggcaagtccttcgtccgcgcatttgtgtgggactctggcagcactgttggtgaatttgatgggcactcaaagagggttctgagctgtgacttcaaaccaacacgtccatttcgcattgtgacatgtggtgaagattttctggctaacttctatgaaggaccaccattcaaatttaagcattccataagggatcactcaaattttgttaactgtatccggtatgctcctgatggtagtaagtttatcactgtgagttctgataagaagggtttgatatatgatggcaaaactggagaaaaaataggagaactttccactgaaggcaatcatacagggagcatatatgctgttagctggagtcctgacagtaaacaggttctaacagtttctgctgataaatctgcaaaagtatgggatatcatggaagatgcaagtgggaaattgaatcgaactttgtcttgccctggtataggaggtgtggatgatatgcttgttggttgtctctggcagaatgaccacctcgtgacagtctctcttggtgggacatttaatgtgttctctgcaagcaacccagaccaagaaccagttacatttgcaggacatttgaagactgttagttctttggtcttctttcctcaaagtagcccaagaactatactatctactagctatgatggtgtcatcatgaggtggatacagggtgttggatttggtggcagattggtgcgcagaaacaacactcaaataaaatgttttgctgcagtagaagaagagcttgttacctcaggttatgataataaggtcttcagaattcctcttaatggaaaccagtgtggagatgctgagtcagttgatataggcggtcagccaaatgctttgaaccttgcaattcagaaacctgaatttgcactgatcactactgattccgggattgtgttgctgcacaattcaaaagtcatttctacaacaaaagttaactatgccatcacgtcatcttcagtgtctcctgatggcacttatgctgtcgtgggtgctcaagatgggaaactgcgaatctattccatcagtggagatacactcacagaagaagctctgcttgagaagcaccggggtgctatcacttccttacattattcgccagatgtttctatgtttgcttctgctgataccaacagggaagctgttgtgtgggatcgagcaagtagagaggtcaagctgaagaacatgttgtaccacacagccaggataaactccctggcttggtcacctgacagtcgattggttgccactggctcactggacacctgtgcaattgtctacgagatagacaagccggtagccagtcgcgtcaccatcaagggagcccatcttggtggggttcatgggttaaccttcctcgacaatgatattctggtgactgccggtgaagatgcttgcattcgtgtttggaaggtggtgcagcaataggccgctcttcattctggtgtgcaatgagaatgtctgtgctgttgattggaataaactttttttttgttggtttggtggctgttactcacggggtcatagcatggaagactcctttgtaagtggatccggtatccctgcatctgattttgttaggagttgtgagaatatagggatactgttgttgctttttctaccccaggtccctaaaatagtcgttaataactgacttcgctgtggttaagtttttacgaacgttgactgtgctttcatatacttcatctgcatcgtaactgtatcatgcacataaatacttggaaacttttgctgcaagacatcgtttaaacgtg

SEQ ID NO: 35926 - DNA, 1984 bp, Zea Mays
cgggcggtgtcggtggccggtgggagtcgtgaccggagttaccaccgcccggccgctgtttggtttgttggttggacttggatattacggccgggcccgtgttacgtcggtcggggggcccgtcgcttttcttgtgcgacgacattgacatggacatggacatggcgcagctggagtggctgtcggggctcttcgacgacgcatccatcccgcacgagccggcgttccccggcgcggcgcccatcatcaagagctccgcgctggcggccggcgcgctgctgccgccggacaagatggaggacgcgctgctgttccgcagctccagccccatctcggtgctggagcacggcagcttcaacaacgccaacggcggtggcggcggctgctccgcgtcgtcggagtcgtcctcggcgtcctcgtcctcggagtctttctccggcagcgggagcgggagcggcgaaggccacgcgtggtcggcgcccgtgtcgccgccgcccgtgctcgtcataccggcgcgcgcgcggagcaagcgctcccgcccgtccgcgttcacgcgcgccggggcggaggcgcccaccatcctcgtgccgacgcccatgtactcgtccgggccgtcccactcggaccccgagagcatcgctgagtccagcccgcacccggcgccgcccatgaagaaaaagaagaaggccaagaagccgccggcgccgcccgcgcccgcctcttccgacgacaacgacggcgacgccgactacgaggaaggcggcgagcgcgcggagccgcagggcggcgccgtcaggaggtgcacgcactgccagatcgagaagacgccgcagtggcgcgcggggccgctggggcccaagacgctgtgcaacgcctgtggcgtgcgctacaagtccggccgcctgttcccggagtaccgtcccgcggcgagccccaccttcgtgccgtccatccactccaactcgcacaagaaggtggtggagatgcgccagaaggctgtccggagcggtgacccgtcgtgcgacctcctgcagttcatccgccgccgggattgacgtcccggcacggcgtcgccggactgtcggtcggtctcgtcccccttatagctagctatatagtatatgtatacatgctagtatgtatgcatgcatggttgcttcagcagtcgtcggtcgtcgtcgtcgtcgtccatcatggtcatcatcaccacttcaccggtcaccgccatggcatggatcccacccctcatcacatgcattggtttctgtcaacatccatccaatcccaatccatcgccgggcatcccggcgcgtttagttcattaggtcttctttctcatcgggggctagtgttattttacctttcttcttttctgtctattggttaattggttccccctgaatgtttttttgtttgtatagagagagaaagagagaggagggtgagaggagaggcaggagaaatagatgaatcagagtggttgctgcattgcagttgcagttgcttgcaggttaggtactaggtgagaaggagagctaaaccagcagcagagggagacagatctagagaggaaactttgcagctagtcagtcagtcagtcaatcaattagaagaaagcatggagagtgcttttaagcaaatgaaaggggaatttgttggtttgctaattagaagggaggttatgcagggcaggtcagtagtagctatcatcgtccatgatgattttaaaacttaagaagagggggacagccatcatccatcatagtctgtactctgtatccggagcttggtgtactgaactctgaaacttctttttgcagttcatctatgtttagggatttgataagtgttgtttggtttcttctatactagtagtgctacctcttagcgaataattaattatatatgcttttgctctcgttcttttctcctgccttgttgcctccatggctccccatccatacagaagctgtgagctgagggc

SEQ ID NO: 35927 - DNA, 1668 bp, Zea Mays
caattagactgtggtcaatcttccccgctagtccttgttcaccttctccggcggcagcctccaaaccaccctcgcgctctaccactccggtcgtgtagctccccagcaggcaaccaccatcgcgcacccaccggccaccgcgtctacatttgccaatctctgcttgaagcgttctgcccactctttcaaccgagaagttcactattatcctgcgcatgttccctttccccctttcgtcgtggcacgcacgttaggagttcgaccgattgccggaacgtcttccgccgtcttctgcgccatcgaaagagcgatgaggtttgtggtgacgaaagtttgcagcggcggagggaaggcgcgggcgggtgcgctccatatagccggcgccggcattggcattgagacgccggcgctgctgctgtccactcgtaaggggctgccggcattcttgtcctgtgacctccttgcctccttgccactcccggactccctccttctccatgtctgtcctacccattttatagaaggccctccagtgaagacaatatcagctattaggggtttgcacggtatgctgggtttacctgatcacattcttgtagcggcggcaagcgattctattgagagtctgccatcatgtgaagccaccaacaaatttggtgcctcctttgaaactccttcgggtcgtagactggtaaaaccatcagactatatggagttgatttcctgtatgaagcctaatatatgggccagtttggcggatgaggtaccagcttgggtgactgagaaacgaaacaaagtctctgttgacaggacattgcggtggcttgatgcatgtattgctttggatgtggcttctgggactaatagttttggtgtaattgtgggaggatctagcttagaacagcgaaagctatgtgccactgaagtgtcgaagcggaatgtttcaggcttttggattgcaggatttggctttggagagagtattgaagaacgttgcactttgctcaatgccacaacagattgcttgccacgggaaaaacctcggctcgtatctaggcttggtcttccagatacatttaccaacttactatgggtggtttcgcactgatcttccctgttgacatggttgaaagagaaatgcagaatggtgtactcaacactactgatggcgattcaacaaagattaacctgcgtgctacaacatatcggaaggatacgtcacggctagttgatagctgtaattgcttcacatgccaaaatcacacccgtgcgtacctcaatcatttgctcaatgtccatgagatgttggctcaaattcttctggagatacacaatacccatcattatcttcgtttcttccattccatacgggaggcgatcaaggttggagagtttgatcttttccgacaggagttcgttaagaagagacgcacccatttcgctgctgttgtggtctagacgtgaccaagagttcatctggctgtcctcacaagattaacttatcaattaatcagacttgtgtacacctgaatccttactagtcaactttcacgtctatgattgacaagtctgaaaagattcatacattaagtgatagaagttgtgtgctaaacaactgatgcattttcttcattggaaaattaattaccattccttgttacctgattt

SEQ ID NO: 35928 - DNA, 1449 bp, Zea Mays
ctcttccaacgccactcagttctcttccctctctgcgcaccaagaagaggtgtcttgccagaagggagccgcctcgccgcagccgaaggccacccatgcagccgagcggccgcgaaatgcagggcggaggcggggcccaggacgacttcttcgaccagatgctgtccacgctgccggccgcgtggtccgaccttggctccggcaagtcgccctgggagctccccgcggcggcgggggccgtgaccgaggacaccgccgcgctcgacgagcctgcgctcctcgcgtcgcgcctccgccaccaccagatcggcggcggggagaagcccctcatgctccacctcagcgacctgcacggcctcggcgccggcgccggcgacgacgcggggttcatgccgctaccgctgttcacccagcacctcgccagggacgacgtggatgccgccttcaagtcccccaatgccgccggaggcgaccgggagctgtacaacgggttcggagccgctgggaatatgcacaccgccgccgtgcatcagccgccgccgttcgggcagggcgggtcaatgccggcggcgccgcagagcttcgggggtggcgggccggcgccggccgccggagcggcgtcgggcggaggagcgccgccgcggcagcagcggcagcgagccaagagggggcaagccactgaccctcacagcatcgccgaacgtctacggagggagaggatagcggagaggatgaaggcgttgcaggagctggtccctaacgccaacaagaccgacaaggcatcgatgcttgacgagatcattgactacgtgaagttcctccagctccaagtcaaggttctcagcatgagccggctaggcggagcgacagccgtcggcactctagttgccggcatcgcatcagagggcaacgggagcggagatggcacgagcgacagcggaaaagggaacgccgccaacggcgagaacggcggtggtggcagcctgcaggtgacggagcagcaggtggccaggttgatggaggaggacatgggcaccgccatgcagtacctgcagggcaaggggctctgcctgatgcccatctctctcgcctccgccatctcctccgccacgtggccgtccctcctatcccgcccctccatgggcgcaatgggagacgctagaggtcccctgcacgacggcggcagccctgcgtcgccgccactggtgaattgtggtgatgattccagcaccgtcaaggatgccggtgccggcggtaagcggtgaaggcaatgatcttgtcttgagaggttgcgtgtgaaagatcaacatgtccaagtgaaaaatgaaatgaattgggctaaaagttctggcaacaattaaatcttatcaaattgtatatttcactctttattattcaataggctacttcacttcttatgtctaataatattttctatcttatgtacaa

SEQ ID NO: 35929 - DNA, 2520 bp, Zea Mays
attgaaaagttatatttcctatttattgataaaaccaatttgttgtcaaaatgaagtttcttttggtttgggaattctttgtcaaagagaattacccacttgttctgcaattaccaagcaggttctctcttttttaactctaaaccttgaaaatcttctgtggtatcataccctactttattttagggtgtcatcctaagttgatagtaagcttctgatggatttgagtgatataccagcaacagttcatgaggatgtgcctgaaactatttgaaatttccttgctcctaagtcctattgcacactcgttgctgtttcattgtgtttgtttgttgaatatggttgataaaaaaacttatgatacaggttgtggaggtttctacctccaagactggtaagcatggccacgccaaatgccactttgtcgccatagacatattcaatgggaaaaagcttgaagatattgttccttcatcacacaactgtgacattccgcatgtgaaccgtactgagtatcagctgattgatatttctgaggatggattgtgagccttcttacttcagatggcaacactaaggatgatcttagactcccaactgatgagactcttgtggcccagattaaggaagggttcgaaagcgggaaggatcttgttgtgactgtccagtctgcgatgggggaggagcagatctgcgcgctgaaggatgttggccccaagtaacttccttggctttggagacggaaccctactctatctcaacttaaatcggaaaagaagtgtatcaccaaaggattgctaccgagacattcacctggcttgagctggcttttgctatagcgtgcaaggggttgctgggtgtcgtacctacctgacttatcattatctgtggttacattctggaccctgtattttctatgctttcatgtctctctactttctagtattaattatcaataagttggtttggaatggttgaattgcatccaatgcatgaagtttctttggttacctttctctttgctcgattgttctgcttccagtgttggtgtatactgtagtttctgagtattctctttgcgcctggggatccagaactggttttcggctttctactttcgattgtgcttcttacagtattacgggactctttggcttgggctttccgtgcaagcagctttttttcgagacagacttctaggctgttttgcaaaataaaacatgtctggttaagccactctttttaggttttaccgatgtaatagaaaaggtttttttaccaaaaggcctatgtcaaaatgtggttggacgtttggtacgactttaaaccactcttaatttttaactctctatttacatttttataaagattatattctatatgtagcatctacagtccaacatttattttgctgttgagtagataaattttgacttgatgagccatttaactagtcatttggagatgttgatgctgtgtattttaacgtaaagttgtagcttaagccggtgtgtggaagccctgctaaacgggcttatatatatctctttttttttctacaatcataaccacataccgaccataggctcgatgtgctccgctccgatcttcctaaaccatcagcctaacgtcttgataaggtttttcgttttgctctaaatccgtgtggattggatgtacttgagtgtctttaaatcctaaataagtctaaatctttcacatttttttctaatcgtattcaatccatatgtgattataactgaataagctttaataatttttttggttaacgttatttcttgtcttcgatggtatctcgataggccactaggatgtggcaacttaaaagtatgccctgcatgcggtcttctgtttgatccttttcccctctgagcttgttgcctccagaatttgctgctgcgtgcttagtgtcagggatggagccagaaagaagcttagtttaggagatactgaactaaactaatgtaaaaagtctttctacattatattatatatattgtgtatatttgagattacgaagggttcggaggctctataaaatcggaagccgtagcggggacgtcccttagggcttgtttaggataaaaggtaatgaagagaattaaaggagttagaatttctcgctatttaagattgagtagtgaaagattctagcctcttaatctactttattacctttgatcccaaacaagcccttagtgttctctgctcgtttcatcagctgtgttgcagctgttccgctgctagcaatcagctagcgtgcattagttgctaagctgcagcgcagcagctgttcttgcagccgaacggctatgcttatgcttatgcatcttttggtgttctaaaattcgatatctggcttctgaaaactaaccagcactctgccactctctcgcattttgtttatcgtgatttttttttggcaatgtttgaatgttatccagaaaatttcaaactgactggtcgttgctctgtctggaagcactccctttgcctgac

SEQ ID NO: 35930 - DNA, 460 bp, Zea Mays
ccgttcgggtcctaagattcctcagggctataaagaaaagcatcaagcagcctcttccatcctgccatcgcgattcacgcggccggctcaacaaaccccgtaaagcgctcgtcaccaacgccgtagataccgcctcggaactcgccagggccgttcctacttcgacgagattcgttccatgccgaggggtatttagacggggccacccaggagagaaagagagggatagagagatctgctcgccgccatatttgtgcagctcgtgctctggatttgttccgccacaccatactgagaagaggatttgagagagagaggggtggagcgtgccagcgtggtcgcgattgctcctcatcgccaagcgtggtccggtggggacctggcaaggggcgccacgacgaaaggactgggcttcctcgtcgtgtgcagaagacgaactgggcggccacggagcgtatca

SEQ ID NO: 35931 - DNA, 264 bp, Zea Mays
ccgagtagtatatagtttataggatgcataatagtagcagcatgcagaagtgcttgcggtgaatatattgtgcttttgattttgtttcaacgtgacctacgatatgattccaattatcattgaacttctctatgcactccaacaacagcaaagtttccagatctgtccatctgcctctaacagtgcctgatccatctttcatcccatccaccctctaaaattctaagcttgaatgtgcttagtaacaatttttgcattgtggaa

SEQ ID NO: 35932 - DNA, 4788 bp, Zea Mays
caacaagtatatttggccaactgttcacggttcttcaccagttgcgttcgtcgttcccgttctcctcctcgtatcccctggtccgtacgtcgtggccaccggcgccgcctagctcgcaccgccgacagcgtctcagactagatcgcgcctccccctcccaaatcgggttccagtcgggctcccgcaaccgccgccgtctacaccaggtgccgaggccgatcttttcgtcggcaaagatcgccgagcagatctgcccctggccgtcgccctacaccaggtgccgatatcttcgccagcgaagagcgcccagcaggtacagtgatttgggattctatactacctagctttatgattgcaagacctggttattttcacctgaggttgtgttcaacatgttagtggcatgaaaattgcctcaattgggggcaatggcatctagtacaaaatcagatttagtgtctggtagccctgatgggcatggatacttcaatgcacaacgtgggtcctatgcagctgcttcattggaaaggtcaggaagcttccgtgaaggcggtgatggctatgcgatgttttcagcatcaaactcatcaaggtcagcggcagtgaactctatcaatctagttcagtcacttgcactggacttgagaccggcaactgtggatcacaaaacatctcggttagatctaaagaaatcaataagttccatttttggaacctctgcagaagattcaacatcacttccatctctagggagaaatttaccaaatgctatcgaagagatcagacgtatgaggagtaatcttaacgacaattcaaataaggccagggaaagatctagagcttttggtggtgctatggcgaagattgataaactttgtcccaatattgtgcgaaaacgttctcgaggagacagttcatctaatgaacgatctagtgtgttatcatctggaggagttacccctaaaaatgttcctcagagccatttaaatgcagatgatatggaagctgggcttcagagagaagagaggacaaagaatgcaggacaaaataggagaatacgtacatccatggtggagatggatgcaagaacagctggtccatcaagaggccccggacctactgataggatctcagatcctggtaaagccaccaatggcagttctgcagttccagaagaaaaaatcagaggtttggcaactactatcgatggttgggaaaagccaaaaatgaagaaaaagcgttctaccattaaggcagacatgtcactggctggtgttttgaggactgttgatgtagaccgagagtcaaaacaaggcatgcagcacaagtttactaatgacggtagggcgagaatgacaagttctagtttcaggtctggaactgttgcatctggcacaaccaaagcagatttgctttctacacaaaatggtcttgttatgcgacccttaaataggagtgatcaagacaatggtttccatcctactaacaaaagggaacgtcaagctgcattagataaagaaacgcccaacccgagaaccattaacaagcctaatgaagacgacagtggatgtaacattgcatcattaccgaaggcgaatggatctgcgcggggaccccgatcaaattcagggtcaatattgaagtcatatccaaacattcatcgatcacaagctagttctgatgattgggaacatccgtctggtacaaataagttaatttctgctggtggatctggcattcataaacgtacaaaatcaacacattcattatctcctccgatccaatggggtgggcagaggcctcagaagatatcccgttcagcaaggaagtcaaatttagtccctataatcactactgatagtgcactggtaccaggttcgctggacagtcctgtcaatgaagattgtgcaggtttaccgaggcgtgcatctgtaaatagccttcaacaaacaaaacgaggagatcatgggctctcaactggacctgaaggcaatgagcctgtagttgctgagaaaaagctaagggacaagggcaaaagggctggtgaactggatgatgggcatggctctggttttcagaagattgctatgcttgggcatccttccaaaaggaataagttgcctgctgatgaggatattggagatgctttaaggagacaagcaagagttgtcccgggttttactctgaccaggcctgggactcctgtatccattgacaagcttgaaaatgctccgattacaaaacaaagaagtgtgaggacagtctcagagagaactgagagtaaatctgggagaccactgatgaagaaaatatctgagcgcaaaagtaatgcacggcctaggcatacaagtagcagtgtgcagtcagactctcctgtgcaatctgaagatgatcatgaggaacttcttgcttcagcaaatgctgccctaagatctgcttgtgcaagcacgttctggcggcaggttgaacctttcttcgcatttttgactgcagaagacatcacatatcttagtcaacagatacatttaccagatgattcctcttcaagtaggtcaatggaagggggtgaatgccaaaaatataagggtggtcttgaatacatttcacacccctcaactccagccgctagcaacaaagatgatcacgctgctcttccaaatggttttggcttgaatcagttggataatgacataggggttggctgggaggcaagctgcattgaacctatcctcgatcaacttgtccatgggattggggtaccaggatggtcttcagttggccaaagacttattcaagcattgattgatgaagataggatcgatagtattaccaacaacacttacataagcgagggctatgcatttgatacacatgaaattcattttgatggaggaggatggaagcctcactcaaataattataagttagaacctttagcgaattttgaagcttcaaggaggggcccaaatggtctgacaatggattctgactggaaatataatgatgtgtcaaatagaagtggcaatgtcatggataaaaccaaggtgtggcctgagtttcagtacagtgagatgtgcttcaatgataggattatcattgagctgagtgaagttggtgtatctattgaacctgtgagtgaggacgaggatattaatgctgaaatctgtaaattagaaggccaacttcgtaaagaggttgtggagaagaaaaacttgctattgaaactggatggcattgttgcaactgcaaaagagtctcagcatagggaattctcacgccttgccatggatagacttctcctgagagcatatgagaaatatatggccttctgtggtccaaatgtttcaagcagcaaaaatgtcaatagaactggcaaacatgctgctctaagttttgtcaaacgagtactagtgcgatgccaaaactacgaagaggcggggacaagttgctttgatgagcctattttcaaggacatgtttttatcagcgacgtctcacagacgcagtctagatactgcttcacaagataacaatacaacagcgagaccagtccacagggccggtgcaccagacgcttcgcgaggaagcagtcacccgacggacctgtcgtttgcaaaggaggatccctggacaaacaacgtaaagcagcgggaactgttgctggacgaggttgtaggtagcataacaggaggagctctgagaacctcctcctccgtccttggtatctccctcgtcagcaatacgaaagggaagagaagcgagagggaagggaaggggcacaaccgagacagcctcaggtccggccgtccgtcgccgtccaacgcaaagggtgaaaggaagaacaaaacaaagctcagacagaaggcagccaacatctctgctccttcaggaggtctacagcttccagcgaaaacaacgcctcccagcagtgggaacggcaaggaggagagcgcagcagcagcagcagctgctgctgccaggcatggtggtgatccggcggcgaatgcttcgaatgacgccgaaatgcccgacctggctaacctcgagctgccaggactggacgccgactttggcggctggttgaatctggacgacgacgacgccctccaggacctcgacctgatgggcctcgagatccccatggacgacatcaacgagataaacctcatgatatagccgtacattttccttcgtttctcacagtaacaaccaacagagaaaaagctcccgatagtgcgtgcacaggtaaccaccaaccctgcagttttaacaccaggcctggttattaagcttcacttagggctagtttggaaactcaaatcccttccggtattggaggtgattgaggggagaatgcaataatttcttcctcaatctcctctaattctggaggggatttgagtttccaaactagctctgataaaagagagagagagggacagacagttgatagagacctcttgacaatcccaacaaccacgtgttgtcttttttgtaccagcgtgtaatttgcctccctgccttgtaccctcccctatacgttcatctgtcgtgtagacgtcggtgtacatatctattttggcgccctagttacaaggtagggaggctagttactgcatctgttactcgctccaaaggttgtgtgtgtacagactgaggacatttctcatctcatggcagcgccgactttccccccttattgcgagcataagatcacattcttttatctcagattagattgaggctagagactattccagccaatcaatgttaacgtaaataaatgtat

SEQ ID NO: 35933 - DNA, 1004 bp, Zea Mays
gatcatatcgccaaccgccctcgtctcctcactccaatccaaaccctagtcgtcgccaatatgcagctccatcccggtgctcgcctagatgggtcgccccgcaaggagagaacgtgactagatctagcaggagacagagcttcctgttccatctccaccgcaatcgaccgtgccaattaacaggctcccaaggaggagatccaatcctgctagcgggcatccccattgcatccatcgatctgaatctgcagatgagcagtctcattggggtcttctcttttttagaaatgactcatgggtttctcaccatcccttccacttggggatttcaatcgaatggtgaaatggagttaccaatcaaccactggctgaatcagctcccggcctgcccgggcttatctccaccggtacaggctagtgaccaccgccgctgggagcacatcgctaggaacgtgcgtacctccctccagtcctttcctcacgctctttgttctttggtcggttccatcaagcgtggcagtaatgttttgttattgcaaattatagatgtaaattcagatcaagtatatgcatttgtagtttatatcacaaagggaagctaaacatttcgagctgcaagatcccactgtatgcattactatacatatagaacaaaaattgtagttaccacaacatatttgttttagtatccagagtcctttgtccagtaagctttatgtctcacaaattagacaaattagggttatctacgtgtacactttgtgttttgtttttattcagtcatgaatgttctacaacaagcaaaatttatgacctgatcaactatgtaaggagtccatcagtgataatataagaagggaggacctacaattctgatgaaaaaggtttgatcatgagttttatttcattacatatataaattgggtgtcaaagttaattcagtaaccaggacataatgaaatatttacacttacctattctacttttaatagtatatcaagcca

SEQ ID NO: 35934 - DNA, 1950 bp, Zea Mays
ttcgaggcattggcaaccccctgacgccgctggagtggagtcctccatctcctcctcctcgcttcgcccaaacacaaccggctgctttgctttctcaacccaccagtcctcaatcacctcacaacacagcccctgtcagatcgtcccactgatcgggccgtgcaaaaccccccaaccttttcgacaggaccctgctggcgctacagtcttctcccggaggcagaaactctttgcttccgcctggctcgcgatgcttgtttgggtgcgcgggcctgcggcgaggtgaggcgacggcggcgccgggcggttgcatggtggccgatggagagtagacggggagggtcgggggcggcggcggaagatgcgggcggggcgatgccgagctttgggccaacgcagcacgccattcgcgcaggcgcagatgtgaacagcatgcaaccttctcgagttactgactttggggcacttgcacagtctgctggattccgaatagaagatcttgctaaccttaatgcaaatgccttgttcaatctgaagccaaattctcatacgattgacaacagtcctcttcagtttggaaattacggaaagtctatttctcctcatataaatactacagaagcaacaacagctgcaacaagaattgaccctcagctgtcagcacagcaaacaggagcacaaccaattctggtggcgttaccaactggtaacatggagaattggggagagtcagctatggctggtagccctatgactgacacatctacagatccagacactgatgagaggaaccagatgtttgaacaaggacttgttgctgtccccacagcatctgattctagcgacaaatcaagggacaaactagatcagaagacacttcggcgtcttgcccaaaatcgtgaagctgccaggaaaagccgattacgaaaaaaggcatacatccaaaaccttgagagtagcagactgaaacttactcagttagagcaagagcttcagcgggctcgtcaacagggtatttttatttcgacatcaggagatcaacctcaatcaacaagtggaaatggagctttggcatttgacatggagtatgcacgctggttggaggagcacaataaacatgtaaatgagttgagggctgcagtcaatgcacatgctggtgataatgatcttcgttgtattgttgatagcattatggtacattacgacgaaattttcaagctcaagggtgtggcagctaaagcagatgtttttcatgtgctgtctgggatgtggaagacccctgctgagagatgtttcatgtggttaggtggcttccgatcatctgagcttcttaagttactggcaggtcacctagagcctcttactgatcagcagcttgttggtatatccaacctgcagcagtcctcccaacaagctgaagatgctctttctcaagggatggaagcattgcaacagtcgcttgcagaaactctagcatctggatccttgggccctgctggaccttctggcaatgttgcaaattacatgggacaaatggcgatggctatgggaaaacttggcactcttgagaactttctacgacaggctgataatctacggctgcaaacacttcaacaaatgcaacgcatcttaactacccgacaatcagcacgagccctactcgcaataaagttacgttcttccaaaggaatcacagtactgcgtaggtcatccttcatgaacaatcaggaatcatgctcctcgagcatgtattggggataactcatgatgaatatgaaggatttaacaatacattgcaattgataaatgtgatagtatgatttattggaatagcaatttgctagttgcacaaagtggccagtaaattttctgactcacaaatgtgtttgatgtacataggcaaaatttgaagtggccagtaaattttctgactcacaaatgcatttgcct

SEQ ID NO: 35935 - DNA, 484 bp, Zea Mays
cttgtatacaattttgggtattacagtacgacaacagggggtgttggactctagcaggggaagcattgggccagggagaaatggggcgagctcctggcagggggtgagctcggccatggcaagagcagggaagggggcgcgcatccaggtgtaggagagttggggaggggcgctcggtagagagaggagcagccatggatggagctcggatggggggaggaagaagacctgctcatcggcctggggaagaagggcgtcgccgagcaggaccagggggatgacgaccgactgtggggaagaaggaccctgctgcatgggtaccgagtgccatgactggccgaggggaggaagtggaggagctaagctccctggtggctgctcgccgtggacagcagagggagggaggaagggctccctgggagaagaaggcaaggaggatgcgtgcgttggctgaaaggagaagagggagaaatgttgtggcggc

SEQ ID NO: 35936 - DNA, 1961 bp, Zea Mays
agccgtcgcctctccttgctctgctcctctctctcccaagcggctctccctctatctcctcgtttctctcccctcctcttctacagccgctgccaggcaaccgaccgccgagcagcgcagccacccgagccccacgcccgccgcgccaggaaccagcgcccctgctctcgccaggacgccaggaattgctctttctatagcaagtttatgagttcagtttatattccattgaatatttgttgcagtgaagagaaatgagagaaagccttcggttgtagccttcagtttatattccattgaatatttgttgcatccgactcatctctgtttcgattccatccggtttggctcattttttaatcgagtgtgttgtagttttgtaccctaatgtcgtgggagtgctaccgaagtactgatagcatcactttaatttcattagctccgtcctggcaatcactttgggaaggtggtcagtggaataactttgcttaaaaagcttgaagcagttggtagtgaaactggaaatccttcttatcaagtgaaaattgtagactgtggtgaagtttccaacacaaattctcaggatccgctaaagggagataaagtaagctcaaagacagataacagcagttcagacagtgaaaagggtggccatcgtaccaagcgttccttgacgaaaggcttcaatgcagcagttgctgggtgcttctttgccattgaaactgtattaagacctcttaaagcagaaaattcacctccatttacgactgcaatgataatattggcatctgttatatcatctactgtttcaaatgttttacttggagccagaccagcttttatagtgccagcctatgagctaaaatctgctgccggttggaatggctgctacactagcttcagtctgttcagtcccattgacttcagtactgcttctctttgagctgacaaaggattacaggattttgcttcctctcatgtgaacaagggagaatattgtgaactgaaggtcatgtatcagcgaaaagcaggctttcctcttgtagcaattgtgcactgaaaaactacagtgcccttatgacaccacaatagtaagcaagactacaggacatctatgcgaaatgcagctagccagctacactgatgtagagatcattcaggtcgctcgaatgcaactgtccggcctagcatccaatcgacctcaaccactctgcatcccacgtgtgtgtggagctgatgaacatgtcgatgtgttctaagcatgagcaagctgggttatgatggtgttgtggcactgctggttgctgatatatcactttcaatcggtcttgaccagattgaagctctgtatcagtatgcccaatttcagtttgagtgtggtaactactcaggggctgctgattacctttaccagtatggtgctttgtgcacaaacagtgagcgaaatgtgagtgccctctggggaaagctagcagcagaaatcctaatgcagaactgggacctagctttggaggaactcaaccgcttgaaggaaataattgattcaaaggtacttgaatgctatacagacaaatgcacaccatcttattaggtatctagctactgcagttgttgtcaacaaaaaggagaaggaatatgcttaaagagttgattaaggtcattcaacaggagcaccatagctacaaggatcccgtaactgaatttttggaatgcttatatgttaactatgtagttgtgggcttttgaacaatagctggagtgatatgaaacattagtgatgtagttgtgggcttttgaactgcttcaagcaggagtgatgccgttgtggtgcttttgtgactgatcatctctggagcttttgtgaatgatctagctagctatctataaatgatctagttgtgaatgatattataattgtgatgcttttgtgaatatataattgtggtgcttttgtgtttatg

SEQ ID NO: 35937 - DNA, 2972 bp, Zea Mays
ccaagcacgctttcttcttcctctactcgcgccgccgcgtctcaagtctcaacgctgcgccaaaacggcaaaaccctaccctgacctgaaccccaaacccgccgcgcctcctcctttctcgtactgcaattcgggactagccgccgccagtctcgatggggaagaggagcggcagcagtaggaaggacaagaacaaggtcattctcccaccggagctgccgccggaaatacacgacgatgaggtggatgtcagcgaggaagacatcgagttctatgccaccgacagcagtaacgttacacccttccgccacttcgacaagaagtccatcgacaggtatgtcgggagggttgccgggcgcgacgagggcgaggtcgagcgcctctacgaagagcgccagaagcggaaggccacagaatcgtcggggagaccccgcgaggatgatgattatttggaggtcgaccccgtcgacgcactccccaccaagacgctgcaaggggagctcgtctacaatagagctaagaaagcaaggtctgaagacaattccggcagtgttaagactaaagctcaagagaatggtgcaaatgccaagacaaatactaaaaaagatgaatcaaagggaaaatctaaaaacaaaaagggagatgataataaagtgaaaaatattcaatcccaaactgaagttccaaagggacaactacactcaaatgtgctggaggaagtgaaggaggaactttcagctgaggaattattcgaaaaaaagaaggctcaacttgctgaactggggatgtctatgcttgaagatcctgagtcgaacattagatctctgaatgatatgctaagtataagcaatgacagagaccaaaaggttgttaaacttggtgtgatgtctttgcttgctgtgtttaaggacgttattccaagttatcggattaggcagctgacagaaaaggagctagcagtagaagtttcgaaagaagtgaagaagacaagatattatgagtacacacttattcgctgctacaaggcctacctgcagaaattgatatcgttggagaagcagccctacttttatactgtggctgttcgttgcatgtgtgctttattagacactgccccacattttaacttccgtgaaagcctattggctagtgtggtaaaaaatttaagctcctcagatgatgtagtaaggaaaacatcgtggtgaggcaacaatagaagcagttaggttgattgcagatcatgtgaagctcaatgattgccaacttcatcctgatagcattgaggtcttcctgtctttgagatttgatgaagatattggaaaagatgagattcaggaggaaaaggtgaaaccaaagaggaataaacgttggcaaaaaaatcaggaggttccgaagcaattgccagttaatgataagaagaaaaccagacaggaactgatctcaaaagctagaaaggaggttgatgcagaccttagagcagtttccttcactcttgacccgaaggagagaaaagggatacaaaaagaaacactttctgctctgtttgagacttacttccgcattctgaagcatagtatggccgcttcaaattcaaggactaaggtgaataatgtttcccctggtggctcacacccacttctcactccatgcctggagggtttagggaaattttcacatttaattgatttggatttcatgggtgaacttatatcttgcctcaagaagctttctgggtatagtgaccgacaagacgaaattcccaatgataatgcactgtctgtctcagaacgtctgcagtgctgcatagttgtgtttaaagtctggaggagcaaccttgaggcactgaatgtggatctgcaggatttctttgtgcagctctataacctcatactggagtatcggcctgacagggatcatggcgaggtattggctgatgcgctgaagacacttctttgggaaggcagacagcatgatatgctaagagccgctgctttcatcaaacgattagccacatttgctctctcatttggctctgcagaagcaatagcagcattggtcacactgaagcatctcctccaaaaaaacagcaagtgccgcaatatgttggaaaatgattctggtggcggttctctgtcttgcttagttgcgaaatacaaccccgaagctacggatccatatctgagtggtgcactcgcttcagtcctctgggagctcagcctcctagagaagcattatgacatctcagtttcctcgatggcttcgaatatcttgagtatggcaaacctgaatcccacccagaacccagttcctatcttgaacgtgaaccctcttgaagcgtacagagacctgtcattggaaagggaactatcaaaaccggctagcaaagcattgccactgaacctcaaaaggaagcggcgtgccaaggagtttgttgcgctaagcccagatgtgcttcagaaggcagattgctcggtggacaaagacgagctcgaagagaagctgcagagccatttctccgtgctaagaggcatctctgagaatgagaggttgagggcagagctgaaccacacactgtcatccataaacatgtacaaggagtacaagaagcagaaaaggaaaaacatgaaagttaagaccggaaggaaaaaaaacagcaaggctttagccgtttaaggctttagccgtcttatctgttccggaggtctttgcgctcgaccggtggatgggtgtaattttcagttttttttgggcatatttcccattgactactatagtgcagttttctgccacccttttgccgtttctgcacaccacactatgaaagacttgtttgcatttgtgattttgggaaatggtttagggaagttgtagtttttccccatttttctcagtttctctatacgattttgaggggaaagcggatagattcttccctaacgcattatacattgatattcacttttatcattctc

SEQ ID NO: 35938 - DNA, 386 bp, Zea Mays
cttatctagaaaatttctctctttcttatctagcttctttctgaagaacccatttgaaagaccagatatagagtgcaatgtatagaaggtgtgaatcaactaaggttgattctgtaattacgcatgcatcatgctacaaattatgctaacaagattttccccttaagaaatgccaccgcgcacaagaaagaccgcgcgcaaatcaaccaggccaatcggtgtgccccgtcatcaacttgccccacggcatgaagatagcagcagtgggagcaacgatccgattggagatttggaagcccaagtggatcagcttcgaacagaactccgacgcaggaacaatctatgggttgcggatggcgaaaggataaatgaattaaggacagaaa

SEQ ID NO: 35939 - DNA, 5849 bp, Zea Mays
ctccgcggaggatctgcggatgaccattcacgggtgcggattctcgattctgtcgagatgataaagccccgttgtttatatcctcttttgccttttttgtgcggtcgtgcctggcgtgtcttagtggactagtggagtgggcatgtggcgccgcttccgccgccgccgctgcagcactactcgttcgtcagaatagtatagggtgcagttgcgtggagatccacccgctcgtggattggcttctcctgcgggttgcaactggagaacatcagaactgattgaagaacagggttggtaagtggagggagcgagatggggttcgacccactggagtggtactgccagccggtcaaggatggtgtgtggtcgcatgtggttgagaatgcgttcggcgcctacactccatgtggcactgacacccttgtagtctgcatctcatacctcgcactctttggagtttgcttctatcgtatatggaggacgacgagggactacacagtgcagcggtacaagttacgttcaccatactacaactacctgcttggactgctcgtggtgtactgcatagcagagccgctttatcggatcatcactggtacctccatcatgaacttggatgggcagcctggccttgctccatttgagattgtctcattgatcattgagtctgttgcttggtgctgtatgcttgtaatgattctgcttgaaacaagaatttacatcaatgagttcagatggtacatccgatttgtggttatttacatgatggttggcgaagctgctatgttcaatcttgtgctctctgtgaggcagtactacagttcaagttcaatcttttacctatactgcagtgagattgtatgccagttcttgtttggaattctcatggtggtttatctgcctagcttggatccatatccgggttataccccgatcaggaatgaagtgttggttgataatactgattatgaacctcttcccggcggtgagcagatttgccctgagagacatgccaacatatttgccagaatattcttttcatggatgactcctttaatgcaacaaggatttagaaggcccattacagataaggatatctggaaattggatagctgggatgagactgaaactttgtatagccagttccagaaacgctggaatgatgagcttcaaaaaccaaacccttggctgttacgagctcttcatagtagtctttggggaaggttctggctgggtggatttttcaagattggcaatgatgcttctcaatttgttggtccacttgtattgaacctgttgttagagtctatgcaaaaaggtgatccatcttggagcgggtacatctatgctttctcaatctttgcaggagtgtcacttggggttcttgctgaggcacagtactttcagaacgtcatgcgtgtgggtttcaggttgaggtccacattgattgcagctgttttccgcaaatctttgcgactaactaatgatagtcgtagaaagtttgcttctgggaggattaccaatttgatttcaactgatgcggagtcccttcagcaagtgtgccagcagcttcacagcctatggtctgctcctttccgcattgttatttccatggtccttctatatgcacagcttggtcctgcagcattagtcggtgcactcatgctggttcttttgtttccaattcagactgtaatcatcagcaaaatgcaaaaacttactaaagaggggttgcaaaggaccgacaagcgaatcagtctcatgaatgaagtattagctgctatggatacagtcaagtgctatgcttgggagcaaagtttccagtcaaaagtgcaggacatccgtgatgatgaactttcttggttccgcagggctcagttgcttgctgcgctgaatagctttatcctgaacagtataccggtcgttgtcactgttgtttcatttggtgtatattctctactgggaggtgatttgacaccagcaaaggcgtttacttctctttcattatttgcagtcttaaggtttccacttttcatgctcccgaatctgataactcaggtggttaattgtaaggtgtcattgaagcgtctggaagatctcctgttggctgaagagagattacttctgccaaatccacctattgatcctgatcttccagccatttctatcaagaatgggtatttttcatgggaatcagaggctcagagaccaactttatcaaatgtcaatctggatgtacctgttggaagtttagttgcaatagtaggaagcactggtgagggtaaaacttctctcatatctgcaatgcttggagaaataccaccagtatctggatcaggtacctcagtggtcattcgtggatcggtggcttacgttcctcaagtttcctggatcttcaatgctactgtacgtgacaatattttgtttgggtctccctttcaacccccacgatacgagaaagcaattgatgccacttcattgcggcatgaccttgacctactcccaggaggcgatctgacagagattggtgaaagaggagttaatattagtggagggcagaagcaaagagtttcaatggcaagagctgtgtattctgattcagatgtgtacatatttgatgatccactcagtgcattagatgcccatgttggccggcaggtatttgataaatgtatcaaaggcgaactgcagcataaaacccgggttcttgttaccaatcagctgcattttctgccatatgtcgataaaatactgctaattcatgatggtgtaattaaagaggagggtacttttgatgaacttagcaacagtggggagctcttcaagaagctcatggaaaatgctggaaaaatggaggaacaggtggaagaggatgaaagtaaaccaaaggatgttgcaaaacaaactgtgaacggtgatgttacaatagctgatgaaggttcacagaagagccaggatagttctagtaaaacaaaaccaggaaaatctgtccttattaagcaagaggaaagggaaactggggttgtcagtgcgagggtcctttcacgttacaaaaatgcactgggagggatatgggtggtgtccatactcttcttttgctatgcactgactgaagttcttcgcatttcaagtagcacatggttgagcatttggactgatgagggttctctgaaaattcatggctctggttattataatttgatctatggaattctttcctttgggcaggttctagtcacactctcaaattcatactggttgattatatcaagtcttcgggcagccaaaaggcttcatgatgccatgctccgatcaatattgagagctcccatggtattttttcatacaaacccacttggacggatcatcaacagattttcgaaggatatgggtgacattgaccgaaatgtcgctgtatttgtcaatatgtttatggcacaaatatctcagttgctctcaactttcgttctcatcggctttgtcagcaccatgtctctttgggctatcatgccactcctgattttgttttatgcagcttacctctattaccaggcaacatctcgcgaggtgaagcgtctggattccattaccaggtctcctgtgtatgctcagttttcagaggctttgaatggtctgtccacaatccgtgcctataaagcctatgatagaatggcaaatatcaatgggagatcaatggacaacaacattaggttcacacttgtgaacatgggtgcaaataggtggctagctattcgtctggagacattgggtggcatcatgatatggtttacagcaacatttgctgttatgcaaaatcaacgagcagagaatcagaaggcctttgcttctacaatgggtcttcttcttacttacactctcaatattaccaatttactcacagctgttcttcgtcttgctagtcttgctgaaaatagtttaaatgctgttgaacgggtcggaacatacattgagttaccttcggaagctcctcctgtcattgaggatcataggccaccccctggttggccatcatcaggtgtcatcaagtttgaagacgttgtgcttcgatatcgaccagaacttcctcctgttcttcatggcatatcttttgttattaatggaagtgagaaggtaggaatagttggcagaacaggtgctggcaaatctagcatgcttaatgctttgttccgtatcgtggagcttgaacgagggagaatattaattgatgattgtgacacttctaagtttggaatttgggacttgcgcaaagttctaggaataataccacaggcaccagttctattctcaggttctgttcggtttaatctggatccctttaatgagcacaatgatgcggacctctgggaggctctggaaagggctcatctaaaagatgttataaggaggaattctttaggattggatgctgaggtttctgaagctggtgaaaatttcagtgttggacaacgacagctgttgagcttagctcgtgcgctgctgagaagagcaaagatacttgtccttgatgaggcaacagcagcagttgacgtgcggactgatgctcttattcagaaaacaatccgagaagaattcaagagttgcacaatgctcataattgcccaccgtttgaacacggtcattgactgtgacaggttgcttattctaagttctgggcaggttctggaattcgactctcctgagaatcttctaagcaacgaggggagtgctttctccaagatggtgcaaagtacaggacctagcaacgcagaatacctcaagagtcttgtatttgcaagtggagaagagaggtcccggagggaagaaatcaagctgcaagatatccaaaggagatgggttgcatctaaccgatgggctgaagctgcccagtttgcgcttgctagaagcctcacatcatcacatagtgacctccttgcattagaagctgccgagggaaataatattctgaggagaacaaaggatgctgtaatcactctgcaaagcgtactggaagggaagcacaatactgaaatcgatgaatctctaactcagtatcaggtcccagctgatcgatggtggtcttcactttacaaagtgatcgaaggcctcgccacaatgagcagattgggccgcaaccgtctgcagcaaccttcttataattttgagaacaacaattctattgactgggaccaaatgtagatgtagaattctggatcacaacagcattgtggagtaggctggaggtgtagttatttctggcggatttgattcctgcggtgtgtaaacgctgcagcaacacgtaacttgcgaataaggaacgagttttgccacagcaggacgatccttgtaccgtcgtccgcaagggttgtaatttctcagggaccgttacgacacgattgtatgtcaggttttgacagtttgagccaatgcaattcttctaatgaaaaagacaagtgcatgtgaatggttagcatctgcctatcgcctatcgggtatcatgtggagtcgtctggtataccgtcctacacggctacacctgagaacgaagcgaccttacccccaactatcaccttgtagcgatccgaagttgttcatcttcgagtttcagttctctaactccatcgtagctaagcgtttcagcaatgggtcaagagagagatttaactatttgtcaccgttaggaaggccacatatttgtttgcttgttttacgtggcaactgtacgattttttatcggaaacgctaactggtctattttattgatgtaccatgttaaattagcatgtcacggtggatcctagtcttttttccggagagacacctggaaagtcatttttaccttcgcattttca

SEQ ID NO: 35940 - DNA, 2237 bp, Zea Mays
gcaagtgaaagtctctgcgggacggaatgtgcatgagtcatgacgcgcctcctccggagttgtttattcgcggcccgccggtcccgtccgtgttctctgttccctcccctcggcacatcgtcaccctacccattttctttgtctctctctcctatcttcctcggtgtcccccctaatcccttgcctactttaattccccgctactaccaggccgccaccatcaccaccctcctcctatctcctgcaggctgcagcctataaataggccagcttcgccaccaccggccacacaccacttcattcatcccaccttccattcctcttcctctctctctctctctcccgtgctccggtagctatagctcttggacctccaagaagcacacggccggagtgatcagtgaagaaacggccggagtgatcagtgaagaaagagaaagcataagaccgggctggtggcaatataatgacgcggtgcctcatgttcatgccgccgctgttcctcgtgtcctccctcatctccaccgtggggctgccggtggagccgcccgcggagctcctgcagctcggaggcgacgtcagcggcgggcgcctcagcgtggacgcgtccgacatcgcggaggcgtcgcgggacttcgggggcctctcccgcgccgagcccatggcggtgttccagccgcgcgcggccggcgacgtggcgggcctggtccgcgccgcgttcgggtcggcgcgcgggttccgcgtgtcggcgcggggccacggccactccatcagcggccaggcgcaggcgcccggcggcgtggtcgtggacatgggccacggcggcgccgtggcgcgggcgcttcccgtgcactcgccggcgctgggcgggcactacgtggacgtctggggcggcgagctgtgggtggacgtgctcaactggacgctgtcgcacggcgggctcgcgccgcggtcgtggacggactacctgtacctgtccgtgggcggcaccctctccaacgccggcatcagcgggcaggcgttccaccacgggccccagatcagcaatgtctacgagctcgacgtcgtcacagggaagggagaggtggtgacctgctcggagacggagaacccggacctattcttcggcgtgctgggcgggctgggccagttcggcatcatcacaagggcgcgcatcgccctggaacgtgctccccaaagggttcggtggatccgggcgctctactccaacttcaccgagttcacggcggaccaggagcgcctcatctccctgggcagccgccggttcgactacgtggagggcttcgtcgtcgccgccgagggcctcatcaacaactggaggtcctccttcttctcgccgcagaacccggtgaagctcagctcgctcaagcaccactccggcgtcctctactgcctcgaggatgtggatgcgctgttgggcgagctgaacttcatcccaggcacggtgttcacgacggacctgccgtacgtggacttcctggaccgcgtgcacaaggcggagctgaagctgcgcgccaaggggatgtgggaggtgccgcacccgtggctgaacctcttcgtgccggcgtcccgcatcgccgacttcgaccgcggcgtcttccgtggcgtgctggggggcggcaccgccggcgccggcggtcccatcctcatctaccccatgaacaagcacaggtgggacccgaggagctcggtggtgaccccggacgaggacgtgttctacctggtggcgttcctgcggtcggcgctgccgggcgcgccggagagcctggaggcgctggcgcggcagaaccggcgggtcctcgacttctgcgcggaggccggcatcggcgccaagcagtacctgcccaaccacaaggcgccgggcgagtgggcggagcacttcggcgccgcgcggtgggagcggttcgccaggctcaaggcccagttcgacccgcgggccatcctggccgccgggcagggcatcttccggccgccgggctcgccgccgctcgtcgccgactcgtgatcggtactactgactgattattaggcgcgttttagtgtaggtagtagctacagcggtaaccgtacaggattatttagtttgttgttattattattattattatttagctccggttgatgtacaaatgtgggtcacgtgattctgtacatgtacatgggagtcaaatatgaatgtcgccaagtgatgctcttctcttctaatggttaaatac

SEQ ID NO: 35941 - DNA, 796 bp, Zea Mays
aattaatgatacaatagtcgaaacatactcataaattatccatctagattggagcgaggtgccatatcaggttatgggctgtcatgtgggaccaccggtatacccacctgacccatgccagggacacgcagtgcacgcaggaagtgccttcgaactacctgacagtctcgttcaagctatatgatatggatagcacagggtttattgaacggaaggaggttaagcagatgttaattgctcttctaggagaatcagaaatgaggctatctgatgatatcattgagacaatcctggataagacattctctgatgctgatgcaaatcaggatgggaaaatagatagaacagagtgggagaattttgtcacaagaaatccttccttgatgaagataatgactctgccatacctcaattaacaaggagaacctgtcgagggttacgactggagatttctagcctctggcattatgaatggagggtatattcatgcggctaccaggaagggtgcgtcaaaattgtctgccacagatgtacttgacgagctgtagtttttactcggtgataatgttgatgcttttgtgttggtgatgattgggacttgagttagtatgctgagatgaacatttttcatttttaccagtgggaagtctctattttgtttgtgaaactgcgacgtgcgtgtctgtactgatcaaatatgattcttgtcaaagtagtactgcattctactattttagcgtaaaataaacctcgaagtcccaaaacttgcatcacatgtcattgaagtctctgagtt

SEQ ID NO: 35942 - DNA, 3353 bp, Zea Mays
atgaaaacgaaattagttctcgtgttttcggccgtgcgctcgctggcgcaagccgcgcgaatcggatcgctgtccgcctctccatttcccctcgtccgcacacccgagcctcgcttccgcctcccacttcccaccaggccaccaccccgtccggcgatcccgatcgcgagacgagggtagcgagatcgagaggattgtcgcggctgccgggcggcgctccagttccaagtcgaggcgaggaactacacgtgtgatatctgcaactcatatggctgggacccacaagaagcgaatggaagaccgttttggtagttttttctcatttgatgaagattctgaaagtgaggacatatcgctggatgagttggaggaggaacttaaagagcacaagaactgtgatgtactagtaactattttaaccaatggtgaaaaacagcgaggcatggcaacattggttgagggcgacctaggccatactgaagaagctcttattcaagattatattgaggataatgacagccttgttctgttgcacgatcagattcatgactgtgacgttattttgtcacaaataggattaattcttagtgggtttcagacccatatatgttcgataagctcggaaatcagaagcctccaggagaaatcctgggatataagcttgaaattgaagaaccgcaagttggttgagacaaagcttgctgggtttgttgaagagatagttgctcctcctggtttggtaaatattcttgttaatggagaggtaaatgaaggttatgccagaagtctggagatccttagcagaaagttgaaatttgttcaagtggatccgttgattaatgcatcaaaagctctgaatgatattaagcaagaattggaaaggcttcgacaaaaggcactatccaagatttccagccatattatggagattttctttgctatgagaaaccctgggactaatatacagatattgcaacaaaatttgcttcagaagcacaggtatctcgttctgtttcttaaagagcatggttccgagacatatggtgatttgtgtgcatcatatgttgatacaatgaacaaggtgctgagtacatactttcatgtgtatgtagaagcattggagaagttgaagctagaaattggtgtacccagtgattttaatggacatgataccagtatcatcgatattataataagaggaagggagcatttgagaaatcatggtttcatgttttcgttaggtgaacgtgcaaatattctgaaggagattcatcaacctggcttggttccacatatatctcaaggcaactctcgtacatacccatatgaagttattttcaggagccttcagaagcttctgatggacactgctagctctgagtatcttttcatggaatcattctttggagaagagtcactgttttatcaagtttttgaaggaccttttgctgttattgatcaacatttggatattactcttccaaattgtcatgatgctgtatgcctcatgctcataatctgcataactaggaagcaccagttggttatgtgcaacagacagctttcttgtcttgataactattttgataaggctctgatgtatctctggccacgtttcaaggtagtgtttgacatgtatattcaaagcttatatcagtgtgatgcgaaaacattatggatagatggtacccatccacaccatattgcaaggtgctacgtggagttcacagcatcccttgttcaacttaatgctgaatgcggagatggtcagcttgatatgaacttggaacgcttgcagtcagctatcgaattcctacttgttaggcttgcccaaacttttacaactaccaagctgcagcacctttttcttctaaataattatgacatggccatctctgtcctgaaggaaactggcgatgaagccaaaaaactgcaaaaatattttgaagagaagttagaaagtaacatgatggcttttgtggatgatttgctgatggaacatttcagtgacttacttcggtttgtgaggagtcatgtctcggaagacctggtatcttacaccgagaacaccaatattgccgacgttgagccagttgtgaagaactttgccatgaagtggagaattgctctagagctcatgcacaacgaagtcataacttcttgtactaaccttttgtctgggatggcaattctaaaagcagctatgactcagttgcttaatgactataacaggctctcagagtgcgtcaaaaaaatcacagggggttcaactttgaacagacatatggtttccatcacatctatttcatatgaaatcaggaaatactcaagaacactctagctgcttataatggtgtcaaagaaattctgataaaaaggttaaacaaaaatatcaccatcgagatttttttgaacattccaaccaggcaaatgctggttgcatttttagtttgatttttgaaattaggtattgtaaatgggacagctcgaacatgttttaatttttgtttgtgactattattgctcatttttatatgctacaaggctttgttgttgttgtcgttgttgttggtcagtcagactatactcgacaacagtaatatgcattattttgaaaagttaattgaatcacctgaagctgaatattatgtgtgaactgccgtaatatggagccccaataaagtgcaactctatgttagcttcgtcctataagctatagctatgctggggactgtattttatagcaagcttcgacctgacattttggtagattggtttcggcttgcatatcgttgtcagctgctgacggtaagtatgctttaaatacgttttcccgttttttcctacggcaaatgataccttttttaatcttggatgtagatagagttctcaacaggaaaagctgttttcgtgaaattagtgtacttgaaactggcccagctgaaaaaaaactctatttgctttaacttatttgcataatccgctattgttcctcgtgatggaataagtcatgtggtcttcgtgtggaggacagtccgcacagcatctctgctgtaggacagcagcaacaacagtttttgactgcaacgactgcggcagacagcatagcagcagtcttttaactgcaaggacagcgtgctgcaggcatctacttttcattttctagcttttggaggacaacagcttgctgcagtttcttttgactagagtacaacaacacctagtggttagtgcagtttgtaggacaacatattcgcaactctagtaagcatatgttgcagccccttgggctataaatatgaatcccaacccttagacgagtatgacattgtgtagtgtttgagaaaataaac

SEQ ID NO: 35943 - DNA, 2307 bp, Zea Mays
cagctttcttttacctattccaaccctctgggctctggcacacagctactccgcctcctcgcccttttctcctcatccctcgctttcgcttcgccgttccaacgcggagcccccacggaaaataaaggccaagaagtgatggtagtggagtaaaaccacgcgttggagggcagagggacaggttggtggaggacgcgcacccagcgtggagagcagcaggagctacgcgaattcgggccgcgagtgcgccggttcaggttgccgccgccggtggaattgtggcagacgaggtggcctgttggtagccgcgggagtttgcgagtaggtcggttccggttggtgtgcgagcgaaggtgctgttggaggcgtggatctggccggcggcgggcgatgggaaggagggactagggctcgattggagggaaaggcgcgatcttggaggttcccatgggcggatgcctctcgcaggaggagcaccggctccagagcaggccagctgaagctgctggagcagatggattgcggaagtctaaatctgattctaaagctgtagcaagtgttcttgctcctccaaaagatgtggtggacctgcaagtagaaggatatggaaatgtgaatattttcacatatgacgaattaagagcagccacaaaaaacttccggccagatcaaattcttggagagggtggatttggagttgtttacaaaggtgtaattgatgaaaatgttagagcaggtttcccatcgagacaggttgctgtgaaagaactaaacccagagggctttcaaggggacaaggagtggcttaagtcaactatcttgggcaacttagtcatccaaatcttgttgaattgattggctattgctgtgagggttcacatagactgcttgtctatgagtacatggcttgtggaagcctcgaaaagcacctttttcgccgggtttgccttaatatgccatggtcaacacgcatgaagattgcattgggtgctgcaagggggctcgagtaccttcacggagctgagagatccatcatttatcgagatttcaagacatcaaacatcttgctagatgcggattacaatgctaagctttcagactttggtctcgcaagaacaggtcctagtggagaccaaacccatgtgtcaactcgggtcatgggaacttatggatacgcagctccagaatatgtcatgactggccatctgacggcacgaagtgatgtttatggcttcggagtggtgcttctagagatgattatcggaagaagggctgtggacaagagccggccaagccgtgagcataacctagttgactgggcacggcccctcctcgtccataacaggaagctgttccgaataatcgatccgagaatggaagggcaatactccaccaaggctgccactgaggtggcaagccttgcataccgctgcctgagccagaaccccaagggacgaccaaccatgagccaagtcgtcgagacctttgaggccgtgcagaacatgcctgaatgccaagacatactcctccagaacagcatcacaggtgccgtgacgctctatgaggtccccaaggagcctgcagacagagttgagctggagaaggccaagcaggaaccggcagtaaagagcgccgcgatgccgcccatgaacggaaagccagtcccccagagcaggcggacgcggcctgggaatggccggagcaagagcgagccatcgttggagtgcaagatgtacatcccgtcaccggactctgatggacaccagctcggcctggaggcagtcgcatccccagatggaagcataagggaccctcctgatgaggatttgtacaagatataacaccagggcagtttttcttcaacaacgagggcccgcgttgctcacctttggcgccgccactcccgttcttaaagatcaatcagctgtaattttttctctgatggccactggccacggtagcgttcatattcttccgattagcaattgtatgtagaggagagttgtgatggaaagcatgtgtgtgtttgccatgacgacgctgtaaaaacctgaaacacttatttctaggggggtttccactccaaaatggaagtggagagatgtgtcctgataattggtgccgttacccgtgtgttgagtttttacccccctccacaatccccttctttcaaacaaggctggtttggatccatgggcaatcaccatgccctgaagaacgttgcaatctggaacagttctgcgggaaatcaacaccaccatggaaattgatactccaaacctgatgtgatgaaacacttatttctgc

SEQ ID NO: 35944 - DNA, 3103 bp, Zea Mays
acatgtggaaagtggcgtccggatgaatcacggagacctgaaattgatgacgcccccgttttcactccgactgaagaggaatttaaggatgcaaccgaatacattgctagcattcgcccgcaagcagaaagatatggaatttgtcgtattattccaccatcttcttggaaacctccgtgtcctctgaaggagaagagtttctggaaatgtacagagttcaatactcgagttcaacaagttgacaagcttcaaaacagggagcccacaaagaaaagaacacaacctcgagttcagaggaaaagaaagagaagaaagagactgaggtttgggatgacacatagacgtcctacttcaagtgcggactctgaagagaaatttggctttcaatctgggtctgacttcacatttgaggagtttcagaaatatgctgatgagttcaagcaggaatattttggaatgaaaacgagtgatgaaatttctatttgtgaaattaagaaccacataaaaacatgggaaccatcagtggaggagattgagggggaatattggcggatagtcataggccctgctgatgaagttgaggtggattatggtgctgatttggacactgcaacctttggtagtggttttgttaaattatcttcttcagatggaaataagcaagatccatatggtgtgtcttgttggaacttgaataatctgccacggctgcctggatctgttatctcatttgaggaagacgatatatctggtgttgttgtcccgtggctttatgtaggaatgtgcttctcttcattttgctggcatgtggaagaccattttctttattctttaaattatatgcattttggtgaaccaaaagtttggtatggtgttcctggtggtgaggcagtaaagctggaagaatctatgagaaaaaacttacccaaactgtttgaagagcagcctgacctacttcatgagctggttacacagttatctccatctgttctgaaagcagaaggagtttctgtttaccgtgctgttcagaagtcagtgtgctgttgagctctatagagatcagcatcgcaagacatcaatatcacatgacaagttattactgaaggctgcaaaagaagctatcagacaactttggatgaacgttttgaattgcagaagtggtaaaggagaatacagatggctgaacacatgtggaaaggatggagtcctgacaagtgcaattaagacaagagttaagatggaggttgctgcatgggaggcaaatgttcctttgaaaagtaagaagatggacaaggattacgattccaatgaccgagagtgcttttcatgcttttatgatctgcacttgtctgctgtcagttgccagtgcacacctgaccgctttgcttgcttaaaccatacaaatcttctttgttcatgcggaatggacaggaaaatcacattctttcgatatagcatggaggagcttaatactcttgtagcagctctggagggtgatctggctgcagtttgttgctgggtacaggaccacctaggcttagtttgccaatcaggttctctgaagcacagcaaaatggactcatgtaaaagcacagaattttcaggattagctattgatgccaatcatgtttctgtatttggtggtattcaaaatcagtgccatgaccttcaaaagccagcaggattccagcaagagaaaggaatccaggataattgtcttaatctcaacatagaagatccaccatgcagttccagaataaaagaagagcatggcaaggataggatgtttcttgatcataggcctttacagaaaactgacagtccatttagaatgagctctgagtgcagttcttcattgtctttatattgttcaggcaacttagtctctccttcaagaaatcaagctagcaattctggcctagcttgcaacactactaagaaactatttggcgttgacattggaaatttagcaaagcattctaatggtcaagttggtcaaatggtaatggcttcagggcaatctgatgcatcgtctaggccaatgtccgggcaccaggttgagccactagactatggaatggtaatgattgacaaaaggtggttcaataatcaagctattttccctaaaggtttcagaagtcgagttacattttacaatatacaagatccgacagcgtggtgcttttatgtttcagaagtcctggatgctggacctcttggaccattgtttaaggtgaccttagagcaagttcctgatgtctctttcactcatacctcaccgatgagttgttgggatagtgttagagacaaggtgaatgaagaaatagaaaacctacaaggaattggaaaatgtggcgttcctaattttttaccacctgattctgtaaacgggctcgaaatgtttgggttcttgtccccacaaatcgtccaggaaatcgaggctctagatccccatcaccagtgtttagactactggttatcgaagtctgcagtagttcctgcgtcaatgaggacacttgagaagctgccaaagaaggctaaactgccagatggacagaaactatctagcatataggagcaacgagcaaggacctgagaaggtaggcgcattctgcaggatgaaatgaagtaatagaataggtaaattaggcctgaatagatagaacatgtcaagtgtcgcctcagaatgactagactaaactggtcaccattgatttacagcttgttcgctgcggcttgctgcggctgcaatccggctgcggctgcggcttctacagtatttttctctctatggattgcagctgcagcagtccaaacagctgcaacagtgtcggcttgtagccagccgaacacgcccttacttttttacagacagcttccaatgaccgtactcattttacattcttttattcataaggatggcaggatggctgatttgtccactgattgtttccctgattagtcaatttcatggcaatcaatatatgggctatttttttttttgtctcagacatagtttgcatgtacaaaacattcggtgctggaaatccgaaagatgtgaagtttattgattatggttaacctaattgtattacagtttcag

SEQ ID NO: 35945 - DNA, 381 bp, Zea Mays
ttgaatcgagacggcaggggccccaatcatgcaccgcagcggcaccagacgcgccaaggagatctctccgaccgcggatggagttgagagacggatgccagcgactcctacacggtggcctccctaccaacacttctctgctggcggcggggtaggtttaggctgttaatggaggcggattcgagcttggggcgagatctccaggttttctgtgcgtgatgtagaaaggccagagaacgggcggcggtgaacctagggaagctgtggagcggagagaggcaagggatcgtggccactgatataggtgtgggctgagccgcagccgcaacggcttacccggaatcgacggcgagcttctgccatcgtcgggcgaagttgttg

SEQ ID NO: 35946 - DNA, 2215 bp, Zea Mays
ggggggggggtggcgcccgcctgggccaccccaggccgccgccagcgacaggtgaagcgtctgccggggggcgctggccatggctgccggggcaatgcaagctgccaaagctaggtgcgtgcaaaagttggatcgccatgccatcactggcgcgcgcgacacagagcggcagcgtgtgcgtgccgcttagattttgttctctccacttgtcgacgacgacgacgctggtttggttcctccctcctcctatgattctatacgaagtgtttcttggtttcgctttttttttcttttttgagacgttggtgcgctgacagtgccatgtagggtcgtgccccggctagtgcctgcctagcgtggagaattctgagaatgaccttagatggcggcaacctcacagcgccagggtacgcgttagaaaatgacggagatgagagagcgtcagtggcggaacggaaccagagaaaattagagggcggtgcgtttgtcttgtaggcgttgaaaatataggcagcaactatggtgaaactatgattttttttttagtggtggtctttcgatatttttgtgggcgtgcatgcgtagcttcgacgctgatgagcgctatgtctttttaagtttttactttccgaatgtagcgaaaaggagagaaagaagcagaatgggagcagtatgccttgtgtaacaagtcagatttcagccggttctctcgaagcaactcccctgcaacaaattgatatgtccgaatcaattgtttgggctaagaagatctgagtataccgattaatcgagcataccgctaatgctactgctataatgtctgaactctgaagcgtaacgctgtgtgtatgtgacttgtatactatggaagtacagagttgcattcgcgtctactagatgcgtcgatgttcacttctgtacagacttttgggcagcctgttcaagccagcaaggcgttcaaccgtgttacagcaggcaaacggttggtagcaaagatgactgttccaccattgtgtggtcatccttcagcttaaaaaaccctttttttttccagttcagcgtgtagatctcaacatctgtgggtgtaaagattttgatgtccctgcgcctcctgctgtttttggcagcaagtccagacagtgaagcagcatcgactcggtagatagataccataccaatgaaatctccaacgatcaccaccaccacatgtccagacgaatcaagttggttctgctcaatggtcccgaaccacaaagcagatctgaacggtgtccacctcccgatctagcctagctacgccgtcaaaattctgaaattaccgagacatacggagcactggaaaatcgtctcgactcggcactgtacctgctgctagttttccacaccggttagttgaattctgcatgcgctgttcctgttcccctccaagagctcgtgtcgtgaccgtctctcctactaaaagcaccccccctctcaaactcaaaaaaaagggggagtgacagtgtttgcctgaaagaagtgagcactaaggaaggttgatggaatcagacgatcttttctctggatggaggcagctccggtaaatggatgctgttgtctggttcgacggctgaaattaagcaaccagagcacagatattttggtggccacggtgggcaggggagagataaaacaaacattgttatggcatgggtttatggccaagctcccatcgatctagcttctaacctgttcgccttggcttctaacctgcttctaacttgcaccgagacattggccttgccgtccaccctgctcgcttcgcgaccaggaaacggaagcactgttcatctttgccttcactgcactgtccttttgcaaatgaagtctgggtgctcgttgaaaaatgggttggagaatgaattctggacatcgatgagggtgtgcagaccacgcaaaatctggtgggagaagtcatgtcgtcgcagggagggaatatcgggagcttggcgaagaaaaaaaaaaacaaaggcaggcatcttgatgtactcggcttggaatatctggaaatactgcaaccggccgagaaccttcaaagggtcaacgagagcgaacaccggtccagatttggggttgatcaagaaagaactggggtcactttagcagagcaactgggaaactagcattaccttcacgagtctctttttattttcacgttttttcttttgtgttcgag

SEQ ID NO: 35947 - DNA, 3522 bp, Zea Mays
gacttctccaaggtgaaaccctagctgctgcttccgccactcacgccgctcgccgccgacgccgactatcgccggaaacaggtcaacaggagagcccgttcaagtccgggacccctcaattgtccttttctctctctccccgcccaacttcccctgctctgccgccgcctccccagtccggcgtgcatcagcagcgacatcagagtcggcgatgggaggcgtcaccgacgttctcgtccccttatgttgatgaagtggcgtgccgtggagattcctttttgaccgatttcttgccggttgcacttcattatttcaggagctcattgtggccctttcttgcatgtgcaaagttgcaccacttgtgttgacagaatgcccatattctgggtcatatccatttttagcgctggtttgccaccttcttaggcataaggatgtaatgtgtttatggtggaaagcagaagatttcgttttctcgtttgaaggcttccttacaaggaagattccaaataagcaggatctacagtgccttgtgccatctgtttggtggcctggttcttctgaggatgaagttagcatgacactgacgatgacaacactctcagatgcaataaaaaagattgaggagatgcatcgtgaactttgcagcttggtaatatgctttattccaccaatgtctacgcctcagcctccaggctctgtatttaggtcctttgtacaaagtttggtgctcaaagctagaggtggagatcataggatggttgtcaatgggactttcaacaacactgtgcttgtttcattgtacacagtaatcctgcatttgttgtctgaaggattttctatggattctgctggatctgcatcatcctctaaagcgaactttgggaatggtgttggatttcttcacaaaggtggaaaacgcaagtttccgacacaattatttttcaggaatgatgcctatcacagtgtaattcctagaatcggtggaccaccaagtattttgatgcatcaccaatttgatgctgtggaaaatgaagtgcagtgggatgaaggctgcatgaatgatgaagagacacgtgttacacacactacagcacagaagccttgttgctgctcagtgacagatgttgctgttggcctaagatacaaagaaactgctaagtatgtgccatcaacttcaaaaggctcatgtaagcctatgcctgaaagatctcctcatgttgctgctgagtgcaatggtagaggtctgagtgatgagatcgaagacaaacctagcacaagtgctcaatcagaaattgaatatggataccaatcactgcatagtcttgaaaacatgccaatggcaactcaatcttcgtcggaaacacttaaagaagaagagctgcttgatgttatgttgttgttatatcatctcggcatctcaccaaattttaggcaggcattttatttcatgtctcagcagtcgcagtccatttctttactagaagaaactgacaggcagatacgagaaaaatcatgctcagagcaagtaaggcgtttgaaagaagcccggaatagctatcacgaggatttggtagattgtgtacggcattgtgtttggtaccgggccacccttttctcccagtggaagcaaaggggaatgtacgcaacttgcatgtgggtcgtggagcttcttttggtccttagtaactcaaatagcatgttccactatgttcctgagttctatgtggaatcactggtggattgtttccatgcactgcgaaggagcgatcctccttttgtttcccctgcattatttctcatgcaagggttggcctcgtttcacttcgatgatacaaggatagtgaaccctgacttgaaagatcttcttcttcaatcaatatcagttctcgtacagtataaagaattcatgcttgttttcgagaacaatcgggaggctataaataaaatgcctagatcactgttatcagcttttgacaacagatcatggattcctgttacaaacatactttcccggttctgcaaaggctcaggatttgcttcctataagaatggtgaatccgcatcatctgcaacttttcaggttctactgagggagacatgtattcatgaacaagagctgttcttttcctttcttaatcgacttttcaatacactcagctggacaatgaccgagttctctatgtccatccgggagatgcaagataaaaaccaggttgctgatttgcagcagaggaagtgcagtgtaatttttgatatctcatgtagccttgcgagaatcttggaattctgtacccgagagattccttgtgcttttctcatgggaccagatatgaatttgcggaggttgactgaattggttgtctttattctcaaccacatcatatcagtagctgatgcagagttctttgacatgacactaagacggccagggcagcatcaagagaaaacaaatcgtactatgatcttggctcctcttgtgggcattatcctcagtcttatggaatgtagcagcacatcagaacgaagggagctaaatgatgtgattgcagtgttcgccagcatggattgccctgccacaatccattttgggctgcagtacctactgagctacaactggagcaatgttcttcgaggggattcatcccttgcaaagctagcgcagcttaaagagttctcccattacttccgacgcattacagcgtccgtggatggtgaagaagaagaccatagcctaaacgcgggcgatgaagacgacgaccacacttgttgcatttgctacaactgtgattccgatgcaacattccagccatgccatcaccggtcctgctttggctgcataagcaggcatctcctgaacaaccagaggtgtttcttctgcaatgcagtggtaacatcggttactagatagccgattcgcgagcgatgcgctgctctactcattgcctctttcggtatcgtgatccgaaggaagatggtgccactgatttgtcttatctattttgcttgacctgagggctggggcgctggcgtcccagagatctttccattgcttttccaggaagaacgcgttacctttgtgcacgagggtcagaagcggttcttcgttttccttgctgtatatgtaaaggccaggtaatagtagaaaggattcaataacattgccgcagaaggaggtttctgtacacggtgggaagccagtaccaccgaaaggaatttcatggaatcgcaatttttgtagggtgtagggggagattccacgactgtaaatatgatgagatatgaaacagaaaagggggtggcagatcaacatcgaccttctgtaattagccagaataaaagaactagatgctttatattgagcagagctctcgtctttttgatcctccccacggtgtagtatcaagaatgaataaatcttctgtttcttgtctggttgtagcatgccagcatctgtaagttgtaacaattcagtgaatttatttaccttcagcaaaaagggtaaaaaggttgcctcttcaa

SEQ ID NO: 35948 - DNA, 5187 bp, Zea Mays
tcaaaattgcaaaaggcttctaagggtttgtttggttgagttgtggcttttgaaaagctaatgcggattatggatgtgggctgtgaaaaagcaattgtgggttatggattgtaccagagatgaaagccatttggttcaatagttgttttttttggggggggggggggggggggaacctattgtcaacttctcttagtgacaagtggccccatccgtcagcctcattcttccttcggatggatacccagctgaggtggcgcttcccgtatggcagtcgagatcatgctcaccaacggcaaaaggcccacgctcgtccacatggcgaccaaggacatggtcaaggggatagcctcacactgagaaggctagaggagtcgccagatccaaccacgggagaggaaggagcatcgcccaccgaacagaggatgagctgttttcagtcaaatgcaggccttcacaagaggtaaaagcagaggaagttgctttcagctcttgtattaggcaaaagcagcttttggtccaatgcaattgtggcttttcagccccctttggctgtctttttgcttttgcaaaagcaaaaaccatagtcacagaaacagggtcaatgccgcattccatgacccaaggtcggcatcccaaatcgtgggtctaggtcaccataggtaatcgtcccaaacgctagggagtcatcgtaccaatacagatggggacgacgaccagtgctcgttcgtgatggaggatcatgcaggttggggcagggcagctcagattggggcaaggcagcgcagatgacagcaaagcgatgtcgatgtgtaaggagacgaggacggagatcctcctatggccagcaaatggtgacactctggattcttgcatcagtgctcctcctgcaggttccagaggtcctgggctgggcggcgatgcttctgctatatgagctctatggctcctatgtgagtctagggcagaagtacagggcttcattgctataatgggttggtaattgggctggtgttatgttgtgttaaggtagtactaggctaggccagtgaggcatagcacgtagggtccttggaattttggaacacgaacctcgacccatggagtcgacctgggattattgacccattagaattgggttcacgtaccaaacccacgattcacataccatagaggtataacacgctccttctaccatattttttcaagtgtcgacccacgactcttactcaacacaatcgactcgggaacattgtgactatggcaaaaactggttcaaaagcccaactaaagggaccctaaaaagcggtataaaaccaaatactcggtccaaaaagataaggcgtgatttgactttggtgatcttcaagatcacactttgaccactaacctcttatattatgcaatttatgtcaataagggcctgttctagaagtttgtttctcaaaaccacagtttataaattataataccgtttataataccacggtttaatgtatgccatgacataactattgtatattttatatcagtccaatccaacacctatttggaaacatagtattttagttgtagtgtaggggaaaagaagactgtagctgcgtgcaagcaaaaaaaaactttggactagaccaaagtttttttgaccccaaaaataccatggtattggcaaaaccatggtttaaaatacagagttcttgtatgtgctcccaaacgctttttggtctaaaataccatggtatgctcaaataccacggtattatcttggaactaagaaaataccgtgttcccaaataagccctaagattttgatccctgttttcaagtcgtcgactagtcgtccaggcggtcttcagagaccgacttggaggtccgactcgacttttctcgtaagtcgcccgacttgccgacgactgaaaaaataagtgggctaagaagtcggtcgacttgtccctttacggcccaaccaaaggcccattaacaaatctaaacctacacataaaccctaacttacctgaagccgccggtcgccctctgcagcacatagccgccgcccctcctctgctacagcagtcgccgcccttcctctgcgcgcctctcctctgcaacagccgcgcccctctgctgcagagccgccgcccctcctctgcggtagagagccgccggtctcccctgctgcagcagcctccggtctccccctgctgcagcagccaccgttctccccctgcagagccaccgcccctcctctgcagcgcaaagctgcagcacagagatggaagatacatttgcagatcaaccacaaggggagccaggaagccagcagccatatgatccagctaaagatcctaaaagaaaggcaaaatcgaaggatccagcatggaactattgttattggccggatttgaacaaaaaagatgtgaagtgcatactttgtggcaaaatcgttcatgcaggtgttagaaggttgaagcagcaccttgttggtggtcatggtgatgttgctaagtgcccgaaaacaacatcggcaattagcaaagagatgagtgattatttgaagaagaatgctagacagaagcctattgacttggatgatgataaagatgatgaagttgaagtacttggagaaggggaaagtagagcatcccattcagttgttcacccagttccggaacagcccaaaagagaaggctctcagctgaagcaagccaaaacaatcaacacgcgtcgaagtcttctaagtcaattgcatccatgtttcgcaaagcaccacttaatgtcatcaactcaagggcctttgagatcatgcttgaggcggttgggcaatatggtcctgggtatgtgaaaccctcctatcatgatgttagggtgccattgcttgagaaggcaaagagtgtagatgagataaaaacgactcatgagttggcttggactgaatttggttgcacacttatgtctgatggttggacagataggaggggtcgacacttgatcaatttccttgtcaatagtccaactggcacatttttcttggagtctgtcaatgcctcaagtgagacagcagatgctcagatgttagctgcactactggagaaaagaattgatgccattggtagagacaaggacattgggaaaattggagagttcaagaaatgcatttcccatgctcgccaagtgacaaccttcatatataggcatagcaagcttcttgatgccacgagggagaagatagggggtgatttagtgaggcctgcagttacaagatttgctacatctttccttactctccagtccatatataaacataagcaagctttgagatgtctctttgttagtgatgattggactaggtccaaactatcaagcacagaagcaggaaagaaggtcacagagatacttctttctacaaacttttggaactcagtccaagattgtattcgtgcatcacaaccactcctcattgtgttgcgaattgttgatggtgatgaaaagccagccatgccagaggttgccgatgccatggatatggcaaaagcaaagatcacttcgggttttgaagttagagaaggggatgatcttgcatgggctcatgtggatgatgcaatcggtgcttctagttcacttcaaggtcgcaactttccaagaagagcccgatatgagtctgtttattcaaggcgttgtcaagctgctgctacacaggaggagagagttatggaagaggaagagcaaagcaacaagggcaatgaacaagatgatgaagagtacatgcctaatgatgatgaagtggatgactttggtgaatccccacatgacagtccaactcaagctggtgctgattgtgaagaaaatgcaatggatgatcttgatttgggagatatttagggtatctaggggctgtttggtttgctacctaagacgccacaatgtgcctaacttttctgcctaaccttagttcttcaattcgagcgactaaggttaggcagattgtggcgtcttagctaagaaaccaaacaggcctctagtatctatctagctgcagcatcttagctatctaatggagtttatttcctttcaagtttgaactatattttcttgctatttgttttccaatttgaacatatggctgttatgacttatgagtttatgatttatcacttatgtggctgatttggttcagtttgaggcttcaaatgaggcaagacttgctatttatttcagtttcgttcaatttcatacttcaaaagaggtaaaacatcctctttcttcatatataattgatatattgtctatatgaagccattatataggcaaaacagccactatattggcaagtcgacgactagtcgactgacttatcgactagtcaccaagtcggtaccttgtcgactcgactcgacttaccgacttgaaaaccttgattttgatcaatagaaagtaattccaaaaacaaatctattgcaatcactttagcataaacttctcatatgattaaactaattgtcaatcaaagataaaaaaataatgaaatagtgcatgtcataaatttcaggacacgccgacaggagtattccaaaacaccaactacatctctatctctactaatataaagtgagagtttctcccttcgtacgtctgctcccctccatgcgcacagagagtgtcaccagagtttgacacgctaagcaaaatatcacgaaatataaaaaaaaagcgtgcccactaggattcaaactgtggtctctagtgttgaacagtaaaccctaaccctaacaggaggttgggagatgtatatattcagagttagatgggctgagcccattacaataggggcaaaatagtaaatacacatggggagtaccgaaaccctaataggtatctaacatctaggagcaaagcactcgtctctaaccactacagctcatgttggtttgtgttatataaagaggtcatatatgatatatataaaccgtagcgatgcacgagcaaataactagttgtagttaaattaatggttatattgtaatgtgatacgtctataaactaattcaaagcatttgataagttaaggtcatcaaatcagtcaaaaaaggaagcagtcaaatttggaaactcaaagtgcaaacatcatgtagggtatagaaggccatcaaatgtaccgagtgaaaactacttcatcttctggaaaggtaa

SEQ ID NO: 35949 - DNA, 3557 bp, Zea Mays
atggagagtgcttttaagcaaatgaaaggggaatttgttggtttgctaattagaagggaggttatgcagggcaggttctcctcatttctgcttttttgggtcgaaccacgtggagtaatacctctggagctcagtggctgcatcagccaggtgtggtcgccatggttcaaaggcgacccgtgcgtcggcgcggccacggacggcacgtccatctacgccgacaaaatgaacccgggcatcaagtgcgactgctccgaccacaacaacaccatctgccacattaccgagctgaaaatgaacaaactggatgtggttggtcctatacctgaggagctgaggaacctcagccacttgacaactctgaatttacaacagaattacttaacagggcctttgccatcgttccttggagaattaactgctttgcagcagatgtcgctttctggcaatgcattatcaggaactattccaaaggagctggggaaccttgtgaatctcataatcctgagtttaggcacgaacaatttaactggctcccttccttctgaattgggtaacctggttaaactagagcatatgtacattgatagtgctggcttaagtggtcctataccatcatcattttcgaaacttacacgattgaaaacattgtgcgcatcagataatgactttactgggaaaataccagattacattggaagctggagtaatttaacagatttgcggtttcaaggcaattcattccaaggtccacttccaagcactcttgctaatcttgttcagctaacaagcttacgaataggtgacattgtaactgggagttcttcgctggcattcatcagtaacatgacatctttgaacttattgtattcccaattaatcattcactttatgaatcaaactgcgccttcatttgctccattgtaaccgagttgttatatacttaaattggtgacattattcattgcagaattttaaggaattgcaggatatttggtactttggcattagtgaacttttcaaaatttacaggattaacattattggatttgagttttaataatatcataggtgaagtaccacaagctctactaaatatgaattcactcaccttgttagacttttcctacaactacctctcaggaaaccttccttcttgggctagtcataatttgcaatttgtcttacctgcggggctggagtgccttcagcgaaacacgtcatgctttcttggctctccacaatcttcctcctttactgtagactgtgggagtagtagatctgtatttgcttcagataattccatgtatcaacctgatgatgccaatcttggtgttgcatcatattatatttcaagcccaccaagatggggtgttagtaatgtcgggagattcatggatacatcaaacgggagttacatagtcaacagttcacgccggtttcagaataccctagattccaaacttttccaaacagcaaggatgtcagcatcaactttaagatactatggttttggacttgaaaatggggactacacagtcacacttcaatttggagaatttgactttgaagatttacaaacttggaagagcgttgggagaagggttttcgatatctatctccagggtgagcgtaaggagcagaactttaacataaagaaggcagcaaaagaagctggcgaagcaagcacatcgtacactgctgtcaagaaacaatatactgtacctgtcacaaaaaacatcctagaaattcatctcttttgggctggaaagggcacttgttgcatccctaatcaaggcgattatgggcctacaatatcagctttgagtgcaactctaagtattctcttttgatacaatcatggctttaatattgttcagataatgtccttacgttcaacaatttcattatatacaatttctaccacgagaagtactgaagactaaaaagactggaattttagaaatgcctaacataaaagccaaatattgtttatattgatgtataatcatgctttctaacaaatgcctctcctacagatacaaaaaagaagggtaataaaataggtgtaattattggagtcgtgattggtgcaacagttttaggactagcaatacttgctacactctgtgtgtggaggcacaaaaggagaaaagtatcactagagcagcaagagctctacaatattgttcgaatacctaatgtattctgttacacttatggtgaactaaggaccgctactgaaaattttagttctgctaatcttcttggtgaagggggatatggatcagtttataagaaaaattcaccttctggcagggtaaattagttgatggcagtgtggtggcaattaaacaactatctgaaacatctcgccaagggaagaaggaattcgtagctgaaatagaaactatttcccgagtgcagcaccgtaatcttgtgaagttgtttggtttttgccttgagggaaataaaccacttttggtttatgagtacatggagagtggaagccttgataaagcattgtttggaaatggaagattgaacttgaattggtcaacacgatataaaatatgcttggggattgcaagaggcttagcttatctccacgaagagtctagcatccgcattgtgcatagggacataaaggccagcaatgtattacttgatgccactttgaaccctaagatttcggatttcgggctcgccaaactttatgacgataaaaagacacatgttagcacaaaagttgctggtacattattattgctggaaggccgaactatgatggtaagcttgaccaagacatggcttatcttttagaatgggtctggcaactttacgaggaagaccatccgctggacattgcggatcccaagctcacagaattcgatagtgtcgagttgctccgtgccatccgcatcgccctcctctgcatccagagctcacctcgtcaaaggccatccatgtcgagagtggtgtcaatgctcacaggagacagcgaggcgcctgaggcagtgtccaagcctagctatgttgccgaatggcagagcaacactgaagggacgtcaagctcagtgtccacagcagaggctgtgtccgtggctccattcctaaaccccgttgtggacgatggccggtgatgatggccatcgctaagatcatcttatgtcaagcactcaagccacagattgttttcttggagatccacctttaaaggccccattatttaggttgaatgtggatgacagatttatgttgttgactggatgagatgtcctagggtttcctcacgttgtagaatacaactctcacaagtataagaatctaggaacatattccttcgatgtaacatacctcttttgtttaatctgttttgtaagagaaaccagaagaacaccttgtatttcggttgatattttgaaacccacagccaattgaatgctgggtgtgtaggcatatatatgaccaataggttgattgtaagctttactacaatagtggggcggtctcgaagtatattgccagatatgttgcagttcattttctaacacgag

SEQ ID NO: 35950 - DNA, 1803 bp, Zea Mays
gtgcccatgtctttgttaggcccttcgccaggtcttaactgggcactttactggcgacgagcacccaccaggtgtgccaaccccgtttcttcccttcctgctgtgcgaaactgaggccgtgtttggggcgactctgtggctccggtgctggaggtgccggcggagccggagcaggagcgcaaccaaacaggccctcagcaccaaatcctaactcagggggtgtttggtttctagggactaatgtttagtccctacattttattccattttagtttcaaatttgtcaaatatagaaactaaaactttattttagtttctatatttagcaatttataaactaaaaaagaataaaatgaagggactaaacattagtccctaaaaaccaaacacccccttaagcttgtaagtgtatgcattattatgcctactgagcatctccaagagtttccaaaaactaatcctgatcttgagtttttttggtaagattgaaaataactgctctcaactcccaatcttgggaaaatggattcaattcaacgtgtaggtggatgtgggaagggaataagcaggacagggttcccaatgcaaatgtaaagagagaaaggaagtacaaaagcgtgatgatgtttaccttttccaattgcatgccattgagcaattaaagcagccgggggtcatttggatatgtgtgacaaccagcgcagtgccatttacattaggatggtaaattgtgcatcaagagaagatagggcttgatttctatgattgagcaaagctggtgatcgatctgtcagtttcggaattggagagctaatgcgtagacatccatgaggttacagtgtcttatcaatcagaggttggggccatcacctggtcatggacattcctctgagatttatggccctggagatggagtaggtggatgccatctatcttgctgttcttatggtggacaccgtggtaaatatcatgcttgccacaaccattcatcggaatgggccaggcacaacatttcacctgaacctggtcctatcagatcttactggataacgaaaaggacttcctccgatcatgtttctcattgtgcaaaaggatctgacagacagatacgcccagcaggaggttataggaagaattattctgctaaccaggggagtggcagtcagaacagaccgtatcatgatgatagctatctaccaactaaattcctggatgaccattttcctgagatagatgctgcaaaacatcagtcttacttatgcgattttcaatcttcaaattttcatgattgctttgatagcagtcagaaattcagaaatgcttataatgacaaggtagtaaaaaggaaatttataaaacaagatttccttggaaacacttacaatggtgcttgtgttggtaaatatgatagaaacagttgcaggaaaaggaatgcatatcattttggtggagagaaaaccaggaagaatgacacaaataaggacaggtctaaaaggcttcgctgcccccttgagcaggaccaacggcaacaggttgagtgcaacgagatgagaaatgatagtcgggagggaaatgttgaaatgaccaggttagtgtgtcaagatggagcaaaacggaacttcaaccaaaagaagaatgctacagctcctgcttctagtgactcaacaaagtgtgatgggaaaaatatattaagtcccaagtgcagcaaaactattgcttcatcacacacaccaaatttgagcgaaggaagtaatgacatggatccaaaatctgacaactacgttgatggttgcactgaaagag

SEQ ID NO: 35951 - DNA, 1625 bp, Zea Mays
atccaattttgggtccgcagaacctcctcctctcgctccgccgccgccttcccctcgcccaccacgctttggtcccaaacccacggtcgctcatcctggacctccacgccatcgaggcagtgaagctgggctcattcgtgcaatcgtgctcaagtctggcatcaactcccccatctaccgggacctccacgcgctcgtctcccacccacgcctgctctccgttgttgcctcgctcctccatatgcccggcctcgtctgcaacgtcccctacacagcgctcccgtcgtcgtcctctgcgtcgaccgctccatccccatgctcatgcgccgcaaggaggccaagccttacgacatgattggtgagaccagaggagcacgagcgcaacctccgtcacccctaagatctcctcaccattgtggccatcctgcaagatcagtactcattatctattaagaaggttacggttagcttggtgtgtaagtgtgttggacaaatgaggtcccgtttttttactggatttatttgccttttcttttctgttttggatatttgaagtcttatttactagctattaatacattgtttttaagtcatcggccttgcaagcattgcctctttctttaaaattatctgatgactggtgaattctgttttgatcttttagattattggcattgaccttttatctcaaacgctgcgacccgtcattgttgaacttgcagaggataggcactggagagtttgacttgcgatatttgagtacatcccattgctggcgctccgagtatctgctgtttctgcaaagaggtcgtcttgactgatcgcaatgatgaagttctggaggcaagtgttgttgttatgatgaaggcagacccaagtattgaaagggatgatctgattttgctctaggagattgccatgtacatgcttcttgcatgtggagctgtctatgtgatcttgataagaaagatttgtggatgttgacccaacaggaaattgctactgaggtgcaaagtgaatccaagtgaaagtaattaggggagttagctatgtcaaatggaaagagagtggttgctaaaggataggaagctgaagctggatgaaggaagcaactacatgcaaccgatggcaataatgcattgcagggttgaggctcgttagaaatgtcaagttggtcccggacgtgggtatggtgcccgcaaggccgacagagctgagatcaagcactgagatcgtgccctcgtgcctacggctgcatgtcacacctggccagaggcataggctaccactactgttctaagaggacaacctgctcgatagctagcctaggatggccttcagttccagcaaggcttgtcggctcgtctcactgcagaacgctattgttggcgcctaattgaacgaagttgataccggtaggatcccatgaagcaacataagcagcagaagtctgacgaggaatgacatagatgcagtgctttcgtttgttgctactgaaaaaagatctgaaccaagtatttctgtaagtataccaacaagttagttgctactactttgtatattgatcttcgttggccgaatgtttgagtttttttcaaggcacaaacactttattttgagatcta

SEQ ID NO: 35952 - DNA, 2290 bp, Zea Mays
cctgcctcggttcttcctccccgtcccatcgtgctgtagaagttgcccgctgccgtctcctgtcctgactcctccatgtctctcacttccctcacttctcggctttgacctcggctcgcaatgaactctctcctgcgtccgccgctgccgggcccgacgccgagcctgagcgcgagacgcatggtctcgccgccgccagcgccggtgcgggtcagctcggcggcgctggccggcagcgggcgcagatgccggctggggctggcagtggcggcgtcggcggctccgtcgtggatggaggaggccggggtggccgtgctggaggaaggcgggcggaggaacccgtctgtgtcggactcgtaccgccctgctgggctgccgcggcccaacgccacggtgctggaggcgcaggcgcgggtgtgcacgggccccgcacagacgcgcccgctcggggaggagcaggccatgcgcgtcctcgacactatcctccgctccgcaatgggagaactcaaagaggagccagtctctagtgcacagttaggtgcattctttgcaggcatgacaataagatccaactcgtttccagaggccacacagtggagcgagggtgaacggcgtgccatgagcatattttggccacgccttgtacaaattcttcctccggaggtgaagtttatagcagaccctgaagggacgatcatgggtgcaaatggtttaacagggcctcggtatgttggtcaaggaactggagagatgagactagtcggtgctctgagggaagtgcttgctggtggccatttaggctatgaggaggttcaatgtgtgctaaaggatattttaccaattggaccgagttcagatttgacagtgactagtgaagcattgctggcagcatttttgattggacaacggatgaatagagaaactgatcgtgagctcaaagcgtattgcctagcctttgatgatgaactaggtcctcctctggttgctgacgtcaagtccttgacacactatggtgaaccatatgatggcaatacacggttttttagaagtactctatttgttgcagcggttcgagcctgctatagtgaatcatgcctcctccatggtgttcaatggatgccacccaaggttttcagggtggaataacagaaggacaaatgcttaaattcatgggcgcaaacatacacttatctccaacacaagccaagatactgttggaggatgagactgctggttttgcatatttgaatcttcaggaagcatgtccaccattatattcaattattgggctcagggagcatattaagaaacggccaccattggctacctctgagaaagttcaacaatttgtgagggcacgggggagagaatcaatggttgcaggattttatcacgaaggctatgaagatccattgcttatgctgatgagaaggagaactgttcatgctggactagttgtgaagggtgaggaaggtgcgctttccttgacaaccaaggaaagatcagcccatgcatcaaaaggactccctgttaaccactgttcagggtttcggacaccaagcggcataaatttctctgagactgatggtattcctagagaaagcttcagggtcattgtgaatgcccaggaacttggttttgaatccactgaaactccaagaactgatagatcaattctaaggaacttggagcttggtctggcagcactaggtggcgaaaaaggagcagcgtatgaccgaatcgttcttaacgcggctatggctgaccacttactaggctgcagcggagctgaggatatcgacgctgcacttgaccgagcgagggaagccattggtagcggtgaagctctgagaaggctcatgagttacataaagatctcgcacaaagtgtcctagtgttgacccgtgagtctgtgaccatgtactgactgtacaattttggcgtgagtcacgactggatatcttcttcgcgttgtctgagtgccttccccactcaatgttacaaagccaccatgaaaaagtatactcccttgccctcaaggacatgtccaaaaaaaacagttgaaaggaaacaatgccttgttggcaaggaatgtgtttttataagatttttgttttgcaccgagagacacgtacagattctcctcttgagatgtccgaatctggttattgtggctattgtgaatactctgcatagcctcatcgtcaatcgtcatccaggttgagaacttgtaaaccgtatttgattttgtttatgaatgtatgtgctcttctttatgttgtgtatcgtg

SEQ ID NO: 35953 - DNA, 306 bp, Zea Mays
caaaaccctcttgaacactaagaggtggatctcttttagggggagtcttgtttagtcaaaggaagagcatttgaaacagggggagaaaatttcaaatcttgaaaatgcttttgcaaactcttattcatttacctttgactatttgcaaaagatctttgaaatggatttacaaaaggatttgcaaaaacaaaacatgtggtgcaaacgtggtccaaaatgttaaataagaaagaaacattccatgcatatcttgtaagtagttttattggctcaattccaagcaacttttacacttacattatgcaa

SEQ ID NO: 35954 - DNA, 1824 bp, Zea Mays
ctttttataataacgaatttcttttcttagcctccatttggtcgaagcgcacacgtgccgtttcataatggcaaatttctcgtccccagcaaagtccctccattcggtctcatctcccatctctcttctctctctcccgcgacatcagcggcggcgcagcggtggggtggggggacggcattgcgagctcacagtctcacaccacccgccgcgtggtgattccgagaggttgctgtgccgctggctatgtagtgatgtggaccgtgatctcgacggctatccgcggctgagcgggcggcggcgatgaacgaagcgagcgccagcgctggcgtcgggaccggctctggcggggaggtgccgctggtatacaaggcctggaaggggaacaatgtgtttttactgaaggggagattcatatttggtcctgatgcaagatccttgtttgtcaccatgttccttattgttgcgccagtatcaatcttctgtccattagttgcgaaggaattgatggataaattctcttatggtctgggattaccggttatgattgcagcagttctattcacagcatatgatctgagtcttctgcttctaacttctgggagagatccggggatcatacctcgcaatgcacatcctccagaacctgaagggtttgatgacaatgcagaggcctcctcgttgctcccattgctctatctgcaacaactgcgtggagcgttttgaccatcactgcccatgggttggacaatgcatagggcttaggaattacaggttcttctacatgtttgtattctcaacaactctgctctgcctgtacgtctttgggttctgctgggtgttcgttgttaagatcagaaatgcagaacagataacaatttggaaggcaatgacaaagacccctgcatctgttgctttaatcatctacacattcattgcggtttggtttgttggtggcctctctgtgttccatttgtatctcatgagcacaaatcagacaacatatgagaacttcaggtatcgctatgatcaacgagccaacccatacaacaggggaatcatggtaaacatcaaacagatcttatttaccacgatccctccttccaagaacaacttctgtggtagggtccaacaggagcatggtctaaggcctcgtccaacaaatggtttcatgagtccaaacatggggagagctgttggtgacatcgagatgggtagaaaaccagtggcttgggatgagcctaggatggcagctgagattggtgatttaggagcaggtctgagcaacctgctggaggacaaggatggcaggtttcgtagcgcatctccagatctcagccgcgacgcccttgcagttggaggaggcttagaagaggaaggctcctcggcgatgaacgctgggcgttcaagctggggagttgaagcaggtcgatgatggcattgaccgtgtaagcggctgtagtgagacgctctgggttgttagtgccagttcgctgctaatctgttgttttgtttgagatttgaggtcactaatgttattagactcatgacctgtatggcggttgtttctggactttcttttcttctttctcttaatttgagatgtctttcgtgtctattatttgaaccagttggtttgtgacgtctcccggtttggcaagttatgttttgtctgtatataatcggacagtaagcctaaaataggatccagctgcttggatttggatggtaatggttgtgaataatgccctaccttttgcattgcagtaactgaacattgctcggtcttggtgcccatgtcaagattaatttattgctttttcg

SEQ ID NO: 35955 - DNA, 3456 bp, Zea Mays
gttcgctcgctgttcgccccccagccgccaccgccagttcttccattcctccgcgctctttgagccttcgtctcccagtctcctcaactcagcaacccgcgctcccgccgcatctattcatggcggagccgacccccaagtcgaagcgcaccaagaaagcgaagaagccctcggcccgggaaggtgatggagaggacatggatacgctcaagtctgacgtcgccacattcgcctcctccctcggcctcctccctggcgctggcgactccaacggcggcttcgatgactccgacttccgcaagtccggccccatgtataaatcctcaaaatttccttccaaacaaccccatcaaaaacctgataacacggcaaacccccatctaaaccctagacctaccaagaagccacaccctctcgagctacgtgactcctatgctgccaccaaacctggtgctgtcaacactaattaccccctgatgaaggcggcagcactctcagggcagtggtacactgatgctgatgagctggaggcgagggtcctaggcggtcgtaagcaggtgcctccagctgtggggcttcaggagatgcagggaatagtggagagaaaacgagagctggcagagaagctcatgttgcagtatgcgagggaatacgatgccgtgaggcgagggcatggtgacctgaagctcctggacatatcagcaaagtctggtacatcagctgacaaggtgtcagcatttacatgtcttgtcgaggacaatccaattgcaaacatgaaggcactcgattccctccttggtatgataacatcaaaagttggtaagaggtatgcgttcacaggattcgatgcaattaaggagttatttctcatgaggttattgcctgaccgtaagctgaaaagtcttatccaacgcccgctagacattttacctgaaacaaaagatgggtactcacttctgctcttctggcattgggaggactgcttaaaacagagatacgaaaggtttgttatggcattggaggatgcggtaaaagatatgctgccaaatcttaaggacaaagcaatgaagacagttttcatgcttttgaaaagtaagtcagaacaggaacgtcgtttgctcacagctcttgttaacaaacttggtgatcctgaaaggagagcagcatcaagtgctgcatatctgttaacatgtctcttggctgctcaccctaatatgaagatggtggtgatagatgaggtggattcttttctcttcagaccacatgttggacttagggccaagtaccaggctgtcaatttcttgagccagattcttcttacaaacaagggagatgggcctaaaattgcaaaacggttggtggatgtctacattgcacttttcaaggtactaatgagctctggtgataccaaaggagatacatatagcaaggacagcaagaaaaaggtaggaaaaatagagggaggaaataacaagatggactccagatccaagggaaacaatgaagtgggttcaacagcaggatcagatttggagctggactccagaatcctttctgcgcttttaactggtgtaaatagggcattaccatatgttgcaagctcagaagttgacgatattgtggaagtgcagacacctattcttttcagattggcattgatgcttttgttccaaatatctataaagaataatatagcaagtgatcgtttgtaccgtgcattatactcaaaactcttgagtccttctgctgttacttcctcaaagccagagttatttcttgggctgttggtgaaagcgatgaagaatgatgtaatgttgaagagagttgctgctttctcaaagcggctgctgcaggtggctcttcaacggcctcctcaatatgcttgcggatgccttttcattctgtcagaagtccttaaggcaaagccaccattatgggggattgtgctccagaatgaatctgttgatgatggtgatgaacactttgaagacattttagagattcccgaggactcttctgttgcctcagcagtgctacataaacataatgaaaaagtagctgcacatgagaaacacaaccttgatgctgctgatggaattgatagtgtaaaacaagtaaatttggtagatgagaacaatgcatcaactgactcgtccagacaacatgcattctatgatccacgacacagagagccttcttactgcaatgcagatcgtgtcagttggtgggagttaacagtattggcttcacatgtgcacccttcagtttctactatggctagaacattgctatctggcaacaatattgtttacagtggtgatccgctgacagacctatcacttcctgctttccttgacaaattcatggaaaagaaaccaaaagggaaccgcatagctgaaggaagatggcatggtggatcacaaattgctccggctaaaaagcttaatctgaatcatcatctcatcggagaggagcttctagaattggcagaaaatgaagtgcctcctgaagatattgttttccaccgtttctatttgaacaagaccggcactgttaagcgtaagacaaagcagaaggactcagttcttgatgaagatgcgggggaactcttagctgataatgacgctgatgaggctagtgacgagagtggagatgagatactggatctgggagatgggttggcagatgatggagaatatgactatgacgaccttgactcaaatgcatttgaagaggaaaaagatttacttagagatgacagtgatgtggaatttgatgacgtttcagatgatactgcatctggggatgaagggtcagaaaatgacgatgacattcctattctcgcgggcgattcagatggcaacttaagtgatgacgagatggttgatgctggtaagggcggtgtctcttacacaaagaaaaggagggcagggaagaagagtgggttgtctccatttgcaagcctggatgattatgagcacctaatggttggggatgctgatgcaacaacagcaaagcggaagcacatggcaacagggagagctggtggtgagaagaaaccaaagttgagaccacgaaagaaaaggtcgcggagttcagaatgagaaacatgccttttacccttaactcttttaaaatgttcaccacaatggtgttcattacatttttgtacttctggaaggcacaggattgggtaacgctattgttgagccgagaatgtattgagattagattatacaggtgctctcatatagtagtccttatcccacacaacgcatttatacgggctaagtttaagaccaactcaaagagttgtttttcttattgagtcaaattttagattttctgagtaagaaattattctccaacaggtattctatctagagttgtagattagctagcaaaggcatatcgtcctttccacttgctaagccagtcctaattttcctgtctcag

SEQ ID NO: 35956 - DNA, 1791 bp, Zea Mays
cggttctaccgtcaacgcgccgcggattccccgccctcctccccgtctgctccccgccatcaacgcgcacgcgacctctgctctccgccatcaacgctcactgcatgcctcaccctctccccgccatcaacgcgccgcagatcccccaccctctccccgccatcaacgcgcaagcggatgccacggatccgcctatccgccataaacgccgatccatagatccacgctcgccctgcctcctacgacaccaaccgaaccctcaacctctcctacgacaccttctccagcccgctccccgacgacatcgagcgcctggctttcacagcggcgggacatggaggatgaacgagcaccgggagagagtcggttagatctaaatttccgtggaggtgagcttggacgaggtcaggttcaaacaggcatatctctgaacaccttgggttctctaggctatgagatagatcatggatcgagatggagaatagcagtgtgtcattctaaactgggtgatcagccgaaaagatcccatggataatcattaatgattatgtgccaggttgtttctaatttaacagagggagggaaccaacaaaggcactccatgggggaatggttgtggccaggtttgttaatggtgttgcggctgcaagcgtcgtgtggcatctgtcgcgaccaagcattacgagacagtctcctccagcgctttgcactgctcctatcaaggtcactcttattggcagtctagaaatgccaaaggatgacatatggcttgtcacagctatcctatctggtctcattgaataatgtgcgaagatataagtcactggctatcaatttctgtgaatcagatctttcttggcctcctatcttcgcctccagctgggatgagtctgtctcattacgatggggtgatcttgggctttctgtttcacatatcttcaggcctgtgcctggatgctgtaccatgcttggtcctatgaatattgaagtaaagcaacggaaagttgtagctgttggtaggaaacggactgcacggccaacagaaaatacctgtcctgaagagcttgctgagtcttcagaggaagtaaagacagacactgacaggaatgtcttagttatgtttgatatcctcaggcgaaagaagagcgcaaaattggaaaaccttgtgttgaataggctttcatttgcccaaacagttgaaaatgtttttgcactatctttcttagtgaaagatggtagggtggaaataactgtagatgatagcgggcatatagtacggccaaggaatgcacctgctgctagcgctatagcctcaggagaagtctcatacagtcattttgtttttagatttgacttgaaggactggaagcttatgaaagaagttgttacagagggagaagagctgttgccacataggacttcccagagcaatctttgcaacgaagaaaacgaccaaccaaatctggaggtacgtgcacaaataatgcctatcaggaagaagagctcgtgcttatctgaacttccagttgtgccagcggagtagggctgtaattataaattgtttgaagttctggtcacatcttgcaactacagaatggtgtttgtagggctgagtgtaactagctagcttggctcgtgttgggtcattaagggtgtgtttggttggatgtatatggagggatggaaagggacgaccacatattctatagtgtttggattagagtcgcgtggggcgagataaacatcggagtaattttttggtggcggtgtgattcaaaaatttgactactt

SEQ ID NO: 35957 - DNA, 3402 bp, Zea Mays
aaaacccttctctacgcgtctcggtgcctcgccggctcgccgctcgcaatcgccggttcgccgtcgccatttgtccccttcccccccctcgcgaccgcccgcttcgagtgtcccccaaacaaaaaatccctcccgcctgcacggccctcgctggacgcggagcatggcggaggagcagatcgaagaggcgtccatggccgcggcggcggccacgccgttccagctccagttcgacaagcccatcccgttccagataaaaatggcagaatggaatccagagaaggatctgcttgctatggttactgatgactccaaggttctcctccatcgcttcaattggcaaaggctttggacaatctctccagggaagtgcatcacatcaatttgttggagccctgatggtaaaataatagcacttggcacagaagatggtttgattcttttgcatgatgtggagaatgggaagatgctaagaactacaaaatcccacgatgttgccattgtatctttgaattgggcagaagacgatccactgtcaaagtctgacaaggatgagtttttatcctatgaagaccgcaccacacgtttctttcctcctcctcctgtgatgcctaggataggtggactacgttctggagatactggtcttgcggatgagaacgaagaagctattccagaattttctagtgcttcctgtcagcgttttaacattctgtgcagtggtggcaaagatggttgtgtttgcttcagcgtttttggaatatttcctgttggaaagatagtaagtaaatacagtaactcacttgtccataatttgaactcaacaaaaaatagtctgtcatgcatgctctctcctgcttcagcatttcctgttattggttctggggacctttctaccctaacagctcctctggaaatctgttctacacagaaatattttgtgaagttaatatgctcatttaaacagagcaaatagaagttgagcactagccttttaggcttggctattgttattggtggtagacccacagtacatctgttttccgcagaatcaacaaactctaggtgtcatctgtgtatctgaacatgtacaattcatcttttccatgtattgactagctgctggtgtaatatgagagaagtttcagatattttatgcatttgcatatttatttactttcctgtgtaatctcacgcgttgaacttatgggcatttcagcaacctttgccaacttttttgtgtcattttgtatttgttctttgtccagttcaatgctctatgaaccagtagctttatgcctttgaaatttcagaacataactaaaatcccaatcaatgttggatcctctagaaagagttaccaactccaggatgcttcagtcagcaaggtctctttatcaagaaacctccagaaatttgttattctgtgctttggaaagttggttgataccgacaacctctctgacagctgcgaaaattctggattacattgtctctacctagatacttctatcttcttcaaccggtgtcccaacaagcatcaagtattcaagatatggttgaagttgtccgtgcttctgtatctttaatatccaaacaatggtcaaacgccatgagtttattccatgagaaatttagtgccttgcccaatctgatatctacacatggagtggaatctagttctgaggatgagtttcttagccttttgtttgggacacgaacaagtccagcccttcaccattttttagctagttcacttggtgaagcgggtctcaagaggatagccaaggctgttgacagtgctggaagagatattcgtggcattatcactgagcatcttcagcctgcagtggagattatttcattcagactcgcagaattaagaggcctttcaagatggcgttcacgatttcaaactatcgggttagatggaaaccttattgatggtgtaactgagagtatagggatgctagttgttcaagtggagcgcttttcaagggtggcagccactgttgtttatctgggatactgcaagacatgtagaacagctagtagtttttggaggatttacagacacccaatttttggaaaagagtttggtaaatcaattcaatgaattggaagatagcttgaaggaggctttcttgatgccatttactgctatctcttcgcagatacaatgtcaaggattgcttcctttatatcctgttacatcatcagctaccttgtcatcatcctgctcgccaacatcaatatcattttataaggatgaagattcatcgcatgaggaatcctcctatagcttgactgactatgtatgcttgaagatacctgatggatcattaaataaagtaaattgcatcggtgtgataaagggctctggtaactgttgtactaccctcagcatgatgtcactttcaggttttctgttgcatatacctgacggatatgagtgtgttgacctgtcactttataaggacaaccaggtagttttactactgagtgaaacgtcttgttctgatagccctggaaaatcttggatggtgatgctgcaaatagagaacttttcctttatgccactctcaggaacattccctgcaaatatttacagtttgcaaaaactggtggcactcgatctgcaattggacacagattatgggaaagttcgtagcatacctcacaccgtatctactccatttgcagttagtgcatcgagaggagtagcctgtgtcttttcatcccggaggcatgccttggtttatatccttgatgaggatgaggaagcggagggggatgaaacttccgatatggagtgattattatccgattccttcaccttcggctcagccatttcagcttcaggcttcagcattgtcttatgtcttgttgcaatggaggcagaggcccggagatatcaatatgtacggaaacgtcgtctcattttcacggcaatgcatgcccgggttcagaagctacgtcgcgtggtaacagcctaacaggtcaccacgcacgcgcagccgcttttagagctcatgaaattgtcagtcgtcaccctgatgtgtgtaggccctgcaggttggacttcatcgtggttatttggaaagcgagcaaaattgtacacccatttctgatcgtgttgtgttatacgagtgcttgctagttgtgtaaaaaatctagaggtaacgtcaacgtgcaaaaaaaaagggtctgtcgcaaatcttgacggtcactagagctatcgcatttctaatcgtgtttgtgttatgtggattcattattttattgttcgagctgctaatgtacttggtaaaatacattgttgactgaactcgtgttgcgccttcaactcatgtttcctttcatcaaaccataggcatatctaagaacaagaaaacatgcctc

SEQ ID NO: 35958 - DNA, 3224 bp, Zea Mays
caggtgcagcagcggcagcgccgcgctcattccggcgcagcacgcgacacgcggcttctgcctcgcctccacggctgcagcccgcgccgcccaccccaggcgcgcgcgcacgcaaacggcaacgcgtgctcacgcatcctcctcctcccgccgctgaagtggagtagccgagtagcaaactacggcacacggccatgagcttgcacgccgcgcgcggcgggccgcacgaggatctgagctggagcgccatcgggcggcgggcaccccgtgacgtggtgacattcggtgatcgagaaggaggcggcgggatgaggagtgcgcagcaggggccgggggcggtgcgggtggacgaggcgtcgtccgcgtccaccttccgtgagctcgacgaggccttcctgcagacacaaacaaagatctggcttggagaagttctacatcttaggtttggtgaagacgctttagttgctgatcttcttgctgacggagaattactatagttttggctctttgcaagtgtctacttgcttgagcattatgatgtcaatcaatcagataaaagaatgcctaggataaatggtttgtgaaagaatagaactgttttatgattaattgtgtgcttctctctctgatatttactgtattctgctgacttgttatgtttgtgctattaggtttcaagtttccaaggtattatggaaaatgttactaaaaaataacagagaacaattgaaacaatcaaaagtgtatatttatgagagactatccttcggtagaagtagtggaaaatacatgccctattcaaaagttgactcctttctaaagatatgtcaaatccttgggttagctggaattgatctgtttaccccttctgatgtggtcgaaaaaagaaatgttcggaaagtctgtatatgcatacgatcggtgtctaaaaagtcactcatcttgcacctaaatgtgcctgattttgatgtagtcacctacacaatatccatgccaaactatgttgttggaggtattcgtagaaatctggagcagacacagtacagctcatccagttcaagtggatacagtccatgtgcccgttctaaagtactacagcaacagataatatttggagggcagaatgaccagcacgaggacacacattatgactctgatgaagcagaaagcaaactctctcttctagaacctgaggactcagttaatgaagataattttgcggctgtgctttcacaatttaacgatgcccatgcccccaacaaagaaagcgaaggctatggagaaagtggacgtggcaagcatggagaaaaatctctagctgaatcagtgggatcacttaacattggcattattgattctgagttcatggattcaagtcctctaattcatgataaagaatcatgttttcctctagaacctgagggctccgttaatgaagataattttacagctgtgctttcacaatttaacgatgcccccaacaaagaaagtgaaggctatggagaaagtggatgtggtaagcatggagaaaaatctctagttgaatcagtgggatcacttaacattggcattgttgattctgagttcatggattcaagtcctctaattcatgataaagaatcatgttctcctctagaacctgaggactccgttaatgaagataattttacagctgtgctttcacaatttaacgatgcccccaacaaagaaagtgaagcctatggagaaagtggatgtggtaagcatggagaaaactctctagatgaatcagtgggatcacttaacattggcgttattgattctgagttcatggattcaagtcctctaattcatgataaagaatcatgttctcctctagaacctgaggactccgttaatgaagataattttgcagctgtgctttcacaatatagcgatggccccaacgaaggaaatgaaggatatggagaaagtggacattacaagcatgaagaaaagtctctagatgaatcagtgggatcactaaccattggcattattgattctgagttcatggattcaagtcgtccaattcatgataaagaatcatgttctactggttctgcagctgaccaatgttcaaggactataccggctaaatatgaattaagttcagaagagtcagattccacaggcagtcatttggtgtttgacagtggcaagaattatctggagttgaacaatcattctgtcacagatttggaaaggatttacaatggacatgccacgtctgtagatcaatatgttcggggaaatggggagacattagctgaccatccaaaaaaagaggaagctggcctccaaaaggacactggcaccatagctcaacatcgtgatacccttgcttgtgatggggagtctgtgtgttcgagttgtgaagagccgagacgtggattaaatggcgagccatcagacttcagctcggagtcacactcgagactgaccccaacacataacacaggtggcaaattgtcgatggtttctgaacatccagtgcataatatggagtcagatatgactgggatggcaagtgatagcactaacccggagctgaatcctgaagccagcaccaggaacgaaatggacggctcccgatccactgataacccagtggaaccagaaaacgtagctcaggacagcgccactcgaggaaggcctgaaggcgacgcccccagatcagggaaaggggttctgaggtcggtcgctggaggaatcacccttgtcggcgcagtgttcttcatgttccatctcagaagaagcaaggggggaagctttgcgacggtcataccatctctttcgggaaaatctgctcggagcaacgcaagggccaggaacatgggcagagaaaacgtccctgatgcgtatcccggggggcggctgaaggcttgacaagacgatggagcacagtctgcttcacagaatctggatgaactctgtcgacccaccagtcaagttgaagtcagtaccctgccttctttcatgtacagaacgacataatcatatgatttaggtgatcgattacagcaaatagtgggacagattttgtacaagtatagttgaggcatgaataaagtctagtttccaacctccaacgtttaaacctagacggtggttgaaaaccagaacggcgttgtgtttaagtcatcactaccctttcatcagtgggattatccacagaccacagatataatttatagagacagaat

SEQ ID NO: 35959 - DNA, 1678 bp, Zea Mays
cagctgtccagctccctgctccaccactagtggacctgctctatagtggatctaggtggaggtcgaagcgcttgtgatccaagggcccaagctgggcaccgtgctcagccaggtgaagaagctggaggcctccgtgctggtgctcagccagtgcaggccatctccctgctggttaagctggtaaggcactccgcaccccgtaccccttctcctatcttatccgctctgcatttgtctcggaaatgtgaagctctcagaggtcaactatggaccagtaaaattggggtgagggaatctctcatgatgccaatccatagcgtttcgtttaaaaatggaaaacgaagcttagacttcagaactagtaatttacatgtctgcaattccagcagaatattcgactagtatcagatttagcttatcctctcaggtaaacaatcctaaaagcaataggtcaaggctcaggagtgagctgattggcacttatttagttgcgtttgcgtctcaatgtatactttctgtaagataaatcaggtaaaaaatgtaattatgagagggcctactcgcaagtggtggccaaactatttgtaaagaatcctcgctcgccaccgttcagtactagggtccatggctttgggtgaaaataacgcctttaggatgcagctccatgtgcaatccataaatccaagatgccatgcatgtccttctagatacatctctcccaaacaaaagcaagaaccacgcacacagatgccagcgagatacgagtacagtacactttttgctgcaatgtgacatcacatgtggaggggcagctgaacctctctaggttggataggattattagggcaaatgtagtaagtactcttcacatcagtgtctgataaccagccgttgtttgagcaaattccaatgctgtgaccctttctttttgcagcttcctgcggagcagcggcgaggagtttgtggagcagtgcatcaaccaggcggagtgcctgacgctggcggtgaggaagcagagcaagggcgtcggtgggtacctcatcagcacccggtggcagaagaacttctggctcctggcctgacaaccatgcattttacctagctagttactactgctacatgatcacatttgttttaagtcactcccgtatatgtgctgtcatttcgtgtcatcaagtgcgtcacaagaaagaccatctctctctctccttcatcctgttgtaaagcgaaaagagcctccgaatctgaccacctttctacgaacctgtatcttccctgcaagtctttagcgtgcgtgtagtactgtgatctgcactgaacaatcatgtaatgctgcataaatgaccaattctgttgtacggcgcttcttgcttgctgcaattgacacttgaggctgtacagcttgcggattacgctaccggatgaaacctgattgcttaaccacgagggaagagctacgcaaattcaggataacaacatcggcaaggccaaggcgacgtttcggatgccgaaggtcgaaattggaaagcaatcaaggcgactcacactcaagcttgggtgcgagaaggaagtcttgagttatttctagaagtaaaataatgttcaggtcctgctccgccaaaataatgttctggtcctgcagccgtccctataataaatacttcatccgtttcaattt

SEQ ID NO: 35960 - DNA, 1375 bp, Zea Mays
ggctgtttcagaattaatagcccccaagatttttttattccacgcccgtttctaaaaagggagagtatggccgccccagcgtcgccgtactgttcccagtaaagacggctactccttccctctccccccttctccccctccgtcttcttcccccaggggcatccgtgttttcactttttgctcccccacgttgaaccttgatcctcgtgctccctttcttgattctttctccgtaggatctcttgctaggagtagcctgccccgtgtgcgcgctcgcacggacatgcttgtttccgcgtcttgaaaggcgagaaaaagtggagatgggcgcttgcgcttcggtacacaaggacccggggcaccccaagaagcagtttcttgactctcccaccaaggcgaaggccgccaacgggaagggtggcgggggcggcggtgttgctccggttggtgatggcttcggtgatctcaagtccaaggtcgacgctgaggctgagcagctgcgggcagagtttaaccccaagaacccggattctggatttgacagcgaagtgtggtgttatcatcgcattaatcgcttctggagatcagttagctttctaggggtagcaaggatgaagtgttcttcgaatctcgagcctggttagattccgactgcgaggatgacttctacagcgtgaatggagatttcactccgtctcgtggcagcacacccgtctaccagcccagagcgcagacggtgatgagcagcatctttcagccagacacgcgcagttccaaatcaccggagccttctccgaccggacggaggaagctcgctgagctgctgcaggaggcaatgcaagacggtcccgaagaaagcgccgacgaggaggagcagcagcagcagtcgctatctgctgccgctgatgggaagccgccggtgtctgagtccacgtccagctccgcttgcagcaccgtgccgactccggtcgcagtcgccaagagccggaaggagaaggcgtggtacaccggacgctgttgcctgccgagctttgttcatagcctgaccttagacgagagtgagagggggcagaagatgagctctaggccatgtgctgtttgactgtggggctccagtgccctcctgagtcctgccctgagctgtatttagcgcgatatgttatctgaatgcccgattgggacgctgaagctactgtattgagagtactatatagtaatcaagtggataataggcactcgttaaatcctgtggagaccatgtgtatgtgtcgaccaatttgcgcgggtagagcatctacctcaaggaattgcccttccctgtgcatgtctaactgaatctttgaataaataaacacactgtataatttttcagatg

SEQ ID NO: 35961 - DNA, 1376 bp, Zea Mays
ccccgtgtccggtggttgcggctgcccgcatcatattcccaccttgcgaacgaggacgaactgctaccccctcgcctcgccctcgccgcctgctcctctccagttctcccccaccaaccgcagcagcgagagcgagactgagaatggccgcggcgccgtcgtccctcgtgtcctcccatctctcccgcctcgccgacctccgccgcgcggcggcgccggccactcccaccgtcccacagcagcttcgcgtcggcttctcgcgccgccgcgcccagcgcgtcgtcgccatggctggatccggcaagttcttcgtcggaggcaactggaagtgcaacggaacaaaggactccgttagcaagcttgtctctgaactgaatgctgctaccctcgaaactgatgtagatgttgtggtggctcctccattcatctatatcgatcaggtcaagaattcactaacgggtcgcattgaggtttctgctcagaatgtgtggattggaaaaggaggagcctacaccggagagatcagaacaactggtggacatcggttgtcaatgggttattcttggacactcagagcgtagacatattattggtgaaaatgacgagtttattgggaagaaggctgcatatgcattgagccaaaatgttaaggttattgcctgcataggagagcttctggaagagagggaagcagggaaaacttttgaagtatgttttgagcagatgaaggcttttgcagatagtatttcaaactgggccgatgttgtgattgcatatgagcctgtttgggctattggaaccggaaaagttgctactcctgagcaagcccaggaagttcatgctgctgtacgcgattggttgacgaccaacatatcacctgatgttgcctctagcacccgaataatctatggaggttctgtgaatgcagccaactgtgcagagctagcaaagaaagaggatatcgatggttttcttgttggtggtgcctccttgaaggccccggacttcgccaccattatcaactcagtgaccgccaagaaagttgcagcctgatggaccaccctgtgaagaaataagaggccatcaccgtgtcgcctcatctgccacgccttaaagcctgtaggaggcgtcacctcctgtttttgctgatttgcagcacggggacagaaaataatgttttgctctcgtggatctgcacgtgacgaggagagttcagttgtcgtgagcgatgtacgttgggaatattgttatgtggtccttttctaaagaaaaaaaaatgttgacagtcaaggagaaatgtaagcgtgtttttttttaacagagaagctacatcttactgtgactgtgagtgttccatcactcgattctttcctttt

SEQ ID NO: 35962 - DNA, 890 bp, Zea Mays
tttgagtaaggataatcatacgaaatgatttgctcgattgtcgataaggtttcctggttctggttccattgcttggatttactgcagaatttgaaactcgcctcagatttagatgattagctactttcgtcatcccatgcccgcggcccgcggggtgcggtaaaagcgtcgcaggcaatgatgcatcgcggattaagcaaattgctgtggtggcctgagggaatcaatgattcacagagatgggagataatttgcaagttgtctatcggcattgtgaaaggactggaccaccttcacacagcatcgcagaaaccaatcattcatggcaatctgaaaacaaataacattatgcttgacgctgatttccagcccaggatatcagacttcggcctctaccttctgctgaaccctgctgctgcgcaggagatgcttgagacatctgcaatgcagggttataaggctccagagctgatcaagattagggatggcaccagggagagtgatatctacagtttgggagtgattatgctcgagatgcttgctcagaaggaggccgcaaatgatgaatcgccaaatgcgcgtgacatccatttgccggtctctttcagagatctggttctcgagaggaagatatctgaagctttcagttccgagcttatcatacagagcaagaattctgggaaggagggcaatctgaatgcctactttgaattggcaacggcttgctgtaatccatcatcgtcattgagaccagatacaaagaaaatactaaaaaggcttgaagacatagcaagataacaatagatgcgcgcggcggttttgttaattgccatttgtcttgcctgaaggcgacagtatgcgatttcagtttccagccatcagacaactat

SEQ ID NO: 35963 - DNA, 2118 bp, Zea Mays
ttgcaggcttgcagctgagctgagagagtcaaaccctccggagtccggaaaacgggcacaaccacctctcctctgggtctcgtactctcgtcggtcccctctccggtccacactccctcgcgcccgctccactccactttcccttccccagtcggccagtccccatccccacccccagccccatgagccgccgccggtgaccagcaacatcccatgggctgcgtgcacggccgcccccccgcgtccagccccgaccacccaccgcagctgcccgagccgccggctcccgcggcgacgcaggaggccgccgggaaggccgagcagccggcggcgccagctgagaagccggcttggcgggagaggcgctcccgctcgtcgcgcaatgcccccgcccctagcttcgccaacagggcgcgcggggagcaggtcgccgccggctggcccgcctggctctccgccgtcgccggcgaggccattgacggatggaccccgcgccgcgccgactccttcgagaagattgacaagatcggccagggcacgtacagcaacgtgtacaaggcgcgcgacacggtgagcggcaagatcgtggcgctcaagaagcctctacctcgtcttcgagtacatggagcacgacctcgctggcctcgccgccagtcccgaaattaagttcaccgaaccacaggttaagtgctatatgcatcagctgctgtcgggtctggagcactgccacgaccggggggtgctgcaccgcgacatcaagggctcgaatctgctcctggacaacaatggcatgctgaagattgcagattttggtctcgcgtcgttcttcgacccagaccgtaaacagccgatgacgagccgggtggtgaccctatggtaccgcccacccgaactgcttctcggcgcaacggattacggggtgggtgtggacctgtggagtgcagggtgtatcctggccgagttgctcgctgggaggccaattatgccaggacgaacagaggtggaacagctacataaaatttttaagttgtgtggctccccaacagaagaatattggaaaaagtcgaagctacctcatgctacaatatttaagcctcagcagccgtacagaaagcgaataagagagacgtttaaggattttccacaatcagcactgcagttgatcgagacactacttgcaattgatccagcagatcgcttaacagcgtcttctgcattaagaagtgatttctttacaaccgaaccttttgcatgcgaaccgtcaagtcttccaaaatatcctccaagcaaagagatagatgtgaaacgaagagacgaagaagccagacgtttaagagctgctggtggtagagctaatggtgatggagccaagaagacgagaacacgtgatcgacctaaggcagttccagctccagaggcaaatgctgaacttcaagtaaatattgataaaagaaggtttattactcatgcaaatgctaagagcaagagcgaaaagttccctcccccacatcaagatggtgcggttggtgtccccttggatgcttcaaatcatatggatccactatacgaacctccggacccatcttccttcagcactgtgttcacttacgagaaaggcgctgtgcctacttggtctggaccattggttgatcctgctgcagtggtgaaccaaaagggcaagcacaagtccgggcgctcatcgaaacagccggccactgcccgtgctcggtaagatcctaaggatcgatatttacaggtaaaaaataaggagacttcaacatggtgggaaaatactccatggcggcacctgcacgctgttttgcaaacgaggcatgcaatgataaagtagtttgttggttacctgttgtcatgtgagtgatttttttttctagacttcgtgtataggctggggagggagttgaagtagttacttctgtacattaggttttctttcctgctctttaagcagctggtgatgttagattcatttgaatggaagcttagatctctagtgttcccgccactacacccccttccattgtaacagtgtgttccctgcataatcagttcttatcaattcaattgaaatcgtaagttttggtgaagatttgatggatt

SEQ ID NO: 35964 - DNA, 2809 bp, Zea Mays
gtccggtccggtccctccctccctttgcttcagagcccagccacctcctccagtccggttcaggcattcagcctgggcggcggcggcggcggcgggccgtcttccactcttcctcctccttccagttccattaacaaattgcttgcctgcctgcctgcccccaaacaagccttgcttgcagccttgtccctgctcccctactcttttccatcacatcgcagtctctgtggacggaaagacaaacagtgccttgcttgtctctacctctcctggctcctaccttagcctcacctggcggtgaagaacaggaactgagcgatagccattggttggaggttggcctgccggtgccggcctgcatgactgctctccctgaccggctggccctgacgaaggggaacaatgagggatggcggcggcggcggcggcagcagcaagacgagcaagctgtcgtggtccaaaagcctcgtgaggaagtggttcaacatcaggggcaagtcccaggacttccatgccgatgctgcagcagttggaactgggagtgtgaggtcaggtcgaggggatggagattggatggatggcagcttcactaggagggactcctacggcgccaagaagagcagaacagagagggcgtcgcggaggagccacgagcggtcgcggcgcagcaagatcgacctcgatgccgccgaggccaccgtcatgctcgactacaggatctttgctgctacgtggaatgtaggtggccgcgcgccgccgggctcgctcagcctcgacgactggctccgcacctcgccgccggccgacatctacgtcctcgggttccaagaaatcgtcccgttgaacgccgggaacgtcctcggcgccgaggacaacggccccgcgaggaagtgggtgtcgctggtcaggcggacgctgaacagcctgccgggaagtagcggcagcgggagcctgcagacgccgtcgccggcgccgtacctggtggcggagatggacgcggacttcgagcggtcgacaacgcaaaacaacccgtccttcttccaccggcggtcgttccactctgggctcagccggagcatgcgggtggacggcgacctcctcgccggccctggccccggccccgccaggctcgagcgccggtacagcgtcaacgaccgcgtcatgtacggtagcaggcccagcgactacgaggccaactgccagtggggcgccggtcagttggtcgatgaggacgacggtggcggcggcgagtccccggtcacggtgttctctccgatgtcccacggatatggaaatgctcctccgcctatggaagaatgcaacgggtcagcccgtggccttgctaggtactgcctggttgcgagcaagcagatggttggactgttcctgatgatctgggctcggaaagagatgaagaacgacattaggaatctgaaggtgtcctgcgttgggaggggattaatgggctaccttggaaataagggctcaatctccatcagcatggctttgcaccaaacgagcttctgcttcgtctgcagccacctgacatctggtcagaaggacggcgacgagcaccgcaggaactccgatgttttggagatcctaaagaagaccagattccctagggtttgcggacagtacgagagatcgccggagaccatcctggagcacgatcggataatctggctcggggatctcaattaccggatcgcgctgtcctaccgatcggtgaaagcgctcgtggagatgcgtaactggaaagcgttgctggaaaaagaccagctaacgagggagcagagaggtgggcgcgtgtttcctggctggaacgaggggaggatctacttcccaccgacctataaatactccaacaactccgacaaatacgcgggagaagacatgaaccagaaggagaagaagcggactccagcatggtgcgaccgcatcttgtggtacgggagggggctcagccagctctcctacgtccgaggagagtcgcgcttctcggaccacagacctgtctacagcatgttcattgccgaggtggagtcgatcaaccacagccagatccagaagatgagttcttggagctcccagctggacatagaggaactgctgccgtactcgtatgggtacacggagatcgatcactatgggtacacagacctcaatttctactgagaaacgggcagaggaactcgcatgctgctgagctctaatagatgcctctagttactgcgacttggaaaaggtgtttgccagcatgcatgcagttgaggacagagctcgacgataccggcgcactgcgttttcgaagtctaatggctcttagcagcttgttatatagacagcagcacttagtttgggttcaggaaagcaaatctggaacttcagcgttgcagttttctgaatgttcagattggctatcagagactttacatatgcccagcagtcaatgtacaaaacccggccgcatctgcggtgacatgagatgagccactggatgctctcttttgcaggtgtccatccagtgttagccagcagcatagagatttaggaatagttggaaggtagtgagtggatgctttatttgaatggctcttcaagggaaacagagaaacaaaaatcacatgacaaatgtcaattttgggatttttttttcctccctctctacaggtgtacactccagagccatttttcctttaattttgaatggctgatgttcgtttgctacagtagttttttttttgagttgtgcttccacagcagtaaaattgattaagacgggccatgaatgcccgcgatatcctta

SEQ ID NO: 35965 - DNA, 2655 bp, Zea Mays
cagctaggcgaccacgaactgcgcaaccgcgtcttccttctccggcatccaagttccaatcacacacgagtccggacgcagaagaacccaccgatttcggcgcgcggaccggtcgaacaggcggcccaatcgccacgcggatggcggcggccgccgcactgctgctgggcgaggacgggcgcggctacgagctcgcgcggcggctggaggcgtgcggcgcgtggcgcgagtggctgggcgacgattccgcgcacgccgcgctcgcgcagcacctcacgtccccagcaacctgggacgccttcctctaccccgccgcctccccatcgccgcccccgcgcccgctcctcctcctccagctccgcgttcgcgcgctcctcttcgacaaggcctcggccgcgctcctcctgcccccccgcggcgcggcccctgtcagcctccattccatcaacgccaactatctgcgacttcatggagatgatatttatttctctttggaagatgagcaggaagacaacactcaacatcaagtgcattctagaactgcgttcagtccaagcagggatggttccatgttgtctcaacggcataatcggtatgaagaattgcctgacacatggtacaagccatatgctgacaaattcaggatatggcacagcaagcttcactcaggtgacaaagaaataccaaagagaacaccagagggaatgtctgactatcttaagatttgcagtgtacataaaaggaagagggctgtgtttatggatgatcccagcatatctgctcccatattggaaaatggcccttccctgcactcaaagaatgctggggaattcagcaattcaacagacgaattaattccagaaattagatttccatctgactgtgttccagaaagcgcaattcctaaaacaagtgggatatctagggctaacaaaatagaagttcatggagttcttgataatttgccagcaccatctagccgcaacactgcaatgcttgaaaggtttggcatggtgcctgaatattacaagacaggaaacaaatatagaggaaaagatggatctagagtagaagggaaatctttaagccaagagcaagcattgctcatgacaaaacagttggttgctcgctacttggcaaattcaggctttgaaagtggaactgtggtctctattgatgttctttcagaaataataattaagcacatatgtaaattgggacgcaacttgaagcttctaactgacagctacaggaagcaattttcatcaattgaactccttaagatgttcctacaaactgttgggtacagtaacattggatccttgatggagatcacaaagatggggaacagagtggccaactaccctattcatcaagatgcacaagttcttcagacacaaaatgcaatttccattcatgcacagcagcttccaaggcagtttcctccgcaaatgcttcagaatttgacaccacagcaacaacagcagcttcaaaatttgacaccacaacagcagcagcttctgcagcagcagcagtggcttaggcgcaaccagttatgcagcccccgtggtcctcttactatggcagacaagaaccagcctatggtgaatgtgaagcaactattgcatcagcagcagcaacagcttcaacagcagcagctccagcaacagcaacaacagctccagcagcagcaacaccaacaacagcttaatcagcagcagcagcaactgcagcaacagcagcagcaattgcaacaacagcagcagcagttcactcagcaacagcaattgcaacaacagcagcagcaactacagcagattaatcagcagcagcaccttcaacagcaacagcaacagcaactaaaccagcaacaacttcagcagcaacagcagcagatgaccatgtcaggaaatcagaatgcacaactagcacagcagttcaaacaagtctcatcaatgagtgcatatggcatgcgaatgccacctgtcaaagtagaagctttccatgaattggtgagcggggactcgtcgctgaagcacgataacgaccctaacaaactcacttctccaaagtagctgcggtgtgcaaaggatagcttttgcggtctgttgccttcctgccccccaacatcatgtctcgcctgtttgattgcgcacaacagcaagacgaaccgtgtatcgtaaatgtgaagcatttggctaattcactgccttcaaacaaactgatgtcaaatacgaactgataatagctccaagtttccttacattctgtacatggattaagggtgcgctgtcctctacataattagacctgtgcatattttaagtttgccagagaaagctcattcatttcatgccaagaaattgtggccattacgttcatagtgtgcgttggctcttcattttcaggccaggcctgggcttggatggaccatccgttagtttttagtatgaagacacttcaaatcaatatattagattggacttaggccaaggaaattttacgaatttggtgtttcgtctcatcctctaggttctattatgattttatccttatccttaattttaagccttttgattttgttctcaggattttaaataaaccagctccttgtttatgtaccacggaattaaatgatgaaaaacagaaaaaaaa

SEQ ID NO: 35966 - DNA, 3251 bp, Zea Mays
ctcactcacttcgcctgtaaggaaggaagaaggaagggatacgattattattgcaattgaaagcgatggcatcaagcagcagcctcaatccctcctcctattcgtgcttcctcttcgtcaccgccgccgccgtcttcttcaccgcctccgatgctcaggtgcctggattcgtcagcatcgactgcggcggctccaccaactacacggacgagctgggcctgcagtggacgggcgacgccggctggttccccttcggccagacggccaccatctccgtgccctccgagaaacgcgcgcagtactccacgctgcgctacttcccatcaccgtccgccagcagcagcagcagcagcaagcactgctacacgctgcacgtccgcacccgcacacgctacctcgtccgcgccaccttcctgtacggcaacttcgacagcagcaacgtgttcccggagttcgatctttaccttggcgcctcccactggtccaccatcgtcatctacgacgactccaaggtggtcaccagggaggccgtcgtcctcgccgccgaccccgccctcagcgtctgcctgtcgtccacggggacggggacgcccttcatctccacgctggagctccggcagctgaacggctccctctactacaccgactacgaggcggacgccttcctggccctctccgccaggatcaacttcggcgcgcccaccgccgaccccgtcaggtacccggacgacccctacgacaggatctgggagtcggacatggtgaggagggccaactacctggtggacgtggccgccggcaccgtcaacgtctccaccgacaggcccgtcttcgtggccggcagcgagaggcccccgcagaaggtgatgcagacggcggtggtcgggtcgctgggcgagctcacctatcgcctcgacctcccaggcttcccgggcaacggctgggccttctcgtacctggctgagatcgaggagttcttggtcccggagacgcgcaagttcaagctctacatcccggggctggcggacgtgagcaagcccacggtggacatcggcgagaacgcgccgggcaagtaccggctctacgagccaggcttccccaacatctcgctgcctttcgtcctgtccttggcgctgaggaagaccaacgattcgtccaaggggccaattctcaacgccttggagatatacaagtacatgcacatggaactcggctcaccggatggacctgtgatggcgaccctgagcctggccctggcgtcgtcgtcgtcgtccttggctgatgttgcaatggaaggcggtgatccctgcctaccttcaccctggtcctgggtcaagtgcaattcagaagcgcaaccaagaaaatctttcaggaaagaacttgacagggagcataccaccccaagtagcggatttgccctgcttagcagagatcggatttgctaataacatgttgacgggcccaattcctgatctcagtggctcctccaacctatccatcattcatcttgagaacaaccaactgaccggaactgttccttcctactttggcagcttgccaaaactgagcgagctgtaccttgagaacaaccggttgtctggacccattcccaaggctctgctaagtcgaagcattattttcaactactctgggaacgtgtaccttggaacagcagggaagcaaaagaagaagcatgtcatcatcattatatctgctctgcttggagcatccttgctacttgcagccgccctctgttgctatatgctgacacgcaaggccatgaattcatcatcctcaccacaagcacaagagcagaacaagttgcagaaatacccaagcacgcagcagctgcagtcgatcgccaccgagacggctcatccctacagcctgtgtgagctggaagaggcgaccaacaagttcgcgagcaggatcggctcagggggtttcgggatagtgtactacgggaagctgagcgatggaaaggagatcgctgtgaaggtgcctagcaacgattcgtaccaggggaagaagcagttctcgaacgaggtggtcttgctctcgaggatacaccataggaacctagtggcgtttctaggctactgccatgaggatgggagaaacattctggtctacgagttcatgcacaatggaacgctcaaagagcagctgcataggcgcgacaagcacatcagttggatcaagcggcttgagattgccgaggatgctgcgaaaggcatcgagtatcttcacactggatgcacgccatcgatcatccacagagacatcaagacgagcaacatccttctggacaagcatatgagagccaaggtgtccgactttgggctatccaagttgctggcagcggagggcaaggactctcacgcgtcaaccaacgtgagagggacaatgggctacctggacccgcagtactacgtctctcagcagctgaccgagaagagcgacatgtacagcttcggcatcatcctgctggagctcatatccggctgtcctcccatctccaccatcgccttcggggacaacttccgcaacatcgggccgtgggccaagttctactacgagagcggcgacatcgaggccataatcgacccctccatctccacggcggccgagtaccaggacgtgcagtccgtctggaagatcgccgaggcggcggtccggtgcatcgacgcagagcctcggaagcggccctgcatgcctgaggtggttaaggagatccaggatgcattggcgctggagcgggcggcggcggagacgaccaccagcgacagggcgctcgcctgccctttctcccccgcggctgcgagcgtcaggtccggcgggacaatgaggtcgcacgacatggtcatggacaacctgctgctcttggacgatgacgacgactccaccttctccggttcgaccgtcaccaagctcaagtacccggagctacgatagctgtgatggaaccaagctcaagcaggattgcaattaattagtatagtagtagtcagcaattcatttgagttagactgttagagcagtggtgagatagcagattttaatttgcagttgttgttacgttacattacattacgaatgtgtttggttggctggcctaactcaggaccaggcccatttgatacatgcacattatgtttggttgtctggtctagtttggaagctggctgaggcgggcccaactgactccgtggcctggcccgatcgaaacatagataacttacttcgctggc

SEQ ID NO: 35967 - DNA, 3215 bp, Zea Mays
aaaaacacaaacggagacgaaaaccacaaccccagcaccaccacgcctaacgccgcctcaatccctcccgtttcaacgattctctccgcctccagctcgccccgccgccgagtgagatccacccgcactcggcccttccgcggcggcgatggcaactggcgccgggtgggcacctgggcggcccgtcgagaggcatggcgcgccccgcggaggcaacgcgcggtccaagtcggtcgtgccgggtccgcgccgcccctccccgtcccccgcgaggtcgcggccagccgccgaccacagcggcagcgctgatttgtgcagagtgagagttgctgtaaggctccggccgaagaattcagaggatttagctcatggtgctgactttgatagctgtgttgagttgcagcctgagtccaagaggctgaaactgaagaaaaataattggagctgtgagtcctacaaatttgatgaggtcttcagtgaaagtgcttcacagaaacgtgtgtatgaggcagttgcaaagcctgtggttgagagtgtattagaaggctataatgggacagtaatggcctatggtcaaacaggtactggcaaaacatacacagttggtcgacttgggaaagatgacccttctgaacgtggtataatggtcagagcattggagcatatcctctctagcctgtcttttgagacagactgtgtcgccatatcatatctacagctgtacttagaatctgtacatgatttactggctccagagaagactaatattccaatagtagaagatgcaaaaactggtgaagtttccttgccaggtgctgcgatagttgaagttaaagatcttgaacatgtttttcaacttttgcaaattggtgaggcaaatcgtcatgctgctaatactaagatgaacacggagtcatctcgtagtcatgcaattttaattatccatttgcaaagaaacacaagaacaaaagaagaaaatggtagctctttatatgatgttagacatgacacttttcctgatgatctgccacttgttctcaaaagtaaactcttgattgtcgaccttgctggatcagaacgaattgataaatcaggaagtgagggtcacatgatcgaagaagccaagttcatcaatctctcgttaacttccttaggaaaatgcattaatgcgctagcagaaaatagttctcatgtacccacaagagattcaaagcttacaaggatacttcgtgattcatttggagggactgctaggacttctcttgttgtgacaataggtccatctgctaggcattactcagaaacttcaagcacaatcatgtttgggcagagggcaatgaaagtagtgaacacaataaagctgaaggaagaggttgattatgaaattctttacaagaagatggagcgtgaggttgaccaactcacatccgagatggagagacaacagaaggttataagaagtgagaaaatgcagatggataaaaggttgaaagaatctgagaggtccttccatgatttaagaatgacatttaacatgcaaattgagaatctggagaaggaaaaccgtcatttggaatcttcagtcaaaagattgacgcaggacttagacaaagagagaggccaaaacaatttgttgtccaaacaagtcactgagcttgagaaattgctcgacgaaaacaagcagcaacaacttgagaacctctcaaaaacgaaaattattactgatgagtttaaagagtatgaaaaggaaatgggagaattagtaaggaaacttgaggaagaaaggtgctgttcgtcaagcatgaaagatcgcatgagtttactacaacagcaactatgtgatgctcagagttctgcccagttgcaggaaagtatggcccgtgaattggaaaaggaattaaccaaagcgactgaagaatttacaattgaaatacaatcattaaaaggaaagatcagcggacttatttcagagaaggaatcaatatatgatgaactgaagtctactcaagaaaaggtgcagctggaaatgagccagagaaaaggccttgaagatcaaattctaaggttcaaacagtctgtgtctgatagttgtgctgaagagtctaaaacatcatgtagtatggttagatcaggatctggattaggcaacacagcttttgtgtccaaatcagaaaaattaagagaggctctatctggtcagagaggtaccatatcaaagatatttgaagaagttggtcttccaaacgtgcttgctctgttgaagtctgaagatctagatgtgcagatccatgctgtcaaggtggttgctaatcttgctgctgaagatgttaatcaggaaagaatcgttgaggaaggagggctcgatgctcttctatcccttctagaaacatcagaaaacaccactattcatcgagtcactgctggtgctgttgctaacttggcaatgaatggatcaaaccagggagtgattatgaataaaggtggagctcgattattagcaaatgttgcttctgaaactgatgatcctcaaactttgcggatggtggctggcgcaattgccaatttatgtgggaatgaaaagctgcacttaatgttgaaacaagatggtggaatcaaggcactactgggaatgtttcgtagtggacacgccgatgtcatagcccagatagcacgaggaatagcaaactttgcaaaatgcgaatcccggatgataagccaaggtcacaggaaagggaggtcccttctgattgaagatggtgttctttcttggatggtggcccattcaactatgttttctgcttcaacacgaagacatattgagcttgctttttgccacctagctcagaacgaagacaacacttgtgacatcattgcttctggcggaatcaaggagctgcttcgcatatcgagggagtccccgagagaagatacacgtaatttagctaagaaggctttagattcgaatcctgcttttttaagagagatccaatgactcttctatggccaagacaaacatttcattgtagactcatccatgatactatacatatgcagatgatgttccattttctcaaggtcccacgctgccacgctcatgctcatccaaacagcaaaaaaaaaaaaaaaaagataagagctccgtttggatgagtagtccaatagctgaaatcgcagtggtcaatagtaatggttatatcaatggttataagtgcatt

SEQ ID NO: 35968 - DNA, 2623 bp, Zea Mays
ctcggcctcctcctaggtccgggcgtcaggccagccccatcacgcatagcgacagcggtagagcgagcccagtccgaaacggaagaaaccaagcgcaaaccaacgccgaaccagcagaggcgcagacggacaggcacttcactggcttctgctaccgtgccgctcctccgtctcccgctacaaaatatttcacgggagaccctgctctctccgattccggcgtccactcgtcgctcacggaaaccgctcggagcccgacgccgcgagatcaccggccagcctcgcgctcgacacgggagaggcgaggcggtcgagtggcccaccctacgccgctctgacagtgagcaatggcggcagcgtcgaggaaagaggaggagaggaacgagcgagtcgtgcgggggctcctcaagctgccacccaaccgcagatgcgtcaactgcgacggactcgggccgcagtacgtgtgcaccagcttctggaccttcatctgcgtctcctgcagcggcatccaccgagagttcacgcaccgtgtgaaatccgtctccatgtcaacgttcagcacgcaagaggtcgaggctctccagaagggtgggaaccagcgtgccaaggaatcattcctgaaggatttcgatacccagaaaatgaggctacctgatagcagcaactccggcagtcttagggacttcataaaagctgtctatgtggagcgaaggtatgctggcggtagattttctgaaaggcctccaagagacaaacagaaccaaaaggcccatgaagaagagcatagaaggccaaattcctaccattcattttcacagagcccaccttatgattatcagtatgaagaggggcgcaatggcaagcgatctgcatttctaagtaggaagcctggttcagataaggggcatcaggggaagatttctggattttgttacagttcacatagcttgcatcagagaatgtctcgggatggatttactggtgagaattctgtatcgaggacttctaactgctcagggtccagcattagtgacacagttagaactgcaccacaatcacctaattttcctgatagtggatgtttcagcccccctgtggtacaagatcaatcaaatgtacatagttcttgtggactcactagttcacagagagctgtatcggcaggagacctagattctatctctcttaaatcaggcaaatcaaacttatctgatttgatttttgagaatgataatgttcaccgaactgaaaaatcctcaaattccgctgctccaagtttcatagccttttctgatgctattagtgctccaaatcaagctagctttgattccaaagcttctcaggaacaccatgtcactaccatagatcaatctgtagatctattttcaaatacgcttactgaaactccatctgctgataaggtgataccaacagctcattcaatggacaatgctgggtgggccacatttgatacacctccagaacaaaagcagcctgcactcactgggctttcttatgtttctgctacaagcatcgataaacaagctcttaatcatgatttgttttcatctgaatcaaatgatgagctaacatggttccggagctctaaggatgatgcttcggttaccaatcataatcagtctactgctacatctcttgatacatgcagttctgagccttggagtattttcgatgcctccagtggtagtacccagtacactgtcaagggagatctatcattaatgacttctagattgcaagagcctaaaggaacaatgaacgaaaatagctctcagctttggcattcatttgatgatgctaatgggatcgtttgtgctcagccacgaattgatgaccacagcaatacagcaagcatttctctatcaaccagcaatccatttgtgtgctctatagttttaaaggaatcttatgacgatgattcccacaaagtattgatgggtgaattgacacctaatacattgattgctgcttcctcagagccatctctgggaggaccctctactgagcagatgccattaaatccatttgaccttccatttgacactcagtcggggactcctgatctgttcatggacgtaagttcattgcaagaggccttgcctagcccagatctgccaaccttccttgatggtttacctgaaagatggttctccagcagctcttgtgcttatgttccatcagcgtcagcgtcacatggtggactgccgtgccttgtcgagcggggccccaactgttccttgctttggcactttatcagctggaaatccttttgtatagagggcatcacagtgaaaataatctgcgtcttggacttggcatgttcctttggtttggtgatcttagagctaggaatcttttctgtgcgaaccgggacaccttgcaaggttaccagaggaggtggggaatatgatagcgtccccaggacccactggaggaatgtttagtaattgtgagtttctgatggaggaatgtgtgtattctttctcggttcatgtactctaggacatgattattcagcactaccgggcatcctcccggtacatttctttctgatagttacaacgatacatggcttcatccagttattcaagttgttcaggta

SEQ ID NO: 35969 - DNA, 1813 bp, Zea Mays
gtcgccagtctgatttgatgaaacagaagttggggaaattgaggatctccttagggccatggatgtagatgatgtgctcagtaacttgcgtgttgttggtgtgccaacaaagagtgcaatttacatatggggttataaccacagtggccagactgcccgaaagggcaaggaatgccacttgaggatccccaagagcctccctcccaaactattcaaattggggaatgggaagagcctcaggtggaccgatattgcatgtggccgtgagcataccgctgcagttgcttccgatggatcactgttcacctggggtgctaatgagtttggccagttgggagatgggacagaggacagcgcgaaagagcccaagaaggtcaagtcattggagactgagtttgtaaaatcagtatcctgtggcgcacattgtacagctgccgtcgctgagcctcgagaaaacgatggcacggtatcgaaaagcaggctttgggtttggggacaaaatcagggttcagattaccctcgtctattttggggagctttcacaccaaacacggtgattaagcaagtttcttgtggagctgttcatgtcatggctctatccgaggatggtctactgcaagcatggggtatacttggggactgggaagcatggggcagcttgggcattgctccctccaatctggagataatgagctgatccctaggcgagttgtggcccttgatggtatagtagttggggacgtttcttgtggaggtgtccactcttgtgctgtaactgaagggggagctctatatgcctggggcggaggacatgtgggtcagctgggagtcgggcctcagggtggcttcttctcttgctcccttaatggatccgacatgctgctccgaaacatcccagtcctggtgataccctcaggtgttcgtcttgctacctgtgggcactcccacacacttgtgtctatgaaagatggccgcatatatgggtggggctataatagttacggtcaagcgacgaacgagaaatctacttatgcttggtttccctctccggtcgattggtgtgttggtgaagtgagacgactcgccgctggaggtggccattctgctgttctgactgatgcatgttcgctgaaagagctgtgcgaattcaagctcgcagagaccgtgaacctttcaaatgctcagctaatagaagatgttgcatcgcggactggtgcggatgccttggcacgcttgtgcgagaaagtaagggagcatttggataaggaaggagaatgtgaattcctggaaaagcaagtggcagaagaggtcaacactataggcagttaggccactagcaaaacagttcaagcagtctgaggctgaagccagtctgggattaaacagggagtcatctacaattgatagcttgacctcccagtaaagttactgattcggacattaattgttgtggtgatcatggaaaatatgtgactcgtcaattgattctgattggtctgtagacctccattggtggtgagcctctcagctgcatcggggaggcgcagaggctctatatgtgtcatgatcttgttccgaactgtcaggttgctgtaatgtagccaaatggaaacctttgtatccctggaacttgaaaggcatgtacctggtatctgcagccagtaagtttggcaatctgaattcgatgccaattcctgggcgtattcgaacgtcctacgtccatgtatttatttcagttcatgtgcatctaaacaatattggtatagcatgaaatttaagtacatcaacacacatttaataggattaacagaat

SEQ ID NO: 35970 - DNA, 3544 bp, Zea Mays
cgcatccaggaatcatcgcgtcgtgctcaagccaccccgccgtcatcgcctcacgcaccttccttcggcaaccttctataggcgcaatcacaggaatccccgcggcctcgccccagatccctaaaccccgcctcgtctctcatggaaagtgcgtcctctgcgctcggctctctccgcgtctgcgacagcccgctatccatggaacgtgggtcctctgccctggatcgtcacgtcggccctcgattcgcgtccgcgacagcctaatcccgcacgtggattgggtacccctctgccccgaatcgtcgctcccgcccggcatcagcgtccgcgtccgcgttgtggtgtccgcagtctccatggaaggcgatcccgcgtgtggattagcattagcagatgaagaggcggaatgttcttcttgggatagcgacgatgagtaccagaaattcatccaaaatatgaaccctccaagggtcaccatcgacaacacctcatgtccaagtgctatagttattcatgaaagtgtccaccgacgaaggagaagccaaagcacaggagcatggtgctatgttcatggagaccagtgcaaaagctgggttcaacgtcaagcccctattccgcaagatcgctggatcccttctaggactagacgcactttcgtcaggaaagcaggaagacatggtcgacataaacctcagacctgccagcggttcgtcggcttcaggtgcagccgcgcagctggagcagaaatcaggcggttgctcctgttgagacttcgacagttttgtgttcagagaagctacaacagtactgcaacatcgaatttgtttagcaagttatcatatgctaggatataactgtttgatacacaagggacaaaatctgtggaggtaagggcatctcacattttttttgatgaaacattagcaggagctctgccatatcatataagaagagcaagctagagtgtcacagtctttattacatgaatgatcaaatacttagagtccatagggaaaaagtgaaaactgttgactatatggctaagagacaatcatgatccatgaaaaattctaatggactcatatacacagagggggctagcgtgcttgagagaataatattagccgccaccgcatctctctatagaggtgtacgtgctcaagtcgccaccgttgtttctgtcgtggacatggaaattatatggcggattgctggacatgtagtattggcttatctggtggacgatagactgcctagaccacatgaattaccaaatacttttgagtctttgacatgcaaaaaagggtgaaaactccattagaaaactttagaagctgaaacaaatattcccttcagtattgagttatattagggtatttcatatccccttcaatattcagttttattagagtacttcattctaataaatcacatccaatttcattctgccaatcatattttctttttatgcaattttattctattgatcctattttctttgttttgtttttggcaatgaggtgtttcagcatcgacattcaatttcacagcaggaacttctccattccattccaatccaacatcgacaggcattccatttcacacagctaatcggtggagggaaaaatattcatcaggaaaccagctaatcgtggaaggaaaaaatattcatcaaagtggatgtcactggatgttttagtggatgtcaactttgtcatctactcgtgtttgataccaggatgcagtgcaaccatttccacatatgtattggctagcattgaactgaggctttgtacagtagtaataagaaatgagaaatgtcgaattcttttagggccctgatttggcatcaattgaaaagacattgactgtatctatctacagggttccacatgcacattcagcgagtcaatcctgggatcgtgtggcttccatactgggctgttcacctcaccacatttgatggatgttagagagcgatttcagctagatgggtgctatgaaatttatgatcgcactgacctagctcctcctttctgagggcatcggggttaatatttctgaagagaaaattttgaagtactcctggtggtgctagaacaagttgaagcctatttcaggttcctcgcgctgctcgcattcaagatattttctgctgagcaggtagatgttgctattctcgaggttggcctaggagggaagttcgatgcaactaatgtggttaaagcacctgtagtttgtggcatatcttcccttggatatgatcatatggaaattcttggtgaccaaatcctgttcttggtgataaacttggtgtcgataaacgggttaattctgttggcaaaattaggatgacacaggtgacatgaaaatgccaagtcggtgcatcgatactaattgcgacttaggtctgtttggacctctggtaaaccacgtagtaggtttggagacctggaactacaaatcaatagtattgggacttaggtgacaccctgaacaagtttaggaacaactggtgcatgttactcttttatatttattttaaattcatatagctggaaaacctactatcaaaccttgactaagttacatagttgcctgaaagcaaaatttcactttattatctttaaatcatttgatgcttatcactttggcgtgatttcaataactaggaaggcatgcacattttcaacctttaaaagccagaatacacacgtctacttgctggaaaatttttatgctttctaccaatcttacaacgacaatttgaaagttgatatttgtgatacttatttggtccaggaactagattttttgtacattctttcggatctggattgaacaacgctctctttgtatatgaacaatgctctgtaaatatacgtttgataattttatatgatatttaataaatagtagctactgtgactgtttcattttgtttttcttaggttgttagttctcgtgaatgtcctgttgtctcgaaatacaaagcttctgttcgcacctaatcgcctaaaatggaaatgtttgactcattgtttaattcggggggaagctgaaggtggtctgatccgttctaggaagagaaaggctgaccaagtcatcatctccagggacgatgttagcgaaagtcaatttaatcaggtgttgatcattgggttgcaacaaatcatcggtggagactgagtcaccgcggccagaaaaccacggtctcaatttgaggagtttttccatctatgtttgttagaaggcataatgcctatttatctcttgtattcgaacatttggcaattaagaaatagaagattacttccccaatatcccttattcctaatctcacctttcacggcttgtggtgaacaatcacttgctattaccgactgacatgtccactcctcatatgtgcgatattggggttgatatatatgttgttcgtttccatgtaattattgtatactaacatttatcgaataatttttacaccgtcgcaacgcacgggcacacacctagtagtagttgatgatgcctttgcaggtttgca

SEQ ID NO: 35971 - DNA, 3025 bp, Zea Mays
ctgtcctccccatgcccgccgctcccacccgagatggttagcgcccctcctccttccggtcccttcccctgcctcggccggccagccatggattcaccaagcgggctctggtggcggccggcgccgtcgtcgtgtcctccattcccgtcaaccccctcgatgtcgccaaggagcaggacgatgcagtggggcagcatctctaatcatttaagcttcaaattaaccagtccattatattatgcaactctgtgaatagaattgagctactggctaagaaaataactgaactcggttattcatgcttcacattcatgctaagagcctaagatgttgcaagacaacagaaactgagtgtttcatgagtttcataatggtgcttgcagaaaccttttgtgcacagatatgtttaccagacgaattgatatctaggctatttatgtggttactaattttgactcctctaagacatatttacacagggttggtcgttatgggagatatgggcaccttggtttggcagtgaacttgaccacttacaaagattgtttcaacttatatagtattgataaaaaaaacttggaacggaaattaagacaatacccccacaaattgacctgtttgtatactgccaatgatgatagcgacagcttcatgagcgtcagtggaggaggaggagaggcccatgtcggtggagctggaacccatcgccagcgagcagcagcttaactaggtccttggagaggcgtagcagctccagctcctcatcgtcctgctctggtaaccccactttcctagatcggtttgtgcctgtagggtgttcttgttaaagtttgcttgtaatgtctgtgagattgcaatcatggtcgtgtatgattgcggtgttcacagattttgtttgcttgttcctagatagtcatttatgtggtgcaaatttagcatcttggatgaagtgaaaatggacaattttgttcatttgttattaggttctggcacttggacttggtatttagtaactgagaatttacttatttagtagttatacagcccgtgtcattgtcgttgggcgaatgaatttcatcgtcagtctattgcatgaatgataaatgcatgtcggtggccttttgccgaatctaccattttgtttgttcctcatctccattcctatctgcttgtttattggtagtagaagtagaactgctatttatggctgaggcctgagggaaaaaataatcaaatgttcaaccaacttcatttttttcttgagtgcatgggttgcagcctttggctagcttatgatctcgtgtggtctatttaccatataaataaatagcagcattagttcaatttgatgttcatagttctctctctctaaagagtcatatgttagattcatgggaaatacttgaactatacatttttttaatgtatcagatgtgtgaattatcatgtccggatcaatttcaaccaaccaacagttcctttagcaaatttgtcaggcatatttatgcacttgttcgcataactgagactatattatttttataagactaaggtcagactattgatggtttggtttgggtggcaccttgttcttcgttccttgccatttccatgccatccttttattatatacatacatttatttggagataaaatttgatgtcaagagaaacttgtctttctttcactctccaactcatcttcgtagtttgattctcatgggaggaccctgtttccatcatgctgcatctttttatctgataaagtgatatttcttagagcatcaaggttcgacaaccaacatattctcgtgtgaggaaatggaaaagtgatgtcttgaggacattttttatcttttgatgttgataattgttcatattattatggttcaacaactcctagcaccaagtcattctgtatgatctgttaacttgatagaagttaacatcatttgattttaagaaatgtaatcatatttcctgattgctcagaattgacttgttcatcatttttcaatgtccctaattggtattagatttttgtgatcttgtgtcatattctgtgatcaacaatgtacaatttgttgaataggctgttgttgaaaaagctgtatattatgctcttgtatggatcaataggctgttggctgtcggtcatgacatcgccatcaagacagataggaaagttatattttttcctaactatatatgctcttacctattcctgttctccatagtacaaaagatgatattgattttgtggctggtttcatttgttggaatgctcttcaactttcttacgctcatttacattgcttttctctgcggtaaattgctggcttaaatgcatgctgcttgaaccctataatcagatagaccatcccgaatgcaagtcaaggcctgatagtggtctttctgcaattacagagctggaccctggttatataacaggtttcaggtcctctctcttcagtatggaaagaatgggtcaaatggtgtgtagagtttggcattgaagctaatgcaattatcgctgttccgtatgattggagactgcccccatcaatgcttgaggagagagatctgtactttcacaaattaaagtttgtaacacttgcctcaacttgttatgaagcaaccaaatgctatacatctgttagcaggatcagtaagagttaatggcccagtgacggattcaaggtatcctgctcaccaacagatcccacaagcatacggttaccgccaaatgcctgcaaggttggacagtaccaacccatcacaggccatgggaggttacacgctgcagtcacagaaggaaacattatttgaagagttgccattttgaagagttactcgaatccaatattttgctcttttgaattccttggtgtacactggcaaatattagcatatttgaagagttgccatttcgatcatcatcttcatttgtactttttgggtcagatctaataaagcatcagcattaaatttacaatgatcacctaaatccatggtttttattgcct

SEQ ID NO: 35972 - DNA, 600 bp, Zea Mays
agtctgcaatgcagtggagtactttattactactagtagtgcagttgtgtgcagggaggcctcccgtaggcgcaggcagatttgctctgcgggcactcgggcagcactagcgagctgaggggcgcgcctgaggctgaggccgagcagcagaggtctcgctcttcgcctggacttggaccacaccaccacacacttccattccctccgtcaggtccgaataatgggccaccgccgtctcttcgttctctcgctggggctggctcatcttctcctcatcgccaccgcgcacgccggaggcggccatgctcgaggcgccgccaccgacgatgctgtcgcccaccagggcatgagcatggtcgggtcgaggccgccgagctgcgcggggcggtgctggtggtgcggcgcccgccgctgcgaggccgtgcaggcatgcatggacgacggatcgtcatcagagcgcgtcttggcttgcagtgtggtgtgttgatcttgcatcgatcaatccattttctttcctgttgcggtgtgaatatagtagaagtcgctgctaaatatgcgtcttcaaaaataaattaaagaaaaggaaaaacccgtttatcg

SEQ ID NO: 35973 - DNA, 1657 bp, Zea Mays
gtgcctttccttctcgctttcactggtaccaggtggcgaccatacagcacggaactccagttcaccgctgcctttcttctactgttcaccccgcgtgcgctcgctcactcgctctctcccctctggctctgagtggcgctagtgggcgaccgccgccgcgtccctccgtcaggtgcccaggtgtagcctcgtcagcccctccgtcaggtcttcgtcggccccctcgccgacgagcacccaccagcagatcccattctttcgacgaggctgaagcagctgaaaatgcaaagtctgcagacattgaccggaggattttgcaagaaacaaaagccgaacaacacatccacaagctcttacttctcggtgctggagaatcggggaagtctacaatatttaaacaaatattatatgagggagctaaagagttagcccaagtggaaccagattcttcaaaatatgtcttatctccagataatcaggagattggagaaaaactatcagaaattggtgccagattggaatacccatcgttgaacaaagaacgtgtacaggatgtaagaaaactatggcaagatccagccattcaggaaacttattcacgtgggagtattctgcaagtcccagactgtgcacagtacttcatggaaaatttggacaaattatctgaagaagattatgtaccgacaaaggaggatgtgcttcatgcaagagtacggacaaatggtgtggtagaaactcagtttagccctctaggagagagcaaaagaggcggagaggtctataggctgtacgatgtaggaggccagagaaacgagagaaggaaatggatccatcttttcgaaggtgttaatgctgtaatattctgtgctgccattagcgagtatgatcagatgttatttgaggatgagacaaagaacagaatgatggagactaaagaactctttgattgggtgctaaagcaaagatgttttgagaaaacctcattcatgttatttcttaacaaatttgacatatttgagagaaaaatacaaaaggtccctttaagcgtgtgcgagtggtttaaagattaccagcccactgcacctggcaaacaggaggtggaacacgcctacgagtttgtaaaaaagaagtttgaggagctctacttccaaagcagcaagcctgaccgtgtcgaccgagtgttcaagatctacagaacaacagccctggatcagaaacttgtaaagaagacattcaagctgatcgacgagagcatgaggcgttccagagaaggaacttgatcgaggatgtggtgttataagccacaagacaagtaactaggatggtgtgaggagcagaaagtttacagtgtcgcggctttggccgattgtgattctttttacatgaggaacatttgttgatctttttgccccaccacaagccagtaaaagtatctgttttgcgctggtcttggggaggtttgggtcgtctccatttccccccaatgttaggacaaaatgtacttaccatcttttggagctctgcctgtttggcctcacaatatcaagttcattcgttgttgtctatgcagcatgcctattcacgaattgtctgaatttgttaaccaacaacagatgaaagttcgattggtactctctcaagactgaatttggctacg

SEQ ID NO: 35974 - DNA, 708 bp, Zea Mays
atggccttggccatctggaggggtgcaacaagagtggactgggccacaacgtcagatggggggcagctgacggagcaacgaagtagcgagtccgacaagagtagaggtgaattcgacagtcggccaacgagggaaagatcgccggctcctgtggcctgcaaggggagcaccgctgctggccacgccggtgggagcgagtgtgcccatgtctatagaaggctaggcatctgcgcctgtggtggggcaagccttgtgcatgaggtcgcgccaacggtggagcaggcccatgctggcatcaatgctctagcattatctcagataacaataaacaaactacgtgagaacttcattgatatagacaagttgtgtcaggagtgtcaaactttaattgagaaccatgacaagatcaagcttcttagcaatacaagaaacaatttgaacacaactctaaaggatgtgggaggtatgatgtccatttctgttgaggctgctgctgcacatgactcattaagcaatgaccaggagttaattcacacttacgagctcttgatggtaagaggcgttttgctctagctgctgctgcatctcataaggaagaagttggaagattaagagaatactttgaggatgttgatcaaacatgggaaacatttgagaaaacattatggggccatatcactaactttttcaaactttcaaaagagaggt

SEQ ID NO: 35975 - DNA, 3214 bp, Zea Mays
acgtttcagcatccagtagctagagctgcaggctgcagccgtcagccgcacccgaggccgagagcccagagccgagaggcgagttgggcggctgtgctggccggccatggcgaagccaggcggcagcgatgagtcgtgggagtacagtctgcgcaagtatctcctgctgctggccacgctggtggccacggtgacgtacggtgcggggttcaaccccccaggcggcgtctggcagactgccgaccccgccgtcgaccgcatcgccggcgaccccatcatccgcgacacgaactacgcccgctacctgtccttcttctacagcaacgccaccgccttcgcctcgtcgctcgtggtcatcgtcctcgtcctcatcctgtccgtgctgcacgacaacgggggaatcaccatgctcgcgccgctgctcggcgtcctccgggccgtcatggtgctggacctgctcagcctcatgggcgcctacgcggcggggacgttccgggacacgctcacggcggtctactccctggtgctgtcggccggcgtcgtcgcctacctcgtggcccacctggccctggcctcgagggcgccggcggccgaggacaagagggggcagagcgcgccggagcggctccgcaaggtgctcatgctcctcgccacgttcgccgcgagcgtcacgtacgtcgccggcctcagcgcgccgggcggcttctgggaccactccgaggacggccaccgcccgggcgacgcgatcctcaagggagggccccacgacgcgcgcctcaaggccttcttcgtctgcaacaccacggcgttcgtcgcgtccctgctcatcctcgtcatgctcctggagaagaagctctgcttcagccagaaggtgcgctcctacgagatctacggcttcatcgccgtcacgctcatcagcctcctgggggcgtatgctgccggcagcagccgccagatcgacacgaccatctatgtgagcgctcttgttggtgctgttgccgtgtgcattctcatccaagtggttttcgttttgctcttccaagcaaattcgaccgaggggcaacaaacacgaactcaaggtcccctaacaaataatggcaatggcagtgatgagcgtcagcagactcaaggtccgcaaacaagcatggacagtaatgacagcagcaacaaacccacggtctgcaaactagtgatgacaatgtcagtgaccaccaccagcagcagcaacaaactcagagtcctcaaactagcaatggcaatggcaatgccagcgatgagcatgagaagcaacaaaatccagcgctggagaaggctcgctctcttgtcctgctgctcgctactctcgcagcggcaatcacctaccaagcgggcctgaacccgccgggtggcctctggcagagcaacggccgcctctacaagatcggtgatccgatcctcttgaccacgaaccccagacggtacaaggcattctactactgcaactccgtcgccttcgtcgcctccttggtcgccgttatgctggttaggaagaagacactgcaccaccacaacgcgctggaggccgccatggtactggacctgttcggcctcatcggcgcttacgccgccgggagctgccgggacgtcagcacgtccatctacgccatggcccttgcaggcgccgtgctggtctacgtggtcatccatgtcgtcttcttgacgctggacgaaaaggacggcagcagcgcgagaaggaatgatgacgcttccttcgaggagagagagaaaaaggaggcgggcctggtggagaagaggcgcaaacgactgctcctattcgccatcttggccgcgaccatcacctaccaagccgggctgacaccgccgggcggctttctggtccaggacgataaccgtaccggccgccatgccggcgacgcggtcctgctcaacaactacccgcgccgttacacggctttcttctactgcaactcggtgagcttcatgctgtccatcgccctcatcatcctcctcgtgaaccccaacctgtaccgccctgccattcggagcaatgcgctgtctgtctgcacggcggccgggttgattggaatcatgggcggctacgcggccggctgcacgcagcatctgaagacatccatctatatcttcgtgttggcggccgtggttctgtccactgtggtctttctggctgcggtgttccttgtgatccatctgagaaaaaaaagacgataatgctaacagcaccaacagagcagcagcaagagaggcacctggggaagaacaagaagccaatgctggtgctggggtgccaaatgccatggggggcgagcaaagaggtccccaaggagccaaagctcgccgaaaagaaaagagggcacacgccaagcgcaagtatctgatgctgcttggaatcctcgtggcgagcgtgacctaccaggccgggctggcgccgccgggcggggcgtggcagtccaacgacggcacccacaccgcgggcgaccctgtgatgcacgactaccggagggcccggtaccttgccttcttctacagcaactccacctccttcgtggcgtccgtggtcgtcgtcgtgcttctgctgccggagtcgctgcacaagaagtggtggtggctcggggtcatgaacgcgacgatcgtgctggacctgctgggcctcttgatcgcctatgccgccgggtccagcaggacgtggaagacttctgtggttgtttccgctctcgttctcgctgtgctcgcctatttcgccatacatgtgctgctgtcaagctgcgtcaggagagggaagaagacagcccccgactctccgtctccgccccaggaccaggagaacagagaggaaaacgaagcggcaacgaaagaggtcgagctccagggtccagcttgctgaaactggagtgtacagtgcggagctgaatgtgtgtgcagtccagtacttgtagatttttttttcacgaccgtgttgtcgcattttttttttttgtcaagaggtgtagtgtttttgttgatccacgtagcgggcgggaacgattgatgtgcaatcaagtgttagatgtaagtgtacaaacaagtctgcgtgcaagcgaggcttctctgtctttttagatcatgtagtcttcgcgtgggtcataaatgacttcacgggtttggaacagtcttactgaatatcagcgtacctgatgactggatattactgtacgag

SEQ ID NO: 35976 - DNA, 1906 bp, Zea Mays
ccatcccaaaactccccgtctctactccctactggcctcctcccacgagtcggataccgaacctcggcggcgtcggcgccacgcgagcaaaaaccctagtgcgagcaagcgagaggcagagacctcagtgcctcgagcaacgcgcgcccggcccgacggcatggagagcctcatcctcgcctcctcctgctccgcgtccccacggctcccgctactctcctccgccgcccgcttccgcgggctgcccgtttccgtgccgccgccgtcttcggcgtccatcagcggtgccgcgaggaaagggccgatgaggcccaggctcttcgttgccgcggcggcggctcctcgcggctccggaaacgttttcgagggattgagagcaaaaggctttgcaagcatgtcatcttcgactggcaatgagaatatgtctactggaactggtacactacctcccatgccacccacatcatcatatattggttcacctgttttctggattggagttggtgtagcattgtctgtggcgtttaccacggtctcttccatgttaaagagatatgccatgcaacaagcatttaagtcaatgatgacccagtcagcaccaaactcatttggctccaactcgcctttcccatttagcatgccgccacaggcatctcctactgctccaagcacttacccgtacttggaaccaaagaaagatacttccccgcatgtgtcaactgttgatgtctcagctaatgaagtggaagccactggaacatcgaaagaggtggatgttactgaaacgccaaaaccttcaaagaagtttgcatttgttgatgtttctcccgaagagttgcagcaaaagaacctccaatcttcaccggagacggtagatgtaaaacatgatagtacatacagtgaaagtaaggaggatactgaggaacaagttcccacaattagtacaaacactgaaagtaaggaggatactgaggaaaaagttcccacaaatggagcatcttttaagctgaacgaaggtgctgctcatgggccaactgaatctaataactcggcatctatgctatccgttgagacaattgagaaaatgatggaagatccagctgtgcagaagatggtgtatccctacttgcctgaagagatgcggaacccaaattcattcaagtaatccaatgtaccgccaacaactacaggatatgctaaataacatgggcgcaactcctgatcaatgggataaccgcatgcttgatcaccttaagaacttcgaccttagcagtccagaagtgcggcagcagtttgcgcaagttggcatgactcctgaggaagtagtatcgaaaataatggcaaacccagatgtagctgttgcattccagaatccaaaaatacagacagccatcatggactgctcgcagaaccctcttaacattgtaaaataccaaaatgacaaggaggtcatggatgttttcatgaagatatcacaaatcttcccccaaattaacggctagctgatcttcgtcgtgggatagcacttctgatttttgtcggcccgtcatctccagtctggagggctgctgcggtagcatctatcaagaaaagggtcgtgacgctccgatataccctccccgtgtcaaggtttttgagtttcttatgtacatcatgtgatgtagcggccttggtttagctatgagtaattgagtatgacccttgccagttcattaagtcaggctattgacatagcagggtccaagtttttattaagccagccaatcagtggaaaggtgcagcagagacggttcgtatcagatcaattttgatatataattgttattattaatctgtaatatattagagacacaatggcaatgcaagtaatctgttacgacatttcctgaccatatttgaccgggta

SEQ ID NO: 35977 - DNA, 1421 bp, Zea Mays
gcggctgaaccagtgccagtcccacccgttcccagaccagcctcacgcgctcaccgtgctgcctccaccaccgatggctctccctcccggcgcaggggcggtggcgccggcgacgcccttcgccgcgaatccgtgccgtctccggcgggcgtctggtcctcctgccgccgcccttcggctcgggccgctcttctggccatgggaaaaggtgaaaatcggtcccctttctgtttcccccatgggttttggaacatgggcatggggaaaccagctactttggggctatcaagaaagcatggacaacgaacttcaggattgcttcaatctggctctaaggaatggcataaacctttttgacactgctgactcttacggaactggaaggctgaacggacagagcgaacggctactcggtaaattcatccttgagtttgaagggaggattaaatctccagatgatgtggtcatagcaactaagtttgctgcatatccttggcgacttacatcggggcagtttgtcagcgcctgcaagtattctcccgatttgtttgtttcatgtcttctttggaaagattacaacttgataggctcgggatagggcagctgcattggtctactgctaactatgcacccttgcaggagcgtgccctctgggatggactagttgaaatgtatgaaaagggccttgtaagtgctgtcggtgtcagcaattacgggccgaagcagcttctgaagatccacagctatctagcttctagaggagttcccttgagctcagctcaggttcagttctcgttactgagcatgggtgacgatcagatggagctgaaaagtgtgtgtgattcattgggcattcgcatcatcgcatatagcccgcttggattaggaatgctcactgggaagtatggtgcttctaacctcccaaaaggaccaaggtcagtgctgttccgacaaatccttcctgggctggagcctctgctgtcttgcctgagaaggattgccgaaaagaaggggaagaccatgcctcaggtggccatcaactggtgcatgtgcaagggcacagttcctatcccaggcgtcaaaacggtgaggcatgtccaggagaacctgggcgcgctcggctggaggctgagttctgccgagatctcggagctcgagtccgcagcgatggcggctccgaggaagatgatccagaatgtcttccagactgcctgaccgtgctgaatacatgtgtgtgtatgcatgtttctgcaatcgtctttactgaaaaatctgaaaccgggcagccgtgaaccttttcttctcgtaagattcataatatagatagtcactgccatgttctattagttgtcgtttttgacaaagtttaaataaaacttataaaattttgactataaataaatgttttattatttagtttg

SEQ ID NO: 35978 - DNA, 4397 bp, Zea Mays
gcaaactgcgttgtcgagagggcttcaggcttctgcttcaccgtgctcctcccagcccagcgccgacgccgagctccccttccttgaaccgccggccgtgccaacccgcgactcgctggagtaggcggtacgattaattcgaccagacgcggccgcggatcctaaacgagttctgggtttttgctctgaagaacaaaatggacaatgctcagagtgacaaccgaactgataccaagcaagatgatgatgcgcgccaaagcaaacaggatgatgaggaggcccgccttgaagaatataaaaagatcattgatcaaaagatttccctccgccggagcaaccaaaaccctgaaagatgcaaactacctgagaaccctggactctagtattaagcgcaatacaaccgttataaagaagttgaagacaataaatgatgaacagaaggatgtgataatggatgagttaaaaagtgtgaatttgagtaaatttgtcagcgaagcagtttcttacatttgtgaggccaaacttcgctccgctgatatacaagctgctgttcaggtttgctcgctccttcatcaaagatacaaggacttctctccttgtcttatagaaggtctactgaagatcttctttcctggaaaatctggagatgatttggatgcagataaaaattcgagagccatgaagaagagaagcacattgaaacttttgattgaactatattttgttggaattgtcgaagatgctagcatatttgtaaatattataaaagatcttacatcagcagaacatttgaaggaccgtgaaggaactcaaacaaacctatctcttctatctacctttgctcgtcaagggaagttttttgtagggctacaacctcatggtcaagaagcttatgacgagttctttaaggacctaaatgttactgctgagcagaagaagttctttaagaaagccttgaactcttactatgatgctgtagctgaactactacaatcagaacatgcgtctcttcgtctaatggaggcggagaatgcaaaagttttaagtgccaaaggtgaactaagtgatgagaacacatcctcatatgagaaactcaggaagtcttttgatcagttactacgtggtgtttcctcgttggctgaatctcttgacatgcaacctccagtgatgccagatgatggaaatacaacaagagttactacaggaaccgatgcgttgccttcttctggaaaagaatcatctgcattggaacctatctgggatgatgaagataccaaagctttttatgaatctttacctgatctcagagcatttgtgccagctgtattactgggagaggttgaaccaaaatcaaatgagcaacatgttaagggccgtgagctatctggtgagtccacttcagaacaagagactgaactacatgacaatgttccaacttctgccactgaacgtcaactagaagttaaagtagatgatctagtgaaagagagtgaagacagagataaagagaaggggaaggatggagaaaaggaaaaatccaaggagaaggatctggataagaaaaatgaaagagagaaggagaaaggaagagtcttggatggcgcaagtctggataacctcctgcagaggctgccaggatgtgtcagtcgtgatctcattgatcaattgacggttgagttttgctacctaaattctaaagcaaatcgaaagaaacttgtgcgtgccttattcaatgttaataggacttcactggaactgttgccatactattctcgtttggttgcaacactctcaacctgtatgaaagatgttccaagtatgcttctgtctatgcttgaagaggagttcaactttttaataaataagaaggaccagatcaacatagaaacaaaaataaaaaatatacggtttatcggggagttgtgcaagttcaaaatggctcctccagctcttgtttttagctgtttgaaggcctgccttgatgatttcagtcatcataatattgatgtggcttgcaaccttcttgagacttgtggtcgttttttgtatcgctcacctgaaactaccattcgcatggctaacatgctggagatactgatgagattgaaaaatgtcaagaatttggattcacgccacagtacacttgtagaaaacgcctactacctttgtaaaccgcccgaaagatctgcgcggatatcgaaagttcggccaccgttgcatcaatacataagaaagttgcttttctcagatcttgacaaatcaagtgttgaacatgttttgcgccaactacgcaaattaccttgggcagagtgtcaacaataccttctgaagtgctttctaaaggttcacaaaggaaagtacagccaagttcatctgattgctcttctcactgctagtctcagccgctatcacgatgactttgctgtctcagtggtagatgaggttttagaagagataagggttggattggagttgaatgactatgggatgcaacaaaggaggcttgcccacatgcggttccttggagagctatacagctacaagcatatagattcatcagttgtttttgatacactgtaccttatcattgtgtttggtcatggaactccggaacaagatgtgctggatccaccagaagattgtttcagaatcaggttgatcattacacttctacagacctgtggtcactatttcagtaaggggtcttcaaaaaggaagctcgacaaattcttgctacactttcaaagatacattattagtaaagggcccttaccactcgacatagagtttgacattcaggatttatttggtgagctacgaccaaccatgtctaggtattcgtcaattgaggaacttgttgccgcgttagttgagtttgaagaaaatgaacgttcagccccagtagaaaaggttgaaaatgaaagacactccgacaatgaatctcagaaaagacactcgcgagatgctggtccatctgtgaatggtgaaagcgctgcaaatggaaccgaggaaaatggcaaggctcatgaagtagcagatagtgagagctattcagatactggcagcattgatggacgggaagaagaggaggatatattatctgaggataaatcaaatgatggctcagataacgaaggcgacgatgaagatgatggcattcctgttgtttctgatgaagatgaaaatgttgaggttagacagaaagtcatgaatgttgatcctaaggagcaagaagacttcgatcgagagctcaaagcccttcttcaggagagcttggagtctcgtaaatcagaggcccgttcaaggctccctttgaatatgatggtgccgatgaacgtcctcgagggttcaaaagactcaagggccacagaatctgagagtggagaagaaacagtagacgaagagggtgggaatgctgggggtagcagcaaggtgcgtgtgaaggtgctaatgaagaaaggacacaagcaacagacaagacaaatgttaattccggccgatagttcaattgtgcaaagcacgaagcagcaggaagctgctgagcttgaggagaagcagagcatcaagcggaggatccttgagtacaatgagagggaggaagaattgaatggagcatcccaaatggggaactggggccaaggagctaccagtaccagcagtatcagatcaggtggccggggcagctgggatggttcagcacggggaggtggtcgacaacggcaccacataacgggttctggtggtttctaccacagttatggcaggagaagataagttcgcctgtgtgagctatttcgccctgagccttttggcaggtagaaagcatcctagtctgacaaattgcctctagcaaatgagattagcgtttaacacagcttgatggacaattgcctctagcaccctagtctgaaaataagacaattctaccactggtcatgggagatagcaatgccttgagaaggagctgcaaatctgatggtcctaatggcttgagttgctacggtgtttggtaaagctggttgtgatggctgtacccggatacatgcgcatactgtttcgacgccatgtagggggtatctggtcaaagttcgctgtctgatgcctgttctaatttagtggagtattactggcaatgtggtacaagcatcttgtcttgaaaatcgaaaactgcacggtatgtgtgcgccattttttgtctgatgaggtgtgttccatgcgtgtatttcatatgtagctacaccaatcgcgtgtccaccgaacgatgctaacttgctatgccgatggagcatgctttctacccgcatcgcaacccgcaaatccttgtccagtcgtttgtcttccatccaggaatgataccgagttctcatgtcacgcttgacgcttctttccgtcctgct

SEQ ID NO: 35979 - DNA, 2501 bp, Zea Mays
atgcacccacgccccgtctctttgaagccgcccgcgtctccacccgagaccccgacccaccccgccctcccccgccgtcgcgctcgcgctcccccgcgacagccgccatgcgccctatctccgccatgcctgcgcctcctcccccgcccgcccgagaaccaccaagtttcccttccttacacagcgaggtccaccatcaacgcccccttccctggcaagccacagccgtccacgttcctggccaccagcgacctcccttctctagcccttagcagcgagcaacacctcctccccatggctgcccccagaccccagtcccgtccgcgcatccgctcccccgtcagcgacgcacctattctcctcgacgtcgcccatggcgtggacggcgacctccctcaccctgcactctgatgttgagttgattttgcaaactggtaagtgttttgtttcatacggcaactctgcacatggacagaatcacagctctgttagcgttgttttatcaaggtacgtccaattccttctatttagttgactgtgattcaatatgcttgttgttcggttttacttgcgacatgctgttggggcatgtgtttgggatggatgacgtttggactagatagtttcagtcagtagccatctaaacaagcccttacagtattcgctatttcatattgaattttcctcatattgtagagaaaatcgcagctaatctgttcactgtggatgagttgccccatggtttgttcttaatcagaagaatggacgtgtgcaccacagtttagtgctaaatcatatggatataggagagatgtgctctctcctgtcctaaaacagttcatgttctcgtttttctattctgacagttcataagcgccggtcttttagatgcccactgacctggacatgttggtagaaatactgggcaggtgggatcaactccgatatttggtcaatttctcaaccactttctgttaatacgcaatttttattgaaaaacataatgacgtgcaatgcaaccaccctattcaatattcgtatggttagcaaaccatacgatcaatagaagatctttttggtagcactaaactacctacatacttgcatgcatgcgtcctaatccttgagtttgagtcaaaattaaatcaaaaattgtcatgatcaatcaaacaggaaagaattgacattctatagtttgcgtaggaaagtgtctctgtgtgttttctttttgaaggatcaaggattgaaggattttcctgcttgacggattagcacttcagtaccagtagttaagttattaggagcagtagcaaaaaggggctatatttgtttagggcttgttcgttttcatctcaatccatgtggatcagaggggtttgagtagctttaaatctacaataggtcaaaagctctactaaaatttttcaatctcatcaaatccatatgtcatatgaccgaacaaggccttagcgggtagggcacatcatcttaacgccaaactgctgcctcgaaaacgagtgtatagggcacaacatttgaaccacatatatgatatcaatcttatcaatctattgtgttaattatgaatcctgcatcaatcaaccagggcccggggcacattttcccaagccattgacaaatgttggtagatgcaggattcatagttacagaaactatgtggttcaaattttgccagtatttgactcatcacatttttcttctctatttcagttcttctagcagttgaagtagtgttttcttggcagatgttcgcctttaggacattgctgcgaggggaatcggatatgccacaggctgcatgttgttggagtttctatgtatccccatatcaaatttgtttttccctaatcagggaactcaattgtgcgagtaatagcaggagctcttccgaaaggccttcacatgttaatcctatcgaagaataacatatcaattattgaacgcctcagagaattgacacgattgcgcttgttggatatcaactataataggatatctagaattggccatggtgcagaggatgctaggaaaatactcaataattatgaaagtcggggccattactcagatggtaaacaaacttgggccatgtaaatggtcgaccttgcctaaactatacctggacgtattggaaagcaatgctgggaaagctatgccatgaaagatatttgtagcagtgttacatgatggcatcaagtgctgggaaaatatttattaatttatggttttgtttctatggaatataggagtcatgattttgtgcatttgatcagagactacattaactagaggatactttctttttttcaaaattacaaaaacaatactaagtgtacctattattgtctactcgtctcatgatgattactatgtagataaattctctaagctatgaacagtgaccaatgaaatatattcatttgcatacagttctcaaactaatgtattcacgtcattatatattgtgccagctttgtcaa

SEQ ID NO: 35980 - DNA, 404 bp, Zea Mays
cacaattcgacattcattccaacatgcatattttatagtatcatcaacatactcactttccttgctcgtcagcggtgttcatcggcgtcggcgtcgatgaagacgccatccacgcatccagtgagcggtcagaccgtccgggtgtctgggcgagcggcggttgacgggctctgcaggggcgtccagcgagcggcggtctgaccgtctaggcgtccaagcaaatctggagaaggagacggcgagcggcggtccggctatccggtcatctagcgagcggccgtcagcccgtcacgcacgcggtcaagcatgagggattgagggcaagcgactggttaattagtttaggtttttttttactttgttgccttgcttctttcctgcgggcctcattggttgggaatttg

SEQ ID NO: 35981 - DNA, 1604 bp, Zea Mays
cctctctgctcctctccccgcccccacacggctgcctacttacaaataaacccccggcatttcctggcctaacacgctctcagtctcactcccacggtcccactcctcaggagcgtccagagtttaggtgctcgtggagtcgtggtggaggtggtaggtgtcgatggccttcaagctggccaccaaggccgcggcggcgtcgcccgctgctgctcaccgcgggggtctcgcccgggggccggagggtacgagccgcgttgccttcggaccagcgcctagaaacaaggggctccgcgcggccaacaactccgcgacgcccgtggctaaatacgaaagtggaaccgtggggaggaaattgacatggatggctatatatattaactctgttgctttttgcacaaaggcttactgtcttatgtgatgctggattgctttgtttttacgaaacccgctctagttatactgaaggaactgatcatttctttatcttaatggtgcacttttattagggaagagagggttgatcgaagtgaaatattgacattggatagcattagacaagttttgattagactagaagacagcatcatatttggccttttggagagagcacagttttgttacaatgctgatacatatgatagcaatgctttccacatggatggttttggcggctctttggttgaatatatggttagagaaactgaaaagctccatgcacaggttgggagatacaagagcccagatgagcaccctttctttcctgaggatctgcctgagccccggttgccacctatgcagtacccaagggttttgcatcccattgctgattctatcaatatcaacaaagagatttggaaaatgtattttgatgaacttcttccaagattggtgaaaaaaggaagtgatggtaatgctggatccagtgctctttgtgacacgacctgcttgcaggcgctctccaaaaggatccactatgggaagtttgtggcagaggctaagtttcaggagtccccggaagcttacatgccagccataatagctcaggaccgtgatcaactcatgcaccttctcacatatgaaacggtggagcgtgctatcgaacatagggtggaagccaaagccaagatcttcgggcaagaggtgaacatcggtgtggaggacaacggcagcccaccggtgtacaagatcgttccgagcttggtcgccgagctgtacagctacagaatcatgccgctaaccaaagaggttcaaatcgcgtatttgcttaggaggctggattgagtatgtttatgtagatgtaaattgccagatcagaactcctggcgttaagccagaacattggtaaataccggttttggtgtcaggatgcaaaatgtaccatgtgtggaattgtgccaacaaacaagcataatatcatgtggagttgtcgagtagtcgcgcctcgtgcgtactgccaatggacaatgtttgtagactgtatggaatgatgggtcacttcctttggcgggtgcccttttgaaagggagtaaaattctctcattgtcgttgaaatttatacagatccgctcaagtgccatcgaaattttcaacttactttgatt

SEQ ID NO: 35982 - DNA, 1512 bp, Zea Mays
ccaacaaaaaaaccctagaactccaaaaccttcagccccacgctatggccctcgcactgcgcctccgtcgggtcctcgcggcggcctccaccgcggcacccctgctccgcccgtccacctcggtcgcccggccttgcccgctcgttcccctcgcctccccggcggcggctgcgcggggcgggaccgactatgggacggacgacagcaagatctcccccgacgagatcctcttcgagggctgcgactacaaccactggctcatcaccatggacttcccggaccccaagccgtcgcgcgaagagatgatcgagacatacctccagactctcgccaaggtcgtcgggagttatgaggaggccaagaagaggatgtatgcttttagtacgacgacttatgttggttttcaggctgtaatgaccgaggaaatgtcagaaaaatttcgcggtttgcctggagtagttttcattttgcctgattcatatctatatccagaaacaaaggagtacggaggagacaaatatgacaatggtgtcatcactccaagaccaccacctgttcattatagcagaccatcaagaactgacaggaaccgtaactaccgaggaaactaccaggatggccctccacagcaaggaaattaccagaacaaccgtcctccaccagaaggtggttaccagaacaacccgccgcagcaaggaaactaccagacataccgctcgcagcaagatggaagaggctatgccccacagcagaattatgcacaaggtggtcaggatggtagaggttttggaaggaatgattacacagaccgttcaggctacaatggaccacctgattttcgaagtcaaactcagtaccaagggcatgtaaatccagctgggcaaggtcaaggttacaacaacccccaagagcgtagcaacttctcgcaagggcagggaggaggttttaggcctggtggtccttcagcacctgggtcttatggccaaccatcagcacctggatcttatggtcaacctaatacacttggtaactatgggcaggtacctccatcagtgaatcctggtggtaacagagttcctggtgtgaatcctagttatggtggggatggcagacagggggctggaccagcatatggtggagataactggcaaagaggttctggtcagtatcctagcccaggtgaaggacaaggaaactggcaggcagtaagagctgacgtgttccactgaagacaagaatggcacttgagatttagaaatctccatctgtaaaataaacgactgtgatgcattactcttttttttttcttgcatttgaactctaaacttatgggcatgcgttattaccaaacctacggatgcaaattcattttagttttttgggccaaatgttggcatttttaaatggcgcagaatgtggaactcccctttgtcttcgtgtattgtttgcaggtatgctgtcactgtaaaacacgtgctaattactatagtattttggtgtagtttctcgttt

SEQ ID NO: 35983 - DNA, 172 bp, Zea Mays
ttgcgttttggaaacttggaataaagaacaggtaaaaaaaatgcctgctacgcatagacctgagcgaatgaatttgtggccaccagactttagattcataccttttctttagtacctttgcgtgctcctgtattagcagagcaatcgtgctgataacgtgttaagaaccctt

SEQ ID NO: 35984 - DNA, 3748 bp, Zea Mays
cttagcaggaggtgaggaaaggggacggaagcacgcagaccgggtcggatccaccggcccgcggaacggatcgaggccaccggcatcctcggctcgcgtcgcgtcgcggcgccgagctcgaaatccccggatcggtgcagctgccccctgccgccgcccgataacgcggcgggagggtggtggcctgtcgatctcgcggcgggagctggttaactacctgccaatttgtggatttgtgtgcgtgcttgattttggtgcgtgtgtggtggtgttgagtcgccggcgtggggtgtcggagctagggtttgggcgttcaggatgacgcgccgggtgcggcggcggacatgcagggaacgggagggtaaggtggtgcggggcgcatcgcgtgttgtttcggctgggccggaaggcgaggaggatgcggcggcggtggaggtggactggagggcgctgccggacgacacggtgctgcagctctttgcgcggctgaactaccgcgaccgcgccagcatggcgtcagcgtgccgggcttggcgagcgctgggctcgtcaccctgcttgtggaggacgctcgacctccgcgcacatcgctatgacagggaggtggcgtcgtcgcttgcctcgcggtgcgggagcctgcgtcggatacgcttgcgcggccacgaggcggcagaggccgtcctgggcctccgtgcgcgtggtcttcgcgaggtggtggccgatggctgccgcggcctcacagatgccacgctcgctgtcctcgccgcgcggcacgaggacctccagagcctccagatcgggcccgatcctctcgagcgcatctctagcgacgccctccgccacgtcgcgctttgttgctcgcagctctgccgccttcgcctctcgggtctccgtgaagttgacgcggaggccgtcggagcgctcgcccggtgctgccccctcctcgaggatgtggctttcctcgattgtggcaccgtggatgaggccgcccttgctggtatccactctgtccgattcctctctgtagcaggatgccggaacctgaaatgggctactgcatccacctgctggacccagcttccctccctcattgcccttgacgtctcccgcactgatgttccgccaagtgctgtttcacgcctcatttcccatgccaaaaccctcaagctaatatgcacgctgaactgcatttctgttgaggaggaacagcttcacaatcctgctgtatttagtaactctaagggcaaggtcgtgctaacgattaacagcgatatcttcaaatcttttgagaccatgtttccagttgtggatgtgaaagagcatgagtttttcaatcaatgtaactggagtcacaaagacaagatacctggtgatacgatgacatggctcgaatggatcctgtcacagtcacttctccgaattgcagagtccaacccacaaggcatggatggtttctggctgcagaagggcactacactgctgcttagactgttgaagagtttacaggaggatgtgcaggagcgggcagctacgtcgcttgctacgtttgtagttatggatgatgagagtgcaaatgtggatcctgcaaggtcggaggcagtgatgcagaatgggggcattcgaatgttgctggaccttgcaaggtgctcaagggagagcgcacaatctgaagcagcaaaagctattgccaacttgtcagtgaataccaaggttgccaaggcagttgcagatgaaggcggcattacaatactcattaatttagccaagtcgatgaataggcttgttgccgaagaagctgctggtggcctttggaatctctctgtaggcgaggaccacaaggcggctattgcagtatctggtggcattaaggccctggtcgatctaatatttcgttggcctgctggaactgatggagttcttgaacgtgctgctggcgcgcttgcaaacctggctgctgatgacaagtgtagcttggaagttgcaaaggctggtggtgtccatgctttggttacacttgctagatcatgtaaacttgatggtgtcctagaacaggctgcaagaggtctggctaacttagctgcacatggggacaacaatgacaacaatgctgctgtaggtcaggaagcaggggctctggaggcactggtgcaactaacaagttctcaaaacgagggtgtaagacaagaagctgctggtgctttgtggaacctgtcatttgatgacagaaaccgtgaagccattgctgcagtgggtggcgttgaagctttgtgcaacaatgtttgaatgcttcagaaggtcttcaggagagagctgctggtgcattgtggggattatctgtttcagaagctaatagcattgcaattgggcagggtggtggggttgcaccattgctcacattggcacgctcagaggttgaagatgttcacgagacagctgcaggggcactatggaatcttgcattttattctggtaatgctctccgcatagtcgaagaaggcggggttcctgttcttgtaaaaatttgctcatcatcacggtccaagatggcacgtttcatgtctgcactagcactagcatatatgtttgacggaagaatggatgaagttgctttggttggagcatcctcagatagcagttccaagagtgttaatgttgagggagctagaagaatagcatttaagcatatagaaacctttgtgctcactttctcagatccacaaatgttctctatggctgctgcctcctcagccccagcagcgctgtctcatgttgctgaagcagtgtttatacacgaagctggacacctgagatgcagtcgctctgagattggtagatttgtttccatgcttcggaatccttcaccaattcttcgtgcttgtgctgcctttgcccttcttcaggaggtcggcatgcagtgcatcacgcaggtctcttgcaggaagcaggggcaggtcgggtgttgcgcgcagcagcggcagcgacaacagcttctattgaagctaaaatctttgccaggattgtactcaggaacttggagcaccatcagttagggatgtcaacatgaacacccagcagaggttcatcctccaataaacaaaggcctctgcatcgatgggctgcttggccaatgcagaatcaaacagtttggccttcggagccttttgacatcacaacagttttggtctgtgcagacagtgactgaaggagctccaccgaaggtataacccacaactgtgaagtgactgaatgaaaacataagtggcgacccttcgcgtattggacgtttaaggttgagtgtgcaattttctagagttcattttgcgtgtacaagtaaaacttttttagagtcgatgagaattataaactggcatatagcttaacttatggatatttattccttattcgttagcgttgaggtgtgtggcggcgtcatgtagaaagttaggttattcctcctaggatacatgtaactttataaatgtactgttatgtattttcttccttatgattgattctgtgcatttatggatcgagttgtagattaccacttaacgaaacaaaggtttaatttgttcatcaacatgcgcatcagtaagcttattgagtatgaatcctcgtttatttttttttctaaaaataaacttacaaaatttttagtaatgctcttagaaaaaagcttactcagagaattctcatattttttagattttagaaaagattcttaaatctccatttaaaaaataaaaaa

SEQ ID NO: 35985 - DNA, 357 bp, Zea Mays
atagcgagtcaatcacgttagtgctgtgatcatgcggcaaattacttaccttagccgcgttgtgagtataaaattgtggctagacgtcgtccccagatacaaacttttctcctcgttccaaagagatgtgctgccttcgtttttcccatcccgcgtgccatcgtgtttaggagagcagtatctctgaagcctacgtcccgtcgtgtccctacaagggtacaggtcatatcaggtttttgggaagtgttgtcgcgactgctcgttattcatctgctttctctacgccaacatcatggttctcgttggtgttctatgtctactcctgcgttgttctagcgccgacaatcccactgtaag

SEQ ID NO: 35986 - DNA, 3082 bp, Zea Mays
gcccaccgcagcgaacaatcccttccactcccctcccctaaacccctcgccgcccgcggggctcgccggccggcgcccctccaggcccccactccctccgcgtgggcgcgatgccaacggcggtgccgacgcccaaggcggtggtccaccagcggttcggcgccaaggcgcggtacacggtcgaggaggtgcgggaggacgtgggcggctgcccgggcctcgcgccgcagaccaggaacgtctaccgctgcgcgctcgacctcccgggcctctccgttgccacgcccggtaccttcctcaggaagaaggacgctgagcaggccgccgcgcagatcgcgctcgacaagcttggtattcatcctacagcaaatagtcccaccacaccccaagaagcttgggctgaactgattgctcgcatatctggttttttcatagatgagaactttctgtcatctacccatcctcttattggccatttgtgtgtgtctctccggagaactggagacctcattgggaggttacctttgtcggctattgctgcatgtgatgtgaaggtcaatacattgtgtaaattgatcgaccatagggcagaatttgatcctctattggtcttgtcattattgtacaatgctgcaaaacaatctcctggagtctctgttagtgacagcaacttctggattcagagtgaaaagccttattctccggaggctgttgactcggcacttgagcgttggtctggtacaacagatcccgtagaagtagaggcagttcttgttccccacatgttggaggatgaactgaagacagtaagaattaatctacgagataatgaacattatatgagttatgttgcagcagagctctcagcaattgattcctctcatgttcttgtatcaagaacaattggaaaaacatcatccgagataagactgtattttgcagccgcaaatatacatgctgtttctgatatgtcaaaacacgcgcttgattctcttggagatggtgacatcaactggcaagtaaataagcgagcttcctacatttgtggccaaacaatttatggagatgcactcttggcaaatattggatacacaaggagagattcggaacttcacactgaagatgtcaatctatgttcctattacaggatacttctgggcaagttacctgatggaaattgtaagatgtctagggattcgattcttgcagcggagcttccatctgcatactctcgttttagttggaaaggcctctctccacgagatcttctttgctcattttgtcgccttcagaggttgccagagccccattttgctgtcagtagggtctcttgtgatacattaatgtcagctgtgagctctgaagaaagaggagcaccagcaggcagcgcagaaaatcagtacaccaatgatgtcaggatcaacaaggaaaaaccagatctttttaaatgtgaagtgaacatacgttcacggaagcaagaagttttactagagtattctgcagctgacacttggagcaaggaatctgatgctattcagaattcttcattaaaggtcttgatttggttcaataattattttaagaaactaacctcaaaaacaggcaagctatatctttctgagtctactgctggtgtcaagttggaccattttctatggatacacaaaagaagcaccttgaaagcactgcaaagttaacacacattgaaggtccagactctggtgttttcccgtcccacggatcattgacttgtataagttatactgcttcccttgtgacgaaggataaagcaaaaacatatttgttggagagccacaacgagtttgagtttgagattgggacgggtgctgttagtaatcagcttgaatcatgtgtaactcagctgtcagtgaatcaaactgcacgttttgtagctgaactgcctcctagggatttaatcatggctgcatcttgtgagttctcacatgacctctccaatgtatctagcgagagctgcttcctggagttctctgtaaaggttctgcaggtaactgaaccattagaagatagaatggagaaagccctgttcagtcctccattatctaaacaaagagttgaatttgctgtacggcacatcaacgagctgcatgctaccacacttgttgattttggctgtggatctggtagccttcttgattcgttgttagagcatccaaccacgctggaaaagcttgttggcgttgatatttctcgaaaaggcctcacacgtgcagcaaagagccttcatcagaagctgagcaaaaaatcaacgacgcagacaaatgttccaactgctgtgctgtatgacggatcaataacggactacgattctcgcttatatgggtttgatattggcacttgtcttgaggtgatcgagcacgtcgaggaggaccaggcgactttatttggcaacgtcgtcttgagctcattccgcccgaccgtgctcattgtttccacacccaactacgaatacaaccctatcctccaggggtctgctatgcccaacaaggacgacgaggcagacgaaagcgctggtccctgcaagttccgcaatcacgaccacaagttcgagtggaccaggctacagttccagtgctgggctactggcctcgcggtgaagcatagctacagcgtggaattctccggcgtcggtggctcaggcgaggagccaggctacgcttcccagatcgctgttttcagaagactggtgcagggccaggaagcgatgtgcctggacgaggatggcgatcagccttacgaggttctctgggagtggcctaacgcgtgtgtgaactaggtagattgcacgtctaatctctctagggcttggaactttgaatcgtgcccccggtttggaactgagtaatatatgtgtcaggaaagtgggcatccgacttgtggcaagaacacaaaaaattaacattgctgcatgcaagtgcagaaattcagtctgcttctaggttctggatgtacggtagttactacactgtatatgatacactgtatatacgaataggtctggacgaaatgctcgtgcctcgttggctcgctcggtttatttgaa

SEQ ID NO: 35987 - DNA, 541 bp, Zea Mays
tcgtgccggggctgcctggaccgcctccggcggctcctcgcggaagcgtcgtccgagccggcgtactccaccgccgtcgcgcggcggatcgcgctggaggccgacaacctcgtgtggctggtggagatgctggtggcgagccagcacgcctgcgacggcttcgtggcgctgtggtcgggccaggcggagctggcgccccgcttccgcgcgaaggagaacgcgacggcgaggtcagcgccgcgaacgccgccgacgacggcaggaggttgccgtttggcacagcgagcatcgtcagcgacggcgtgaggttaagtagctaaatccttcttcgcagtggctaataactaaatcaattccatatcagcgtttgtccatcgcctgcgcctccaaaatgtcgaagcccacgcctacgcctctatttcgtcgaaaccaattctgccgtgtttcataatctcaataatctccctagagagagtatcggatatggacacttccgccacattgtactggtgttgcttgagggtgtttcgtttatagggac

SEQ ID NO: 35988 - DNA, 316 bp, Zea Mays
gctaaagccagtcgccaacgccaaaacagaagggagatccggggttgggtgcgtccgcctatgccgtgtctgtccacgcctgggggaagctcggaggttctcttaagctcggggatcatgtctgtggtatggccaaaccgcgggagtgcgtgctggcgaggtaatttcttgtcggagcaagtgcgacgccgctgttccgccatactgcgtcaacgaccatgcccgtgttgccacccgcggtatgatcctcccttgcgtacttcccacgattcccgcatcggttttggcacatcagttttcgtgttgggggttggcg

SEQ ID NO: 35989 - DNA, 3046 bp, Zea Mays
gatcgcaccgcacctaaagggagggccaaatccaatctcaatctcccacggccaagtaccatcacccccaccccaacgaaagggagccgggctcccctatctatatccacccgtccttctccctatatatatggattgggaaatttttcaggagggcagagaagcgaaagggacgcgcaagctccttcacccaccctcccccacgccacacgctcctcctacataaccacgctgcttcgattcactcctcatcggtggctcacgaccgagctgctgaggcaaagcttgtcccgcagtccttcccttagccttaacactcggagttgatcccgtctccgggggaagcagctggtaataatggcgcggtgccaggggaccgttgagagcctctgccaggggctgctcgacctcgacgacgacaagttcggtgcaatgtgcagcgccttcggctacctccaggagtggccggacctgggtgccgccatgtgcggcgccaatctcgccgtgccgcctgccgtggcgacgccgagcgccggcgacggcaacgattcctcctcttgcagcgtcagcggcgggttgaggaagaggaggccggacgcgtacctcgatgccaagggtggtgcgaacggcatgaacaagagacccagagggaagcagcagccgtctggcctctctgagatcgcggcggcgcccgggaaagggaagcaggagaggccaaaggctggcaccaagaagaaggccgaggctgcggcggcggcggcggctgccggccagaagaccgactacatccacgtccgggcccgccgcggccaggccacggacagccacagcctcgccgagcgggtgaggagggagaggatcagcgagcggatgcggtacctgcaggagctggtgcccgggtgcagcaaggtcacgggcaaggccggcatgctcgacgagatcatcaactacgtccagtccctgcagaagcaagtcgaggtgaatggaactgctgctgcctgggatattggctcccagaatttgttcagcggatttgatgcacaatttcagtcggtagaaagtggctgcttgctagacaacctcaaaatggaaatgtgagaagaattaatcctcattgctggagttttaaccacgggaaaaaaaacttgtggctgaagattctttattcatatcaactgtactaatgaagtattctgtcagcaatggcaatacaagtacatttcttgtgttatatgtttgtctgctactctcccggtttctaagcattccttcataaccaagccagacagagggttcagagcttcagattacaagcaaagcaaagcacttaaggacatgttcccacaacaaaccagcaccaatatacaacactttatcacctaaactgacagtacaacgaacaggaacaactctcctactcatcttccttcaaagcacagactgttcaccagcttctgtaaagacatgattcaaccttgtaacagaagtaaaggataattcgcttgcacaatatataatgacagtgaccaccacaaaggatttgagtgcattgagatatcagatgaatcttatttcaatatttacatgtatctacactgacatggcacatgatttgagtgcgttaggttacttgatacccagtctattttcgtgaaatgcttgagacgaagtaaagaacctgaactaacctttcccaggcacaatgataattggggctgctttacagttgtggaagcaatactcactgacacttccctgcaacacactacagtacaaaggcaaagttagagatatgcttataaatgcaatctacagctcacctccagcaataagatataaactaggcaccaaaagatgattctgcaactatcaagttatctaaagaggcactctagtcactgttctttccatgcatttgtacaagcatctcaccataattcagccaaagtcgctttttatactgaacaatcagacctaccttctcgaattattgaatctgagcatgggctcagcactcagcatttttcagcaagcttccaaagtaagagatccaggcacaaattatgaagatgttgttttacatcaaaagggaaaaaggcaaaaaggcaaagatatttcatatctgaatctcgcaagatctttttccttaaaatggtgatgtttacttttccaaacatcaggaccacgcctgccctgatttcagtttcatgcaaacaataatggcgttagttagacagatcccttggcattctaaagccagtaaagaatcccttagggcatgtacatttctgagccaccagttcggtttccaagtataaaagacgattgagaggttacatggtaaaatcctgagaccttggatcatcaatgcagttaagagacaacgtgtatgaaaagttgtgaagaaacatgctcttcgcgaagagtccaggtcttatattttttccacttggcctcttaaagaccactcaagagatcccatattaaatggggttgtacatgcccttagcatcaagacgtctcttgctgttgacatcataccagaactgaaaacacgtggttttattactgagatgaagtttctttttcttggagtaattcttttagatggtgaactggtgatcaaatatttgtattcgttacttgcaagtaacaagacatgcatattgcaggaacataatcacagaagtgttccaaagaagagatccctgattttgaataaaaatgacataaaggcaattgaatgacaacttttatggattacatgcaccatgcaaaaaaatgaaggtagcagcagaatcatgacttcgaattatacgatttttttcacttgcaaagttggctggacataaaactaagtcaaacgaccgtagatataatgttaattcaaaaggctgaatatctaaatgtaccacagatatataatgatttggagtttaaaagagtcaggtacctttgaataaggcctctaccacgtgtaccaagaatgacagcggcaggcttcagtcgatctgcttctcggcaaataacttttccagcgtctcct

SEQ ID NO: 35990 - DNA, 4657 bp, Zea Mays
tcgccccaacctcaaacagtgaacggcgccacctctccgccgccgtcagatcggagctcgactccgaaccccgcttttcagccgccatggcggcgccaccgcgccgctcgctccttgtcctcctcgcggggatcctagttttcggctccctcaccaccctcgccacagccatctacgaggaccaagtcggtctcgcggactggcaccagaagtacattggcaaagtaaagcaagcagtttaccacagccaaaagagtggaaggaggcgtgttgtagtcttgacagaggaaaatgtgatctcatctcttgatctacgttctggagatatattctggcgacatgtcattgacaagaacgaccccttggatcagcttagtctttcacttggaaaatatgttctaaccctttctttgggaggaactatattaagggcatggaatcttccagatggacatatgatctgggaaactaaccttcggatctctacagcatcaaatccacagttgcatgttatgtcaaacaataaagtggccaatgacaacttggttttagtttcagctgggcgatggatttatgctgtatcaagcactgatggggcaattttatgggaaaaggagttttctcttgatggcttagaaattaagcggattctccaatcacctgaaaatggtattgtatatgctttaggacttgctggttcctcaaagctagctttgtatcacttgagtgctaaaactggagagatactaaaagatatccaagagtcactccctggtggattattgggtgaaacagtacttgtttctgataatgtgttggtagcattagataaggccagatcaagtctgttagttattgaattcaagggtgagagaattagctacaacaaggtgcatgtttcagatcttgttcaagacttatcaggatcacttgagcttcaatctttgtccaatggtgtcatatctttgcaaacatcatcttctatttccctcctaaagctcaaaggtactgatggattggaagtacttcagagatttgaccagccagctgctgtcagtgattccctgacaatcacagaaaaagaagcagcttttgctgtcgtgcaacatttgggttctgaaattgagtttatcgtaaaatctacaagtgatctaagcagtgaaattattaaagaaaagcttgttatagaccaaaataggggcaatgttgagaaggtcttcttgaatagttatattcgaaccgacagatctcatggttttcgagctttggttgtaatggaggatcattcactcttgttaattcaacaaggtgaggttgtttggagcagagaggatgggctggcttcaattgttgatgtaacaacatcagaattgcctgttgagaaggatggtgtatcagttgccgatgtggaacacaatctctttgagtggcttaaggtaacccacataaactgctatttatttagttattcactattgggaaatgctttagataaatgttaaatctattatgctgtttggatgttgatattggagaggatggaattgaattgggttgaataccaaatcaagcattgtattgaaatgtgatgtaattccaattctattgtttggatgccactggattggagtttggaattatgcggtctaattccatgcaataccaaggggtgagactttgtattgggagagggggtttctagttatagtccaatttcagagaattgggcctctgattccaaatctcaattccatgtgcaaccaaacaacagaatttaagaaagctgattccaattcccaattctgagctccaatatctacatccaaacgggatatattagataatttgaaggctccaacattatggtgaatttattatctttcttaaattcttttcaatctaatggcttgcttatatgtttggtgcacaagttacttgtagctaatgtgttagaatgtgctaagaaattgatcaatgttgatctatgatttttttattgttaccataaggtgatacaaagttattcattcataaaaccggtgacaacattagcatatgatccccacttgtggagtttggttcttacatagggacacatgctgaaactcaaaggaagtctaatgcttgctaatgctgatgaagttgctgcaatccaagcaatgagactaaaaagctctgagaaaaataagatgacaagagaccataatggatttcgcaaactccttgttgtattgacaaaagcgggcaaagtgatggctctgcacactggagatggacgtgttatctggtcgaaattggtgccatctcttcgtgcctccagatgtggtggagtcccttctgcattaaggatataccaatggcaggtcccgcatcacagtgtcatgcgtgaaaatccatctgtacttgttgttggcaaatttggagcagaaccttcaattcctggtgtattctctattcttgattcatattctggagaagaactgaactctatgaaacttgaccattctgttgtccaaattattcccttgacactgaaggattcatcagagcaacaacttcatctgtttgttgattccgattccaatgcacatttatatccgaaatctccagatgctctcaatgtatttcttcatgaaatgtcaaacctgtatttctactctgtagatattcaggcaaatgttattaaagggtattcattacagaagtcatgtaatctcaatgtgggtgatgagtactgctttagtacgaaggagttatggttcatcatctttccttctgattctgaaaggattactatctctgaaacacgaaagatgaatgaggttgttcatacccaagctaagataagcggtgaccatgatgtgatgtacaagtacttgtcaaagaatttagtttttgttgctactttgtctcctaaagctgctgttgatattggatctgcactacctgaagaagcttcacttgttgcatatcttattgatgcagtcactggacgcatactccatcgtgtgactcatcatggtgcacaaggccctgtacatgcagttttgagcgagaactgggttgtctatcattattttaatcttcgagctcacagatttgaaatggcggtgatcgagatatatgatcaatctagggcgggcaataaagatgtcacgaagctcatactagggaagcataatcttttggcaccaattacatcttatgcccgccctgaggtggcagtaaaatcccagtcatactttttcacccattcagtaaaagcaatggcagttacacaaacggctaaggggatcacttccaagcagcttctgttgggtactattggtgaccaggttttggcacttgataagcgctatcttgatccacgccgttcagtgaacccgacacagcaagaaaaagaagagggcattataccattaacagattctttgcctataataccccagtcctttgtgacgcactctcatcaagtggaggccctgcgagccattgtttctattcctgcaaagttggagtccactattgttttcacatatggtgtcgatctattctacacccagcttgccccgtcaagaacctatgattccctaaccgacgaattcagctatgcgctgcttctaatcacgatcgcagtcctggttgccgccattattggtacatggatttggtctgagaaaaaggagttgagagacaagtggaggtgagcaaggtctcagtgttctgacgctgaggaaattttgggccctagtcagctaccttctcctcctctccccttttcattgtagtgctagagttcgtttcactttttgactaggactttatttatgtaaccgtttgacaacaaagcctatctgccgtgaattgtcacactgcggaggccttatagaaagccacttacgcaattaaagattcaggaaatgacatcgaagggttagcagagcgcagatggcgtgaatctgtaccactgcagccaaacacttcacagcagattttgtagctattgttgttggtagagggtttccgcttctcttgtgtaactgaaagctcgtctttatttcaatcactatacctttcttgacagaaactgtatatctcttccaatgcactgtcattacttctgctgttagcctgtgatagggtgggctacaagatgctctacgttggtgcggtttgcgcaacctcagtcctccagggcatatctttattctgaaggtgatgtaacaactacatcattgaaccaatgatggttattgctacttcctgatcggatcgttcatgtgttaatgatggcagtgatcaagtcaggtaccatttaaagatttgtagcatcttttgtcaaggttatctttcttttggaatcttgatgctcgtttttttgtgtgtgtgcatattattggttgctatgctcagatctttaaacttcaatatagtacttcctgctcctgggtctgtcagcgtggcatgcaaggccgtctagcttgtctcaggttctttcatgtcacgccccatcgcccttttgcaacggacctaaggtggtagtggggctttcaggtcgcccatgcagaaattccaggtatgggttctcttttttctgtggtggtaaactggcaggggtcgcgagcttcaatcatggtaatgttgggtatgctcgcaa

SEQ ID NO: 35991 - DNA, 725 bp, Zea Mays
ccaaaacagaatcgcaccaaccccgtcgggctcctcggcctccccttatgcagactcctcacccctgggctataaagaaatccgagcgccatgccccctgctcaccagaacagaaccaagaacacaggatatctcgataccattgcaggaggggatggatcaccatgggagaaagtggggacgccgcgagcaggattcgttgagcacgacatcgtgatttccggtaacaacccctcccatagattctctttgagcctagctttgttttgatgtgtttcgcttagagcaccgggcaccgtatcggcaacggaccaatcaccggtgaagctctgtcgtatgggggcggcgacgccgctgctctggtcgtggcgggcaagggggaagtgccttaaacgtggattaaaggatgaacggttgagattaggcctgtgcataccattttgtggggtgatctgagctactgatcgatgacggacgaatgagatctaatcggggagtctgttaattcctgctcgttgattcgggatagcacaagtgagatcgaatctcagctatttttaattgcgatcgtagatctcggatctgacggcttgtttagcgtaccatttcggtttatgaaaattttaatcttgaccgttgaaagtcgcctataggggggtggataggcgaatcctgaaaattataactttacaccccaactagatcccttgcttagtggttagaac

SEQ ID NO: 35992 - DNA, 1983 bp, Zea Mays
gaatggttctataattgagcactcagagcctgtttgctgtccctgtggtcctaaccgccgtgtaccttcatcttgtggaaacgtttttgagaaaattttcaaaggaaaagctaatacggctcactgtctaagatttccaggtgactggttccatgtttttggaattggaacaaggtcacttgggttcaacatcagggtacaagttaagaaaggaggttgttgttggtccagagaatagaactgttgtttctaaagacaactttctgagagtgaatctcattggtgattttggtggttataccagcatcccagcatttgaggacttctatcttgtgacccctaggaagagtgctggtagtggtgagccacaaaaccttggtgctgaatatagaaagtggatgctgttggagagagttcgttttacagacggtgtcgaatgtaacaagattggtgttggttatgaggctttccaaaaccaacctaacttttgtgcatcgccatttgagagctgtttgaacaatcagctatggacctttttggagtctgacaaaaaccggataagcatgagccgacagccccaatatgttgtgcagggaaggtttcagaggatcaatcaacatccagatgcaagtgttcattctttttctattggagtgacagaagttattaatagcaatttacggatagagctgagtgctgatgacatagaatacatgtatcagaggagtccagggaatataacagacattagtgttccagcatttgaagtcttaagtcaatatggtactgcaaaggtcacaactaagaatattggtacactggaggcttcgtataccttgacatttcactgctcaagtggcatcagttttatggaggagcagtactatatcctcaaaccgaatgaagagagtacccgtttattttacttgcacgcatctacagatcaagcagcaaagtatcaatgtacagctattctgaaggcgtcggattctagtgaactcgacagacaagaatgtgttttttctactacggctacagttcttgataatggaacacagattatcggttcaaatggctacaaattgggtttctttgacaccatcaaaggctatttggttagcttctgggattttctgattgatttaatcagtggcaaatcctgcaggctgaacaaatgtcggagcttttttgacttcagctgccatgcgcagtacagatgcataacctggctcgtcatgttggtgctgctactttttatgttacccgcaggcgcaattgtcctgtatcttcttcatcagaaaggcttcttcgacccagtatacgactggtgggatgacctgctgggggcggactaccgcgcgcaccggaggcacaagaaaggccgccgccaccaccatcaccaccacgaccaccatcaccaccggcaccaccaccaccacgggcactcgcacggccatgaccaccacccccacagtcaccaccacgcgcaccagaggagaaagatcgagcccagccaccaccacgtcctacacaggcagcagcccgggacagcggcagaaggccaccggcacaagcacgacccggcgctcggcgtgcagcacagggaggccgggcacttggggcacaagcgtcggcatggcaaagcggtggtcgcggaggacgccctggacctggagttcagggaacgaaggccatacgaggtcaggcatgccgggcacctgcaccgcgaccaccaccaccaccaccactcctgggaagtgtaggaatagttctgaccgtctgaactttaagacatctagcgtaagatgaagttggtgtaccgtgggcacgggacatgcccttttgcatgcatgcagtgagttagtgggtgtttaatttctagtaaactaatttgtatcgcttcattttatttcattttagtctttaatttgcttaatattgaaactaaaatttcatattcgacaaattagaaaataaaataaa

SEQ ID NO: 35993 - DNA, 6464 bp, Zea Mays
cgcaactgccatcgtcctctgctcgtcgcgtcgttctcctctcgaccgcatcgcgcccgtggcggggaacgagccatcgacgccgcgtcgcgtgcctttcttcttcgtcccccccctgcctgcctagctgtctcaggctgccgcccgcccagccccaaaacattcggcagccgagtcaaccgagaacacgagccatccacccaccctgtcccttccccggctttcccccgtcctcggctccaccaattgctctcgcgtcagtggaaggaaaaaccaagggcgagggagggaggagcgcatctccgccccgcccgcgttcccgtaccccgatccgccacatgatctgacaccgcattgccgccgaggtgacccctcccgcccccagaatggaggcgctcaacgagctctgcgacctggtggccgcgcacccggatctcctcctcgccgacaagcttgcatggctctcctcccgctgcgccgccgccccgggtgccgccgccccgcagcgtgcgtcgagggcgcaccttcattcgctcctcgcgttggcgcgcctcctcccggcgggtggcgccggtgccggtgccgaaggcgatgcggcgcccccggccccactcctattcttcctcgcgtcccacgccttcctctcgccggccttctggccccagtctttcgccccggcgccgtttctcgctaggctcctcccgctcctcgccgcggccccatcctcccccgccctttcttccgcgctctccgccgccctcctcgcggcgctcgacgtcgccgacccgacctccgcgccgctcgcccgcgcgtttctctccgccgccgctgccgcggcgcccctgccgctcctccccgcggatgccgcgcccatcgctgcccggctgctcctcgagtttcttggctccgaggaggagccgatcagggccaaggggaagggagaggacaccttgggcgaggaaaacggtggggcaaaggaggtagtgcggaggttcgaggaggaggaggtcgatgagctggagcggaaggaagtcgcattcagactgaccgtgcatatgcttgggggcgagggtgggctagagaccgagcagattgggaaggtcaggaatgctgctgcgcgacaggtccgatcactcacggattttctcaagattagaaagcgggactggagggagcagggtacacagctcagggcaaggataaacaccaaattgatgtgttgtcaagctgcagtgggggtgctggtgcgaagcgtttccaccatggatactgatatcaaatcttcgaaggatatgctccagcagactctagcttggttcatcgaggccaccaagtcgtgcatcctgtcatcctggcggaaactgaagatatgcgaggagctattttgcacactgctcaatgggatcagccagataactgtctcacgtgggggccaacttctgccggtgcttttgattcccttaaaaccgcttgttgtgagcacatgttcgcaggctgacatggcaggcagtagtcctggggctctatttgaagcagttgtgaagttgagctgtgagatcatagagtttggctggacaaaggatagggcccttgttgacacatttgttatgcgtctagctgcttatgttcgtgagcggaatgattacgaggaggaggatggcaaaggaaaagaggcagttccagttattcgacttaatgtcatacgccttttggctgagttatgtgtttgcttgaaaaaatgggaagttgtggacatgattttaccccttttcattgaacatctagaagagggtgatgcttcatctccaagttcattgcgtttacgattattagatgcaatatctcgtgttgcgtgcttgggttttgaaaaatcatatcgtgagagtattgtcttgatgacaagaagctatcttgacaaagttaaagctctaggggcttcagaaaacaatacagttccatcagaagcaacaactgagcgaacagaaactcttcctgcaggctttctgcttgttgcttccaaccttacaagcacaaaactcaggtctgattatcgtcataggttactgtctctgtgctcagatgtggggctagttgctgaatctaaaagtgggaggagtggtgctgatttgatgggtccgttacttcctgcagttgctgatatatgttctgattttgatccagtgtccactgttgagccatcattattgaaactattccgaaacctttggttctacgttgtattgtttgggctagctccacccatacagaataatgaggcacctacaaaaccggtttccacttcattaggtacagcagaaagcagcagtgctatagcccttcaagctgtagctggaccatacatgtggaacagccaatggtctgtagcagtgcaacgtattgcgcaaggaacacctcctctggttgttagttctgtaaaatggcttgaagatgagctagagttaaacactctacacaacccaggtagtcgtggtggtaatggtaatgaaaattctgctgttgggcagagagctgcactttctgctgctttgggaggtcgagttgaggtagcagcaatgaacactatttcaggggtaaaagctacgtacctacttgcagttgctttcctggagatactacgttttagttgcaatggtggcatactctcggctacatctacattgaatagatcaaacagtgctttcagttgtgtatttgaatacctgctcactccaaatttgacaccagcagtaactcagtgtttgacggcagttgcacatagagcttttgaaacagtgctgtcgtggctggatgatcgcatatctgacataggtgaaggagctgatgttagagaatcggttctttctgttcatgcttgctttctgataaaaagcatgtcccagagagacgagcatgttcgtgatgtgagtgttaagcttttaacgcagctgaaggaaaagttcccacaggtcctctggaactcttcatgcttggatttacttcttatttctgttcacaatgagttgacttctggtccagtcagtgatcctgcttgggttgcaactgtacgctcactgtatcaaaagatcgctagggaatggttaacaagtgctctttcatatgctccatgtaccacacaaggccttatacaggaaaatttttgcaagccaagtggagtacaaagaacacaacatacagcagatgttgtttcacttttatctgagatacgtatttgtagtggaaagaatgattggaacggtattaggacggccaatgttcctgcagttatggactcagcagcagcagcatcgggagccaaaaaagaagcacctgacttcactttggaagtactctctactgcagtagtgagtgcaactgtgaagtgcaatcatgctggtgagattgctggtatgagaaggctgtttagtactatgggaggcataaacatgggcatgtctcctcctgggacacaatctttgcacccccatcagtcatttgatgaagtttttgtctccaagtttgtcagtcttcttcagaactttgttgttgcagctgagaaacaaccaatagataattcacaatttcgtgaaacatgttctcaagctacagcattacttcttgatcatatggtgtctgattctagagcaaacctggaagggttttctcagcttatacggcttctatgttggtgtcctgcttatatttctacccctgatgcaatggaaactggaatctacatctggacatggctagtatcggctgcgccttctttaggtcctcttgtgcttgcggaacttgttgatgcatggctgtggaccatagatacaaagcgtggattgtttgcatcagatatgaattactgtggcccagatgcaaaattgaggccgcatcttatcgctggtgagcctgaggcaccaccagaaaaggacccagtagaagcaataatagcccatagactctggcttggcttcttcattgatcggtttgaggtggttcggcatgacagcattgaacaacttctacttctaggtcgaatgttacaaggaacaatgaagtctccagctcatttttctcaccatcctgctgctactggcactttctttactgcgatgctccttggattgaagttttgctcatgccagtctcaatctaacttgcagaagtgtaatatggggcttcagttgttagaggacagggtataccgtgctgctttgggatggttttcttatgcgcctgagtggtatgaatctccaaacaaaacttatgctcagagagaagctcaatctgtgtcagtatttgttcattttctacaaaatgagcgcaccagtggtcctgtcgattcggtttcaaagttacagggacgtgaaggtgaacctagcatggcagatcacattcatcctgtttggggctgtgttgacaactacacaaatgcaagggaaaagcgtaaacagttacttctgacactttctcagaatgaggcagacagacttgaagtctgggcacaaccaatacatacaaaagatacaacgacttttcgcggtaaaatcagctcggataaatggattgatcatgtcagaactgcttttgctgttgatcctcgaattgctctttctatgcctttgaggtttccaacgaatgctacaatgcaatctgagattactcagttggtacagacacgattactggagcttcgtacaattcctgaagcattaccctttttcattactccaaaagcagtagatgaaaattcagtgctgttacagcaactaccacactgggctccatgttctgttacacaggcattggagtttcttactcctccttataaaggacatccacgtgttatggcctatgtccttcgtgtcttggagacttacccccctgagactgttaccttttttatgccacaattggtacaatctctcagatatgatgaagggaaactggttgaagggtacttgcttggagctactcgaagaagtaatatatttgctcatatcttgatatggcatctgcagggagaatatgttgatgaatctgagaaagatgcagctgctctgaagtgcattccagtccttgctcccagctgttaaggacaaaattatagagagttttactccagaggctcgtgacatgtttgaaagagaatttgatttctttgacaaagtcacatctatttctggtgttcttttccctctccccaaggacgagcggagagcgggtataagaagggaactggagaagatttctattccaggtgatgacctctacctacctactgcaacaaacaagctagtacggggtatacagttggacagcggtattcctctccagtctgctgcaaaagttccaataatgattacttttaacgttgttgaccgtgacggggacccaaatgatgtaaaaccacaggcttgtatttttaaggttggtgatgactgtagacaagatgtgctggcgctgcaagtgattgctctattaagggatgtatttcaagctgtcggattaaacctgtatctttttccatatggtgttttgcctactggaccaggccgaggcataattgaggtggtcccagatactcgaagtagaaatcaaatgggtgaaacaactgatggtggtttattagagatatttcagcaagattatggtcctgtaggttcaccttcttttgaaactgctcgagaaatgtttatgatcagtagtgctggatatgctgttgctagcttactccttcaaccgaaggatcggcataatggcaatcttctctttgatagccatgggagattagttcacattgattttggttttattttggagatttcacctggaggtaacatggggtttgagagtgcacatttcaagctaagccacgagatgactcaattgctggatccatctggaactatgaagagtgatacatggaaccaatttctcaggttgtgtgtcaaaggatacctagcagcaaggaggcatatgaatgggattttaagtacagtcaacctaatggtggacagtggccttccttgctttagcaggggagatcctatcaataatcttcggaagcggtttcatccagagatgaatgaacgtgaggccgctaacttcatggtacgaacatgtgctgatgcttacaacaagtggactaccgcagggtatgacttgattcagtacttgcagcagggtattgagaaatagtttgtttctcgttttttaagtggcgttcgtgtacatcaattgtatgtagccactatctttttatgtagaatttattttttgagttgtatcatcgggcaaggatggaattcatgtgattaacgtaggatgcttggtgcaaagaggcaattctttttttttcttgcactgtaaaactgccaagaaagtagctagtaagttgatcaagattctgtattgctgtcgcagaatgcattttcgtttactagacatgtatgattcgcatttttatc

SEQ ID NO: 35994 - DNA, 789 bp, Zea Mays
ggagactctaccctccgaccactcatcgtagttgacaagtgaaatatgaattagctaaaagaaagctagaccaggacaagtggatgctctagattaggcaaatctagatccagggaaagtacttaacttgtgaagtaaaattttggcataaggattcactactagtaagctcttctgcaaaatgagtccttgaaatttgataagccttaccttgattcctaatcagccagcatatccttgagagtcttttctttagtcgggtaagtcttgctgagtaattccatactcagggttttattccctgttgttttttcaggtcatagttttgtgctgctgatggtggtgttaagtgccggtgggctcggccttcttataagtctaagtaacccttctatacttcttattgagggtggtcacttgagctagcatatatttcgaacttatactttcgtaatcactccgatgaatataatgtaaaatttttgtaacttgtaaaatttggtaataagatttcctctgcaaaaatattgatgtgtgtgatttgtgttacttaatcctgcggtcctggttgtaagtggtttatccggtgtccttggggcaatcggacggatcctgttaagttatctggtgcacatgcatagccgtctgaggtctttgagacaaggacaggtgcatgtgggcccgataacttgggaggttctgccacaccgggcgtaccgagggaagttggtgatcattccttaaacattcgagcaaactccaggccggtgagacagcacctgcgccgat

SEQ ID NO: 35995 - DNA, 289 bp, Zea Mays
tgaacaagcagaagtccaggagccaactcccgaacctaccatagaagaactccttgttgcacctgcacctcaagatactttcgtgctagacaatcaggatcagttcaaagaggaaccgcaagatttctatgaagaagaaggatgtgaagaagaaggctttgaggaaggcgttgacgaattctagatctagcgatgcgccggtcaacttcctatgggagatcacccatgagaactgttgtgttttgatggaataatgtttaagacaattttgtcaatgagttgtaataag

SEQ ID NO: 35996 - DNA, 2416 bp, Zea Mays
acccgcacctgcactgcagcacacgcgccgccgaagcgctctgcccacctcgctcccctccagtggccgccggcgcggctcagcggtccatcctcctgacgccacctgcaacggcgccaggcggtgatccattccaactcgcggtcatctcaagtgggtgcggcaaccatgcccaaggttaagaatccccacgttttcatggacatatcaatcagtggaggcagcgccgagaggatcacatttgagctactcgcaaatgtagttccaaagacagcggagaacttcagagcactctgtactggtgaaagtggacttggggcatctacacagaaaccactctattataagggaacacatattcatcgcatagttaaagggtttgttgttcagggtggtgatttttcaagaggagatggaaaaggtggagagagcatttatggtggaaaatttccagcaaccttaaatgaatttcaagctataatatttgtagcaaacatgtggtctttgggaaggtggtcagtggaatagctttgcttaaaaagcttgaagcagttggtagtgaaactggaaatccttcttatcaagtgaaaattgtagactgtggtgaagtttccaacacaaattctccggatctgctaaagggagagaaagaaaaaaaactaagaacggcagatggtaactccactgctgaagggagagccaaattaaaaaaaacatccggtgatcataagcaaaggaagaagagaaaacactattcgtctgattcatatagctcagatacttcagactcattgtcctattcttcagatagtggctctgattcagaatcagattcatcaatggatactagctcatccagtgatcataggcgtaagagaagaaaaggatctaagaaggataagcgcaagcccacaaagagaaagggtaaacatacaaggagtaagagaaagagtagaggatccaaaaggcgatctagacggagccatgggagttcaagtgatgattcagtaagctcaaagacagataacagcagttctgacagtgaaaagggtggccatcataccaagcgttccttgccgaaagataaagagagtaccaaaatgacaatttcagaacaaggaagaacttttcaagaagcggacaaagacgaacaaacagttactaccatcaatcgatcacaatcacatgatggaagtaaaccctcaaacaaagatggcaacagggctgatgaaagatctggaaattacaattcagaagataggaatggtccaggtggaagctccaggaacaatcccattcaggttgatgtaaatttaacgaaaccagtaaatgtagatggcaacactggtggtgataatgcagaggctggcatgtctagaactggtgaaggaaggcaccttccaagcaatgattctgtgtccaccaatggtaaagatttaggtgtgggttctgcagacaatgggcaacctcaacgaatcaggaaaggacgtggttttactcagaagtatgggtatgcacgccgatacaggacgccatctcccgagcgtccccctgttcgaccccgctacgatggagggagagatgatagatggaacaatttcaataggtatgaaagaaatggtccttacagtagacgctcgccagtaaggagataccatggctcgccaagagccaatagcccatccaggtacccaagaagagaacgaatgaggagtaggtcacgcagcccagtgaggcgccatgaccgtggagggtatcaccgccccagcccaagacgtagccgcagccctgcagaaccgagacagaatgtgaatgataggcctcgatcaggtcatggcggaggcgatcctgaccacagccctcctgccaacaggtccagatcgaagagccgggaccccttgggacccagatctcctgatgctgccccagccaagagggagagctccagatacaaccgcaggcgcagcagcagctcaaggtccagcagccctgatggaaacaaaggcctggtttcgtactgagaagtaacggcacaacagtttgcaggctccatggaccatgtttcttgctagtttagcatcatgtactcttttgtaatggattctgaacttgaactgctttcgatgcaggtgtagatttatatgttctgttagatttgaatgtttcttatgccagatatttatagaactactgagtagagcaggggaaaggctcgagcctcgtgaactggcttgagcttgctaaggcttggagaggctcgcgagtttgtaagcctgaatcgagactacttttatgactcgctcaaacgccgagccctgagcgaacttgagtcgactcgggagtctgcctaataatattgtgctacgttgttatattattatgtttttaatttattttcttattttttatggattca

SEQ ID NO: 35997 - DNA, 1824 bp, Zea Mays
caataatagggatgatcaccaaacgcattatttagaaaaccgccgggagctggaaagggcgaggcgagcggtgccggcggaggtcgacaggggggctacaggtagaaaggcgactccgccgctccagctgaaaatggcgaaatgatttgccttccccagaacccagctcagacagacgccgccctccgctgctctgctctgttcctcttcctccttgccccctgagcaggcgagttgccagcccggaaaccattcgaacaggccgagcccgcccgcctccattgctcgcgtgcgtcaggaaggaaaagaagaactaggagcagagttgaataggtcattatgcgccggtggctttgctgcagtcattttgacacaccgtatctcgaaaacgaaaatggatttacgagcagtcctgatagaacaagtggaaacggtttaaatgcaaacagtgatcctgcaaaaccgccttctattgaagtacctgcattgtcattagatgaattgagggaaaagacggatgattttgggtccaaggctttggttggtgaggggtcatatggaagagtatattatgctgttctggaaaacgaacaacatgtggctgtcaagaagcttgatacttcagcagatcctgagcctgataatgaatttctagcacaggtgtccgttgtttcaagattgaagcatgaaaactttgtggacatgcttggttattgtatccaaggagatcaacgtctactggcttacgaattcgctacgatgggctctctacatgatattttgcacggaagaaaaggtgttgcaggtgcacaacctggacctgctcttgattggatgcaaagagtcaaaattgctgttgatgctgcaaaaggtcttgaatatcttcatgagaaggttcaaccttccatagtccatcgagatatacggtccagcaatgttcttttatttgaggattacaaggccaaaattgcagacttcaatctttcaagccaatctccagatatggctgctcgtctacattctactcgtgtccttggaaccttcggatatcatgctccagagtatgctatgactggccaactgactcaaaaaagtgatgtatatagttttggggttgtccttttagagcttcttactggaaggaaacctgtagatcatacaatgccaaggggccagcagagtcttgttacttgggcaacaccaaggcttggtgaggacaaggtgaaacaatgtgttgatccaagattgaatggagagtaccctccaaagggagtagcaaagctagcggcagtggcggctctctgtgtccaatacgaatctgagttcagaccaagcatgagcattgtagtcaaggcgttgtctcctcttcttgtgaatgcaccgtatcagccggctgctgctcctgatgtatcttcagatgcctgacagcatgagcaactgaaaacccatgtaaagaaacaccatttactgtcggtatgccattttttccacgaattattcatctttcgtaaaatcagaattgtgtgtgtgtttattggagaggaagggaagaggaaagagcaacgcatttgttttgaacccatgtacttcgtgcttgagagctgctgcagttgaaattaattacttaatgtacacacttgtgcatccgttgcccttcccctgtttcagtttcttttttttttcttttgaaatggtcatccttgtaatctacccctgctttgctgttgggtggccgcagaaccaaactttttgaatcggagtaattgggtttgaattgtccagtccaatgcaacacggttacacaaagctcttagagagagagag

SEQ ID NO: 35998 - DNA, 1934 bp, Zea Mays
tggatgctgctggaatgaacttcccagactctataagacaattgaaagtcaagttccaaatgtttgtcaaactgaagcatggaagagcaggacacattgggctggttctcaagtgcctgaagaagctacccaatccattaaaaaggccgatgaatacctccagtcttgcagacctgtacggagaaaacatgggaggttgctggaggaaggtgctagtggttttcttgctgggaaagttcctgttggggatgatgattctgttaagtgtcatgagaaaagttggagctctttcaatgaacttattaaatctaaggagagtgctgagaatacatttggtagcagtaactgggcatcagtttatcttgcaagtaccccccaggaagcagccgcattaggtctccagtttcctggagttgatgagttgtttttagccttccttttttctgcccacgttaaaattaatgataatgaatatagacatataaacaaactacattcatagcttattgaatgaatgtgtatttgccctaaaacgaactataatttggtacagagggagtattatattgctatgattctgtaggtagaggagatatctgaagttgatggtgattttgatgatataaaaggtgtagatgaagtagagctttctgaggaacagagaaggaaatacagaaaggtaagggaagaggatgacgcaaaaataatgaagtgcctgcagcgccgtttgaaaggaaaaaggatgagagactggtgtaaggagaactttggtttggtctcatcatgtgacgagaagcctcctctaccagaaaatggcgttttaggtgctaaaagtgactgtccttcatctaaaaaactcaaaactgatgaaaacaaagtttctattgagatatgaagcatacatgtgaagatgatgataatgagaagagattgaaaactgtgatagttgaaagcgatgatgatatgcagatagatagcaaacaagctttacaaaaggatggtgaaggtagttcaacagaatttgaaaaagtggttgatatcattgatcttgatctcttcccaagccctaagctccctaataaaagtttgcataaaactttcaaatgtactatttgctctgaaatgctgaatgcctctgatgtgcatcgccaccctgtcttggatgttgttgtttgtggatcatgcagatttcttgtgatagagaagaatcgccttgaggatcctgtatctggtagttattgcacttggtgtgcacaaagtgaactgattcaaagttgtagttctttgttgctgctgtgtacccagtcaactagagctcttaatttctgaatgtgacaaggccctcagtggtgtggaatcttccgattcagagactagcaatgcagagctttctggatcagagaataatggtcctgttagcaagcaaaaaatgaagaagagtattagaagaattatggatgatacagaacttggtgaagaaacaaagcgtaaaattgcaatggagaaggcaaggcaagaccatttgaagtcaatgcaagagcaatctgccaccaagttaaggagcaagaatgttggaaatccctttgaaactccactggaaatctgtttacaggatgctggggatggacatgtagtcaaccttgccagggaggaggatgaggaacctgttaggattccaagcagcatgtcttctaaactgaagcctcatcaggttgaaggaataaggtttatgtgggaaaatgttattcaatctgttaaaaaggtcaaatccagggataaaggtcttgggtgcattttggcgcataacatgggccttgggaaaacttttcaggtctgtgttgggctgttggcttatagcttggatatatatttacattttcttcaagagttattcgttcattgtatgctgcacctattgtacccatgacaatcaa

SEQ ID NO: 35999 - DNA, 543 bp, Zea Mays
acaggccacatgcatcttgtgcctagatgcacaattcacaataggacgtcccagcaatatgtccgtagccttgtggtacccagacgatggcaaagcatggagcaactccgatcattactcagccagctgcaactgtggtagccatttgcatgtccatctttgtgggctaccgattttctaggaacaggagcactgcccagtttacaccacttgaacagatccagtttgctgaagaacgccattgattggaattgagattaggcgaagcatcaagcaacaatgtttcatctgttccaccattgtacctccaaagttgacagattgctgcattgaagttttgaaccgggttgttgtgatccagtatagggagatattgaaagcatacacgatacataatttaattacagactgccggtttttatcgtaggaaacaatttctatatgctatacatcaaaccggttattggcggctcatgactttgacgattgtttcattggttgcataatatttgaatatatctaaatttggttcgaatgctgaag

SEQ ID NO: 36000 - DNA, 1833 bp, Zea Mays
ccccccttctgctctagccttcacgactaaatccaccaccactcccgcacacctcacctgcccgcgtcgcctcctcccctgtcctccgcgcgcgttgggcgggcagccagctcccccaccaaaccctaatcactccggcgccgcgccgcgccgcgcggccctgcctcgatccgctccagcggccgcccgccgaggcggctgtgcggtggttgcgcttgcgcttacgcgcgcaggtccccgtgggtctctgcgcgcagcgggacccgtccacggcggcgaggcgcgggcttcaaggcgggcgcaggcggaggggcggaattgctcgggcgatgacacggaggctcgcggccgcggcgtcgcgtccgaggccgtgaatgggagtggcggggcgctgcgggcggcggctgcgtacatggaggccggggcaccgccccgcggctggcgctgtggggtgctctggctcgtcagcgtcgagattgtgttggttctagtctgcactcgcggagctggtgcggattctggtgaaagcaaaggatcgtttctgcaagactctgaagctggagaaaaggatgtctaccttagccactcctgcatccacgacgagatactacatcaacggcgacgagctgggaggaaggagtactctgtcatgccacaagtgtaccatgagtctcgggaggatgcggagcgtgtaagaggacgacacttgttgggcatgtcatcttggcgtgctccgcacgagaatgccaggaagccaatacgaatatacctcaattatgatgccgtcgggcattcgcccgaccgtgattgtaaaaatgttggcgacatcgtgaagcttggcgaacctcctgtatcatcagcaccaggaacacctatatgcgatcctcatggtgatccaccactggtgggagactgctggtacaattgcacccttgaggacatagctgggaaagacaagaggcaacgtctccgtaaggcactggggcaaacagtagagtggtttagaaaagctctagctgttgaacctgtcaaggggaacctacggctcagtgggtactcagcttgtggtcaggatggaggtgtacaactacctcatgcgtatgttgaagatggtgttgctaatgctgatttagtcctcttagtaacaactagaccaacaacaggtaacacccttgcatgggctgtggcctgtgaacgtgaccagtggggtcgggccattgcaggacatgttaatgtggcccctcgtcatttgacagctgaagctgaaacattactttcagctactctaatacacgaggttatgcatgttctagggtttgatcctcatgccttcacacattttcgtgatgaaaggaaaaggagacgtggtcaggttactgctcaaagtttggataaaaagcttggaagaatggttactcgtgttgtcctaccacgagttgtcatgcacgcgagacatcattatggagcattttcccaaaacttcactgggttagaattggaagacgggggaggccggggcacctcaggttcacattgggagaagaggctcttaatgaatgagatcatgactggattggggtcagaatcagggaacagagtttgttatatctccttgcaactcatggaaaggggcataccattgcaatacaactcaattatcaggatgcacatataatagggaggcagaaggttactgccctatagtaaactatagtggggacttgcccaagtgggctcaatattttccccaagccaataaaggtatgcccaaatgtagcataaattattatgtttatgacattaaacaggatgctgaattatattaaatgaaaa

SEQ ID NO: 36001 - DNA, 998 bp, Zea Mays
cgcgtcgtgtggggtccccacccacttccgctctgctcacgtgccgtgcccgtgtgcatcggggaaaaaacagcagcaggggccgaatcggagctccgccgccggcagatctgcgccggccggtctgctccgcccagcggacatggaccgcgacggccgcccggggtggctaccgtcgctgggcttcgccttcctcagcttcaactgcgggatggccgtctaccgctcctgggacgacccctacgccgtcgccttcgtcctcgccgcgtacgccgccctcgtcctcctcttccgctgcctccaccttctggagcgccgccgggaccagcgcctcaagctcgccgtctggggcctctccacgctcctcacactcatgttctcgtacaagatcgccgccgtgatgccgccctgggcccagctgctcgtctggggcatggggatcctcaccgtcgttgcgggattctacgccttcttcgtcgcccgcccggaggagccctgacccttcgatacctgatgagcatcactcaccgcatcggtctcagttatcttgtgtagtacgtatgtctttttgcagcatgccgaagaagttgacgaacgtaccgagaggcgcgtagcaagactcatcactcttttgaatgcaagagttggtagtagaataaagtaggggttccgtgtgtgtgtgcgtgtgggagagagatcgtgaaaaacggtttgcatctagcggtgacctctttacattggtttttccagtgcctgttgcggttagctatgtgttactaattggaatggatgcaagtaagtgaggatagagtcgttctaaacccactctccaaatcacccatgcatcatcatttgaacaaggtgctccataaaaaattgtttggggccttaatacatgttttagtttcttagatttcgcattttttgaatctttcaagatgtcatcagatggagatatgctctatgacaaaattgcagtggcccaccagagatctaaa

SEQ ID NO: 36002 - DNA, 1797 bp, Zea Mays
caatcattaacgagagtgctctggcctctggctagctatctcgtccggtcctgcatcaggtcgtagatatagtggggatagttttgttgttggtctggaaagaagagagggaaaaaaaaagatccatggcgacggaggaggccggccgtgccctggcgacgaaggcgaagctggtggcggcggtgctggtgctggagctgctcgtcgcgggcttccacgtcgtgtcgagggcggcgctcgacatgggcgtcagcaagatggcgttcctcgtctaccggaacgccgcagccctgctcgtggtcgcccccgtcgcctacttcctcgacaagaaagataggccgcccttcacgctacgcttgctgatggacttcttcttgctggctgcagtcggggtaaccttcacacaggggctctacatcctcggcctgtactacctgtcaccaacctacgtctctgtcatccagaactcagtccctgcgatcaccttcgtcatggccgctagtttgagaatcgaacaggtaaatgtgaggagcagatacgggctggcaaagatgctaggcacggtggtcaccatagcgggggcaaccgtcataaccctctacaaagggacgccattattgacagaaacagctcatgcagagggcaccacgcacacgctggaaggcacccacacgctcggaggatgggtcgcaggatgcctcatcatgttcgcgaactgcatttgcttgtctgcgtggatggttctgcaggtcccggttctgaagaaatacccagctaagctgtcgtctttcaccatcactctggcgttgggtttcgtccagctcgctgtcgtcgcgccgtttttcgagagcgacgttgagaggtggaagatcagctcaggaggcgagcttttcaccatcctggcgttgtggtgcttggaatcgcctggtatctcatgatctggtgcataaacaaaggagggcctcacttcgtttccgtcttccagccactgcaaaccgtcatggtcgccatcatggccgccatcttccttggcgacacactctacattggaggagtcataggtgcggtgatcatagtcgcgggtctgtactgtgtactgtgggcgaagagcaaggagaccaaaagcagcggcgatctcctagtccttcctgaaagaagccccgcgcagcagaatctcctccagcgtgaagattgaagcgagaccactcactgtactgtacggttctcggccggctgtagctgccccaacaagaaatatgggggtgtttggtttgagaaatcacttcatccaaaatgtggtggtgcatcatgagtccattactcaaatttggtgggatgaccttatgcctcatattagtactaactaaataactataagaaatggggtgatgatggatcaactcaatccattccacaaaccaaacaaaaaagtgaggagtgagaagacgatggactagatcattcctcaaaccaaacagcttatatattccttgtatcgtcagttggacaggccaatagatgatgtcgcctgtgcaaccttgttggccgagggccactttcgattttgtctattggttcttttagagcaaccatcccgatgcgatgacactgtagctctcttaggatgtgtttggttgcaatgacagaacgggacgggataggacgatctctcgaataaggttgtttggttcagagccaaaggttaggacataactatccgaatgttgtccccagttgtccctcaattttggagggacgggagaggacgccaggggacgtctctgtcctagcttgatg

SEQ ID NO: 36003 - DNA, 3088 bp, Zea Mays
agaaaagctactcacaccaataagccaaagccaaacagcccttccttcgcagcgatggcggcggcggcgccgccggtggccaagaaggtcccgcggcagctcgttgagcacggcgacgtccgcgtcgacaactactactggctccgcgacgactctcgatccgacccggacgtcctcgcgcacctccgcgccgagaacgactacaccgccgccgtcatgtccgcaacttgaggatgaaatatatgctgaaatcagaggaagaataaaggaagatgatatagatgcgcctcttcgcaaagggcggtactactactatgaaaggacattgactggcaaggagtatgtgcaacactgtaggcgtcccgtatcgactgatgctcctattacagtccacgatgtgatgcccacaggacctgatgcccctgatgagcatattatcctggatgagaatgttaaggctgagggccacgactactacagcatcggagctttcaaggtcagtcccaacaacaagctagttgcttacgctgaagacactaaaggtgatgaaatctacacggtctatgtcattgacacggagagtggagaatacgttgggcaaccacttaaaggaattacttctgacattgagtgggctggtgacgaccacctcgtttacattacaatggatagtatacttcggccagataaagtatggctacataagttagggtctgaccaatcaagtgatgcttgtttgtatcatgagaaagatgatacattttctctaggccttcaagcttctgaaagcaagagatatttatttgttgaatctggaagcaaaaacacaagctttatattctacctggacatacccaaacagaacaaggaacttgctgttttgacacctcgtgtgtatggcattgatacaacagctagtcatcgtggaaatcatttctttattaagaggcgaagtgatgaattctacaattctgaattggttgcttgtccactggataatgtagctgagaccactatactgctaccacatagagaaagtgtgaaaatacaagacttccagctctttgacaaccatattgctgtatatgagcgtgagaatggccttcccaaagtgatcgtatatcggctacctgctattggagagtcaattggacaactccagggaggtcgagcgattgattttattgatccaacatatgctgtggaccctgaggagtctcagtttcattcatctgttctacgatttcattatagctcaatgcggactccaccctctgtttatgactatgatatggattcaggggtgtctgtgctgaagaagatccatactattttaggcggattcaatgcatcaaattatgtaacagaaagaaaatgggctgctgctgctgatggcactcaggtccccatgtccattctatacagaaatgatcttgtgaagcttgatggctcagaccctatgctactctatggctatggctcctatgaggtacgttctgtttgtttattttcttttttgctatttggtaaactgtaataaggaatctttctgcaatttttaacacttcgaagtttgaacaaatttcaagattggcatgtacactgcgctagctgcagttataaatgcaggcttgtactgtagcatggcttgctgcagctgcaaccgcagcaagcactgctgagcaggctgatagtgatagtttatgtcaacttcctttggttcgtttgaaagtttgtgttcttctttatatgtgcatcatgtacagactatacttatttgctaatgtgctatcatgcattcattagctgttttattcatcattgttttcaaatgacaacaattctttagcattcagttattctagtgtttcctcgctgagaaagattccttggcaggaaccagcaatgtctaactagtagtaactgcatgtgacaacttggcatcgagactatgagatggttccaggtttcaggaataaatataatagaagttattgtgataaaaccgtgctcttgttttctttgttcttatggctacagatatgcatagatccgagttttagagggtcacgattctctctggtagataggggctttatatatgtgatagctcatatccgcggtggtggtgaaatgggccggaagtggtacgaggatgggaaactgttgaagaagaaaaacactttcactgatttcattgattgtgctgagcacttgataaaaagcaagtactgctccagggaaaagctttgcattaatggcagaagcgcaggtggcttattgatgggtgctgtcctaaatatgaggcctgacttattcagggcagctgttgctggagtgccttttgttgatgttgtcacaactatgcttgatccaactatcccactgacaacagctgaatgggaggagtggggtgatccaagaaaagaagaattctattattacatgaaatcgtattctcctgttgacaatgtgatggcgcaagagtatcccaacattcttgtcactgcaggcttaaacgatccacgcgtgatgtactctgagcctgcgaaatacgtggcgaagctgagggagctgaagagagatgacaatcttgtgctgttcaagtgcgagctgggagctggacacttctccaaatcgggaaggttcgagaaattacaggaggatgcgtttacttatgcgttcatcctaaaggcgctgggcatgactcggaagctggcatcactgtgaattcgattggtgtgaggcacctggactggatttgtatcatggcctgccctcttggttgggggatggatggattctgatggaatatgcatttagatttgaatagggacacagatgttatgcaaaagagattgtttgaaactttgaattctgatttgcatttggatatctgtcctagaataattgtgcttctattattcaatatttgccccatttttaacctatggaccatataaattttgctattttctcctttcaaagtactacaatcattacatgttggtactagtattattttacaggagcatgtatgtaattttatagtgactggtttatgcacatcatataaatacgtttattt

SEQ ID NO: 36004 - DNA, 630 bp, Zea Mays
ctttctgtccgcttccattgagttcccatcccttcactctctgcgaaaccgagcacgccaagccctagagggtcgactgaactgagcaggcagtaggaagagacactatgttgttcttctcctacttcaaggagctggtggggaaggaggtgacagtggagctcaagaatgacttggcgatccgcgggacgctccactcggttgaccagtacctcaacatcaagctcgagaacacccgcgtagtcgaccaggacaagtatccccacatgtgcggaactgcttcatcaggggctcggtggtgcggtacgtgctgctcccgcaggacggcgtggacatcgacatcctccacgacgccaccaggagggaggcgcgcggaggctgatcctgatgcgcacccgctccctcacctgctggctgctgcttcatccccgattgtacgaagcatgcatgtacggtgtgtggtagacagatgccccagtttagttctttggtgcttgccttgacatagatattccaggttggatgatgacctgaatcacctgatatattattgtcatatcatatgcaatgttcttgcatggggttgctatattattaccatatcgtattatcacatcatagacacttaaa

SEQ ID NO: 36005 - DNA, 2811 bp, Zea Mays
tctctcttcacgcacacgcagcagcagacgggacgcaacccaagtagtacgcaagccgaacagattttccccatttccctgctctcctcgccctccccacgaaattccctgcttgatcacgccgatttcagctgtttgcaacacttcctcttgttcgatttttattaactcgtcgactccacctcaccgaggtcaaatctttggcatcggattctgttctgtgctgccttttggtttcggcgccgaattcagttccgattccgaacagttagcagctttaagcggctttcagttcgagcgcgtcggaggcatccctgattccggcgatgtcgttgcccgcgatttccatgtacaccagtccgccgggcgcggtctactcttcggagttcgacccagcctcccgtggctcgtcgccttgcaccaccgctgcgcccccgccgccggccgcctcgtaccgcttgccctccggcggcggcggcctgtcttgcctcttctcctcgccggcagctgcggccgcgccgccccgcgccccggctcacgacgacctcggtgcgctgtggcacaacagatccgacgacctgagcgtccccgccgacgggggcgggtactcctactcgcactcccactcgtcttcgcagctaaagcggagggacctgcatcaccaccaccacagccccgtgtcggtgttccaggggccgtccacctcttcaccatcccggagcccaccggcttcttggctcgccgcccgcgaccgcgaccgcctcttcgctggcttcgtgcgcaacgctctcggttcctgcgttgactacgcgccgcccaccagccctcgcccggaggtcggcgccagcgagctcgcgttcgagctcgacgagaacctcgcggaggctagccctgcctgcgagccatacgcccaagagctgctcgcgagtgcccaggatcgccaccgcatcttccacgaggagctggtcgtgaaggccttcttggaggccgagaaggctcaccgtggccagacgcgcgcgagtggtgacccctacttgcaacattgtgtggagactgctgtgctacttgccaaggtcggcgcaaatgcaacggttgtctctgctgggcttctgcatgacaccattgatgattcattcattgactatgaccacatcttccatatgtttggtgctggggttgccgatctcgtcgaaggggtatccaagttgagccacctcagcaaacttgctcgtgacaacaacacggcaagcaggacagttgaagcagatcgcttgcatacgatgctcctcgcaatggcggatgcacgcgctgttctaataaagcttgcggatcggctgcataacatggagaccttaaaagctttgccttgtgccaaacaagaaagattcgccaaggaaacaatggagattttcgtgcctctagctaaccggctaggggttgctagctggaaagaccagctggagaatctctgtttcaagtatctgaatccggaagagcacgaggagttgtcgtccaaacttagggaatccttcgacgaagaactgatcacatctgccgtggataaactggataaaggcctgagggatgctggtgtctcgtaccacagtctttctgggaggcacaagagcctatacagcatccattgcaagatgctaaagaagaacttgacgatggaagagatccacgatatacacgggctgcgtcttttggttgagagcgaagaagattgctacgaagccctttgcgtcgtccacagactgtggcctcgagtcaccggtcgattcaaggattacatatcacgtccgaaactaaatgggtatcggtcgctgcacactgtcgtcatgagcgaaggcgtccacccgttcgaggtccagatccgcacgagggagatgcatctgcaggccgagtacgggttcgcggcgcactggaggtacaaggagggcacctgcaggcactcgttcgtgctccggatggtggagtgggcaaggtgggtgctcacatggcagtgcgaggcgatggacagagaacggactgcctcccttggcagtgatgacggtactgtgagcgtgaggccaccaccagcatgcccgttcccccagcatgcagaggactgcccatactcgtacacccgccaatgcaaccatgatggaccgctgttcgtcatcctcttggagcatggcaagatgtctgtccaagaattcccggcgaacttgacggtgatggatctcatggaccgcgtgggcgccaacagctcgagatggagcccctacagcattccgatgaaggaggacctgcggccgagggtgaacggcgagcccatatgcgacccagaccggaggctcaacatgggggacgtggtggagctgacgccggccctgcctcgaaagtccctcagcgggtaccgggaagagatccagcgcatgtacgatcgcggcggcttcgcgctctcagcccggggcggcggcggcggcggcggcggcgccagacgctgctgagagacagtagcaagacgacgatgcgtagccctttttttttctagtaccattgtaccattcaattcgttgtaaatacgtagtatagcaggtaggtaggccttgcagccggggtgggtgggttctgaaatctgttgcaccctgtcctgaaccccatgcagtgtgtaaaaagtagaacgctgtgtatgtaagctgttcaagttcgtctcagcttctatctcaggccctgtttgaattacaaggactaattattagccactaaagtttagttcattttagtttagttcatttgtcgccaaccaggccgactaatagagag

SEQ ID NO: 36006 - DNA, 3995 bp, Zea Mays
tcaggcaggcaggcaacgcccaccccccacagaggagagagagagagaaagaggcagcagagcacataaccaaacgacacccatccgaaaaccccgaaaggaggagggaaaagggtgagagaaaaccacgcagtcgcttgtccagacaaaacaagaacaagaacccaccagtacgcacttcctcctcctcctcctcctctctgcctctctctcctccctccctccgccagtccgctcccccctggcccatcagatccaattccttcccccgacccccgtcccggatccgccgcaattccttcctgcgtcgagctcgactgctccctctccctgcccgcaagaatcccgccgtggccggcggcttagtgggactcccaagtcgaagccaaggctggtggggggcgcgctcctgccgggcgtagcgggccatgggcgcgctgttgccgttcgtgcgtcgggtaaccagggccgtcaggctcagtccgctgcagcgcagcgccgaggatcgttttgcaacaagaatgggggcaaaagtagaacgggaaagttatatgcctggatattatgccacgggggatctcaatttggaaccaaatggtagatggtctccatactatgaggagatgacatcaaatgatcagttatgcaatggcttcacaacaaaaccaacaaatgactattcagaatttgacaaagaaatactcaagcatcaaatacttgaacatgaagctgtgtttagacaacaggtgtatgaactgcaccgagtttacaaaatacagaaggatatgatgaaacaacatcaaagcaaagaggtatattcatacccaactttggcagttgcatcacatacaaattcaccatcacaagtgccacaaaacggtgcaaagatgatgtggcagatgccagttcctccaatgtccacaacatacaggaaagctattggagagcataatgatacaaaccagtcctccatgaagttccttagagaaggcagtgtgcagtcctcaccaaatggatttatatcaagtgatgttggtccaagaagcagacaaggcacttttgaccttcaacttccagctgatcattatatagatgacgatggcacatcagataacaagcccatagatttccttggtttggcatcagatacaaaaccccggaatgatgctgagcttacattagttagtgcagaaggcttgggcaagttcagtgataatagttcatcctcgggtttgcagactacaaataatcttggaccccggcaggttaccgacctgaatgaatcaaatactggcttccatatgggtagagcaaatggatcagtttccagaggccttccgcgtacccttgagaactcatggaaccaaccaatattgagagcaaacacaactaatttcagtttcagtaaaaaacactccaaagaaaagcacacagatgaaggtacaagctcaaatttctttgacacaagtgtgaaaacaatacatgacgacaaaccatcaatcaataaaggtaaacaagtcagcagtgtaacttttttagcacccagatataatgatgctgaccccccaaaatacttcaaagctgttgatgggaggcctgccactgccagttataaccactttgtttaccaaggtcagaatagttcagttggatggattgcacaaagtcctctggaaccttctgttatcaataattttgctagagttgaccgtccacatcatttgaatatgggtacatttactgcccccgtctctattcctcaaatagacaatccttcaattgtctccccgatgggttcttgcacagcagacccaaggagcagcgttatcaataatcctgctttaattccaagattcaatgggttctcaactgtgaattcgtacaccagtcttagtgctgtgacgcagagcattggaacttcaatcccaaagctgataaatgtggataatgtagataaacgctatcgtggttttccacttgattcgttttccgtgtctcactcacgacatcaggtagcagtttcaagtaacctggagcaaaagaattcccagaagttggaagattcagatcaacagtcccatggcaagggtatgaagaacttcaatttgaatgagacactgtcagattgtcaggaagatggtcttgtagaacaagatgggagatgtgcttccagttttcagcatgataaagatggggggtcagtacttgggatctcttggctcaaaaaaaaacttatgtctgctgacccaacagctgtggagaagccagggaagatttttggacattcattgggaactgcaatagagctgaaaaatactaaagaccagaatgaaccagctgtgactattcggaatttgtcagattctgcttctacatctgttggctgtgcaattaagaaggataggccttcggataacattgttaccggaactctgcctgtctgtaataaagcccaagagggtgctacatgtttacctctttcgtgccagaagcatgtgcctaaagatggacaagccgctgaaggagccaccaagaaaagtggcgcccccatcaggaacttcatcgatctcaatgatgatgtaccaaatgatgacaattctgaggaatcagtagtgtcacacgaatgccacgtggaaccttcacggaacaaccatcctaaacgagcatttgtgattgatttagaggtgccggcctgtgaagaggacgcttcgtgggatattgatcaagaatgcgcgcagccgaaacctgatgcgtaccaggaagttgacgacggatctgatacatccgctctagctgcagccgagaacatcgtagcgttgtcaaggaatacgccaacagccgcagaggcatcggacgatacgttgcagtggtttgcagatctcgctgtattaaacatcaacgaccttgctgagcaagctgaactccaagcttgtacgaatgattccagtaactacgagtcggattcattcgagtccttgacactgaagctggaagagaccaagatcgacgatctctggagcaggccactggaacctgaaaccgcaaccgatgaacagacagtttcagctgctcaccttctcaccaagcccagaaggggccagcaaaggagacggcggcagaagcgagatttccagagagatgtcttgcctggcctttcgtcgctttcccggcctgagatcacagaggacgtccagttgctcgaggggttagtccaggcttccgggggatcctgggagtcgagcttgactaggcgaggacgttgtggtgggcgtgctagaggcaggaaacctcggaaaactgtagtaaccgtaattgtagaggaggaggaagaggaggaggtagaggttagcccaccgccaaaacctgctggcactggggaattggaagccgatggcaggggtatgatcgggtggggcagaacaacaaggcggtgtcgcagagcgagatgtccgtcaggtaacagcatggctactgcgtcttgagtgggagggtatttcttggcagcaagcattggacctgattaggtactgggtggttcacaattgttgtattgactccgatggatgggctggtggtataaggtgatcacactcatatgagtgtcggcctactggtctcagcacaactttcgtgcttttgggtcgaaacatggtttacgttcttataataagttcggtaaattagctggcgagacatttctgcgacagcattgtactaagctgttccaggttatgaggcccggtgccccggtatatattcattgtgagaaaaactgcaatgcatgtaaaccaccttgatctctgaagaatagctcatcacatgtgtaacaaaagggtgtgaatgaggctctgagcctgtattctttttgtagctgtatgccctgcctaattggcgctagtatccagcatgcgaattgctaatttagttttataccgtggatattgctcatatcgtgtcccaacgcttttcttccctatgggaatgcatatgccact

SEQ ID NO: 36007 - DNA, 2394 bp, Zea Mays
cgcacggacgacatcgaggaaccctagactagagcacattgcacgggcgacggcgcgccaccggtgactggcgtcccctcctcggtcctcactccccagcatggcgacgccctgccgcagcaggggcttcgagcgtgtggagctgcggtgtcccagggagctggacccacggccgagctggacgctcggcgatgtgctcgctgagcttgacgcgctggatgccacccgccgcgctgcgccacccacgcccctgaagcagccgccggattgggctaacggtggtggtgagaaggcctttgtgatgcgggttgatgacgacgacgaagacgacacagaagatgaagacgatggtacaagtggtgggaagtcccgggctctggtggccaaaggagcaaggttctcgtgtaatgatcttgcatcaagtgattcagaggatgaattagatggtcaggttgccccataccacttaatggagaaaagggacctagcgaagagcattcttcttgagctggaacacgagcatcatctaaaagttcaagaagaagttagaagtaagctagcttcattggaggtatgccaccaaaatgaaattcggagaacgatctctgcatttgcccgacttcagaaatatgcagaatcaagaaaggagatagacagaagacttgatgtacacttccagagaagaataagtactcgataaacacttatctatggtccaaagggatcatgaacaaaaatcccagattgttgaacgccgaataagagatgatgcagctcttgaagaagctaaaagaaaagagcaagctgtcaaggaagaaaagttaaggcaggaaagagcccagcaagaagcagaggctagacagaaggaagctgcaaaattagcagctgaagcacgaaaaacagcatttgaggctgctaaaaaggaagcagcagaaaaggaagcagcagaaaaggaggctgctaaattgagagatgcagcagcttctcaacctagtccgaattcccagaataatactgcaggcattaaagtttttggcgataaatacgcactagaagcagagtcacggaggcatgcattagtacagaatcaagtgccagaaaacattcatcacagcaaggaattcagcaaatatgaccgacaaattgccaaatccataagtaaacttatgccaactactgacagtgtcagaacaagggctagtgagcttgttaaagctttaaatggacaggattgtccccgtccaatctcttgttgtctatttgctaacaagattatttccattgtcaagagtagaaatacaaaggacaagacctttggaaatttggcctttgcgtgtggatatgtcatgctattagttacaaatcaggtaccagacgcaatggattatcttttagctgagttcaacagagtttgcatatacacggttccaaagcatatgcatgctttgaatgcacaagcacgaaatagagattattacagactgataggttaccaggaagaaaatggacagctcgagagcactgaaagttatctaacatacgtcgttgcatatgttaaactctacgcagcaatgattcagacggaaatcaaaggtgttcgtcatcctcatggtttagctgagggatggaagtggcttgccatgttcctcaattctctcccagctactacagccactgcatgtgcccttcacgctttcctcaagatggctggttttgcacttcacaagaaatatgggtcacagttcatgaaaatcctggatgtaatatcacggtgctttttaccagctttgaaggaacaaggcaacaagatgcaggctgaggctgtcaacaatctacagaattacctgaacgacaagatctacctggaggaaccagaagggcagtacctcgtccagcaactactatccaaggagttgttcatgtaaagatcaaaacaccagatcggtatgagacatcgtgtgtgatcgtctgaagggcggtacctcgtccaagctaccactatcgcaagaggggcctcatgtagagatgaaagcaccagatcgatatggagctgttcgtgtttcagaaacacgatcgagcctttcaaatctcacgaacattatttatgggacagtcccccagatcatttcccccctctgcacgggatcctgacgatgtatttgtttatgtgacttgtatccggccaaggacaggtatgataggttgaggttttatgtttgttgtagttgtacatgtactactagaatcgtgaccagaacaaaataatactcgaccacttcggcgtgggcccagcggtggccaaagtcaaggtcaacttgacacgcgacactttgtctactctgtttgcaatgaaatctaatgtttgtgcttcaaacaaaatagttttaatataaa

SEQ ID NO: 36008 - DNA, 618 bp, Zea Mays
agcgacagggcaaggagccagggccgctccgctccgctccgctcgtgctctgctcctgctctctctctctctcggcgtcgattgggcgaccgccgccgcctcccccaggtcttcgctgggcccgtcgccggcgccgagcacccaccagggcaagttttacttgataatgtggacatcaagacgttgcaattaaagcgacttagagaccagatcggattggtgaatcaggaacctactctttttgcaactacaattcttgagaatattctttttggcaaacctgaggcgacaaaggcagaggttgggtctacgactacttccgcagttttctcctaaacacatttgctctgatgttgtttgtcaccataactggcgctgaaccgcgctggtggcaaggctggaaacaagggtgctgaagctgctcttacttcccacaactgtcacggcgtgtgctagggcagtggggctgtcgccaaggacatgcagcttgtgaagcagtgctggagccgtccccatcgccgagcagctcgtgagggtaattcaagcacgctaatgcagtctggtcctacaatagcgatccttggtcttcacctacatcttcacctaccgaacatcagg

SEQ ID NO: 36009 - DNA, 2436 bp, Zea Mays
gggtgggagcagagagagcagcacctcctgggtctaggccgctctcgcagagagagcagagagggcgaggggagctggccgatgttggacggtgatggatggcgggggcagggtggaggggagctcgcggaggcagggccactgactgctgcaggagagagggaagaggcaggggcgcagggcggctaacatcgctgccgcctagaggcagtgaagaggtaggggatctcgcgggaggcagggccgctgctgccacctggagatcccgaatcccgaccgccgccgcctggagctcccaaccgctgacgcctggagtgtttcgcgtcaaaatgggcagtcaggcagtgaaaccgcttcgggtatttcttctgatgatgcgggtttggagacgtcatctaatatgccagagaggacagcaacccttcttgacttgtattcgggctgtgggggcatgtccactggtctttgcttgggtgctgctctttctggcctgaaacttgaaactcgatgggctgttgatcttaacagttttgcgtgccaaagtttaaaatacaatcatccacagactgaggtgcgaaatgagaaagctgatgagtttcttgctctccttaaggaatgggcagtcttatgtgaaaaatatgttcatcaagacgtggattcgaatttagcaggttcagaggatcaagaggatgctgacactcttgacaaggatgaatttgttgtacagaagcttattggaatacgctatgatggcactggaaggaaaaaaggcgtatattttaaggtccaatgggaaggatatggtcctgaagaggatacatgggaacctattgataacctgagtgactgtccgctgaaaattagagaatttgtacaagaagggcgcaaaagaaaaattctcccgcttcctggtgatgttgatgtcatttgtggaggcccaccatgtcaaggtataagtgggtttaatcggttcaggaaccgtgatgagccacttaaagatgagaaaaacaagcaaatggtgactttcatggatattgtggcatacttgaagcccaagtatgttctcatggaaaatgtcgtggacatactgaaatttgctgatggctacctaggaaaatatgctttgagctgcctagttgctatgaagtaccaagcacgccttggaatgatggtggcaggctgctatggtctgccacagttcaggatgcgtgtgttcctctggggtgctctttcttccatggtgctccctaagtatcctctgcctacatatgacgttgtagtacgtggaggagcacctaatgccttttcgcaatgtatggttgcatatgatgagacacaaaggccatccctgaagaaagctttgcttcttggtgatgcattttcagatttaccaaaggtcgaaaaccatcaacctaacgatgtaatggagtatggtggttcccccaagacagagttccagcgctacattcgacttggtcgtaaagacatgttggattggtcgtttggtgaggaggctggtccagatgaaggcaagctcttggatcaccagcccttacggcttaacaatgatgattatgagcgggttaagcaaattcctgtcaagaagggagccaacttccgtgacctaaagggtgtcaaggttggagcaaataatgttgttgagtgggatccagaagtcgaacgtgtgtacctttcgtctgggaaaccactggttcctgactatgcgatgtcattcatcaagggcaaatcactcaagccattcgggcgcctgtggtgggacgagacggttcctacagttgtgaccagagcagagcctcataaccaggttatattgcatccgactcaagcaagagtcttgactatccgggagaacgcaaggttacagggcttccccgattactaccgattgtttggaccgatcaaggagaagtatattcaagtcgggaacgcagtggcagtccctgttgcacgggcactgggctactgtctgggtcaagcctacctgggtgaatctgacgggagtcagcctctgtaccagctgcctgcaagttttacctctgtggggcgaaccgcggttcaggcgaatgccgtttctgttggcactcctgcgggggaggtagtcgagcagtaaaaggatagcggagcaaccctgggtgtactcgagctcgagtgcttgttgtactgtaggttgaggtttctcatccattggcctgcctatttgtggatgacgtttcatttcagattagcaatgtgcttatttaaggtttcgtcatgtacctgtattctacaatccactattgtttccaaagacagcatttgatccttgttcaacgcgagcagattttcgtccaccaaagctgtgtagggatcgaaatgtcaacaatgaattgagtcattcaatcatttgtctaatgttaatgtgtcctttgcatttat

SEQ ID NO: 36010 - DNA, 1790 bp, Zea Mays
aagtgcgtgcgtgcgtgcgttcgtccggggctccgggctgtgccggccgggcgatcgatcggcgatggcgccgccgtcgagggactactggctcggcttcttccgcggcgcgggggacaacatcttcgacgccatcgaggcggccatcaccgtcgccgcatccgaccacccggccgccctccgggagcgccgcgacggcatcgccgagcgcctcttcaccgcgctcctggtcaccagcgccgcggcagcggccgcgggggcggcggcggcggccccgggaggaggagcagcggggggaacccccgtggctggggcgcccactccggcacagctccaccccgagggcgccgccagcgtgcccagcctctgcagctccgaccgcgccgaggccatcgccgacgacgccgcgccgcgctgcgacgatcctgtcctcgccgagacggagcgcatcaaggccgtcctcctcagcgaccaagagaagccggaggccgagttgctggagctactccggcggctgcaggagctggacctcgcgttcgacaccttggatgccaccgcgattggcaaagcagttgccaacttccggaagcacagctccaagcagattcggaatctcgtgagatcgctcatcgaagactggaaacacacagttgacgtgtggattgctcaccgcagagatgctgttgtagatcaaacacctcagtccatgggtccttcaagcttggagcaggaggatcgaggggcggcttccacccacatggatgaaggcgacctcttcgcaacgccgagcactacaattcggctgtccgaggagaacatggatggcgatggaagtgagtgatcagattctcgctctcatcaaccaatcccctccctccctctgaccattcttggttaggaatttgtatttaccatctcggtcggtttgtgaattccaattcaggcatcatgaccaatgacagtagggactgtgggcagcggtacccgatgatgaaccaagaaccggctagaaggcctccgccaatgggccagcggtacgacccagagccatgctggaggcagtctcggccgcaggaactgagcaacgggcagacaaaggagcagttcgtcgcggagatgcttgccagaccctcgagcgtggagtcgggccccgggagaccgcaggcgaggcctaggcagcagcaccaggacaccccagcagctcaagccaggcagcagcaccaggacaccccagcagctcaagccaggccgcagccggctgcgtccgagaaaccggcggctcaactcgacgcgaactctgtgcgagcgaagctggagctcgcgaagaacgccaagctcgaggcgaccaagaggaagctccaggaagggtaccaagaatccgataacgcgaagaagcagaggaacgtacagatggtgggtccgcagaacctgcccaagcaagggaacacgaacaacaaccgtagtttccagcctagcggtagcggcaggccaaggagtagcggcaacgtcaatagcaacaggaactggtcaagatgagaggcaccgattccaattccgattccaattccttcaagagcggcaggatcccttttctttttctttttctttttacatcggctacaacaatttttagtctaggccagtagtacataaacagcaataaggcttgttttcggaattgcatgtttggcatgtcacaatgctcggctggctggtctttgccgatgaaacctgtaaagataacactaccaaattctgatcttgagcttactatccatgctaggacgctg

SEQ ID NO: 36011 - DNA, 1367 bp, Zea Mays
ttggagtgactcccctcccacttggtcattgggaagcgtttgtagaacttctccatctgtctatggtgtatcacttccatggtatgattgatatgctcataaactgtggatatgagaaagggaccacactatttggatatggttatgattttcgccaaagcaacaggatagacaaagcgatggctggtttgagagcaaaacttgagacagcttataagacctctggagggaaaaaagttaatttaatctcacattctatgggtggattgctagtacgctgcttcatgtctatgaatcatgatgtattcactaagtatgtcaacaaatggatttgcattgcttgtccattccaaggtgcccccggatgcatcaatgattctctacttactggattgcaatttgtttatggttttgagagcttctttttcgtatctagatgggcaatgcaccaattgcttgtcgaatgcccatcaatctatgaaatgttaccgaatccagaattcaagtggaaggaaaaaccaattattcaggtttggcgtaagaaccctgaaaaggatggaactgtggagcttgttcaatatgaagcaactgattgtgtgtccttgttcgaagaagctttaaggaataatgagctcacgtataacggaaagaaagtagcactaccattcaatatgtcagtcttcaaatgggccaccaagactcgccaaatcctagacaatgctgaattaccagatactgtgagcttttacaatatatacgggacatcttatgaaactccatacgatgtatgctatggctcagaaagctctccgattggagatttgtcagaagtgtgtcacacagtgccgtcatacacttatgtggatggagattgcacggttcccatagaatcggcacgggctgatgggttctctgcgaaagaaagagttggcgtcaaggccgaccaccgtggcctgctgtccgatgagaacgtattcaagcttctcaagaaatggctcggtgtgagcgagaagaagtcagagtggcgttgcgtgtctaaatcctactccaaagtgggtaattgggttgccctgtagttcttcaggaagactgttattttggcctttcctcctgaagagaagatgaaacaaaattctggtgattgtattgtatgtctgcacgatgtaaatccctgcgagctgcacggaacaagggattagtgccccttgtacgatgtatcattgccagacatttcttttgaagcctagggtcatatattcattgccccttccaactttggagcatagtaaatgaataatatgaaatcgatcataatttcagaagtgttctgtatttggattagaatgttaatttgcccataacggtgg

SEQ ID NO: 36012 - DNA, 3358 bp, Zea Mays
ccccatgtcgcatcgagacgaagcctttcgtttagattattctccccaaagtttcttccggcctctcctccacccccacctccgcctcgccctgctgcttcccttcttccgcctccgcctccactccacctccgcctccgcgcccttccgacctcccagtcctcctcatctcgcgattggcgaattatagggtttcgcggcggccacccggatccagctcggcttggtgagcgcctccaaagcttcggatcgcgagagggcgctgtgctcactcgctgttccgccgccgccgcgacgacgacgacgagcttctgtgcgcctgtgcctgggttcggagcccccgtcgcccctccgctggccaccggataccagctcatgatgtggaaatctcagctctaaatccgcttaggttgtgataccgtgacagtgtgggactgacataattgtcactgtgcaagatgttttggcacgtgccaggattctccgctgcatcacctgtggatactattttggacaaggaaaattttaagttggaggatcttcttgatgaggatgaaataattcaggagtgcaaagcactgaatacccgcttaatcaattttttgcgggataaggttcaagtggagcaattgctccgctacattgtagaggaggctcctgaagatgcagaaaagaaacggatatttagatttccatttatagcttgtgaaatatttacatgtgacgtggatgtcatcatgaagacattagtggaggatgaagatcttatgaatttgcttttctccttcctaaaacctgaccaccctcatgggacattgttggctggttactttgctaaggtagtaatttgtttggcgatgaggaagacacttcaactagttcattatgtgcagggccatcctgaaatagttagccagcttgttgatcttattgggattacttctatcatggaggttttgattcgcttaatcggtgcagatgaaactatgtattcaagccatgcagattctatgcaatggttagatgacatacaagtccttgagatgattgttgacaagttcagcacatcagattctgctgaggttcacgcaaatgctgctgaaatcctttgtgcagtaaccagatacgcccctccagcacttgctgcaaagatttccagtccaagcttcgtagggaggttatttcaacatgcttttgaagattcaaggcctaaatcggtgctggtccactcattatcagtgtgcatatctttgttagatcctaagagacttgtatcggcttcctaccaagctttccgtagccagttgagccatggaacacttgtcactgcaagtccagagacagtaaatggcatgctggatagcctaggggatttgttgaagctgctggatgtttcatctgccgaaaatgttctgccaacaacatatggaagcttacaacctccactcgggaaacatcgcttaaagattgttgagttcatctctgttctactatcaattggtagtgaagttgccgaaacgcgactgattcaactaggagcaatccagcacgctatagatctattttttgagtacccgtttaacaacttcttgcaccaccatgtcgagaatatcattgggtcatgtctggagagtaagcaggatcacctgattggccatgtccttgatgagtgtaaacttgttacaagaattctggaagcggagaagaactctgctctgtcgtcagatttaactaagcatacattgtctacagagggaagatgtccaccaaggataggaattgttggtcatatgacacgaatagctaacaagctccttcagctggccaataccaacatcatggtccaatcatatttgcagcaaaattctgattggattgagtggcacaccagtaccctaacgaagcgtaatgcattagaaaatgtttaccagtgggcatgtggtcgaccaacatcactacaggatcgtggtagggatagtgatgatgaagacttccgagatagggactacgatgtggctgcacttgctagtaatttaagccaggcatttaaatatggtatctacagtaacgatgacattgacgaggctcaagcatcacttgagcgggatgatgaggatgtatattttgatgatgaatctgcagagtggctcgctctttacaaattccaactggtttgcatttgacgaggacaaggcactgaatgatggtttggttagcccagaagcttccccatctccaaattcagaaatatccgcactaaaagaggatgatgaagtcattcttggcgaagtaatagatgacacagaaggttctgaaccaactctaccagtctccaacaaagacgcaaacgaagagtctggtcacaccgtcttggcaaatggtaccattgacaaacaggaagatgatatcaggccactgactccggatgtaaaagagagtcaacccgagtttgtggaatggaaggaggaagaagctgaacctggtgatgttgctgagaaggatactgcagttcctggtattgaggttgaaagtgagaagcagctgaattccatggacgatgttatgctttgtgatgccgagttaggagaggaaaagaagagtggtggtatgcttggatcttcagcacctgaggcagaagcagcatcgcctgtttcatctgacatcgattcaatcaagcacccggaacaagctgctgacagtgctgtatcagagtatccaatgggcgaacaaaatcctgagatatgaaatgaatttgagggcagcagagttccgctcacgtgatggcggatgatgatggacgtgcaggaagcacttggaactggttggaccattactgtacaagcagtttgaggatcatgtgtgggttttctgttctactctcttggaggaaggtggtcccggaacatgcatctgatggagcctcaaaggttccacttagtctcatggagatgcttaggttcgatgtgtaacatattcatggagacgcaaaattcagaaagttgacttccctgcccttttccttaatcagtggggttctggttgtgtcactctggtaaatagccgataattgaataggtgatatctggtctggctacatgtccattactgtagttggtgctatttgtacgaaagttttggctcaaatgcagtcagttgattcttgtcatatttagaacttgtttgaaatttgtgtaaacgaaaaaaatatagcttctatttttcccaggtgcttggtgcttaattcatctgttataaatatagattttattttcccctcttgttctttgttttccccagcagaacagaaaaagaaaacttcgttccttataccagttgctaaagcacatgctttttcgaa

SEQ ID NO: 36013 - DNA, 3946 bp, Zea Mays
cggccggcgcctgcacggcgcccgcggctccgcgcgctcgtcctacttgccatccgtcactggacgggccacgcgactgcgatccctgccacacgagcgcaacgcgccatgggtccggcgtgccagtgagagcgggagaagctcggacatctccgcgattcagcgcgggatcctgctggactggcctgatccctccgtgctggtgtcggcgagcatgcaaggaaggatgcgaggcgcgcggcggagcgcgcgcggggaatcgtcccggaaggcggcgggccgcgaggtggagccattcacgctgtgcggcgagatgtcccatctcaccagggccacgtcagagccgtgccgcagggctcgcggcgccgccttcgcccgccgggcgaggcccttctcggcgtacgagctggtgtcggcgcgggaggccggccgcgcgggcggcgccgggttctccgcggccgatcgagcctacctcggcaggcagcacatccccaccaaggggccgtggggcgtcgacgacgtggaaagcgaggcctacgtctcgcagttctccgccgatggctcgttgctcatcgcggggtttcggggaagccgcatcagagtctacgacgccgagaaagggtggaagatccacaaggatataagctgcagaagtgtgcactggacggtttcagatattgctctctcacctgaccaacgattccttgcctatgcaagtctgacacctattgttcacattgtgaatgttcagaatgctggaaaggaatcacatgctaatattactgaaattcatgagggattggatttaaccggtggtgatgaggatgaggactttggaatattttctgttaaattctccaaagatggtaaagaagttgttgttgggaacaatgaaaagtcaatatatgtttatgacctttcagcaaataaagtgtcagcccgcatccgtgctcataaagcggctcccgcctgtacaaatatacaatcccaccgaccctagaggtcaaggcaagcaattaaagattgttgtgtttcttcaatggtattagagcaagtcgacattgacctcatcaacgacaagattccgtagcatcatccagctcagtagtactgacgactctcttaggtcaaagcattgttgtaaagctcaacaagaccaacttcgctctttgaattcatgagctctgaggtgcgcaactacaaggctccctagatggcatgattgtagcgtccgacaagatctccgtcaagcaagatggcaagatgattgacgatgtcaacccagagtacatccaatgggtcgcgcttcagcagcaagtccttagcttattcatgacattcataactcaagaaagtcatgggtcgggttgccatctacgagacaccccatgaggtgtggtcagaactgcaaaagacctacgcgtcgtagtcatgagcccggaccgcgaacacacggattgccctgaccacaagaaaatgtaatatgataatggctgaatacattaccaagatgaagtcttttgcatatgagctgacatttgcaaagacgaatgttgatgatgaagaacttgtacaaaccactcaacacctcaaagttctacaaatcatgtctctaatgcgcctgatcaccatgctgctgcagcatcgagcttttggtccctcaagcagcgagaaagcagtgcagtggaaccttcacatgacttgcatcatcagagtgctcggtttcatcaagacctgcaactccatcacctcaatgacgtcatgttcccattgtttacatagatcagcgtcctcagacaagattacaagatgaaaaaattactcatactgaatatggctattttatcatcactggtgaacctcaagaatgctatgaatgctaaatttgatacgcgatgagaaataacacttgacatctagttgttgctgatgagaccaagaatgttattaactgcaagtagagatgacaatggggccctgatttacgactccccgttgggaattcttccattaggggatgaggatggggatggggaagtttctccccccacggggatgtaaacgggaaaatttttccactcgacgggtaaatagagatggggacggggaagtattccccatccccgttccccgcggggaccgctaaacttgcacgtgaagatgttttcatataatagttaatgataaaaataaatatttaccttgccaagagattactcattgtacaaatgtgttcattttgatgtacacataattatttttttacatctgacaatatatatgtgacaatgttttgtgttaataataaaggacgtacatcctaattataatttaaggggggcacgaggatccccgtcagggatttattcccacggggacggggatgataagctattccccaacggggaattccctgttgccatcactaactgcaagtggctatatagaatcaaatggaagacagatataacactgaacaaatataaagcaggctggtggtaaatggttttaaggtagattatgtggagacattcagtcttctggtcaaatcatctactatcaggatcattatgggatagagccagtgtgggaggctctcgcatgagtgtgttctagggaaggataaaccgaggaaaccctttcatcagcaaatgttgtacaaccacagcttaatcatttaatagatttcctgtgagacaatttttttttctaattccatggtgtggttcgaacttgtgaaaagtacaaagctcatattgcttaatgatggaaaaaacacaaccatgcttgagttgggtgctataaattcatgatatggtttaatgtcataggactggactggcagatagaagtaaatcgatatttatctcttgtacgagttgtgctaggaaaatcatttttgtgatcatttactttccactgtttctctaaggctgatgtcaatgctgttaccttcgctgatgaaactggaaacgtgttgtactctggaagtgatgatagtctctgtaaggtgtgggacaggcgttgcctttcaggggaaaagtcagcaggtattttgacaggtcatttagatggagttacatttatcgatagccgtggtgatgggcgttatttcatctccaattgcaaggatcagagaatcaaactttgggacatcaggaaaatgtcttccgtcgtgagatctcgcccagtgagtctagtggactgggactataggtggatgccatttccatcagaagctcataatcttaagcatccaggtgatcagtctgtggccacatacagaggccattcagttctgcgaacacttatccgttgctatttctcccctgtgcacagcacgggtcagaggtacatatacacgggatccagtgacaagtctgtacatatttatgacgtggtaaccggggaggctgtcaagaggctttcgtggcatggctccatcatcagagactgcacctggcatccatactacccaacgctcgtcagctcctcctgggacggcttcgttgcccggtgggaggcctcgggcgacgacgacgaccattcggtgctcgtcgccgacgagatgagaggaagcccttactaccggagatacggcgatcccttggtgatgtagagatgtctgcaaagtggttaacaccaaatggtagtgagcatgtactttgctttgttgtttgggaattacaactgagcagcatgtacagtgccgtttggctcatgtggttgtatagccttacgataaataatatgtagggatacagaaagaacacatgagatcgaagcgactttataaatcctatggaatttatagaaacagacaagatcctctttccttgtttttaaaaactttataaatactttttcgaattttgattggattggaatacaccgttgttggattcagaaattatccattcatctcactcactatgggacaatgtac

SEQ ID NO: 36014 - DNA, 1607 bp, Zea Mays
aacccgccactttgcccactctcctcttccttctttgctacccatttcgtcgcagtagtcggcagtcgaaaccctagtcccctcgctttccttccactcgccgtcgcggcgccgatagagccagagctgaaaggcgtaggaaaagctggtggaggaggggatggaccggatcgtaggcagcaagtacaagctgggtcgcaagatcggaagcggttccttcggggagatctacctcgcgacgcacgtcgacacctacgagatcgtcgccgtcaagattgaaagcagcaaaaccaatcatccacagttgctatatgaggccaaactgtacaatgctcttcaaggagggactggtatcgcaaacataaaatggtgcggcattgacggcgatgaaaacattcttgttattgatttactcggaccaagccttgaagatctgtttgtttattgtggccggagattctcactgaagacggtcttgatgctagcggaccagatggtttatgtaattgacttcgggcttgcaaagagatatcgtgattcagccaccaaccgccatataccttatagagaaaataaaaacttgactggcacagctcgctatgctagccgtaatactcatcttgggattgagcaaagccgcagagatgatttggaatcgatcggatacgttcttctgtatttccttaggggaagtcttccttggcagggcttgaaagcagccacaaagaaacagaagtatgacaaaataagtgagaagaagctttcgactcctattgaggctctatgtaaatcccatcctgtggaatttgcttcctatttccactactgccattctctgacatttgatcagcgtcccgattatagtttcttgaggcatgtctttcgagaattgtttgagcgcgaaggctatcaatttgattatgtgtatgactggactttgttgaagtgtaagcaatcccagaaggctaaggttcagcaaggatgctctcatgatgcaggcgtaagcagccgtccagttgcaacaaacgtggacaagcaccaagttggtgttgcacgcccaattaatgcttcaggtctgcttgaagcagaacaacgcccggcaatcagaatgcaattaaacagccgttccaataatctgcatcctgagagattgggagtgtctgctagtcataataatgtactgctgcaatccacgtcacttgacaatgctgatgctccaatggaccacgcgacacattcaaaagcacaggggtccattgatccacacactcgtggaagttatagtccagggccctctaaccgcacttaaccttttgcattgttcgtaaaagcttgcgggtccatgcagtaaacaattggttgcctgatgtagtttcatggatgcattctggacaaacatccaatgcttcttagttgcatgaggccattgctggaaatagctgtcggatttttatgaggacttctgtattgcttgaggatcctttacaaacctaataatggtgacacattctatgcataatgaaaatttggggtttcacctggatagctttcattttaattacgggctgcagcagtgcgacaatgtgcattctacttggattgagtta

SEQ ID NO: 36015 - DNA, 873 bp, Zea Mays
aaaatgtaggctcagctcagatgagattatgtgctcgcttttgttgaaggatgaatgtatgtagccaaccgtgcttcagacaagattacccaattgacagacaatgtgtacgtttgtcgctctggatctgctgctgatacacaagtcatttcggactatatacgttatttcctccaccaacacacaatccagcttggacaaccagctactgttaaagttgcagctaacttgattaggttgctagcttatcagaataagaacatgttgcaagctggcatgattgttggaggatgggataagtacgagggaggccaaattttctcagtccctcttggtggaacgatcttgaagcaaccatttgcaattggaggctcaggttccagttatctttatgcacttcttgatcatgaatggaaagagggaatgagccaggaagaggcagagaaatttgtggtgaaggtagtttcccttgctatggcccgtgatggtgctagcggaggggttgtccgtacagttacaataaatgcggatggcgtgaagaggaacttctaccctggcgacaagctacccctgtggcacgacgagctggagccccagaactcgttgcttgatattcttgctgccgggaaccctgatcccatggtgcagtgaatttgccctccacttccgttgtgaacttttcactgtacctgacttgttcttgatttcaaccgaagaaagaattggaacatttcctgtcgaactaatgtcgcgccagagtatttacatactgttgttatcacaccttagtaaattcatggttactactgctgtcgtcgttttatctgacgagtatgcgattttgtcagccgcctacttatatgcggtactgat

SEQ ID NO: 36016 - DNA, 4646 bp, Zea Mays
cgctgccgtcgtcgcgccggcctcgatacgttcccgggaagtcggaggcgccgcgctcgtcacgccgccggctccgacgagatggaggatggcgtatctacttatactgtggatgaggcacttgtgtccatggggtttgggaaattccatgcattcgtgcttgcatactctgggatggctaaaatctctgaagcaatggagatgatgcttttgtcatttgttgggcaatcagttcaagctgagtgggggctttctgcacatgaagaaagcctcataacaagtgttgtctttgtggggatgcttgtaggagcatatgcttggggcatagtttcagataactatggaagaagggttgggttcaacttcacagctattgttactggaggagctggccttcttagcgcttttgctccaaattacttatctttgattgtactgagatttatggtcggtgttggactgggtggtgggccagttttaggttcttggttcctagagttcatccctgctcctaaccgaggaacatggatggttatgttctcagcattttggactgttggcacaataatggaagcttctcttgcttgggccgttatgccagcttttggctggaggtggctgctggcactctcatcattgccatcgtttgccctgctactcttctacccagtgacacttgagtcaccaagatacctatgcatgaagggtagaatagctgaagcagttcatgttctggaaacaatgtcacgcgtgaactgtgtttctctcccctctggccgacttgtctctggccatcgggtggaacttcatgatatcggggattcttcagaaacggcacagttggtgacatctaataagaataacactgctgatcgtggtagcaaatccgagattggaggcctcagtgccatcttaaagcttctatctccaaacttaatcagatcgactcttctactctggactgtctttcttggtcatgcctttctgtactatggtcttgttctactcacatcagaactaaatcatggaaataggatctgtggatcagaagagggggcagaagtgacaacaacagcccacatacatgatgagaatctctacagaaatgtatttataacaagctttggagaggtccctggtcttctcctgtcggctgccattgttgacatgatcgggcgcaagctctcgatgtcttccatgctttacatcagttgcctgtgcatatctccgcttatgttcgcccagacggaatcgctgacgaccatctttttgttctgtgcccgggtttgcatctctgcaagcttcactgttctgcacatctacgcccctgagatatacccaactgctgttagggccacgggtgtcgggtttgcaagctcgattgctcgctttggtggaatcctgtgccctctcgtggccgtcggcctggtgcacgcgtgccaccagatggcagctatcctgatattcatcacggtgatgctggcttcaggcatcgccgtgtcatacttccccctggaaacaagcggccgaaagctgagcgaccacgtcgccgccgcgtaagagctgattaattgaagaactgactttttgagagggatacaccaatacagaatcaaggcccaaggggccattattttttttgttcagttgttgacaaaggatacagtgggaaagaaagtgcaaaggaggcactagattgttacgttattatactgttgcttctcaatagaaatctacagatcactatatgatttttgttctcttgtcaatatggtattagtatgaattctaaacgccctcaaaattcattttttgtttcaaaagtgaaacgtctttttatatatgaattgggaaactaaaaaatgaaattccgttgccgggactcgaacccgggtctttcgggtgagagccgaatatcctgaccagctagactacaacggattctgtttatgttgtgcatagtaatttataagattacgtagagctattcacagtaatggcttagcgacattctcgctgctgcaatggcgacggtctcgttccatcactgtcccccgtcattctcgctgctccaatggcgacggtctcgttccatcccccgtctcttcctcctccgtctcctaattttggaaaggccatagtttcccatcgcgagacctgtatccccatggatccatgagagaaaggcggaggagatcaggcgacgtacgcgcgtgggggtctcctcctgcacgctctcagctgaaccgccccgtgctcccctgggcgcgccgcgcgcaatggcccgacgacggcgccccctaccgccgccgctgctcgtctgcatgaacaagccatcgcaattgtccggttggaaatcgagcggcggtgatccctgcgatgacgatgacgagtggaaagggatagagtgcagcggctcatctgtcacagaaattaacttgtcagggcttgaactcagtggctcgctaggatatcagctatcaagcttgaaatcagtaaccaaatttgatctcagcaataacaatctcaacggcgatcttccatatcagcttccaccaaacgtggttgaattaaatctttacggaaactctttaactggaggagttccttattcgatatctcagatgggtgatctggaaacactaaatttgggcaagaaccacctaagcgggcagttgacggatatgttttcagaacttccaaagctctcaacattggatctctccttcaaccgcttctcaggcagcctgcccaagagttttcagcacctaaaagacctcaagacgctgtgagggaactgaaatttgcacatggtagtaattcatccatactttctttcagatctacaatcagtgccattcttttcaaaatgtatgtaggaatgtggagagcaaccaattcagtggtcatatagatgttctagcgaaacttcctctcgaggatctgaatctgcagaacaacaagtttactgggtggatccctagtaaactaaaagacatcagcaatctacagattggagggaaccagtggtcgtccggatcagctcctcctggtatggagaagggctctgcactggagggctcttcaggcggaggtggtcgaagtggagtaaacggtatcgccatcgcagctgtggtgatagcggtgcttgttgcagctctgattctcttgtctgtgttgaagaggaaccgttcttcttcctcgtctcattacctcatggatgagtcagcgatcaacatgaagccactggagcattcatcgtcaattagcagtacgacaccgtctgcaatgcctatcaagccgattagtgacaacgagttcgagaacaaactaaactattcgaggcggagcacagatccagtcaaccttgttgcttattcatcatcagacctccaagcagccactggaagcttccatagtagcaggttactaggtcaggggacaatcggtggtgtttacaaggcaaaatatgctgatggaacggtgctggccgttaagaagtttgatccattgagcttctcgggaagcagcgacttcatggatcttgtgaacagcatttccaagctgcatcatccaaacatctccgtgcttgttggttactgctcagagcctgggcactacatgttggtctatgactacaacatgaatggatccctctatgactttctgcacttgtccgacgactacagcaagccgctgacctgggacacccgcgtaaggattgctgttggtacagcttgtgctctggagtacctacatgacgcgtgttcacctccagtgatccacaagaacatcaaggcatccaacgtcttgctcgatgctgacctcaaccctcacctcactgactgcggccttgcatacttctatgaggatccgagtcagagcctgggaccagggtacgatcctccagagtgcacaaggccatcaggttacgttatgaagagcgatgtctactgctttggtgtcgtcatgcttcagctgttgaccggccggaagccctacgacagctcgaagcctagagcggagcagtccttggtcaagtttgtcggtccacagcttcatgacaccaacgccttggaagctctggcggatccaggccttcgtggcctatatccaccgaaagcattgtcccgtttcgccgatgtcctctcccgctgcgtccagtcggatccagaactccggccatccatgtcagaggtggtgcagttgcttctccagtgcgtccagcgcacaaccagcaacaggaggctgggtggccaccgcaccgtctcgcagcgaagcgacgattctgattggtgatgctctgtttctgcctccatcctgctgctgcggcccagttgctgaaactgtctcagaacagaaccgtaggtgtgcggcccttggcatgccgctgtacaaaagaaaatgctttattagacaatctggttgctcgaacagtgtggcaacaaataagtcggttgatttaggtaaaggtaaaagcagattgggtgttctagtgagtagtgacattgtatttgtactcataaacttaaaaacatatgaccagctaatttttaaaaatatataaaccatcttagaacaactccagcagggcctctcagatccctattctacttttgagaatgcaagagccaaaaaaaaaaaaa

SEQ ID NO: 36017 - DNA, 1979 bp, Zea Mays
aaaaatggaggcagcatattttaaaagcgagattttgaaaagtgctgtgaagtgagtgagaaccaacagatatgctcggtggaaaaagaaaacaattcgcgagtatatatatataatgctcggcggggcgagggagaaaggcagcaaacaggttgcacagcgggggaaggaagagcggaaaagcccatcgccaccttcctcctcggatccacaacccggacgccccacccgggtcctttcttcctccctcccagtcccactcccaacaccgaccgcccctcctcatcacacctcgcaactattttagtctaaccgagtccaaccagtggcaagcgagcgagaggtggtggacggaaccgtcgcctgctgcgggctgccctacgagatctaggcaagcgagcgagcgagcgcggccatgggtgctcgctgctccaagctctccgtctgctggtggcctccccgcttcaaatcgccgatgctcggggagacaaatccgttgagttgggcaatgaggacgagggctgcattttatgtggcacaggcgttggaatactgcagtagcaaagggagggcactctatcatgacctgcatgcatacagggtcgtcttcgatgcggtaacccaagactatcatgttttggtctgatgaagaacagccgtgatggaaagagctacagtactaatttggccttcacgcctcctgagtatcttaagacaggcagagtaagtcctgagagtgtggtttacagttttggcactgtcttgcttgatctcctgagtggaaagcacattccaccaagtcatgcactcgaccttataagagggaagaactttctagtgctgatggattcttgcttggaaggtcatgtatccagctccgatggaactgacttgatgcgattagcatcccgctgcttgcaatatgaagcacgtgaccggccaaatttgaaaacggtggtatccggtctcgaatgtctccagaaagatgtttctactccttcacacactttgctggggatccaacatgataataaaaactcagatcgaatttctttatccgctattgggaaagcttttgccagagcagacctgaatgaggtgcacgaaatattactgcatgatggatatgatgaggatgacactgctaatgctgagctatctctccagtcatggaatgatgatgtatctgagagctttgttgttaagaggcatgcagacaacgcctttaggtctaaggattactcgactgcaattgagtgttactcaaggttcatcgactcaggtgcaggggtggctccaaccatgctggggcggagatgcttcgcatatgtggtggctggcaacccacaggaaggccttgaggatgcaaagagagccgaggttattgcatcggactggccgatgggacactacctgcaggccttggcacttcacaacctgggaagggaggctgaaagccaagaagcactgaagaatggcactgccttggaagctgcaatgaatagtagagctagaactgtatagccctgaatttgtgataccctgtcctgcttgtacctagatcgcctccctccaatgcttcgtcaccagtaggggctgtttttggtattccctaacttgtatcggtatttcccctagtttcacaagtcgaaaaaactcctaggggctagtttggatactttgggattagagtgttttgaagggattggagagggtgtaaatccctaatagatcaaatactctctcaatacatctcaatccactccaatcccactcgttactagagtatccaaactaggcctaggctggctgttgttacacctccaatatatttatgaatacaggaatgggcaactagcattctgttgatgtgagtttgtaaagtgagagtttctatttatttcaacaaattcatgtacatacacacttttgaaccctgcaacttaagatatttgaggtcaggcaaacttcaactctgg

SEQ ID NO: 36018 - DNA, 1591 bp, Zea Mays
gctgcagctgcagaaccaaggacggtcaccgccacacgaacagcccagagcaggaggcagttgatggaatgcgtggagctgctggattctcccgatctcttcttcctggacggcggcgatgcgcatgcgaccgacttctcactggagaaccatctcgagtcaagtagctcggcaggtgccaaaaacaaagctgcgccgggtcatagtcatattcatagtcatagtcatagccggcgtgctcagcttcatcggagtaacgcgcctgttccaccgccgctgcctggaacctcttattatggcgcgcggaggaaggcgaaggccgcctgtcgccgtgtccccgaaggcgtcctggattcctgggacaggttgttcttggagggataccagtctgacctccgtgtctccacagacggcggcgctgagatttcgtcgcattcctgcgttctcggcgtcaaatcccctgtcctgagagctatgctggaggaagctagactgagagatgggtttcggtgtatccgtgtctctggcgcgccttcggaagcagtccgtgtcttcatcagatttctctactcttcacggtttgagcaggaacagatgaaggagcacgctctgcatttgcttgtgctctcccacgtcttctcggtgccgtctctgaagacggtctgcgtcgaccaactcgagaggggcttcctcgctactgacaacgtggtagacatgctgcagcttgccaggctgtgtgacgcgccccgcctcgcgctcgcctgtgcccggatggtcatcggggatttcaagaccatctctctgacggatgggtggaaagtgatgagacggaccaatccaagtatggaacaggagctgctcgagtctcttgtcgaagctgatacgagaaggcaggaaagagctaaaaggatggaagaaaagaaagtgtatctgcaactgtacgaagcaatggaggcgctggtccacatctgccgggacggatgcaggacgatcgggcctcgagatcaagcgctcaagggcagcctagcagccgcctgcaagtttcgcgcctgcaagggcattgagctgctcgtgcgccacttctcggcctgcggagtccgggtgcccggcggctgtgccaactgcaggcggatgtggcagctcctcgagctgcattcccgcatgtgcttcctcccggacacctgcaaggttcctctctgcaggcattttaaggagaagatgcggaatctggggaggaaggaagagaccaaatggaaccttttggtgtgcaaggtgctggagcgcggaggaaccatgggttttatgcccggaaggagaaaaaatttcatcaaccctaaggccagctgggtgttgccacgtggctcctcttgtatttgaaacactcaaacctcgcaggggtacttttatgttagacgagaaggggaccaggaggagcaggaacaaaaaagaaaaacgtcagaacagctgttgcgtgaatcgtgatgatactttaaaaaggaaaaagcatctaattttgaccatccatccatagctcgagcaaattttgttccaccaattactagtcatattggaaaaaaaattactattcaaa

SEQ ID NO: 36019 - DNA, 2193 bp, Zea Mays
aggaataagaggatgctggggcagcttcttgtcggtacattagatgtaaaatcagagactcagcgaaaggctgagcaaaaggttcgtgaagaaagtgaaaggctgcgacaacaggaacgtgagcaaattgcagagaagcgtaagtgtgatatgatgctccacgctcgtgtagctgctaaggcagaagaaaagagtatggagctgttgtacattcactggactgagcatcataaaaggctgtccaatttcttaagacgtttattgccagcaggttatgttcttcactaccccgtgtagctgccactgttgctagcgcatccatcgttaacccatgtgtgggaatgcacaatttgacagctatcatcacccatcagatactcggatggcaatatcctttatgttagcacctgcctcccacatcgtcttactttatttcctgtctccgaataaatagatttttaacctaagaatttatttataaataaattaatctcgtatttaatacgtatctcatctttcaacctattgttaaatttctgcatttggacgtgtactaaatactataattaatgttactaaaataatcatcaatcgttgttctaattaataaagggtagtatgatcttttctctttcacactaacctgccttaagtttgctaaaaaaatcttattctaatacagaaaatgtgttattcagttgtttaagtgagtatgcagtatatatatcgtacatgaatgctggatgtatggttatcagtggtgactcatacaccgtttatgcccattctaaaattatatgccatcaatttgcaatgttttgccctacagaggtggactacacaatcagcaaaaagaacatgacattccaagtaaatccattcgtttcaatcaaattataagatgttttagttttttagatatattgttgcccaaggactactgcagaattggaggcacatgtagctgatacatctcttgtgtctgctgatgcacctcgtgtgcttgctgatactgtactggatatatctggtggggagcgtgcttttattgaggcagatgaagcaaaggaactgcttagtccacttacgaaaccagggaattcatataaaagaatttgctttagcaacaggagctttggaaggcctgaggatgaagcccttgatgtgatgcgcatattctccaaagcattagagggttctgtcctgagatatctgaacatctctgacaatgctttgggtgagaagggtaggaagctgcgaaagctctatctgagcttattcctgcaactgaagcttaaggttctccacttccacaacaacatgacgggagatgaaggtgctatgtatattgctgagatggttaagcgttctccgaatgtagagagtttcaggtgctcagcaacaaggataggatctaatggtggagtcgcattgtctgaggcattagggacatgcactcgcctgaagaaacttgatctcagggacaacttgtttggtgttgatgcagggttagctctcagcaaaacccttccaaagcttcctgatcttgttgagctttatctcagtgatctcaatcttgaaaacaagggtactatagcaattgccaaagccctcgaacagtcagcaccgcagttggagatactgttgaagatgctaccaaaatattacaatcatgtcagagcttatgataatacactcattacaaaaaaatttggcgtccacaggattactctgaaaggcggaagaaaggttcgctttgttgtgatgggaaatatgttttgcactgagctgcgaattcctcgtaagtatgacttaaagggttctacacaaggccgatcaaccaaaaagcaaaatataaatgagaacgcaacactgaaggaccttgacctatcatatgtttttcatgtcgataaaccatggcgggacacacttttcagaaatgatcatagtgggttaatgattattgtttcttctaatgttcttttatcacacaagaggagcataccccttgagaaggaccttaaggaacaacaggttgtgcatggtgaggtggaaaacactttagggcctggttttatcaacttggcattagagaatccaataccaaaggattggagaactattcatatgattggagctgaaagcaatctacttgatattgtctctaattctgttgccacatctataacttaa

SEQ ID NO: 36020 - DNA, 1301 bp, Zea Mays
cctgtcctcgttgaccgccgcgccataggagggagatagaaatcaaacatgcgtcgggggtccgccgacgccgccgtaggcattacaagcctacgcacccagccgttgggcttcgggcgggcgatgaaggacgttcgccccccggtactcttacccatggagtcaggatcatgggtgagcttgcttgggtggcaatccatggttggaatccttcgtgaagccgcgccgtgacgtgggcggggcacatcaccgcccgttcgtcggtgtgaagtaggcccggatgttcgcccgagcacattgagcacatgaatgtggcagctgggtgcggggattgattggtgatggagaaattgctcgccggacttcaatggcgccaccgcacacagcgggccgggttgcctattgcatgaacctcggaaagaatcaccctattaggcttaacgaagttccccacccctttcgcacctgatagcgcttgattcgatgctctgggggccgttgtgacgccttgccgacggcgctccgccgcgaagaagactagcgccgcctcgtgtacgtcggtaggagggaggctgtgaggtggaagaagtgtgatcgttgatgtggggattaacgggcgagatctcggaaagaatcaccctattaggcttaacgaagttccccacccctttcgcacctgatagcgcttgattcgatgctctgggggccgttgtgacgccttgccgacggcgctccgccgcgaagaagactagcgccgcctcgtgtacgtcggtaggagggaggctgtgaggtggaagaagtgtgatcgttgatgtggggattaacgggcgagatctgatcctgtaccgtttcttttggagcaaaatccgttagatcgggggttgatgggtaggattagatccaggttaataaaatcgtagtcactgaatctggatcgtgcggctccatttggatcataggtggacgactttcgtcccgaaatcaacaatcttaaggtcgtaccggttcattaagtgatttgatctaatggtgtccaccggattgtgatcaggcggtcgaaaatagaagataccccttcaccgtgtaatgtttgtaaaagaacccctaagtttttgggtaaacatacccaccgtccctcggctgaaaggaactcttacacctaggtccccataatttgcaaaacaacccctggcctttataaagtcattctgaaagttgattttactatagaaataattccaatagcttagataaatcataagttgtccgtcttagctccgattagacctgttccagtcgcg

SEQ ID NO: 36021 - DNA, 1609 bp, Zea Mays
caaaaacccagaaggaagtagaggcccccttcttgccccctacgcagccgtgtgccgtacaccgtgcacgcacgccgctcctcgcctccctgcaccatggacgccggcgagtgctccacctccaaaccccctcagccctctgccgcctccccgccctgcggcggggaggaggtcgcgtggtgcgagatcaggcggaatgccggggacgcgtcgtccgccactattcggaaccttagctcggatgcaattattgttgatggaagaattgtcgaacaagaatgcgtagacatcaaaccaggcagtgagattgtctctggaccccagaaagaagggcatttaatatatacatttgaaattacagaggcagaggatcatgaaaaaaaaaatgtcaagattgttctagatatcgagaatgcaaaatgcagcatatgcctgaatttgtggcatgatgttgttactgttgctccatgcctgcacaacttctgcaatggatgtttctcagagtggttaaggaggtcttcatctaattcacgtgataaaagccagagcgctgcatgcccacaatgtaggacaacagttcaatcagttggaaggaatcacttcctgcataatattgaagaggctatattgcaagctttttcctcactacagagatctgatgaggagattgcgttgttagagtcgtatgcttcagttaagtcgaatatggttttgggtcaacagaaaaaccaatcaaggaaaagacgtttttcacgttctagtgatgataccgacaattcagatctaccatgtcctcaatgccgtaatgaatttggtggatttagatgcagcccaggatctgtgcacttgcaatgcagtggatgtggaggaatgatgccagccagatctaacatcagtataccacaaaaatgcttggggtgtgataaagcgttttgtggggcttattggtattcgcaaggtgtgagttcaagtcattgcaatctgatctgcaaccaggatactttgaagagtatttatcagcgacatatctctgcacttcctgacacaattcatgggggcaatccatatgaaaaagatattacagaaagatgtatacagcaatcaggcaaaacattgcaagttgtaatctcagagtggatatcaaaatttgacaacatggaaattgatcgttcaaggttgcaattgaataatgtggatgcaattacttccaggacatatatctgcaaccattgctacagcaagtttgttgatttcctgctctactggttccgtgtatcattgccccaaaatcttcttccacgtgatgctgcggagagggagagctgctggtacggtttcatgtgccgcacccagcaccatcggcctgaccacgccaagaagctgaaccacgtgtgtcgcccgacaagaggcaaccagccctagtgagacttgactgtttctgtcaccattgtcatcaccatccattgtatgtgtgtgtcatcaaaatggtcaggaagtgtggcgcgtccatgtttggaaccctttttggtttgatcctggctggacctgacaaggaaattatattgctgctggtgccggaaccgccgctctgtcggcaggtccggggggg

SEQ ID NO: 36022 - DNA, 5223 bp, Zea Mays
ccggcacactccgagattcccctcaaggcaccccaaaccgatgctttctggccactgaaaagcgcacgggagaagaagcgccaaggcaaagcaaaaatttcgcgatgagtccaccacgactccaagcagctgcggccgcgccgctctaaccggagctccgttaagactccgccgccccaaatctcagcgcctgagtccgccgctctcctcccgtgctcgccgccactggtttccgcgccgggacttgggttcggtggggcgacgtggagcttagggtttcggcaggatgagctaccggaaggggttgaaggtttgggtggaggagaagggggaagggtgggtggaggcggaggtggtggaagcgaaggagcgcgccgtcgtcgtgttctcgagccagcggaaaaagattacagtttcaccagaaaaattgttgcccagggatacagatgaagatctgggtgggggtcatgtggatgacatgaccaaattgacatatctaaatgaaccaggtgttctttacaatctgaagaaaagatatgcattgaatgagatatatacgtacaccggaagcatcttgattgccgttaatccttttacaaggctgcctcacctgtacaatgaatacatgatggaacaatacaagggcatccgattaggggagctgagtccgcatgtttttgcggtggcggatgcatcatacagggctatggtgaatgattctcgaagccaatccatcctggttagtggtgaaagtggtgctggcaaaaccgaaacaacgaagcttattatgcagtatctcacctttgttggcggtagagccgctcttgatgaccggacggttgaacaacaggttctagaatctaaccctcttttggaggcatttggcaatgcaaaaacagtacgcaatgacaattcaagtcgatttggaaaattcgtagagatacagtttgattcaagtggtagaatatctggagctgctattaggacctatcttttggaaaggtcccgtgttgtgcaaattactgatcctgaaaggaattttcattgcttctaccaattgtgtgcctctggaaaggacgcagagctgtacaaacttgggcatataagcagttttcattacttgaatcaaagcaatacacatgatttggaagggacaaacaatgaagatgagtactggaagacaaaaagggcaatggatattgttgggattagcagagaagatcaggacgctatatttcggacattggcagccattcttcatcttggcaatattgagtttgtcccaggaaaagatgctgattcttcaaaaattaaggattcaacctcaaattttcatctccaaacagcagctaaattatttatgtgtgattcagatctattggtctcaacgctatgtagccgatctatacatactcgtgaaggaataattgttaaagcattggattgtgctgctgccgcagctaatcgtgatgctttagcgaagactgtatatgcaagattatttgactggcttgttgagaatattaataagtctattggtcaagatgtggattccaagctacaaattggtgtgctggatatctacggctttgaaagcttcaaaaacaacagctttgagcagttctgcattaactttgcaaatgaaaaacttcagcaacactttaatgagcatgtattcaagatggaacaggaggagtacaaaagtgaggaaattaattggagctacattgagttcattgacaatcaggatgtgctggatttgattgaaaagaaaccaattggaattattgcactgctggatgaagcctgtatgtttcccaaatctacgcatgagacctttgcgacaaagatgttcagaaacttctcttcccatcttaggctcgagaggacaaaattctcagaaacagattttaccatctcacactatgctgggaaggtcacgtatcaaacagattcttttctggaaaagaatcgagattatattgttgcagaacactgcaatcttctatcatcttcaaggtgcccatttgtttctggacttttcacttcattgcctgaagaatctataagatcttcatacaagttctcatcagttgcttccagattcaagctacaattgcaagccctgatggaaaccctaaactcgactgaacctcactatgtacgctgtgtgaagcccaactctgctaatcgacctcagctttttgaaaatcaaagtgtattgcatcaacttcgttgtgggggtgtcttagaggctgtccgtattagtcttgctggctatcctaccagaaggacttatgctgaatttgttgaccggtttgctgttcttgtgccagaattgatgattggaagttacgatgaaaaaatgatgacaaagggtattctcgaaaagatgaagcttgaaaattttcaacttggtaaaacaaaggtgttccttagggctggtcaaattgcgattttagatatgcgccgtgctgagattttggacaacgctgcacggcacattcaaggccgtttcagaacatttatcacacgcaaagaatttgtgaaaacaagggaggcttcaatttctatacaagcatactgcagaggctgtttggcaaggaagatgttcgcaaacagacgagaaacagcagcagctgtaattgttcagaagtatgtccgaagatggctgctacgtagagctcacctgcaagcatgtttggcagctctccttattcagtcttacattcgagggttcatcgctcgccgctatttctctgtcattagggaacataaagctgctacagtgatacagtccacatggagaagacggaagtttgtcatacttttccagaattaccggcaagccactgtggcaattcagtgttcttggagacagaagcttgcaagaaaggagctaaggaaactcaaaatggctgcaaatgaagctggtgcactgcgtgaggcaaagaataagcttgagaaaaagatggatgatcttgctttaagacttacccttgaaaggagactgcgggcttccagtgaagagtcaaaatcagtagaaatattgaagcgtgacaaaataattgaatcattaagtgcagaatgtgctgccgctaagtcagctgctcaaaatgaacatgccaaaaaattgctgctccaaaagcagttggatgattctttgagagagattactatgttgcagagtaaaaagattatgtcagcagaagcagcagaagaaaactccaacctaaagaacttagttgaatcattatctacgaagaactcaatactggagaatgaacttattgtgactcgcaaaagtagtgatgatacaatggaaaaattgaaggaagtcgaggggaaatgcaaccatctacagcaaaacttggacaaattgcaggagaaacttacaaacttggaaaatgaaaatcatgtcttaagacagaaggcatttaatatgccgacaatgaacaatctgtctgtagctccaaagacattatctgagaaattttctgcatcaattgggcttcccaacagtgagccaaagcatatatatgaaagcccaacacctacaaaatatctggcttctcttccacagactttgagtacatcaaggagatcgaggttgcctgttgaaaggcatgagcaaaatcatgaaattttattgagatgcatcaaagaaaatttaggatataaggatggcaaaccagttgcagcatgtatcatttacaaatgtcttttgcactggcgtgcttttgaatcagagcgaactgctatttttgatcacgtgattgaggccataaatgatgtcctaaaggggaacgaagctgatggtagattaccttattggttgtccaatacctctgcattgctatgccttctccaaagaaatctgcggtcaaatggattattcactaccccgtctcgtcgttctggtggagctctagggaagatagcacaaacattgaggtctccttcaaagtttataggccgcagtgatactctaccacatgttgatgcacggtatccagccatactattcaaacagcagcttactgcatgtgtcgaaaagatatttgggcagctcagagataatctaaaaaaggaaatatcacctcttcttaatgtttgcattcaggctccaaagtcaacacgtgggcaatctggaaaagcatccaagtcatctggagttggtgcccacccagcatcgaactccaactgggacaatatcgtcaatttccttgacttacttatggatacattgcgcgaaaattatgtgccatccttctttatacgtaaacttatcacacaattattctccttcatcaatatacagttgtttaacagtcttcttctccgacgtgaatgttgtacattctccaatggggaatacgtgaaagctgggctatcgttgttggagaaatggattactgatgtcacagatgagtttgcgggtacatcttggcacgagctcaattatatcagacaagctgttggatttttggttatacaccaaaaaagaaaaaagacgcttgaggagatcaagcaagatctttgcccgtccttgagtgttcgccaaatctatagaatatgctcgatgtattgggatgacaaatacggtacccaaggcatttcaaccgaggtggttgctgcaatgcgggagatggtcaacaaagatacccagaatcttgtgtcaaattccttcttgttggatgatgacttaagtataccattctctaccgaggatctatcaatggcaatcccgtcaatagattatgctgacgtcgatcttccagaatctcttcagcactatacatcagtacagtttctactaaggcagcaggatccacagcctgcccaatagaatgaatgtggtcagcctgccctgaagatctgtctgtcccctggttttattggggtaacatccatctgcgatgttgtattgatgtttagagagtacctagtttggtggagtggacacaatttaaaagcaaccattgttgctagatgccaattcattggtgttcactccccaagtatttttcattgtacaggaaatgttgtaagtctgttgactagcgcaaaattagttatatcagtggtaaattgggcaatgcgcatcagtgcatcaccgatggtatcttctacacatgaatcgttagccagttaaccgctaggtcgggcgatcataagctccaggctgtctgatatgggttcgtgtgggtctgtcgcgggacg

SEQ ID NO: 36023 - DNA, 309 bp, Zea Mays
ccgagatcaaacgacgtggatcgatcaagctgaacggcagatcagataacgatccgctgggaaagataatactactaccttcgcctatgaataaattagatttatagagttattatggcatgtacaacatcatttaatatgaactctctcgagagatctaccttctcggctagattcgtcgtctctttgaccggatcgccgtctggatccgtcaatgtcgaggcctttctggtcggatccatcgttaccccttctattacgccacaggcgcggctaacattactggtgcagacgtgtgcgctgccgccg

SEQ ID NO: 36024 - DNA, 381 bp, Zea Mays
gaaggatttgtaagaaaacaggtgctgtgctacggtggccgtcgcgcgtccaggtgcagcagaccactagacgaggctgctagctggttgcgccgcgcacactgcctctgtgcctgcctaaccgatctgctatctgccaaacagtgccataaacaagagcggcttcaccaacggcagcacgaaggagatcgacgctcattatccgtctgggaagccgagggaggtgcacactgtggcctgctgcgcgccactcgatgtctggatcgatccaacaaaaaccagaccactgcatgcacagcctgactgcagttcacagagcacagcccgtatgtttgttacccgcatcgtctcgtcttgaaccaccgtatgtgttaactctgt

SEQ ID NO: 36025 - DNA, 365 bp, Zea Mays
caatccctaacccggctggttcgttgctttgcctctcgatttgtattgttgttggctaggtgcagtgcctataaagtaggcatcccttcactattgttggatcctatttgatgccatgacccatatgattgttttattggaccttccattgacaccattatgaaatgacaatggtgtgattgaggtggagggtatcacagaagaaagtccaaacctatagatcaaaagagtggagaagataactctgttgagcaaaaagaagaaaaaggtgtatcaactttttggcttaatgcaattaagaatcatgaaattctagatgagaggagagggatgaggaagctctcaagtacctcaaggacatcaag

SEQ ID NO: 36026 - DNA, 1399 bp, Zea Mays
gtggatgctcctggtggtgtctagtggagagcttctccatacatggcatgcacactatcgtgctgttaggtgcctcgggctgtatgactatttgcttgtctcagggtcagaggatgggactatcaaagtttgggatctcatcacggtgcttgatgagcaatcaaggctggaggtccagacaccatatttgtatagtttcagtcagcatgcactgcctgtaactgatattgcttgttttcttggagcaatcgctatatcttcttctgaggatcgaacctgcaaaatttggagtttatctgagggtaggatgctgagaagcatttcatttcctactagcattgattctatagcactagacccaagaagtcatattttctatgctggtggtagagatggaaaaatatatgttactgctatgggtgttgatctcagttttcatggtagggatgagtcatctattctgggtgcattggatgaccacagtaacaagcttagcatcaagcagagatggacttctacttgtctctggatctgaggatggtaatgttcgggtgtgggataccagatgtcagcaagttacccgaaaattcaaacactcccaaggtccagtaaccaatgttcttattgtaacgccacaacgagtaaatctgccaccgctacaaccattacgcaaagttcggtctgcaaatggggaggctgaacggcaggcagtacttcttcatcggcctgaaaatgatgtcccaattcctggaaataagaccttcatttttatggagcgctacttggatgagcttcagaagcatggtggttcatccaggttatttgattttgggccgaatgctcagaatggcactccaaaccaacagggaacagaatggagagatagatacttggagttgcaggatctctttgtacatgaggtcctccatcagatgccatcctcgaggaacccatgatgcacatgctttggatatcgatcatttgtggtgtcgaaacagtgatggttgccattcgggctacaaacgatgtagatgagttctttggagtaattcaactgatggtgctttcggctgcgaggaacttatcagattctgaactaaaaccactagaatcggtgccagcagtcacttggaactggttctcgtttgtgtactagtctagagaaacgctaaaaatcaggtttctcttgattctagttctaattttaaggatacagtgagcttgctacataaagttattttgatttcatagagaaaatgttttgttctcaggggaatctgaattttgaaagttttctactagaatctaagatttgatacgttcagggttaaccataccaattaaggactaaaaagtgctagttagcggtatcggattttcgctggaaaaccgctgtttt

SEQ ID NO: 36027 - DNA, 1775 bp, Zea Mays
cgtttgtttctcaaatacaagatgatactcaggctgtgactcttgtttctactcactccacgccactgactggcaggcgattatgtgattcatgaaccttcttgccatggcgacgatgtctgcagcgtctcatcgctgctgtgcttcttccttgagagctttaaccgtgttatttgtgttggcagctcctgtttcagatgtagaggggcgacatcatcgtcatgtctgtccttatttctcctgcggtggtttaagcaatatatcgtatccattccgtcggcaaggtgatccatctgggtgcggtgtccaatcgtgtgagctggtttgcacggatacagacgccacaattcgcatcggcagtggaacatacaagtctgcagccttcatgcggttacctagccatgactcctttgggtagtccaggcatgccggtgcccaagaatacaagctatccagatgttgttaagttcatgaggaatggatttgcccttggatttactgtttcgattcctgaccccaacatcagagaatgtttcgctgagtttatgcggttcgtattaatgccgctggcagtattcatcttcctagtctataaatactggaaaacaaggataacagtagatgcagtcgagaagttcttgcaaatgcagcagatgctcgttccaatgagatatgcatacacaaacatcattgctatcaccggccatttcagagacaagctcggacaaggtggttacggttctgtatacaagggggtgctacagccaggtgaagttcatgttgctatcaagatgttgggcaactccaactgtaatggagacgagttcatcagtgaggtcgccaccattggcaagatccaccatgtcaatattgtgcgcctcatcgggttttgctccgaggaaaatagcagggcacttatctacgagttcatgccccatggatctctcgataagtacatcttctcgtcggagaagagtttctcgtgggacaaactcaatgagatcgctctgggcattgctagaggtctcaactacttgcatcatgggtgtgatatgcagattgtacacttcgacatcaagccacacaacatccttctcgacaacaactttgttccaaaagttgctgattttgggcttgccaagctgttcccaaaagatgacaatttcgtgccactgagcgctatgcggggaacgattggctatatagctccagagatggtatctcgaagctttggtgttatctctagcaaatccgatgtgtacagctttgggatgctactattggagatgacgggcgggcgaaggaacgcagatcctcatgcaggaagctccagtcaagcatactacccatccttggtgtacagccagctgagccaaggagatgcgaacgagatcagtgaaggtgttgatatgcacgagttagagaagaagctatgtatcattgggctttggtgcatacagatgaagccgcaagatcggccgacgatgagcgaggtcatagagatgtttgaagctggtgtcgatggcatccaaatgcctccaaggccattcttttgtgatgacgagggtgatagttcttactctgcaatctctaaactggatacaatagaagagtagtagttgtagtaaaatacacttgtgtctatgtgatcttaatgtattagactactaataatgcaaggttgtcgtaagctaaggtactggttgtatacttttattgagagtgtggtaatgtgttttgatataaaatacctccatgaacctttttttacaaag

SEQ ID NO: 36028 - DNA, 597 bp, Zea Mays
ttcaaagctcatgcagccagccaagtagtgtcgatctccctcctttgtgcttcatgactcatggcagtaaaatgcatgcatgcatgcatgaggaatcctggacgtacggcagttggatcgtccttgatctcgctcgttgcatgcgcggcggggaccggccgcgggccgcggcgccagcctttccggctccggccgggaaggaaatcttgggggatccggcgctgacatgagcgtgtaccggaagggatcgatcgagcaggcgcaaggcgtgagctagctggtggctgtggtggccgcccgttccaagggttctacacggatcgagctttaatgcatgctcttcacctgcgtacgacgatcttcggattattgtagaggctggcaccctgttccattcatttaatgaattttctctttgttctaaaatgataccaaccctgtcaatcgacgtatccggtcgcagaaatttaaagaatgatataatacaaatgtgtttggttgcctcgctagcttttacagtctagctctacaaattaatgtatagctttcctctagacttggctctcgagttagaaaatggatgtttctttagagcca

SEQ ID NO: 36029 - DNA, 2951 bp, Zea Mays
gctgtgtccaccacataacccgccatttcaccctcctccctcctccctctcctccgattgggcccactaaccagagagtcggtgagagggccccgccaccggcaataacccacccaaccccagtcagactcagagcctgcagcgtgtcggccacaccagccatgacgcgccgcgggacgctcccgctggcgctgctgctgctgctggcggcgacaaccaccgtgtccgggcagggccgacccgtgacggacagcggcgcgcagacgccgcccacgccatccagcttcacgcccaaggacaacttcctgatcgactgcggcgggacggcgcccctcaccgccgacggcaagtcgtacaagactgacgcgcaggccaaccacctgctctccgccaccgacgccatccgcgtggccgccgacgacaaggccgacgtgccctcgccgctgtatgccaccgcgcgggtgttcaaggaggaggccgtctacagctttccgctcaccgtcccaggctggcacttcatccgcctctacttcttcccgctcaagggcggcgacgtggacctcgcgtcggtgaccttcagcgtcgtgaccgacgacaacgtcctgctccacagcttcaccccgggggacaagcccgtcatgaaggagtacctggtgaacgccaccgagaaccacctcgcgctcaagttccagccgctcaagggctccgccgccttcgtgaacgccatcgaggtggtgaacgcccccgacgagctcatcaccgactcggcgctggccgtcgcgcccctgggcgagattaccggcctcgtgcacgacgcgtaccaggtcgtgtaccggatcaacgtcggtgggcccgccatcggccccgccaaggacacgctgggccggcgctgggagagcgacgcggcgtacgtgcagtccaaggaggcggtgaaggacgtgtcggtgcccaccagcaccatcaagttccccgacggcacgtcccggctggtggcgccggcgctggtgtacgccagcgccgcgaagatggcggacgccgacgtggcgagccccaacttcaacctgacgtggaaggtggacgtggacgcgtccttcagctacctggtccgcctcttcttcgccgacatcgtgagcaaggccaccaacgacctctacttcgacgtgtacctcagcgggcgcaaggccgtgtccgggctggacctgtcgacggtggccggcggcgagctggcggcgccctactacaaggacttcgtggtgaactcgtcggcgctggcgggggcggacggcaagctgagcgtccaggtcgggcccatggggcaggacacggggcgggtggacgcgctgctgaacggcgtggaggtgctgaagatgagcaactccgtgggcagcctggacggcgagttcggcgtggacgggcagaaggccgacgacggcagcggcgggcgcaaggcggtggcggccgtcgggttcgccatgatgttcggcgcgttcgcggggctgggcgccatggtggtgaagtggtacaagcggccgcaggactgggagcggcgggagagcttctcgtcgtggctgctgcccatccacacgggccagtccttcacctcgggcagcggcggcggcaagagcggcaacaccttctcgtccaccatgggtctaggccgcttcttctcgttcgcggagatccaggcggccacccagaacttcgacgagaaggcgatcatcggcgtgggcgggttcggcaacgtgtacgtcggggagatcgacgacggcaccaaggtggcggtgaagcgcgggagcgcggagtcggagcagggcatcaacgagttcaacacggagatccagatgctgtcgaagctgcggcaccggcacctggtgtcgctgatcggctactgcgacgagaaccaggagatgatcctggtgtacgagtacatgcacaacggcgtgttccgggaccacatctacggcagcgaggggaaggcgccgctgcccttcgggtacctggacccggagtacttccggtgccagcagctgacggacaagtcggacgtgtactccttcggcgtggtgctgctggaggcgctgtgcgcgcggcccccaatcgacccgcagctgccccgcgagcaggtcagcctggcggagtggggcatgcagtggaagcgcaagggcctcatcgagaagatcatggaccccacgctcgccggcaccgtcaacccggagtcgctcgccaagttcgccgagaccgccgagaagtgcctcgccgagttcggcagtgaccgcatctccatgggcgacgtgctgtggaacctcgagtatgcgctgcagctgcaggacgccaacccgcccgagggcggcgacagcgacggcaacagcgacggtgccacggcggagggcggcgccatcgtccccgctggcggtgccgtgcccgacgcgtccaccgccgccgccggggagctcttccagcagctcgccgacatgaaggggaggtgatcgatcgattgcactgtatgtggcatggcaatctgactggctcaactcaacagtcgtatcgtcgtagtggatcactcgtctcgtgcatgtcgtcacatcgatgcatgtattgcacgttgaaaattcgaattctagaacacaaattgaaaagagtggttggtgatcagtacgtgtataagtatatatatatgtataatgtatgtacgtgtaacaactagcactgatcgatacattctttcttcaacctgctgttctgagagacagacagacgacgtgagcgaggtctgcactattgggagctcatcatttcagaaatttcgaatctaataaatatatatgtggcataatatcagagtcatttgggggatcacttacctgacgaaaaatgagaaggaaaaaaaaagaaggggcagagcactgctcctgccacgtcacactcctgttcatcgtcggcccgtagcgtct

SEQ ID NO: 36030 - DNA, 2336 bp, Zea Mays
aaagtgacgtccatctatatcaaattttagatattgatggtggtcagagttaaaaaacagtttgccttaagacaaaccaagatgaacttgtatttacaatcgaaggaaatattgcacattgcctagacatttaatttattagataaattcttttgttagttgttcaactttgtacgtcttataagtcacaggaacaatgtttatctagaacttcggtctcaaattatacagtagtgttcagccatacctgccatgtcacaagaaagagagataaaaagtatttaatagtagacctaatgatgctcatttgtaattgtagatattcgtatatcctttttctgcaaccttgtgaaacatgtgatggtttgacttggaacaaactttgggtctgatatagtaaaatgcaatgtatgtggagggaagtagtagaacaagacagaacaagtgccaaataaggttatatagtagaatacaatgtgtggagggaaatagtagaacaacacaaaacaagtgccaaataaggttacaaggtttatagtagcgattgcttagctgctacaacgacactcatagattagcctggcatttgcaatgtcgctcttgtatttgccataacctcacttaaggtcacacattgcctctgggaccttgacctccgctactgttgtcgcctggccgcgtcgacttcaccaatgccggggtgtccaacctcatcagcttcaccgtcgtcgactgctcccacacaaccgagctgtcacatatggaaagtgaagaacccaaatgatttcttcacaggaagcttggaccaatcttcaactcatggggcgcttcatcctcggcctcctacgcatgcacttctcctgcttctcctgctggtcatcgcccaagatgttgcatggtgtcagtgtgtcagatgtgccgtaacagatgactccaaaatggattgcatgctcttcaaatagctacagataactatcttcacataaaatggagagtacaatgtttataaaagaaggaatatggataaggatccagattctcctatagcatatgaagaggcaaaggaaatggcaagccaaagctgcacaatttctgatgatcactcgttgttactgttatccattatctcctcagaggcattgcttttaaattcaacagcagacatggcaggtacgtgtccactttcttctcaaggaattgcactagaggttggactttgtgggtcaagagaaatttaatgcctattgttaatacaacctttagctatttttccatgatgatggagttggacaagtaccatattgagtataagtgttagcctattatatctttgtacaaccatggcaaacgaataatttcttataacaccatgaagataatgtttaacgaagtgtgtttgcgtgcgtgtgtaatttcttcttttgttttgctgctaagtttgatagttcaaaacatgattcttgtaaagtttggttttagtctaacaaatacactcaagtcctgacatgtaaactgtaaagttggactgttgcttggtggatctgtattgaactttattttttttaaaatgttttatggcttgtatagtttgtattcacttctcacctaagctacaatttgtttttccagcctttcaagatttggcacattgacataatgacatgggttggtcacggattggatgtcaattttgctccctgtaccttgtagattatcggttatgtcaattttcgaaatttctatcgtgatggataacatttgaataaaacatagttaaataaacatgactactgtttcagtctttcgaaattctgatgctatagtgtcagtatactatgtcattttagggaaaatatatgtcatgtttattttgataaaattatatgatttctcactcaattcttgtcggtggcttcaggatttgttattttgtatatcgatctgtgtcatttgacaaagtactttgacttggtataatatgagtgttacttcgaccaaaagagcttggtaaagtgtgagaaactccgcaaacttcttctgcagacgatgactagcaacagttatgacgagggtcaagatagccgccatacatgatacattgagtacaacatcaagataaacactccctccccacacacaacttttgccttccgttcactctgtatgttgtgtttattacggttgcatatgttgtgtttattatggcatcaacacgttccattagaaaatataactattgtttgtcaagtacaaaatcataatcacatcagcttgtaataatattgcatcactgttttgtaccaaattgtaagttgttgtagcaacgcacgggcacc

SEQ ID NO: 36031 - DNA, 2391 bp, Zea Mays
gtctgctccagcctccaggcattcggttccggctcctgcttccctctcccttctccggttctccccctccgccgcggagatggaggccaccgcgctcgcgtcccactcgtccccgttcgccgtccaccgctcgacagggaagccagccttcgcctacccccaccgtggagggccctcgatggtctcctctgtccacctccgcacgtcccggacccccgcccgctctgcggttggcatggagaaggcggaggagggggaccgggctggttgtgcgcgcggagatgttcggccagctcaccaccggcctcgagtccgcctggaacaagctgcgcggcgttggcgtgctaacaaaggaaaatattgccgaaccaatgcgggacattagacgagcacttctggaagcagatattgtgcatgacgaactggtacaactgatgggtggagaggtatcggatattgtatttgcaaaaagtggcccgacagttatcttgcttgcaggtctacagggtgttgggaagactactgtctgtgcaaagcttgcgttctatttgaagaaactggggaagagttgtatgctggttgctgcagacatttacaggcctgcagccattgatcaactcactatactgggtaaacaggtgggtgtaccagtttactcagaaggaacagaagccaaacctacacaaataactaagaatgctatggaagaggcaaaaagcaagaatattgatgctattgtggtggatactgctggaaggctgcagattgatagatcaatgatggatgaattgaaagaagtgaagaaggctgttaatcctacagaagttctgcttgtcgttgatgccatgactggccaagaagcagcagcactagtcaccaccttcaatattgagattggtataactggtgcaatactgactaaattggatggtgactccaggggcggagccgcactaagcgttaaagaggtctctgggaggcccataaaatttgttgggcgtggggagcgattagaggaccttgagcttttctaccctgatcgcatggcacagcgagttctgggaatgggagacgtgctttcatttgtcgaaaagacacaagaagtgatgaggcaagaagaagctatagaattacagaagaagatcatgagtgcaaaattcgacttcaacgatttcttaaaacaatctcaaaacgttgcgaaaatgggttccatgagccgcattattggaatgatgccaggcatgaacaagataactcccgcacaaatccgagaagctgagaaaagacttgcattcgtggagtcaatgatcaatgccatgactgctgaggaaagggagaagccagagttactggctgaatcacgtgagaggaggataagagtggctgaggagtctggaaagactgaacaagaggtgagtcaattggttgcccagcttttccaaatgcgtgctcagatgcagaagttgatgggtatggtgcaaggacaagaagcaatagctggcatgggagatctcatggactcgcttaaatctgaagagaaggcacctcctggcaccgcgcggcggaagagaaggaataacacgtctaagcagagggacctggacgcagtgctgagctagtgagtagtggcctagtgtgctgtattatgaaaatgcataggtgggcactgaacctgtgtaattgcggttaattcggcacacattttttttgtacataacgtttagtcccatgagggaagatatgttggtcgctcttgaaattggagtaggttgtcatgaggacatatctagtgcacatagaagattggtgtacatgatgtacatattaaattaccaccactcattttagatttaacgtctctagttgatcattcaatttacaaataacacatttcactactacacaccaccacgttggatgatgtttttagcaaaatataccaaacaactagagacgttaaatctaaaataagtggtgatgatttaatatgtgcatcatgtgcatcaatctttcatgtgcattagatatgttctctgttgtcatacagggcccagaagaactcaggtcttgtaccggaggcctggagcccagtatctttcagttgcaacacttgatgtaaaaaaataagaaaaaacattttacctttcttagtttaagtttactcctcaagcaccaaaaccaaacatcttgctccttgaactctcaaaaacactcaaattatctccttgacctgaattcaagtggttataaaggtggttttgtcttttgtttagttaaaaaattcataagtacttgatagggttttagccatagaatatgtttctaaccttttaaaaattccaaaaaaaaatcatagagatacattcggacaacaacaatcaaagtaaaata

SEQ ID NO: 36032 - DNA, 2164 bp, Zea Mays
aacacacgtggattgcggtgaatactagagtatccaaataaggcctaaggggtattaaccccctcccccccaaaaaaaagtcctgggaatctatttactgatttcacttatataggtgtagtgttaggaaacattttagcgtcggaaaacaagattttgaagcaattaagtgattttgtattttgtgctctttgaggttgtggaaaacaagactcgaagtggttgaagtgattctgaccagacctactgcattatgttttgagcatatctggtcgtgtagtgggtttatggcagtagggattcagtgctatcgttttcactcattagcgcatttgattgtaaacaaatacatccttgaaagtgtttatgatacattctccggtgaacctcatcttcaggtgaggcaaagagaggggagattaactctcccagcaaatttataatcctgacatggtttcttgaacttttttattgtagctagatggaacaagatactggatgaagtaccaagaatcagattgttttgttctagaagactctactgaccaccttcacatgctatagtatattgctggcctatcattatccctgttattgcagatataaatatacaaaagctgaaatttacagagaacctcatccaagcgaacataatgccttatgactgacctgctgatgaccatttctggtctattgcaacctgcagggcttcagaaaggttgatcctgacaggtgggagtttgcaaatgaaggtttcctcagaggtcaaaggcacctgctgaagatgataaagagaaggaagccaccatcagctgtggcaccattgcgacagcaacgtgcccctgcttcttgcctggaggttggtgagtttggatttgaggaggagattgataggctgaagcgtgacaagaacattttaatcacagaagtagtaaaactaaggcaggagcagcaaagtactaaagatcatgtgagagccatggaggaaaggctacgagtggctgaacagaagcaggtacagatgatggggttcttggcaagagcaatgcggaacccagagttcttccagcagttggcccagcagcaagacaagaggaaggagctcgaggataccatctcaaagaaaagaaggcggcccattgacaacacaccattctacagtgatggggaaagcgaacagcttgattcacagttgaaaatgttcgagtcaggtgttctcaatgggctcaatgaacctgagctggagaatttagcagtgaacattcaggagcttgggaagggaagcatagatgatgggaacttgactcaagttagtgaccagtcagagctgaacgacgacttctgggcagagcttttggtcgaagattttggagacaaggcaggacagccagagttggagggaagaactgaagacgtgaatgaccttgctcaacaactggggtatctgagttcttctagcccaaaatagagccagttcctaatggttgcccccacaatcactggtgctttccctaccctactgttgcagaccatcctgatcaaaccgccaggaatgatgatggatctggcagacaagttgactggtggtggagaggtgttcatactgaaggcgtgctgtggagaggtcactgccttgacgttgaaggcttagcgctgtactctgctgtgggagttacgtgtggggtgttggctaaatgtctcttccggcgtcttctggcaaaatgatctcgtggacggtgactggcaaagatgcctaggggccaacgtatacgtacacagctgttatcagatcttgttcaaagtcattgcgcggttttgacggtgctatgtatcgatcagggttctggccttctggggttgggttgtagaattgactggctgatctagtgttctccatgtatgactggtgtaaccttaaaacaccctcagcttgttgttgaactgtgacaagcatctcgtttttttgttgtactccattttcatcatcattgtacatcaaattgctgaattatgaacagatccctaataatttggtggactgcgtcttggcatttggctacggcccagcttgcagtgtagttgatacatgcttttgttgaagctcttgccataggttgggcgcccacagtacgccttctgcatgtgcactgtcacagttggctag

SEQ ID NO: 36033 - DNA, 1309 bp, Zea Mays
gtgtaaccacctccagcctaaacacagtcaccaccacctacacccccgttgtctcctctccttccattgccacagtcggccttctccgtggaagccggcgggccgccgcctcctttgtccctgtcgtcgtgctcttccgtaccgccattccctagcactgtccacgggcgagaaagctggcaagaatgagtctcactcatccccaattgatgcagcattgcccgatgagtccaaggagaaaaggaaaactcaaaagccaccagcacagctctcttccatcaaaagagatgaagaacagtcaaatggtgagagtgcaaagcctcgaaaagttggaagcacgccatcatatggtttcaccttcaagtgtgatgagagatctgaaaaaagacgagagttctattcgaagcttgaggagaagattcatgcaagagagttagaaataagcaatttgcaagccaagtcaaaggaaactgaagaagcagaactcaaaatgctgagaaagagtttgaatttcaaggcaacaccaatgccaagcttttataaggaaccaacccctgccaaggttgaattgaaaaagatccccccaaccagagctaaatcaccaaagcttggtcggtctaaaaacaagtccatatcagagactgaagaaaatactactacggaccaacctgcccgtctgagccttgacgaaaaggtttctcaaaacggtgtgaaaaaaccaaccccgtcgagttcagcaaagaagccccagagaaagtcactccccaggctgccatctgaagaaacttgtccgcttgatgccacctcaaggcagctgaagaacaacaaactggatgaagttaatgctcaggagacaggatcagctacagggcaggtacaaggaagtgagacggaaacagattctgttcagagcgcaactcaagctggagctaaccctgatgaacagagtgtcgctcagtgaacagagtgtcgctcagtgaagatctcggtggccaagccaagtgatttgtgatggatggtgtgccttatctttgtgtgatgttgtgcttgtctactagagtgacttgtggcctgtatcatgctgtgttatactcctgtttttgttttcctgcgattgagcctgtatgttgcttatcaatctagatagcttttgttcataatctacagatatatccaaattgtcctaagtcatttgcagctggtcgcaagtgcagtcaccgtaaaatcccttaacgcctgtatggttgggttttgaggttgcttttgcttcccaaaagcctaaccaaaacggctgtttttttttaaaaaa

SEQ ID NO: 36034 - DNA, 1225 bp, Zea Mays
tttggattggtgctgcaatttattccatatgcttgtcgacattgtgtaatcatgctttggtatgcagcttcggcaattatgcaagatatcgggggtaaaggtctgctttgatactgaaaatgctcgtgattctttctacagagcagcagtgaactttgttttagatgattgcagcagcaaaagacatcggtgcagcaaaacttaatggtgaggatccaagggattttctcgccggccttgctagcaatattggattagacaagtttcgtgctgccactcttgtatgtgcatcagttgctactcgtacacggacatgcttcttgcaatgctgggctctagagattcaaggaaaacggccagaagcactggatgaactcgtgaagatttgtagaattcattacatatttcctccagaggacaattctgcagagatggaaatggtggctgctggactagaaaagaatttgcatgttgccgagagggttcaccttctatatctatacaggagcgtttgtactgctggtaacttaaaaacagctgcacaggctcttggtctgagtttgccaaatgagaatacagaaggatttgcaatgcccattcgtcaaccatagatgaaggctttgaagcccctgacgcagttttggtattcctactttcttaacatgcattatgcagtatgctaccaagacaagaatcaagcatactgcagattcccttctcaacagaatcttagggacagatctgcacgggccccccagacaaatgctgaatcaattgttccgttcatgtgcatttgatagaggggtgctctttaatatgtgcaatgtcatcaaaacctcgtatattcagatgatcgattctgctcaccaaacgcgcccaccgccatgcctaatatcgtggccgtattgggagtatcatggccgtattgggagttctcttctgcagctgtagttggttaggacatctacaacctgagtctttgaattgttattttaagagctacaaaaactgtgcgatgagaattggttttttaagagctaaaaaactgtatgatataatgagatgtcttcaatattaatcacataataaatatagttaatagacaatgtgtagtgtagagagactctttgcaaagagatctctcttatattttttatttaacccttatttctgaaaaggctgtattaaatgatattgtatatgtcattatttcgtggtcgtattg

SEQ ID NO: 36035 - DNA, 2016 bp, Zea Mays
tccctcccccatgcctcaacaagcgtgatagttgtcgcactccacagctgctggttcacgagagagagagagagagtcctgtgatggatcttcttctcactataaatagggcaaggcacttgaggccattccagcagtagctagctcactccatcgtctggccaaccttctggccatgacatacacgcatggttaattagatctcgaacccttgtattcattcccatccgttcctgcttttggtcttgttcatccacagaccacagagagcccagccactacgtagatagatagatagatacatacatactcaacgaactggcggcgaggatctgaggagaattaggaaaaaagaagggtatggaacaacccttgaagctcaggagggatagcgcctaggaaaacacatagatcggagccggccgcgaggagaaagaaagagccaagagatatgtgtgatgaataatctacatggatcttggctagcttttgtgttctcctctggaggcgtggttctgtctatcaatctgaagcgctatctatcctgagctccacggcttgttcttaccacacgccggcggctggccggccggccggccgatcgatcgatcgatggagctccatcctcgctcccatatatgaataatgacctcttgccgtcgtctgcctcctgttcctgtacttgttgttcttgtgatatatgcagcatgcaggtgagcgtgcgtgagaggtcgtacgtagtctctcgtcaggtacacgcgcggacatgtcctcctagctagctttgcttgaggaagtacatacatgaacatccccagcactccagcagtacgtgggcattgctgcagtgtcctgctcctgcggccgaggtatctatctatctatctcctcctccgtccgatccctgctgctggtgctggctccgtccatgacttgtttactgtactctatgcccgtgcaagcgatgaggtgaggtctgcccgcgctcattcatgaatgcatgcatgcagagccgagcctctgccaaacaagcagtcatgggcacgccccgggtttcacttgctactgtagtacagagcttgcatgagtaaatgctgtgacccgtaaccgattctttcaagagcatgcgtggtacggtgcccatcgtcatctctactcatctgggagtatagtaaattaattcattcgttcatgaatgtaactgactgactaaaccacctactttagctgctcttgttgtgtgagaaaaatcgaaatggtctatctctgttgttgaaactactgccatatatatagattcattcattcaagctcgagtgcccattattccaaaactacaacaacaaagtaaccgactaaaactttttttttcttttctgttcttttgagcgcgcaggcaggcgagcggcgcgcgggtttccagaggcaatgcaatgcaagagccctcgcgcgcccaccaccaccagctttccagtccggttgacgtgccttgatgactgccatttcaggacatgtaggtaggtaggtaggtaggtagggccccagagccgagccggatcttctacgccgccggacagccatacacccccgcgctgcccaagtgcccatgccgcccagttgctcacaatcgcaagctctcattgatggtggccagaaacaatacactgatctcgttcttctcgtgagagttttcaatgtctttctactagtactctaccacgtactgctgctagagcacaagtactgccgggtgatattaataagaatattactaatattaattgaaatccaatgtaccctgcccccaaaatcttcaatgttctgtagtactcggctggcagaggagcatttgctcccccaaccccaccccaccccacacccaacccctgcccgttttttttttatatattttcattttctcgtacatatctgaatcgacgcgaatttatcatcgtatcctgcgtgcgtgctgcacaaaccggggacagcgccagcaagggcatttcctacgagcgg

SEQ ID NO: 36036 - DNA, 1353 bp, Zea Mays
gaggaatatgcacaattatattaggtcgaagaagccgccactgccggatctggcgcagcgctagggcacaacgtgcgttggcgaggcaggcgagcgtgccgtgggtctgcgtgcccttggagctcctccaggtgacgtagggccatcacgccaattcacagttcgagatccgacgctggagccgccgctccaccagctcatcggcggtagctccgtgcggacagcgacgtcgacgcgtcgtcatctggtggcatggcagcggtggtcctcaccgatggctcagccatccgcaagagcgcaagcatggggacctctccctcgtcttcgcggggtccaccagcgacagcgcgtccccaactgttgggcccgacctcgccgacagcggtgtggggccatgacttcgaacgacatcgtcctccgcgagccatgagcgtaaaaaggttaggatgaaggatgagaggaataggctgaggatgatcatggcacagtacttggtgtggcttcattcttcatgcaagatctgagcaaccttgagtagcaaatcgaggggaagggtacgagcagcttcggcaagcgccggaacaagacgcacacgctctgcatccgctgcagcagccgtagcttccacctccagaagagcacctgctcctcctgcgattacactgccgcccgcatccgcaagtaaggacaagcctccacgtcgatagaagcaaatcaatccatttcgtttgacaagtagaagattatctgtgttcaaccaaatggacataattagtgctgttttgcaaaagcattttggattttccagtctcaaagcattccaaaaggaagtcttggatgcttggtttgctcatgaggattgtgttctcctaacagccataggatcaggaggtaccaaaggaaatgagcaaaacatagcatacagtctcagatgctgcaggatcacatgaaaattattgaagacgacggtccagggacctctcaagcaacaacctcaatggataaggcatattaaatacattacttcttcagcatcatgggagaaaatcttactgtcagggttcagaggatgttgtacggaatgaagttggttgatttgacgaagaagaaaacatttttagtcttgtggctgtgcgtctagctgttgatgcagctgatgagaagtcggctatagccgagagaatttcagtcatcctgcagaaatatgtcttcccatatgacttctttcgttgttggatttatcatcgagtggagagtggcaatacttagtctggccactacttgtgcttgccaactttgcttaggtaatttcttggcctacttttaagcggtgtcatctgtagacaaaatgag

SEQ ID NO: 36037 - DNA, 261 bp, Zea Mays
cttaccagagatcaggatggcgccaggaagagcgtcctcgctccaccgcggcacggcgtcgaagccccactccggtgaaggattctcgttccccccggggcctacttccagttcgggcgaaccacgcacgggcccgaatgactacactgtcacgaccggatcgcgtggtgaggctcgagcgacggcggcgatatctggggtcttgcggcggcgattccttctccctcactccccacggctgcggcagaggttagatttcta

SEQ ID NO: 36038 - DNA, 1352 bp, Zea Mays
gcgcgtggtggccctgggcgcctgctgcggtaggaccaccgctcgcgccgtgccgccgtgtcgccgtgctcctcttactccaggcgaggctctcgttcccgaacggcgggcgtggtggtgcgccccgacactctccctctcctcctcctcgtctctgggtcttcttctgctgctgctgctgcttgtgcagttgccgtccatggccagctgccacgaggagatgaagtccatctacgtgggccagagggttctccccgtgcgcctcggccggccggcgttcgggcccgagagcctcgccttcgaccaccgcggcgacgggcccttcaccggcgtctccaacggccgcatcctccggtggcgcggcgcccagcgcgggtggaccgagttcgcccacaaccacaagcacgagacggtggccatgtgcgcggcgaagaagaggctggtggtgccggagagcgcgtgcgggcggccgctgggcctgcagttccaccgcgcgtccggcgacctctactacggcgacgcgtacctggggctgatgcgcgtggggcgccgcggcggcctggcggaggcggtggccacggaggccggcggcgcgccgctcaacttcgtcaacgccgtcgaggtcgaccaggagaccggcctcgtctacttcaccgacagcagcgccacgtaccagcggagcgactacatcatgatcatcctgaccggggaagcgacgggtcggctactgcggtacgacccggccacgggcagcgccgccgtgctggcgtccggcctgtccttccccaacggcgtggcgctgagcgcggacgggacgcacgtcgtggtggccgagaccacgcggtgccgcctgctgcgccactggctgcgcggccccgccgccggcaccaccgagcccttcgccgacctgccggggtacccggacaacgtgcgccgcgccggcgacggtgggtactactgggtggcgctcaaccgggacaagtcgtggctggagcagggggaccactcccccggtccgtggctgccgtcagggtccacgctgagacgggcgtcgtcgtcgagggcgttgcgcgggctcggcaacgccacggtcagcgaggtcctggagcgccccggcggcgcgctctggctcggttctgtcgacacgccttacgtcggtctgttcaagatcggcctctagctagcagcgtacgtgtgtagccgtgtatgtctgtcgtttgtcctaaattaagagtagtcgatcttctatctgtcgcacacgtacgtgtgacagcaatgtaatatatgtgcactagtaatgtcggacgcctatctataatatattgtcatcgtagaaatgcactttgttcgcg

SEQ ID NO: 36039 - DNA, 1415 bp, Zea Mays
cagaccagaaactcccaccactgcggcgaacgtgcgtagcctgcgcattggtctggtcgtcggcgtcggtcgaatcgcggggtgcggggtcctgcgagatcgaatcggggagcttccgtatcgaagtcggaggccgcggggcacaatgccgggatggcggaggcggcgccatggcgaggggcatagcgcgggcgtcgtcgttcgggggccgcgccaccaccccgtggtgctcctgcaggcacgtcaccgtggatgtctgcctcggcaaactcgtcgccgctctgctcgtgctccgctccctcaccgcccccgccccccgcttccttcgcgcccacctttcccaaccattagttcctagctagtccactgaaataattcaaaggtaaaagaagctgcggaagaaattcgcacggcagaagcgacgggaggaactgcggttggtgccgcagcagaaggtttcttatgatattgtacggaagttgctggacttgggagataacagcagcctcgcgtagcagagaggaccgcaggagtggtggaactatggcgtgttgagaagttaaaaggcatcaaagttgcatctacttggaatcaatcaaatttggacctatctagtgaggaaatcagaattttcaaacgagccaaggcatatgcttctggaggccattggcctttggataccaggggaagtcacacgtactgtactgtctgtacatgatgataaacgtgaaaatgaaccagaagaagaagagatagtagcaggtccacccttgtcccgacaatgtaatgctgagctccatacagattatgatggtgccgctgttagatgggattaacgcaccacaaagaatatgttgctgattgttgtcaagcttgtcttgatcaagctacgaacgccaagccaggggaattgaagtgcaatatatgggtttattgcccatcggaatttggatgcttctgacaagacaaatatgagcataaacatcaggagtgctggttgaaacaggctgaccaccccaaactgaacttcaaagacaagttaagtattcagagccttacaagatgctcgtcccaatgcacctgttgtcgtgccgtggatgtctggtgtcacctgtgcttgcactacctcttaccaaacgaacagcatcgagactcaggaattaattagactagtgctgtgctgatccaaccagttccaccgtacatattttttcttttcattttgggaatatactcttttctttttcttcgtttggccccggtatatacgatgtaaaagtaaaacttagcttagtcaacctggcaattggatttggtgggtggtggttgattgaatccagtgattcacctattggcgaccttaattttcctctgattaatactgattgttatcagttcacggatatgctcatttg

SEQ ID NO: 36040 - DNA, 3409 bp, Zea Mays
cccttcagaaaacagagcgagtccaattcgagacggctctccccacatcaccacagcgcagccgcaaccatggcttccgccgaaaccctagcccgctccccctcacgcgagccctcttccgacctgacccgcgccgactcttccgagccccaccacaacatcgatggctccggcgcgggcgccggagactcatcccgccgccgccgccgctcccgctgggagcagtctaacgacgactccgccgccaacaactccggcggcgagggcgggaccgggggccggaagcgcaagacgcggtgggccgaggaggagccgcgcccggcgatcgcgctcccggacttcatgaaggacttcgccgccgagatggaccccgaggtgcacgccctaaacgcgcgcctcctcgagatctcgcgtctgctgcaatcgggcctcccgctcgacgatcgccccgagggggcgcgctcgccctcccctgagcctgtctacgacaacctcggcatccgcatcaacacccgcgaataccgcgctagggagcgcctcaaccgcgagaggcaggagatcatctcgcagcttatccgccgcaaccccgccttcaagcccccctccgactaccgcccacccaagctccagaagaagctctacatccccatgaaggagtacccaggctacaactttatcggcctcatcattggccctcgtggcaacacgcagaagcgcatggagaaggagactggtgccaagattgtcatcagggggaagggtagtgtcaaggaagggaagctgctccagaagagggacctcaagccagatcccagcgagaacgaagacctccacgtgcttgttgaggcagatacacaggaggcactggatgcagctgctggtatggtggagaagctgctcaccccggtggatgaggtgctcaatgagcacaagcggcagcagctccgggagcttgccgcgcttaatggaacaattagggacgatgaattttgtaggacatgtggtgaggctggtcacaggcagtatgcttgccccaacaagatgaacacatttaagagtgatgttcagtgcaagatctgcggggacggtgggcacccaactattgattgtccggtcaagggcacttctgggaagaagatggatgatgaataccagaacttcctggctgagcttggtggtgggagtgcacctgagtccatgaacaaatctggtggtccgatgttggctcttacaggaagtggtggtagcggtggtgcttctactggaactgggagtaacccgccttggtcggccggtggtggtgccgcttccactgggctcaatggtatcaagaaagattatgacgagacaaatctttatattggatacctgccacctacaatggacgatgcaggtttagtcagtctgttttcgcagtttggggagattgtcatggctaaggtgatcaaggatcgaaacactggacagagcaaaggatatggatttgtcaagtattcagatgtgtcacaggccaatgcagcgattgctgcaatgaatggtcaccatcttgaagggcgagttattgcggttagagttgcaggaaagccgccacagacagcaccagcagtgtcagcacccccatcatatcctcctccggatcctacttcaggtggctattcctcccagtcctacatgggggcaccaccacctcctcctccagggagttatgctccagttccttgggggcagccgccaccatatgcttcatatcctccgccaccaccaggctctggtgtctacagtcctgcaccccctgcaccaggtcaagctgccccacctccgtatgggatgcaatatccaccaccaccaccacccccagcagctccaatccctccaccaggcactgctccatcaagtgatggagctcagaactatccacctggtgtaacaccaccaagttctggctcatccactcaccctgttgcaacatcagtatatgcatcatctggtgcaccaaatgcaccatcgatataccctccaccaccttatagttattcctcatactaccctccaccatttcagccaccacctccaccaccaccaccaccggctagtgttgatccctctcagagtattgcaactgcaccttggctaacccacagtgtggtggtgccaccaccacccacgagtgttgatccttctcagagtatttcaactgcaccttggttaacccacagcgcagtgccgccaccaccaccacctttgtcctccacaaccgaccagtctactgcttcctatggtgccgatgcagagtatgacaagtttatgtcagagatgaagtgatacgagcgaagctggatgattcttccaatgaagggcaaaaggcttgatctttcttggagcttataccaacctgatttatttcttgttggaagtttcggactcacatcttaaccttgctgtgtgctgttgtgaccgttgcagaggttgcatgcttaagaaggcatcaagtattactggctcagctggcatcagaatatttgctcatcttcttggaactattttaaggaatcttttactaatgcttttgttgtgatgtctattcttgttattatttgagattactctgtgttttcactttaatgctctgttctttgtgacatgtgttaatctcactttattattcatatatattattcttcatcttgatttggtagtgctagcactcctctccatctggagcagaaaagcctgctgctccgtgctggttggtataacttcaaaaatttaaatgcttgtttggtatcttctgataatctgtcatgcatttctttcttacgtcttcacctaagttgtttggcagttgtcgtgacagcttggcacaggcagccagagtttttagcacgtgatgaatgaatatcaggtataatggaggtgctgtgaattgttctgtgaacccaatgttttcatttggtttctgcacaattttctactgacaaacagtaacgagtttcccatttggtagttgatgtgtgtgcattagggtaaccaagcatgcacgcatgctggaaaaaaatctttgatgaagagcttacatatatattttgcattgctaatgctcttttaacatcattggaatttttgtttgcggttcaagtaggacatgctggcgtgcagatctagtctggagtcctatgctcaaggtgcatactgtcacaatgatatttgtgagatgaactgaaggtttggaggggtgtattgagaaagaagaaattggaatctgctgatgtttaggaggaagtggatgtctgaaatttgtgacctaaacaagcacaaagaagttacaaaatgagacatgaattttgtaccattgtcactgtgaattgctttgaagtcatcctttggaatcttattttacaaccaaaaaaaa

SEQ ID NO: 36041 - DNA, 349 bp, Zea Mays
gccacaacaaccatccttccacctcgccgtggtcagagcatctcgagaagtttgttacccagaacggagttgcgccaccgcagaccggagccgtgaacagcctttgtgttgaccgaacaactcacgctttctccggtcgattccttgtgagcaccaaagtttaggcatatggaatgcagactgttcagtcgactgtcattatggttcagtgagtttttaaccacctttggagctctgtggtgattactccaagtagaattgggttagggattccacggcaagatgggagaccatatcatgcacaacaaatttgatgcaaatagttggcttgctactgtagagaatttag

SEQ ID NO: 36042 - DNA, 1195 bp, Zea Mays
ggagagcaactatatttatatacatcttccctgatctgtccctgtccggcaacaagaacaccaccaataaggatctcatcactacgagtcaccggcggcgtcgaggatcagggccaagatcctgtacgcgacatcgaagcaaggcctgcggcggctgctggacggggtccactacgaggtgcaggccaccgacccctccgagatgggcttcgacgtcatcagaggccgcgcgcaatgaggcccccgctgcgctctgctcctatttacgtacttacctgtgcgtgggcgtgttctcctactactcactgctcagtagtcagtagtcatctgcgttcgtgtgtgtgtgtgtgtgatcggccggatgctaattggcgttggtgtgctcccgtagcgatcgatgctgccaatctgacgaggcttcgcgtgtgtttgctttgctattttcggttctcgggagagatggtgcaggcgtggtgtgttgatgttgatgggtggagtagaagctcaggggagtggcagcggactaatgaaacgtccacctctgcgacgtagaattccactgaaaaaaaaatgctccagtgtaccataagctgcttcagatttgatcgtgttttctctcccatggtggcgtttctacctacatttttcttagaaaacacatttctagttactcgttcagttctgaattataaaatgttttgatttttctagatgtattgcttttgctacgtttagatatacacaatgtctagatagatagttaaagcaataaatctaagaaaaatcttataatttagaacgagacaatatgattcagagcaaagttgggttacgagagcaacatagaagaaaaaaaagtacaaagtggggaatagccatggcaattaaaatgaagttgtgtttaaaaattgcttgctccagttctcaggatctgcctagttttccggtccgttttttagaatcgttttgatgaaaatcgtccgaaatcgacataaacatgccgagtcgtagtgatagtagtaatccgtcacttttaaaacctaaaccatataaactcgtttatctttctttgcacgtaattcttacgatactcatattaataaaagtttgttagaaaaaagctaaaacaaatagtcccatattaggtactctcacactttccagtctagaccttgtactatatagttgggccaac

SEQ ID NO: 36043 - DNA, 1805 bp, Zea Mays
acaggtcccatcactacctattttggagatctgaaagcactccaatacctggacttgtcacacaataacttgtctggctccattccagattgtcttggacagcttccattcctagtgttcctggatctctccagcaatgacctccgtggaccagttccttacactcttcttcaaaaatcccacaatgggactctatcgctaaggcttagtaacaacccaaatttgtctgggaacggatcgggtccaaagaagttgaatggggccgcacttctctccgcgataatcatcccaacagttgccgccactgccttgtctgttaccttcattgctctgctgctccgagcactcaaggaacaagctagaagacgggctgttgatccaactccgagagatgagacggcgttgcttgagaaccgagaattctcttacagagaactgaagcacatcacgaagaactttagcctggagattggcagaggtgggtttggagctgtcttccttgggtacctggggaacggaaacccggtagctgtgaaaatccggtcggagtcgtcttcgcaagggggtaaagagtttctggctgaggctcaacatctgacgagggtacaccacaagaacctggtatccttgattggctactgtaaggacaaagaccatttcgcccttgtctacgagtacatgcctgaagggaacctgcaggatcatctgagactgagaggttgtctcatcctggcccactcgaatataaaaccaactggctgtgttctggatcaaatactgactgtgtttcttttctttttcttttattttcgcttgggtgtccaatttcttctgatgtgcctagacacttgcactcacagaccactcacttggcagcaacgccttcagatcgcccttgatgccgctcaaggtctggagtacctgcatgtggcatgcaaaccagcgctgatccacagagacgtgaagagcaggaacatcctcctgaccacgggccttggggctaagatcgccgactttggtctgaccaaggctttcagcgactcggagacacacatcaccactgaaccagctggaacaatgggctacttggatccagagtacgtctcaggccagtccccggtcgtcccggtggacgacagcgtgagcgtccacgtcggcgagtgggtgcagcagagcctcgaccggggcggcggcgtcgagagcgtcgtggatccgagcatgggacggtgcgagcgcggcgactacgacgtcaactccgtctggaaagtcgccgacctcgcgctgcgctgccggcgggaggcctccagggagcggcctacgatgacggacgtggtcgcgcagatcagggagagcgtggagctcgaggcggcccgccggagctcggcgtcgggtgctgctgctgctggtggtggtgggggtctgaggagttgtgccggcgagagggacgcgtttgaggtggtggaaggaagcgttggggagacggcgggggccgcgcctggtccggcgatgatctgagctgaagactctgaactaattaaggtacgagggtggtggtggacatgtgtttcaccgtgagaaacctgctcagcaagggaagatcggaacagtgggccttctttttcttctttttttactggtaatgcattattgttggagacatcgtcgacaggattttgctgatgaagcaaccaggcagctatcttgtctgccggtcacatatataatgtgaggaggttagctagtagtggtaggggaacaattcccttggccagggcgattgaataatacaagtctgaatatgaaat

SEQ ID NO: 36044 - DNA, 2460 bp, Zea Mays
gttctgtcctccagcgtaatagctgcggctaaatccacgacagagttccaaggtgaatacttggagaaaaaggtcccccacaccccccacgcaggtgaatactacaagtagcagtacaaggaagagagccaatctgcccgtgactgccagtgagttgctcgggtgtggtggttagttgaggtcacgatgatgggaggcgggctgatgatggatcagagcgtggtgttccctggcgtccacaacttcgtggatctcctgcagcagaacggcgacaagaacctgggcttcgcctcactcatgccgcagacgtcctccggcgaccagtgcgtgatgggggagggtgatctcgtggacccaccgccagacagcttcccggacgccgtggaggacgacagcgatgacgacgttgaggacatcgaggagctggagcgccgcatgtggcgcgaccgcatgaagctgaagcggctcagggagctgcagcagagccgcggcaaggatcccatggctagcggtgggggcctggccgacggctcatccaagccaaggcagtcgcaggagcaggcccggcgcaagaagatgtcgcgcgcgcaggacggcatcctcaagtacatgctcaagatgatggaggtgtgccgcgcgcaggggtttgtgtacgggatcattccggagaagggcaagccggtgagcggcgcctccgacaacctccgtgcctggtggaaggagaaggtccgcttcgaccgcaacggcccggccgccatcgccaagtatcaggccgacaacgccgtcccgggcgccgagaatgagctcgcctcgggcgctgccagccctcattccttgcaggagctgcaggacaccacactcggctcgctgctctcagcactcatgcagcactgcgaccccccacagcggcgctacccgctggagaagggcgttcctccaccgtggtggcctaccggcgacgaggagtggtggccggagcttggcattcccaaggaccagggcccacctccctacaagaagccccatgaccttaagaaggcctggaagtccaagtgcctccaggacaagatgactgccaaggagatctcgacctggctggcggtcgtcaagcaggaagaggagctgtacctgaagatgcaccctggcgcacgcccgccggcatccactggtggcatcgccagtgccatatctttcaacaccacctcaagcgagtacgacgtggacatcgttgatgagtgcaagggggatgaggctggcaaccagaagacagcagtcactgacccaacctccttcaaccttggtgcggctatcctaagtgacaagttcctcatgccgacgccgatgaaggaggagaccgctgacgtcgagttcatccagaagaggaacgcccccgctcctgctgagccagagctaatgctaaacaaccgggtgtacacctgcaacaacgtccagtgcccgcacagtgactacagctatggattccttgaccggaatgcccgcaacagccaccagtacacctgtaagtacaacgatccgatcactcagagcgccgagaacaagcctctgccagcaccgccgcaaccacaagccttccagccggccttcagccaagccaatcaggcagcgaacaatctggacttcagcctgcctatggacgggcagaggtccatcgccgagctgatgaacatgtacgacaccaacttcatgacgagcaagaccatgagcagtagtgacagcgtcaccatcatggagaggccgaacgcgatgccccagaggatccagatggacgagggcttcttcggacagggcaacggagtcttcgacgacgtcaatagcatgatgcagcaacaacagcagcaggcaccacccgtggtgcagcagcagcagcagcagcagttcttcatccgcgacgacacgccattcatgagccagatgggcgacatcaccagcacggcggagttcaggttcggctctggtttcaacatgtctagcaccgccgccgccgctgattacccaggcgcggcgcagaagaacgacgggaccaattggttctactgaagaataaaacttgtagggctcctcgttataagcttcggattcctccatggatctcccaagttgtcaagtcttataggtcttcgttatataggttttgcagtagctgcaagacggctggaacctggaactggtttatacttgtatgtccggccagccataaacctctcttatttgcaaacttaatgttattcctagctttaagttgttagtctcagtctgctgtccatgtatatggctgttaaaatgcttgtgcttgtttctgtactacctgctgtttggtgtctgaatgaagtgttttcttcagtggttctgctcgacgtgtctgctcactgttgatgaggcacatcatcgctgctgctcttcacacaaacaacatgactgacatattcaaatattttgagc

SEQ ID NO: 36045 - DNA, 1480 bp, Zea Mays
aatagaaaggctaaagatatggtggaatttctcgtattggtaaaccaaataatctgcaaatttaaatcgtcagctagcgccatattggaggaaatatttcctactattgcaagtcgtttgtctgcgatattatcacaagatgcattttcagctggtcctgcaagcaatactgaggaaatgcgagaactgcaagagctgcagaggacattatacacattcttgcatgctatggcaacacatgatctttctgcagttctccttactcctagctctagggagtatctggagaccataatgcagttgcttttatttacctcatacaaacatagagatatactactgcgcaaggcatgtgtacaaatttttgtgaatcttgtaaaagactggtgctctaactctgaagataaggttccaggcttccgagtatttatgattgagaagtttgctactaattgctgtttatacagcgtccttgataaatcatttgatttacgcgatgcaaactcgcttgtcctttttggtgaaattgtgctggcccagaagattatgtatgaaagatttgggggggatttcattgtgaactttatagcaaaaggtctttctggagttcactgcccaccggacctagctgaacagtactaccagaagttaaagggaaatgatatcaaggcattcaggctagttgtgccgtcaatgtacatagagctaccatttctgcgatcggaagacgtattactgcggcattatctttaccaagtctggcaaccatggttgtgcccttattcattgtattctatctgaggtgcaggggaattcatcctgcaatagtttgtactaggaaggaatcacagggttccattttcttattttgcctatatccccaaatcataggctgttctgctgtctgggcctgaaattttgcaagagcatgccatgtcatgctggtgcctgcaaatgctgtatctgatgaggaattccatggcccatgttgctgttgtctcaactgctgcaagttttgttggtcggttcttatttgagcccatcctgttcggtattggagcttgtacagaacaacaccgaggtgcatgatattcttgactgaataaaattaattgacgacactgtttttacgtaaggaaggatgaggataatttggagacataggtctaaccaccggaaatagtaagcgggaatctcttgtatgtctttttttatatagtgtggcatgagtcgtgtcaaccctcagctcagctgaaagggctcaagttcgtgccacaacacaactggaagagctgcggccgtggccaaggagggaaatgccaaacaacagcaacaccattacaccaacaaaactaagggagaaagaccagggtgttacttgtattgtatatatcactccgcagaatttttgtcgtcacaaagacacaaatgaaggagcgctaacaaccattatcggtgttaataataatattgtatttgg

SEQ ID NO: 36046 - DNA, 1730 bp, Zea Mays
ctccaatctcgcctcactcctcctcccagaatctcaccttcccccgcgtgcaccgactgcttttctcccgcgtgcgctggctgcttttggccaccgatacgctgcgtcggcgctccaaagttccaggaaatcaaaatgccatagtttcacgggatagacggatcagcttggtctggggatgtcgtcaggttcctgtgcttttttcccaatatctttgcttccgccagatcctagatccagtgtctttcgtcggctggctttgtttgcgccgctgaagaacaacaatagtcagccaatatctagtccaaagtccaagcgccgccttaagtttagttggttcaccatgcagcgtggatggacggtcaatttcttcgtccgtcgcccaaccggcagcaacacatacgcgatgatttgattggttccttgtgtcctaaatgaaggcaggttgtctgaagatctggaatctccagtttcatccaagttattatgtttttcattttattcaattatctcccctgcttctttatcactcctattttctagatgacatatacataaaaacaggatggtctttgttggcttcctgctactgcatataacatactaatttcgctaaagaatatatgtatgtaccttaactgtggcagctactgatttggatttttcttcaaaacaggtcaggagaggctagagttccaaatcgtagttcgtgtgaaccagtgtgaaccagttgaatctcatcaatcttatcaagtcatctaataaaaaaaggtttcttcgtatttacccatacctctcatcacatgatcattttattactctgatgtatgtcctgtttattacaaaggaatagataaatattaggtcagtagtaactatttccttcagcaatttcatttacaacatcagccacaaatttctgaaattgtgtgcaagcatcccaagtgagaataactgttttaggatgcctaggctcttatgaaaattagtttgtctgaacatgcattcataaatgatgttcagtgaagtatctgcacaatacatatagagactttagcctgacgtgaaaaggctaaatcagttttgttagttgcatgtatgcttcaaagttctataagctataactaaagagatttggacagcaagctgtcgtactaaataaactcacatgttttctgtttgccggaactattctctccgagtaacaaccactctaccaaaatcatggaagacaaacctcggtaccatcttcaatgctcaactttgtagtcaccttaatatgtagccgccattgtatctttgaaatttacctttgtagtcacccttaatatgtcagaattctcagtgacaaacacggtacaaaacttcttacataataatgtcttcaagtttctgtgaaccatcttgaagatacgtaacataatgaaacatatttgacaggttcgacgcgtcttagagttctacgatgcatccaagaattcagagaacgttgacaaatatatagatcagctgaccaacaatgaattgtcatcaccacccaaaaagatgaagcacacccaggttaacaaagccattccagattctacatgttccaagaatgacaacagttagaccatcctgaaatacatcaaggttgggcggcttccgaagtcattcagacctgcgtccgagcctacatcatcatttggtttgaatcgcggaacgatgtcgttcgtcactgcgttgttcta

SEQ ID NO: 36047 - DNA, 2524 bp, Zea Mays
caaaaccccgttccccaattccccgatcgacgcccctcttatcacaggagggcggcggggctgctgtcggctactcggctccacgagaccacgactggagttcggcgaatcgacagtaggtggaggcggggctcacggccgacggagcctctcaccaacgcccaacgcccaacgccggttccctgggttgggctggccacttgctcctcgccggctggggctgaggtgtggccggcggcagctaggaacagcgacctgcgccagtcgaagcaacattgcgtcagggagcggaagacatgcgcgccgttggtgaatgacagctttgcatcaccttctctgccgctcccatttctccctcgaggcaagaaaaataaatcctagggtttctgcctccaatccgcggccgatgcctgacgccaatgagctggaagccgcccggcgcgtggcgaccttcaccttggcggagctctctatctcctcttcgacgttgcctcctcgctccaacctcccggcgctctttcgccgctgcctccagttgctgcctcttctcaacgctggcgatccaaaactagccgctcgatgctgccgcggcctcctcgcttccgttggcgccatcctctctcgggacctctcgccctccctcctccctgcaatcgaggtcttcactgagagtgttgtttctagtgaccatttgaggagctgcttgattatagccaactgtgctgcacgtgaaggatcaaggatgttcgctgaggctgacccatacgaggatgagcacataatgcttgaacttgtgtgccgccacttcatttcatcattactggacgagggggcatttgaggtgtttctgagtgcactttcttggtcggggagggcattgcagcggactccagaaatcagctttcagggggcttttgtgctggttcaaaggacctacctctctttgccggctgttgtacaagcacatcttttactgctcatgtcaagatgcaccagtggtcaaaatcttaactcgcatatgctagcgtttagatatgccatgaatctttatgtcagatatttaccggcattgcgtgttttcaacataacccgcagtgcaatacccccactgaattatttgggcaagaaaagatcttttagttgtatcaaagatagcactgatcagaaactcagaagtcagatctatcgtctgctttcgttttgtgaattgcactgtggtgatgatcttcctgtcaatgagagtgatattggttgcataattgaaatgaaccagcatatgtttcttgaaaagttcaggcaagaatgtattgtgtttgtgaagggtatattgtctagtatcctgtgctgtgcaaagcaaaaggaggtgagtgaacctgatactgaggtatcagatgagattatttgccttgctgcagcaactagggtaatgggctcctcaattctatacatcctgcacaataaaaattatgaagcaaactgcaaggaatacaatgttatatgtgaaattatcagtttgcttgggcaatatggaacagatgagcttcatagatatgacctcctggctattattggggagtcagtggaaagtgaaagtgcctcaatgctaatgttggctcattttgctagcttatcaacttgttgtttaagaagaaggcttggctttctgtggaaaggttgtattatcatgatgatgatcgccacaaatcttattgctgaagagcaaagttggggtacatttcatctccctatggatgtctccaaatattctccagttttctgcaataccgaaaaggggattgtagaggtttctgctcgaactaaagagataatattacggtataaaagcatacataaatctcataataaaggcaggcgcttttatgatgatggaatcaggtgcaacagcagcggcttggaagttgcggtgcagaactcatgaacagagtgcatgggagctttctgtactcccctggacggagggataagactgttggttattttttgagagagaagttaattttttttacatattttgttggtctcatgctgatggactggtgggaggcaagagtagtagtgctgcacgttggatctcccaaacctatatcacctactatgtgaccttttattttgggacaaaatttgaattatagaattgcaaatatttaggacagagggagtaagttaataccctattaataatattaaaaacaattgcgcatgtctcatttcttcccccctttgaccagtagttaacgaattcctggtgactattggtgggtgtatagcaattttaatcgataaaagatgcaacattgatattaagaccagaatgctggataaattccattgaaatgtatattataattttttttgaagaaactgactataggaatgtcaaaaggacaagtagaagatggtagtatgcatcagttgcttaccactattatttccatcttgtgatatgtagtcaagaccaatttaaatcctgctaccaaatttgatcagagtgagttcctataga

SEQ ID NO: 36048 - DNA, 1222 bp, Zea Mays
ccaaaacgcaacggtcgaatcccctcgaattcgaattgcaaccggtgccacacccacacccacacccacaccccacctcacatggcgtcgccgcaagcagacgaagagatagtggcggtgctcgacgaggagactctagcgctgatgggggtcagcaacgccgccaccgcagcgcgggtggcggtgggcgccgagtgggagaagttcaaggagaacgtgcggccgctcaagcgcgggcacgacgtgtccaaactcaaccacgcgctcgctcaaggcacacgccaatccctcccagcgcaccgctctcgtcgaagcccgcaagttgattttcctgattcagaaagatgatcgaggcaatctacgagtaccgaggcgaggatccgctccaaccgtggctggactgcatcaagtgggtccaggagtcattcccgaccggcggcgacagtgcgtgcggaccttatggcacgacgagcgctacaaggacgacatccgctttctcaaagtgtggctggaatacgctgggaactgtgctgatgccgaggtgacatacaggttcctggaggccaaccagattgggcagggccatgccatctactacatggcttacgcatcgttgatggagtcaaagaacaagttgaggaaagctaatgagatctttgatcttggtatagctaggtgagattttcatgagacctatatatatatatatatatatatatatatatacacggcgacactaaaatgcacctgggtgcattctctatattgaatgcacccacctgcaataacacctcgagcacgcctcggcctcctgtatgcgcgtcttcctgcccccccgccacgcgtctccctgtccccgcgccaccctctcccccaccgccgccgagtgccaccctctcccccaccgccgccgagcgcctccctgtccccgcgccgtcgcgtgcctccctgtccccgcgccgccgcgcgcctctctgtcagcgcgcctccatgtcccttgcattaggtgtgattgcaactgctgtataattctacccaaatatctgttaaaaatgtaaacacaatgattgcaattgctggtgtgttgtaattgcaactgctggtgtggtgtggatgcaactgctgagttgctctgatgtgattgcaagtactgaataactctggaaattttgataaaaaaatatgattgcaactgctggtctggtgtaattgcaactgctgg

SEQ ID NO: 36049 - DNA, 6088 bp, Zea Mays
catgcttcatttgttgagcttctgcggcaagttgctggtttgcgccgccgtttgttttcattatttgcacatccagctgaaagtgtgcgagagactatttctgttataatgcgtacaattgctgaggaagatgcaatagcagcagagtccatgcgtgacgctgccttgaaggatggtgctcttctgaggcatttactaaatgctttcttctttcctgctggagaacggcgtgatgttagtcggcaacttgttgctctttgggctgattcctatcaacctgcacttgatttgctatcaagaatacttcctcctggacttgttgcttatctgcatacacgttcagatgaagattcacggagccagtatgatgaagcaccgttgagcagaaggcagagacgaatacttcagcagaggagggttcatggtactaaaactatggcagtacaagaacaagggataccccccaatggtgttgaggatggggaacccttcaggcacatcagtgccggcacttacggaggagcagatgttcatcagaggcatgttggcctgtactcttccacccactctccttcgccaggtataaacattgatccttctcacactgtttcagttccacatggttctgtacctgaggccctttctgaaaataatcaacaaatcgaggcaccacagctggattcacatgtttattcagtggactccaatgccaatggcaatcttgtgagctcattgcattcagatttttcagtccctgcacaggttgtggtggaaaacactcctgtgggatctggcaggctcctgtgcaattggtatggattttggagggcattcagtctagatcacaacagagcagatttgatatggaatgaacgcactagaggggaattgagggcagcattgcaagctgaagttcataacttggatgtcgagaaagaaagaacagatgacattgtccttggaagttcagtcactgaggatgctgctggtagtgacaacttacctcgaatttcatggaattatgctgaattttcagtgagttacccaagcttgttcaaagaagtctgtgtggggcaatactatttgcggctcctgcttgaaagcggaagcaactatcgagcacaggattttccattacgtgatcctgttgccttttttagagctctgtaccatcgatttttgtgtgacgcagatattggtcttactgtggatggtgcagtacctgatgagttgggatcatctgatgattggtgtgacatggggagattagatggctttggtggtggtggaggatcttctgtgagagaactttgttctagggcaatggctatagtttatgagcaacattataaagttattgggccttttgatggcactgcacatattactgtcctcttagaccgaacagatgatagggtgttgaggcatcgtttgctactacttttaaaggccttgatgaatgacctttcaaatgttgaagcatgtgttttggttggaggctgtgttttggctgttgatttgcttactgttgcacatgaaacatccgaacggacagctattcctttgcaatctaacctcatcgcggcaactgcatttatggaaccttcaaaagagtggatgtacattgataaagatggcacacaagttgggccacttgaaaaggatgcaataagaaggctgtggtcaaagaagtcaattgattggacaataaaatgttgggcttctggtatgtctgactggaaaaggttacgggatatacgggaactgcgatgggcactttctgtaagagtacctgttttgactcctacccagattggggacactgcattatctatattacacagtatggcatctgcacgctctgatcttgatgatgcaggtgaaatagtaactccaactcctagggtgaaacatatattgtcaagtccaagatgccttcctcatgtggcccaggctatgcttactggggaacccagcatcgttgaagcagctgcctcattgcttaaggctattgttacaagaaatcctaaagctatgattcgattatatagtactggtgccttttactttgcattggcgtatcctggttcaaatctcctatcaattgcacagttgttttcggccacacatactcatcaagcttttcatggtggtgaagaggcagcactatcttcatctttgcctttggcaaagcgtagtgtactgggtggactactcccagaatctttgctgtatgtcttggagcgcagtggcccttctgcttttgcgggtgcaatggtgtctgattctgacacaccagaaattatatggacccacaagatgcgagcagaaaaccttattcgtcaggtcctgcagcatctcggtgactttcctcagaaattagcacagcattgccattcgttgtatgattatgctcctatgccacccgtgacttatccgaatctgaaagatgagatgtggtgccatcgttactacctccgtaacctatgtgatgaaattaggtttcctaactggcccattgtagaacacgtggagtttttgcagtcattgttggtaatgtggcgtgaagagttaactcgtcgtccaatggatttatctgaagaagaagcctgtaagatactggagatttcacttgatgatctcgtgcttgttgagaacggtagcagcaagcggccatctgacttaagttcggctaattccggaaacaaaactgaaaacattgatgaagagaagcttaagcgccaataccgaaagctagcaataaaatatcatccagacaagaaccctgaaggaagggagaagtttgttgctgtgcaaaaggcctatgagcgattgcaggctagtatgcagggattgcagggaccacaagtctggaggctgctactcttgctgaaggcacaatgcatcttgtacaagagatatggggatgtcttggaaccattcaaatatgctggttatcctatgttgctaaatgcagttactgtagataaggatgacagcaattttctttcatctgatagggcccctcttcttatagctgcttcagagctgatttggctgacatgtgcatcatcttcattaaatggagaagaacttataagggatggtggtatccccttgttggcaacacttctttctcgctgtatgtgcattgttcagcccacaacaccggcaaatgaaccagctgcaagaatagtcaccaacataatgcatactttctctgtcctcagtcagtttgagtcaggaagagttgaggttcttaagtttggtggccttgttgaggacattgtgcattgtacagaacttgaatttgttccttcagctgtggatgctgcactgctgacagctgcaaatgtttcggtgtcatctgagttgcaaaatgctttgctcagggctggatttttatggtatgtgctacccctgctgcttcagtatgattcgacagcagaagagaatgagatatgtgaggcacatggtgttggggcaagggtgcagattgctaaaaatctgcatgctgttcatgcaactcaggctttgtctaagctttctggtctcagcagcgatgatatactgtacccagataacaaacctgcatacaatgcgctaaaggctcttcttactccaaagcttgctgacatgctgagaaaccacccacctaaagagttattatcaaatctgaattcaaatttggaatcaccagagatcatatggaattcgtccaccagaggggagcttctcaaatttgtagaccagcagcgtgctagtcaaggccctgatggttcatatgatttgacagaatcacagtctttcacctatgaagctttatccaaagaattgatcgttggtaatgtatacttgagagtttacaacaatcaaccggattttgaaataagtgaccaggaggaattttgcattgccctgctcaagtttatagcagagttagtacaacagtggaattccgttaacttggaggagacgattcatcaacatggttcagttattgaagcatctatttctgaaaatgatcaagtcagtgattcaactattgaaggaaaaatggacaattcatcaggaaaacaaagtacagatggagattctgaagttattataaacctccaatgtgggctaacatcacttcagaggaaatctctatgcagcaaagagctgctgctgcatctttattgggcaaacttgttggacaaccaatgcatggccccagggtggcaatcacccttgccaggttcctgcctgatggtttggtttctgccattaaagatggacctggtgaagctgttgtttcttctcttgaacagacaacggaaactcctgaactagtatggacacccgcaatggcagcttctctttctgcacagttagcaacaatggcatcagacctctaccaagagcagatgaaaggacgtgttgttgattgggatgtacctgaacaagcatctgggcaacatgtaatgaaggacgaaccacaggttggtggaatttatgttagactttttcttaaggaccccaaatttccactgagaaaccctaaaagattccttgaagggctcctagatcaatatgtctcctctgttgctgctacgcattatgaagcaattgctacagacccagagcttcctttactactgtctgcggcattggtttccttactacgagttcatccagcacttgctgaccatgttggctacctcggttatgttccaaagcttgttgcggctatggcttatgagggaagaagggagactatggcatctgggcaggctaccagtgcatcgaaggcagaacctagcgaacatgacaactcagctcactccgaggccactgtacagactccacaagaacgtgttcgccttagttgtttgcgtgttctgcatcagcttgcgtctagtacaacttgtgcagaagctatggcagcaacaagtgcaggaactcctcaggttgtaccactgcttatgaaagcaattggatggcaaggtggaagtatactggcattggagacattaaagcgtgtagttggtgctggtaatcgggctcgtgatgctcttgttgcacaggggcttaaggttggtcttgttgaagtactccttggtattcttgattggcgtgttggtggaagacaggggctctgtaatcaaatgaagtggaatgaatcagaggcttcaattggacgtgttttggctgtggaggtgcttcatgcttttgcaaccgaaggtgcacattgtgctagagttcgtgaagtcctgaattcctctgatgtatggagtgcttacaaagaccagaagcacgaccttttccttccatccaatgcacaatcttctgctgctggaattgctgggctcattgagagctcatcatcaagactcacttacgccctcaccgcaccgccaccacaaccttcattggtccgtctgccatcttcttctccctctccaccatcagctcctgcaaaccctagtggacggcattcttatcagcgtttgtagtgcaaaacggaacatgttaatctcaacccggagtgtgaaccatgaaggcaccatggtaacggtttctagagtgaggccaccttgagtgggcttgttactgccaccaaatacagattgtgcggttgtgcctccattccccaccaatgagcagctgtcagtggctgcatttcagtacatagcattgtacagttttccattacaacggggtcagggtcggggtcggttttgcgtttgttcatgtaaagcatatgatcttttttgtaacataatagatgtcaatagaataatggagctggaaattgtagtatcgattcattgctgggtcctgggtggatgcactcccttgttaggataacacgactttcttggacaagagaaatggatgttttttgttttgtttgatcagcgtcctgtagcgtcagggtatatttggttccctgtctaactcgacttttttgttagtcacaaactaaacaatgacacagttagtcacaaaccaaataactccttaaccttttatagtcatacgtcgcaaacttctggcaatggtgtgctattttatttgtaataaaataacaaagcaaaattca

SEQ ID NO: 36050 - DNA, 1677 bp, Zea Mays
agataaggcccagtccatctaaagagtcgaacaggcctggcccggactccagaacaacgcatgacgtcgaagaaaatctcagggacaccctccatccaatcagaaccgaccttgacccaccgataataaatttacaaaaaagccccaaaacaaacaggctcttctcctctcgtcttcctctccccaacccgtcgagaccatccttcccttcttccctcctcgccagaggagagtctcgctagctagggtttccaccaatggcggcgcccaccacctcccgccgcggccccggcggcgcgcgcaacatggacgatgaaaacctcaccttcgagacctccccgggggtcgaggtcgtcagcagcttcgaccagatgggcatcaaggacgacctcctccgcggcatctacggctacggcttcgaaaagccctccgccatccagcagcgcgccgtcctccccatcatcaacggccgcgacgtcatcgcgcaggcccagtccggcaccggcaagacatccatgatctccctcaccgtatgccagatcgtcgacaccgccgtgcgcgaggtgcaggctttgattctctcgcctactagggagcttgcttcccaaacagagagagttatgctggctattggtgaccacctcaacgtccaagtacatgcttgcattggtggaaaaagtatcggtgaggatatcaggaggctcgagaatggggtgcatgttgtctcgggaactccaggcagagtctgtgatatgatcaagaggaggaccttgcgaacaagagccatcaagcttctagttctggtggttttgatctctgcaactcttcctcatgagatcttggagatgactagcaagttcatgacggaaccagttagaatccttgtaaagcgtgatgagctgaccctggagggcatcaaacaattttttgttgctgttgagaaagaggaatggaagtttgatactctttgtgatctttatgatacactcaccatcacacaagctgttattttctgcaatactaagagaaaggtggattggcttactgaaaaaatgcgcagcaataacttcacagtatcggctatgcacggtgacatgccccaacaagaaagggatgccattatgggcgagttcaggtccggcgcaactcgtgtgctaataactacggatgtttgggctcgaggactggacgtccagcaggtttcacttgtcataaattatgatctcccaaataatcgagagctttacatccatcgcattggtcgctctggtcgttttggacgcaagggtgtggcgatcaatttcgtgcgcaaggatgacatccgtatcctgagagatatagagcagtactacagcacgcaaattgatgagatgccaatgaatgttgctgatcttatttgagcaaccgctcctcgcaaggtttggcttggtgtggcggtgagaagtggacgagaggggctttgtaatctgagtggagcagagatttgtttgtttacttttttggtgacggcttgaactgtatgtatatatattttagcatgctccagctcatgtaacactttttgggagacctatgttggtggcttattgtgacaatgacacggagaactgtgctgctgtgaattgctgtttgattattattaattattatggttttggttggttgcaatgccgagaa

SEQ ID NO: 36051 - DNA, 2896 bp, Zea Mays
cccctatcctctctcctcgcccaccggaaacgcaacgcaacgcaacgcaaccagagggggaggggggggggggggaaagccggagccgactgcccgcaccacccacaggaacgccgcggggcaggggggcaggaggaagacgccggcggcggcggcttaaaagggcagggcgccattacctgcttccctgtcttccccttcccctcatgtactatagtactgcgctgcgccctttcatttacccggagtagtaaacgagaagaggaataattgtgtcgcaaactaatccgtttcgccgctgcctgctgcttgagccaatcttccgcgggtcggggccgatgacctgccaactgggaccccagggtcgtcgtcatctatctatatttgaggtttttgcgtcaacatgacaaggtgcttttactctcaccaaaccgttactggggttgtccctgtgtctgtcatttctttgtcctaggcaatggccacagagaagagccaaagacatgatgggtattttttacaacacggacgtgctggtaatgtctgtggcggaggcagggttggcttctgtctgttatggtgttctgctgcctccccgtgtggctgtggcagccatcagctctaccaggagcagctgtatccagagatggtgtgaagcacacacaattctactctgcgcagggtctgtttcacttgccattttggataggatcgctcgttttggaattaactttatgctaacagaatctaggtgtcattaagctagattaagcttgctgcttgacttagtagtgtaaatctgtaaagaaaattacctggtttgggtttagtctctataaaagaaatggaacagaggaatgttctggcattgggtgaacatgttctaaaagctactgtttggaagcggaagcataagactgctatggagcaccctgaaggcaatgatgtgatggtgttctctcagcatgatcaaagaaagcaccctgtgatatttgacgacagagctaaatgtaagaagtctaaattaatttcctgtgggagtggagttatattggagtcatattggaactttaagacaagtgggctgcctgtgcgcgtgcttttctaccaacatggtgactggagtgattttccagaggatgttgtaaatctagcacaacaggacttccagttgaagaagccaattacaactgctgtgttccagaacaagcacatcctgttggacttcattcacatgatttgcatagattatgagatgaccatagacaaaccactagcatgggttgatgataatggcaaacgcttctttccagatttatctgctgggctctacacatctaaaccatctcagcatgagaatggtgaagctgatgagtgtgatggaacgcctacaagtgtagctgaaagttctagttcggtatctgttggtgaagtagtttctcatggtccttcattccatttgaatgaatattctagtggaaccatacaagctactggcaagccaaacgattgtcgacgtattgattcagctgtgcggaatttgttgctcaaaggattaggtcagccgtttagtgaggaagatattattggtatctatagaacaccactgctagatcagcgagggcaagttcgttgtggtctcttccagaaggagatcgaagagaccaggagtcgtcgggggaatgcaaatgtacgttatgcttggcttccttgctcaagatataccatggagcagatggcaatgcggggtgctctggaaatcgcgaagcctcataaggggtccatttgtggtgttgggacttgtcttgctcctgcaaactgtacaaattcatgtgccagatattctgattttcatgaagatggcatcatcagaatgatgttgtgccgtgtaataatgggtaatgttgaggttgttttgcctggatcaaagcaatttcagccatccaatggaagttttgataatggtgtggatgatcttcaaaatccacagaattacatcgtatgggatgctaatgtgcataaacacatatatgctgaatatgctgttattgtccaagcacctctcgtgaccaatgaatgttcgggcttgaaggatagcgtgcccaacatatctgagatcataagttctggttctcgagacaatctaaccaaggaggataggttcgcgccttgtggtgtcgaacaagaagcacctaggctggggcgtgctccaagggccccctcctcaccatggatgcccttttcgatgctttttgctgctatttccacgaaagtgcctcgttcggacatggagttggtcatcagatactatgaagaattcaagaggaagaggatgagccggagcgacctggtggtacggatgaggcaaatagtcggtgataagatattggtttctacaataatgaggcttcaccaccagaagaagcccccatcgatggcagcagcagcagctgggctagcaagagcactcgcaaggggggaagagggagggggagtagccgagtaagattagtttaagccgccttgtcttttgagaaatttatggagcacatatgctttgtcgacatggccagacccaaggtgtcaaaagggagggagatgagctgagcaactgttgtagtgtagtctcaaactcaaagcgtttaggtcttgacatttgacaaactaaaactcagaaacattatcatgagtagtgtttttttttcgtttctctttcctggatttaactattgttattgctatttcgtggatatctgggcactgaaggccgtgctattgttggttaatgatggtatgattaagggtgcgcttgccattttaaccctttgaccacatccaaacaatcacggctccttgtgccagctcaaaggcaacatctatcatgtgaaaatttaag

SEQ ID NO: 36052 - DNA, 5056 bp, Zea Mays
atggacagaaagccagccggtaaaaatagcttcaggcaacaggagaagcagaaaaaaaatgagaggttggactggaatgacctggtcctggctgggccttttgtccttcattcacattcccaaactgctccatcactttataccgccgtctcatctcgtgctcgtggtgtccgtgttcctcctcttggcggggccggccagaaaagcttgctggacggttggctccggaaaccggatgcgtctcaggtcaggcgcctgatttttacttgggttcccatggttcgtttccacagcgcaaaccacctcccagcttttagtcagtatagtctgctggagcccatggaggtgcagctggcgacggagcaaccgggggacccgttcctgccgctgcggtgggagagcacgggcgaccagtggtggtacgccacgcccatcgactgggcggcggccaacggccactacgacctcgtccgggagctcctgcgcctggaccccaacctcctcgtcaagctcacctcgctccgccgcatccgccgcctcgagtccgtctgggacgacgacgcgcgcctcgacgccgccgccaggaaccgcgccgccgtcgcccgccgcctgctgctcgactgcgagcccgataacgacaagcagcccccatcccgcggaggcggaggcgacgccgccaaccgcctcctccgcgccggctacggcggatggctcctctacacggcggccgcggccggggacgagaggttcgcgcgggagctgctcgcggcgcagccgctgctcgtcttcggcgagggggagtacggcgtcaccgacatcctgtacgccggcgcgaggagcggacgccccgaggtgttccgcctcctgttcgacgcggtgctgtccgcggcgccggcgtgcccggtcgggggtgacgacggcgagtttaggcgcgagatgatgaaccgcgccgtgcacgccgcggcgaggggaggcagccttgccgtgctcagggacctcctgcgcggctgctccgacgccgcggcatacagggacgcgcagggatcaacgatcttgcacgccgcggctgcaaagggccaagttgaggtatgtcttgcagtttttttccttgtcagctttattctttcaagatggatggacgtcgtcatccgcagcaccatgcaatgtatgtcccgtctgtttaacattttcagtgcttgatttgaaattatccgtacggtttgatctatatagactagtaattctgtacaaacatatgttgcctttcacttgcttctacttgcaatatgactgaacattttagccaggttgtcagcttgttagaaaagttctattttgcatagtttaattgagtgaacaaaacatgttgagcattaaagttgattcaagccaatactgcttctctgatctataatctaagaattgttcatccctgttttgtttgactttattcccactttggcccttagagttgattcggtgcacatgcttgcttgccattgccaggttgttagttgatcatgcgaatatggattaaacttgtggaatgactcgattaatctaatggttgtacctgttgttgttggcattcacatattatcttttaacaccggattggagcttcataaaatgttgtctgccatcaaaatttcacagcaaaagggtacttaaggtttgcttggtagcacgtgaattaaattgatgcctttggcgatggaaatttccattgacatccctagtcattagtacatttatgttgctgtcatggaaccatttgtagtttgttatgttcactgattgaaggatgatcattcgagatggctctttattatgattagaagggttaaaagtattttccttcattctgtatttctgttgctccaaagttagaccttgggatgggtcctgtgctcaattttctatgtacacacagtttacaaagtactactaaactaaatttatgaacaaaaaaaatactgtacgctgcaggttgtgaaggatctgattgcatctttcgatatagcgaactgtgtagatgaccaagggaacacggcgctgcatatagcagccttccgaggccatgtccaagtggtcgaggctctcatcaccgcatctccgtctcttatatcagcaacaaacgaagccggcgacacgttccttcacatggcactgactggcttcgggactcccgagttccaaaggcttgatcgccagacggagctcattaggcaattagcgagtggagcaatcgtggatatcagcagcagcactattatcaacgcgcagaatgacgacgggaagacagctcttcacttggccgtggtttgcaacctgcattcggacgtcgttaagctcctgatgagcgtgccttgtattgacctcaacatctgcgacaaggacggcatgactcctctggatctactcaggaagcagccacggacgacggcgtcagagatactgatcaaacaactgatcctggccggtgggttcacaagctcaagggaccacgagactaggtcggctatcgcttctcagctgaagatgcactccattgtaggaagcccggggacatcgttcaagataccagacggcgagatcttctttctccacgctgctggagtcgacgtgtcgggcggcatcggcgaaggaggagcagcagtaccgttttcctccgttattgctagggctgacgtcctgcatggacccaaactgaagaggctcaactctttccaagacgcggcgaagcatatcaaggtcctattcagatggcctcgccgcggatggaacaagtcaggcagcggcggccgaaagggtctggacgacgacgatgcctcgtctgtggactctgccaagacctggagccacgaggagaccccgacaccgctgaggcagaggtattccaggatcggctcgctgttcaacaagcggacctacgcagcaggcagggcttcacctagcgaagcagtgaagaagggtggagtggtacagccagctggttctactctactttcgacatctctgtcgtcgtcgtcggcgtccttggttgacagtcatggctagagcttcatggaatatgaactatgagaaggttcttgttgacatcttgcacgagcacaatcatgtgaagtaccggggccagaatggttgggcaccagaaggttggcgttctatgacacaaatgttcaatgagaagtgcccgttggctaagtttacaaaggcacagatccaggaaaaagaaaaggaacttaaggcaaactataaggtgctgaaggaagcccgcaagcaaagtggtgttggatggaatgaggccatgggtatgatcattgctgaaccaccaatatgggcaaatataattgttagtaatccaaaggtcaagaaatttcagtcaaggccattccctttgtataatcagttgtcagcactctatgatggcagttgtgccaccggtgatctcaattttacatcaactcagcaacatacatcatcccgacaacaattacatattcaagctgaagttgaagctgaagctatgagctctttcaggattgatgatgacctcggggttaaccctgatttgaaccaaatctcttcaaatttgcatgggttgggatcttcaagtacccgtgttgagattggtggacatgaccgcaccccggcatcttcagaacagcgagcggagagtcatggaaggaagcgtaagcaaagtcagattgctggggttcttgaggaatatttggattacaaaaggcaacataatgataagttgcttgatgtggtaaatcagattgatcaacaagctgagggatgtaacaagaaggaagaatattgtattggaaagtgtgttcgtgtgttagagtcgatggaagatataactgaagaggagatggcagcggcaatgggtgtgtttaagtgcgaggagaacagagaaatatttctgaacagccagaggccacgtgtccgattgttgtggcttagaaacgagatccacaagcaggtagttatataaagcactcaatttctacaattttttttgcttcatggtcacatttactaatttctgcaatattttcagatgtccaccaatctcaatattttcagatgtccaccaagcctttagtttcctgggaggcaatggatggagctctgcgacaataaatacaagatgttcaaaagaacgttattgttgtgttaacattttgggcataccaagtacttttttttgttatgagtctgtcaaacatatgttaaatttgtcactaatttcttatgagctatttctgtggtcaaagaaagttgtttatttaagtggcatgaatcaaaaaatcttaggagacttctgtttgattttgtttatttttaaaagaaagttgcttcagcgtacaaattttgaggggcatattgttgtttttgcgtacaaatttctgtttgattttgttgatttttattttttctattttacttgtgatttgatgatgatcacacttctagcagctgccgatgtgtggctccagagggcagcagggcagctgacccatggggcaccaaaggatgtcagggcagcgcagccccgctgggcaatgcccacccagggaattcgtatgacaggaatttgccccctccggtgctagctcccctgtgttttattggccccggtcaccaaaggatgtcttaggtgccgtggaagcccctgaacctgaactgtccgtcggcgtcgaggcggccccgcgcgtcggacatccactcgctcctgaggtcgatgagcctctggccggcgtcgttgacggtgccgtcggcgttgacgagcgcggcgtcctgcctccacatgtggccctgcatgaacccccagagcacgacgccctgcaccgccgggtgcgcgaacgcctcgcgcaggaccacctcgaggtcgtcggcgcggagcgcgtcgtcgggctcgcagacgtcgacctccgtgaaccagacgggcaggccggtggcggcgtagaccgtgtcgagcgcgtcgcagatgacctcgccgacggggtgggtgacgtggccctgcatcccgacgccgccgacc

SEQ ID NO: 36053 - DNA, 1110 bp, Zea Mays
agggcaggcagaatattacgcacgcgtgttggagtatttttaaaggatctcacgttacatgtggaataacatcaacaaagttgggggggaaatgtcgagaggcaatttttttttggcacagagaaaaaagaagttgcaataggcggagcggagagaagctttagataccttttcggccacccatcatatactctgtctgctgttcttccctataaattcgtcgacctctccatatcacagagagatagagagagagagagatagacaggagagagagagagaggggaagagagagagagagagagagagagatagatgtggtaactcaagaactgttcttatgcatgcagcagccataagcattgctactagcgtctcctgcacgtgctgtgtcgtttccagggtttcatgcggggcgaagcagctggtctctgccgcctgaacgccgccggaatctgcgaggcctccccgagctgcgtgcgtcgtcggataaggcagccggcacggcaatgccggttccgcttgctccgtacccagctcctccggcgccattcacgccgcccaatggggcccagagccagctcgtctgcaccgggtgccggaacctcctcatgtacccagctggtgcgacgtcggtctgctgcgccgtctgcagcaccgtcaccgccgtgccggctccaggaactgagatggcgcagctagtgtgcggaggatgccacaccctcctcatgtacatacgcggcgcgacgagcgtgcagtgttcttgctgccacactgtgaacctggctatggaagagagatggaaaagcttgacagggatgtcctagagtcactggactggagctgaatgaatatctcgtagagatgcttcagtgtgccgagcacagcatttactggaactttcctacaaggaaggattttagtcccatgaccatgaccacccgttgaattcatcaagttgcgaactttgtcaaaaagaaagggaaaaataaacatcacgttcagagattgtgtatttgtccagggttcagaaatcaagtgctctgctcattcctaacatctccagtgacgaacggtcttcttgttttttttcttcttcttccgtcgcag

SEQ ID NO: 36054 - DNA, 1296 bp, Zea Mays
atgacgcacgcaacagggccgtccctgtgggggtgccaagggtgccgccgcaccgggcccccaaaaatagagggccccgtagccactgatatgtcacgactcacgacgacggaaacagtagtgctgccagtagagctctcagaactcgggaaaaaaatgtcagaggccgccgtgcgtgtgatcggcctatggccgagcccgttcgtgatccgcgtcctgatcgccctgaagctgaagggcgtcgagttcgagttcgtggaggaggtggtgggcaggaagagcgagctgctgctgaggtcgaacccggtgcacaagaagatccccgtcctgctccaccacggcaagcccatctccgagtctctgatcatcgtccagtacatcgacgagctgccttgggcgatccgcatactgaagggaacggacgacgggggcatggagcaggcggcggggcagctgtccgcggccctgcagctcctagaggaggctttcgcgcagctcagccaggggaagcgctacttcggcggggacagcgtcgggtacctggacatcgctctggtgtcgcatgtcggctgggtgaaggcggtggagaagatcgccggggtcaccctgctggacaaggccaaggtcccgaacctggtggcgtgggctgatcgtctgtgtgcccacccggccgtggtcgacgccatccctgacgcggacaagttcgttgagttcagcgtcacctatggctccttctccaagcctatcaatgctcccgccaagtgagcaaaaagggtccgtgcatgcttcgtcattttcactttcactgcgccccttccaaggggaatcgacgcatacactagtggctctgtattctttagtgcaaagcttactgttctgaactcagttgcagagtttcattaactttttcaaatgtgactaaagataataaagcaaactgaactgttagtaacctattacaagagagaaatttactcctcctgcaaggctgtggctgttagtggcttggcctagctttgcccggatatgaacatagtcttcttaatttagtactcccatcaccatcagaagaatcttccttgctttgcattttgggcgagatcttccggtttccctcctccgttgaattcgtttctggctgaggttaaccttctgtttgttgatcacctgcatcctatatccaaccactacaggacagtcggtcattaccataagaaaccatcgacatataattctacgcatctagattagacgaggaagtgagctcctatccatttagctttaatccatacgggt

SEQ ID NO: 36055 - DNA, 3832 bp, Zea Mays
ccgccactaccctgctccctcccccaagccgccgccactccttctccctccccctttctctctcttctctctctaccgcccacctctctccacctcctctccccaagccgcgccaccaggagtgcagcagccgctagaagctgccatccgcccgccaggagttcagtcaatctcctgtctcctgagagccgccgcccgccgagtcccgctcgccgctcggtcgctcccgtgaggcgctcgatctcctcagcgccgcgcccacccagccacggtggagccacccttcgtcccgtcgtccggcggccggccctcaatccctcacgccctagcttctctgccatttccggtcagcccctcacgccctagctttcctatcaggcgctcggtcgctccctttgccacgcgctcctagcttctctggtcggctcttcctccgccatttccggttggatcctcctatggtatgtgcatcataatccgtcacttttactgtgtatgcaatctcgatctgcctagttcggataagaagaacctatccgaagagcgcccgttaatgtctactagtggccaacgcgcgcctacgcgcggtgtttttacccttttctttcaaaaatatatgagaattgagtctctcgcaaggaagcatcaggccaatgggatttagtggccaaaacacgatactacctgtagaggcagagaagacccaaaattaaggtgctgctaatgatacgatgaatttagagaaaatgaaaaatgcaacgaaagcccctccaaaaaaattctaccattttcttttgattggccgagactgatgtgcatttgcctaaaagtctcacaaattcattcctcattcttcatgccgacattttaattgggaggacgttttgaattttggcgaatgggacttctccatccttgaaatccacccacacgccacaaaaccaaaacagaagtaagcaaaataaaaatttcgaagctagcatgccaaaaaagacgacgaagaaggacctgaatgatgccgtaggggtcaggccacgaacgatggttgcccgcgctccattgtggcaagcttctgttgctggcttggcgggtcgctggagcacgacctggagctcctcctcgacgatgtactccgtgatgcgggtacgtgcggtcgacgactgctgtagcgtcggagactccgagttggagcggctgctgctaatgctgccgagctccacacgaaagaagtgcttgagcggccagtggggcaacgcgatggaggcacgacacagcgggcatgatggctcgctgctcagcgcccgcggggaggagctaggatgctcgggtcggcgggcggcggcgcctcgacctaagcgagcgcggggccatgggcaggtctggtcaccattcagaacagggggctcggaggcgaaggcgagaggagagaagcgtatttgtttttttaaccctaccagccggtcgtctaaaaccaaaagtgctagccgcttcaagaaagtgcgaggggtaggaagcatagaaattaccagctaaacatgtgcgacggcggtgaagcgtccaaagtagatcgaacggctcctataaaaaggacgacgtggccacgctcattgggcgtcttgatgcagagctttaatatatagaaatatcaacgagtcgccgataaaaaaccaagcatgaatgtgcagtgcagtgctcgacaaacggcaccagcgccgctgggtactgtcaccgcttcggtcgccggagcccggagatgtaaatgcgctggagttttcatgctgtcgctggaggaattgaggaagaaagtttggtaaccgtatactgctctaagaagttttgccagttttgatcatagccaagcttttgattcatcataatctgatcctgtaaccaatttctctccctatgtctagagcagcctcgtggccaatgcaattgatgccctggaactgccgaagggatctgcaattgctattgacatgcctatggatgttacctaatttcaggatgctaaggtaataatgcttggactggtacccagcatcgttcgtacttggaagaatacggactgtacagctggactagactggtcctccatccgatacataattttttgactgagccttgatattctcagaaggtgatgtcagtcttttcctaagagaagtaagtagtgttactccatccttactgctcggatgtcggatcattgactaccactgaggtcagcactggcattttttttaacgtagagctctgcagttcttacgctgacaccttataagtgaaagtgcaatatagaggccttgtgactatcttttcgtcagcaagagaacaacatcgatcttggtagttcttagttgcccctgtgtttcggaagtgttgtgtcagattattatatacccatttctagaaataaccaattgctcatattgcttacttagacaaataagcaatcttgaatctggaattttacagtgtacctgaactatcaactcccttcaacaaacttttttgtatggaacaggagcagcagcaccccccccccccccccgcctagtgaaaatattatgaacagaaaaagaacatcaaacagcaaagaaagaaaccaaaaagttcaacaaacattgcttatcatcaccagcaattattatccttattcctcctaatcagaaatcagctttaacgacctgtttggttgattgtctggtacttctctcaaaatatttatttgatttagctttaggagctatcttgtttccctatgcagggtcttcatttaaacttcctcaggattttatcagtatatattttacttttgcagtttaaacaatggaatgtagcatttatcggttccagctttcaatcttgcaaaatagaagcactgacagcgtgcttgttgcatgcattacctgtaataatgctccatttgtgttctttatttgtttagccactctaatcgacactgcccgtttatttacataggaacgtcaatcatatggatgcttcttcagtggaattatcatgtgaatccccatagtgcccaagctgtgaagcagtcatgattgatgcttgggctgttagctttatgtggtccagggggaggaaggataccttagaaactgtcagaaaagctcatttcatacttcatttttcatcatgttattttgttgcatgagacatttgtccaactgcgtagggaatgaaaattcaaattatttctgccactgattgggggatgtaattccaaacgttgtaaaaggcgactgtatctagtgattatttatggctgatgggaagagctggttgtgatgcagttgaagacccaagatttgaacgacactattgtcacaccgaaagtgtgttcgatgaaatgcctccaacatccggaggtttctatttgtgaaagtttgcaggctaagacaaatgatagctattcaaggagctagaggctgctcaacataaagcatcaacagcaacctctggaacagctgaaaatgctctactggaagctaagtcagtgactgatcttaaatctaaagatttggagaagaagaaaagtgagctttgttcactgatacaagaagttggagtgcttttgtgaaggcttttgcgaatcacttgaagtgttagtacttttgtgaatgattttgtaaagtgtttgcaaatatgtgcaaaacataataacatgtgtaggttttgtgaatgattttgttgtggtgcttgttgatggtttatgtgatgtggatctatcattgtgcaatactaattaaatttgtatatctatgtgattatctgtataaaaattggtgatttgtgatgcttttgtata

SEQ ID NO: 36056 - DNA, 1897 bp, Zea Mays
tcgcttgtgctgtatatatgcacatacacacgcagacgcagtgctcagtgggggtggatgcagagcagttggatcggggacacacacagagagagagagggctttgctttccgttttcctctccaaatggctcatttagctcttgaccggaagagtggagggtggtggtgcgggtagagatagagatagatggcactcgtcggtgtggacagtgctgggttccttggagcttagcgtgacttcatcagaagacgccgtttgcctgcctggctgcttggtcttgggtcgacgaccggagccccctccctcgtgctcgccttcttcctccctgtccctgtccctgctaccgagtttccgggcgctgaccactgggcaactacagctgatctctctctgccgcggcatggaggtggaggctctggagaagaaggggcacgcagcttttgccaaggcgatgaaatctttcggctcttccgagcggtacaagcgatccacgagatattttgaggatatgtatgctacagacgctttgcgttcttcagacaagacgattgttctacctatgccggaagtggtaaaagctaaggtcaaatgtgatatcactaaggaagctcaacccgggaggggagcacaaagcaccttgagaaaggagattcttcagctcgagaagcacctcaaggatcaacaggctgtgcgtggtgcgctggaaaaggctttagggcctaacgctggccctgtcagcttgtcgccagagaatccaatgccacaggcagctaatgaattgatacgggagattgctacattggagctggaggtcaagaacatggagcagtatctcctgacgctgtaccggaaagcatttgagcagcagcaagcgcctgcgttttccccccctgaccgccgggaagcttcgaagccgtcagtgagctcgcgttctgggcagctccgggaaacgcccatggcaacgaagtcttcttgcaagagtagaggggacgcagcactgcggtccagttacccgccagcgcataagaaactgaacgatccattggcggattgctgcacatctgctcgatttgatagagtggttgattcagacgtcctccgctgccagtctgcgttgtcataccgtggagtttgttcgtccaggatattgccttcggaggacgatagtcttgcaagggctcttcgctcgtgccactcgcagcctttctcattcgtagaggaaggagacaccggtgcatcagggatgataagcttagcagagtatctaggaactaatgtagctgaccacatccctgaaactccaaacaacctgtcagaggagatggtgagatgcatggcggggatatactgcagactcgcagatcctcccttggttcaccacggctcgtcctcttcaccgtcgtcgtcgttctcctcgactagcgcaatctctccgcagtatgtgggggacatgtggagtcccaaatacaggagagaggcgactctggactcccgtctgataaacccgttccatgtcgatggtctgaaggagttcagtggaccttacaacacaatggttgaggttcctatgattagccgggacagtcggaggctgaaagaagccgaggacctgctccagacttacaagttgattttgtatcggttggaagccgttgatctgaggagaatgacagatgaagaaaagatcgcattctgggtcaacatacacaatgctttgctgatgcatgcttatctgaagaatggcgtcccacagaacaatctaaagaaaacatccctacttgttaaggctgcctgcaaaatagccggacgcaacatcaacgccgccgtcatccagagcattgttcttgggtgcaacacacactgccccggacaggcatgctaatttcagcttcgg

SEQ ID NO: 36057 - DNA, 197 bp, Zea Mays
gactcgccgccgccgccgcgataggccacgcctccatgtcgccatttccgggtccttaccgacgacgcgcacccaccaccccatttttttccgttcctgctgtgcgacacacaaaccctagctgtatcgggtgggctgtgaaatggaccaagctgcagattcctctgaactgcttcgtcgcatcgaggagctccagc

SEQ ID NO: 36058 - DNA, 1571 bp, Zea Mays
ccattctagatcatatgggaggaatagagtgtagctcctaccaactcaccaataataatacggatgtaagaaacaaaagaatgtacaaagaaaatccaaatgaataaaaggagaaacaatgagtggaaaatgatatggagcacccaacagtatacgcatacgccaggcaccacatgtccatccgcgactccgcgtcggtatccgtcaagaaattttcaacaaaaaaaaaacttaattttccactcctattcttccccgacgccggggaccagcgccagcgccaccaagaagtgacccacccaggtagccaggtaggtaaccgcccgtgccccgtcgccggcgatggcgaggtacgaggcgtcggcggccgcgccgggcgtagactttcaccttcccgacgagatcctggccgtgatccccaccgacccgtacgagcaactggacgtggcgcgcaagatcacctccatggccatcacctcccgcgtctcccgcctcgaggccgactctgggcgcctccgccgtgacctagccgaccgcgaccacgccgaggccgagctccgtgcccgcctcgccgactccgacgcgcgcctggccgccgctctcgacgagaacgcgaagctagcgaaggaaagggactcgctcgccgcgacgaccaaaaagctgaccaggaatttggcgaagttggaggcttttaagaaacaactgatgaaatcgttaagtgaagataatctattgcaactgtctgaaaccagtcaagatcacaacggagaagatattttgacagctcgagtcccgtattggaaagatgaagtttgtagcagtaacacttcttcagatacctccatcagatctacaataactgaatccatccatggtggaggataccagttctcaatcaaaacatatgtgcctccaaaattaactcctggctcaacacctatgatttcgtcttctagtggttctccccgagcttattcaactggcccaccctctcccaacttcttctctggtccgacttctcctacaaaagctcgatctgagggccaattgacattttcgtcatggcaaggatcatcaagtcatcagtattcagcacctacctctcctcaacgccactcattcacagggcggccacgtatagatgggaaggaattcttccggcaagcacggacaagactttcttatgagcaatttggagcatttttggccaacatcaaggagttcaatgctcaaaaacaatcacgggaggacaccctgtcaaaagcagaagagatttttggaacagaacacaaagacttgtacatttctttccagaatatgcttagtcgcaaccagtcatgaaaaatatgtcagaagcggtattttctgtctctaaatcaagcagatctttgagaatgaacggcgaacgaacttgaatttgcagagtgaagaccactccaagtcgagagagatcttgtaggcgtcggtcgcggtgggcacaggagatgtccgtagggagcttttggaggaccttctctttggaacaaacacaaaacatggtacacatttcaccaagcagcattggaagacgg

SEQ ID NO: 36059 - DNA, 497 bp, Zea Mays
ctgaaccgcaacttccccccgcgccgacctgctccggcgagttaggcatgaccgtcctcccccgcggcaccttcgccgcagccatgactgctggcccctcctcggcgctgctcgccaccaccttccgcgctcccatggccgccttctgcctcgcgctgcgccgcagcgccgcttgtatgtggcccgcgcgtcggcccagccgctcgaggtctgcgctaaggagtccatcaccgtccttggcttcctcggagactgagcgggagagagatggcgcgattggcgaacggaggatgtagatgcagaggtttgtcgcatgtctgtaaattgtacatgaaaggtggtagattttgattggaattttgtagggcgtagcatatcaggtgttcgtatccaatctaatttgctttctgtgtgaagtggaaaacatcaaagaaattgtaaaaaacagagaattattttttttatgtaaatgagcattctcgttgaactttaacccc

SEQ ID NO: 36060 - DNA, 329 bp, Zea Mays
cacaaacccgaatagaccgaaccgaattaccctaatagaccgaatgcccagccctaccggtgacgatggcggttgcgcgagccgcgataggcttcagtagtggcggtggcggccacggtagacacgggtcgcttcggcggtcacacgaggcgcggttgtcttcggtgatggcggccgcacgagacgtgggtggcttcgacatccttcgatgacaaactcctccgatccgctggcctcggcgacgtcctcctccaatcctttgtttatgcatgcggctgttggttgagcccatactaagactttttcactaattatggtgtacaatatag

SEQ ID NO: 36061 - DNA, 932 bp, Zea Mays
ccgacccagagaatggagactggagccgtctcctcctgtcctcccgagacccgactcaactttttctctgcacgccactgccaattccccgccagcagcagaaatcacactccgcttcatcttccgctggatccctagtctacgccggcctaacgccttgggacctccgctgctgttctctcgccggtcatttttggttcaggggctgatcgcttgatcggatcggtgtcgcagccctatacatcatacatgacgacgcccggctcctgtcctgcgacaaccgccgccacccaccctcccatgtgcgccgctagcgccgcaggtggatcgcaaaaaatggtgcgtccgcgactagtgctcttcggggactccatcaccgagcagtccttccgccccggtggctggggtgccgcactggctgatacctactcgcgcaaggctgatgtagttgtcagaggctatggtggatacaacacaagatgggctcttttcttagtacatcacatctttccgctggatggtttagcaccccctcttgcaaccactattttctttggagcaaatgacgcagccctgttaggaagaactggcgagcgacaacatgttccagtttcagaatataaaaataatctcaaaatgattgttaatcatttgaaggattgttctaattccatggttattgtgcttattacgccacctccaattgatgaagaaggaagagaaagatttgcacggtcactttatggacagaatgcgaggaagctacctgaaaggacaaatgaaatggctggggtctatgctggttattgcgtcgaactagctagagaaatgtgtataccctgtgttaatatctggtcaaagatgcaggagacagaaggatggcagaaactttacctaagacacctagccagaacctggtaccatggtgaaat

SEQ ID NO: 36062 - DNA, 1607 bp, Zea Mays
aaccattccttaaacccacggagggtccaggtccagccgtccaggctccagaaagaggagaggagagagagagagagagaggaggacgaggagtttgtttggacgctgctccaaactccgagaaaggcaggcacagccagtgataactgtcaacagtcagtctatttaccgcgtctgctgcctgctggctgctgcctcgccccgcgtgaatcaataatcattgaatccattctaccgctgctcctcctccttgctctgccgagaagccggcgatgaggggccgcaagaggcagcaggtgagcgccagctcggccgccgcgctggtgaaggggagggagagcaccaagcagaaggagaaagaagctaggaaggagaaggaggcgagggaggccggcagggagccggcggcgaaggagaggcagatgaggcgcaaggccgggaaggagaaggagacggagacgggcggagaggggaaggagccagccaaggagaaggaggtcagggaagagggcaaggagaacgacaagcacaaggagaaggcgaagacgaaggccaacgtctgcccgcagttcttcaaggtcttcttccccgagcagtccacggagcggctgatcccaccttcagtttgttagacgaatccaagactttcaacaagactcagatcagagacaagaacgtgcctaggagcggtaaattccttctgaggaccaccaaagcaccagttgtaatatcccaaaggcgccgagtaaccgaagaagagaagtgccttgctctcagaaaggcaatggagttcaagtcgaagcaccctttcaccatgcagataatgatcgagtcttatgtctacgtgggatttttcatgaacatcgcctgcgagttcgtcagggagtcgctcccccgcacgagcaagaagatgacgctctgggacccgatggggaagccgtgggacgtcagctacgtctactacggcgaccgcgccgccggctccttcggtggcggctggggtaggttcgctctggggaacaacctggagaagtccgacgtctgcgtcttcgagctcttcgaggaggacaacatgcgggtgcacatatacagggtcgtcccggaaattaccccgctcctgcgcgccagcaacaaggactaggcttgcggctttcctgtcgatctgcggctactagagaataacaagaagaccggttggtcattcacaatgctggaatggaattcggtgctcgttcaagagagagagatgctaataatttcccggaataaataactgactatgaacagaggagtctattagtctatgttcgcttagatttaattcgtaccggtttctactgtttatacaatgtttataaattacagttgcagcagtccaattagctggctttaatcgtgcccatattttggttggaagttggaaccctggtgactggtgtgtttgcttaactgatatcgctgtgaacttgcagccgtcggcgtgatgattcgctacatgaacattattgttgtccccattgattttttttcttcttcttcttgcggtttatggcagaaactttacttaggggtacaaaaacaggagagctgtcgcgatttatctgatc

SEQ ID NO: 36063 - DNA, 2413 bp, Zea Mays
gacgctcccacccccaattttgtcttgctcgttttcttcgtcgtcttcatcctgcctgtctcccttgaccttcttttgttggctgtgagctcaattcggagcacgtcggcctaattttagctcacccggagatcacccccggaacaaatttcttgaggggcagaatcggttgcttgctaggctgggttctcccgcccagtctgttcggttccacgccatggcggtatagccggccacttgcagacagcgtcagatgcccaaacctggtgattgcagcagcagcggcgttggtgggccgagcgccggggacgccaaggacttgccccaacttttcctcagagtgggcgcggccgtcacgctctccgtagccggtctgctcttctcgcggcgccagcggccgccccggcagctcctgccgccgccgccgcgtcctccctcggagtcggatgatgcttgcagcatgaaggccagaacagggctcaaggagcttaggatcctaaaaaatgaggataccaaggcaaaaattatcagtgggaactctgtgcacacgaccactaccactacgacaattaccaccaccgcattagtaccattggcccctaaatgcagaagccttgctgatgatgaaggctatctccttccggagttcaatgacatggttctcagagaatttggccaagatatagatagcattccatccacacctgcagcgagagtaagggaagatgtatcgaatgaccatgaagtccacaaacttagagatttggtgagatcactgcaagaaagggagaagactctggagctacagcttctggagtgttacggtttgcaggagcaagatgctgcggtgagggagcttgagaatcagctgaagattaacaacgttgaatcaaagttgtacttgctgaagattgaatctttacagactgaaaaccagaggctgcaaacacagctctcagagaactcaaaaatattctctgagcttgaggcgacaagaacaaaatgcaagtttctgaagaagaagtttatatcggatgcagaacaggcaaaggagcaaatcatttctcttcagaaaatggtcgactcattgcagaacaaacagactgatgaggagaaaaaatttattgagtttgaaaataaactgaagagactagaggagctggaaaaagaggcaacagagctaagagcggcaaattcaaggctgcagcaggagaatgcacatcttattaggcgactggaggttacacgcctaccccctgtacccaagcccaaaactagtatggaggtaaaagcattggaggaggctgatcggttgaagcaagaaactgataggttggctaaagaggttgaacaacttcagagtggcaggtttgcagatgtcgaagaattggtatatctgaaatggataaatgcctgcctacggtatgagctgagaaacaaggatgccccatcagggaagactgttgcacgagatcttagcaagaccctgagccccaagtctgaattgaaggccaaacagctgataatggaatatgccaatgtgggtgcggaggacagtcacttggggcatgtcgaattcggttcagagtgctcttcctcacgggcttcgtcaggtgaaccggatgatgtgtcaattgatattgcttccatgacaaagcatactaataaaaaccccaaaaagaagaagttcttctctaagcttcggaaactggtgctgggaaaagggaaagagaaccgtgaaatttctactctggagaggagagtgtctatttcaagttgttccttcgatgacttcactggaagggattcacatgatagctattcttcgttcatggcagaaccaaacatgcctgatagtcgacggcatggtgatcatggctttggtacacattcttctttggacagcgcaaaatctagtcctcttggcacagaaattgtaggtgaaagaagtgaccattctgtggtgaagagtgtatcttctagagaggaaaaggtaaatgcattcggtcccagcattggccttgatagtagcaaggccatacctgaggatgttgagatccataaatttgctgatgcgctgatcacatcaaggtcaggttccatgtcatcaagaagatcggcatccttccgacactgatataggagtcatctgctactgacccctctgcctggatgtatatttctgccagttcttgatggggggagttataggagatgttactggaatataagttgtcaatactttatttttttgtaccattgcgtatagggtgtagtttacttacctttaataccaactcctactacctgggctcgtcatgtgtaccataaaatggcacatttcaatggcaaacacaagacaattgtaacaccctaaatccatcaattaaggtaacctagattatattattaa

SEQ ID NO: 36064 - DNA, 5284 bp, Zea Mays
gtataattgattactatttcgtttctgtttcatgtaattaatgtatgtaattaaattaattgctcccggccatagcaagcaccagcaagaagagagagacagagagagttggtgaagtcgggggacatggtttctttctccgcttcctaagattcctctttcttccccaaccccaccctacgccttttgccacgccgcacggccgctccctcccttcatgcgccgccgtatctcaggtcagcatcgccaaccgcagctccacctcccgatcccagccccaatctaggaggaggaggaggaggagaaggccactttcaggattctgacgaagccctccctccctcggccgcatcgcatgctaccacgactgaccaccaccagcagcagcagcagcagcagcaggaggaggagggcaggatgttcaagcttcaccgccaccgctcctccgaccgcgtcggcgagcgcttcgacttcagattctccaacttccgcgccgtccaggtccctgcagtgtcagacaggctcttcctttccatagtttcagtcgacagcggaaggacaattgcaaagtccagcaaagtagcttctcggagtgggatatgccagtggcctgacacaatcttggaacccatatggttctccaaggacgaagtctccaaagaattcgaagattgccagtacaagattattgtttccttgggatcgacaaaatctggcattcttggggagatttttctaaatctgtctaattttctgaatatagtcgatccaaccgcaatctctttgccactgaagagatgcaacgccggaacagttttacagcttaaggtccaatgtcttggcacaaagtctaagctgagatcactgagggacatggctccccgtctcgatgaccgtagtccaacgccaaccaatgatgagatggacaataagtcagattgctctgatggtatgttcaacaggagtgttcgttcttcatccgaaaatcatctggttggaacttatcaagatgaatctggaaacagggaaacaagtttctctgcaccagggtcccatcggagttctaattctggagatagtactgcggatagaacaaacttctctcctagagacaactctagtggaggactttatgtgggaaggcaggattctgctagttcctatgctagttatgttagtgctggtcgtggcgatgatgggcttagatccaataattcatcttttagttctcgggcttcaggcccaaatttgctgcaagggaatactccaaaaatattttcaaatggcctttctcaattatctatgggggcatctgactcatctaaagatcttcttgaagctgctgaagaaacaattgaggagctccgtgatgaggcaaaaatgtgggaacgccactctcgtaagttgaaggctgatctagagatgctaaaaaaggagtgttctgaaaaatcaaagcaacatgctgagctagcaggcgagctatctgctgcacaagctgaacgggattcctataggcatgaaatagaagaattgaagtcatccttacaagatgtaaacacacggcaaacaattacaggaacacctaaacgttcagactggatagacctgcagaaggaacttgaaggtgaggtgaagtttcttagagaatcgaatgcggacttaaccatacaactaaacaggactcaagagtcaaatatagagcttctttctattcttcaggaactggaggaaaccattgaagaacagagagttgaaatatctaagatttcgaaggtcaagcagactgctgatcctgagaatgggcttttagtaaaagaagacaaagaatgggctaagaaactgtcaatgaaagacgatgaaatcacagttctgagggagaaattggatcgggctctcaacattggaaatgcaggtggtgctggttccaatgccatttatcttgaattggagaaagaaaatgaaattttaagggctaaaatacaagagcttgagaaggactgctctgaactaacagatgaaaatttggagcttatatataagctgaaagaaaatgggctcacaaaaggtcaggttccacgtatttcaaacaacaatgagctgcaatttgaaaagcttacatcccggattcgtcaactggaggaggaacttaggaataaggaaatgttaagagacgacagtttttctgagtcatcaacgtctaatgcagatgagttacagagaaaatgtgctgaccttgagctgaagctgctaaattttaggtctcaaacctgtgagctggaagaaaagttccaaaaaagccaagaggaactggaacaaagaaatctcgagttatccgaactgagaagaaagctaaacggtttacattctactgaactggaagtttttgaatctggtgcgacatggaagtaccaatctagaacagcagatctagaggatactgaacctgagacagatacgctaaaggctagatttgaactgcaactacaggaaaatgatgaccttcgaagttccaaggttgagatggaaaattttatttctgagattcaggcagagaagagtcagcttgaggaacgcctgtccgtgtcgcttaaagaaagcagcatcacatctaaatgcttggatgaagtgcggaaagatatccttgtgctttccagcagtatagattcccatgtttcagctaataaggttcttgagaggaacataattgagctagagagctgcaaagctgaactagagttgcatgtatcagagctggaacaggaaaacatagagttgtcagaacggatatctggactggaagcacaattgacttatctgacaaatgaaaaggagtcaagcgagctacagattcatgactccagatcgctcatcattaatctcaaagataaagtagagcggcagcaatccgagatggaaactcaaaggctcgagtttaagcagaaacaacaagaatctcaaagaagattgtcagaaacacaggatgattctgaagttctgagaagatctaattctaaactacaatctactgttgagagccttattgaagagtgcagttctcttcagaatctaactgctgatctgaaaaggcagaagttggaaatgcatggtcatcttacgcaaaaagagcaggaactggatgagtcgaaaaaaaggaactttgagtttagcaaaacagtggaattccttgaggcaaagctttcgtcactacataaggacgtttcttctaaagagcaatctttattgtcagaattggagagtatattccaggagcacatggaacaagaagaaagaattaatcgcgcgcatttcatgctcaataagatcgagaaggaaaagactcttgaagtagagaacctcaagagggaggtcgtcagcctcactgcacaggtctcctccacacatgaggagcgagaaagtgccactctggatgctattagagaggtatctgtcctacgagcagacaaggctaaacttgaggctaatcttcaagatgtcagtacacaattgagacattacgagtctcaattggaagacctccgaaaggagtctaaaaataagattaaagggttggttgattcccttaatgcctccaaacaaagcgaggaaatgttgacatcagatgctgaacatatgaaaaagttgatggaagctgctagatccaatgaagacacgttaaggaagacttctaatgaactagaattgaagcttaaatccagtgattatgagaaacaacaaatgctggaagaaatatctggcctgaaactgcaggtccagaaaataatgaatcttcaagatgaggttttcaaacttcagagttctcttgatgaggccaagttcggaaaagggaaactggaggagattctacgctcggtgaccgaggaatgtgaagaactaaaagcacagaaggctatgctaacagataaagtttctgatatgcaggagactttgagaaatggtgaagaagaaaaacgaaacagaatagctatgcaggcaaagctcgtgaggctggagagtgatctgtcagcatcagaagcatcacatgtacatgaagcagaattaaagaacgaactcagcaggatcaagagatcaaacagtgagtaccagaggaagatacaatctcttgagcaggaaaatgaggatctcactagaagagttcaaactatggaaaagggatttgagcaaatgtcccacgttaaagagaaccttggaaagcaggagcttggaggagataaccaggcagccattcagtcaaaaattgagttattggaaacgaagctcgcagaggcattggaggaaaacaagatgtacagagctcaacagaagagtccgatgcctgaggggcaaccttctgcgggagcgggagacggcaaggagggcaataccgataggattttgcaattggaaggagagctaagagatatgaaggaacggttactgaacatgagcttgcagtatgcagaggtggaggctcagagggagcggttagtgatggagctcaaagccatgaagaaaggcaggtggttttagcaatgatggagaactgttgcctgacataaaacagacacaggctgactgacagcacagatgggcatgtcatgtgagagcaagcaaagcaaatgcaagtgatgcagagcctggacctgctaactggtgctggaagatgtgtatcccaagacgacactgaaggtccctgtgaccacccagcgcccctacatgacatgatgatccaattgttattggtatttatttttaatggcgtgccttttcatcttgtatataatatacgccggtttgtgaggagcttgactggtcagttgttgatatgattactgagatcgatgactccgatctctctattttacacccttaattgtcgataaatgtagttactctattctttctttctttcttttttgagacagcagtggagtggctgggttagtgggtagcagtcattatgttgcactcatacaatattgttttagtttgggtgtagaataatgtgacgaagggagacccatttgttcatgtaagtttgtttgtttgtttgtttgtttgtttttacagcgtagatcacggataataatgaagtttccgttgtgcggttgtggtacgtgcatcgcattattgatgaaacttttaacctcaggagggcaaagtgttgccagctgaattagggaccacacgattgcattggtttagaagtgttgtaactaaagatatactactaattagctagtgtttgtactacatctcctctcaccctggtaccagtgcacttgcg

SEQ ID NO: 36065 - DNA, 2962 bp, Zea Mays
acctagattgcgttactctcatggatggcggatgcgcttccttccgttctgctaccactcttcttcgttctcgtccccgcaggccgcaggatttttccaccacacacatgcatccttttggatttgtttagttcataagcccttcagactggcagatatcaagaggtcatacacatctcgcacctctaagtgggtgtgggtctgcaacaattctgcaaccaccttatccttgcctttgggagtaagcccgacctacatctggaggcttcgtcgagccttggaaggcctttttgttgattacggctaatttccaatggcagctgagatgtaacaaatttgctcagttcagttctctaggaaaagttcccgtggttcagcaatgtgattggtttcataggttttttcgtgtgttggtgatcaaagcaatctggtgtaagcttgcgtagttgacatcagagtttgtttcttatggttaggttcttttgcttttcatcctctactgcacatcacagatccaaggaggttttttccccagcagatgaaaccatgcatgcagcgtcaaagaaggattatcagttggagtccatgactggctcagttcgttcaaaccagatgacagaagaaaataaccgttcagctgttagtggtcattgtggcagtagcccatcatctcatcaagaatgctgtaggtcagaagacttgaatagatatgtgtgctctgatgagggcaaggaggttgggcacctaaagaagagtcagtcgcttgtaaacatgcttcaaaaggatcatggtcgtaattctagcgaaggctctgaggttgatgttacaaaccatgaacacaaatatgatccctctaatttgaagagatctgaagttgttggagaatctagtaagctgtacagactgaaaaatgaggatgattttgatgcctcatctgacctaatcagccatgacttttgtgaacctttaggtgatcacactgttgattctgatagccatcatgacatgccttattcccaaagcaatctcccaagatcacaatctgcaatatttcagaatgattgcaccagtgatccagaaggttctgtcgattctgagatactagggtgcagatctgttgacggtttatgttcactgactgatgagaaatttgactacctgagaggtggtgaaatgtatcactgtaaatcaaatttggatgtttattgtgcaccttctccaaatatgcaccgggcatcaaacattgacgaccatggttcagtaggttgctctgatgttgctgcagagggtcaacggtccactggaagcacagaagaattttttgtcagggatgggatcctagtaggtcacgaatactgggatggcaaatacatttgtggcgatcactcgctgggtccagttgcccttttctgtgcagattattaccattctgggaatgatgtcgacctcagtgaagctacaggtcaagagagagagctgtcgaacagagatagcacactccaccagtcgcttgtagtggaagtacctgagtcggtgagcatttctgatacaaacgacattagtggggaacctgaacacagtagaactgacattgatgaggacccaagtgaacttactccaagaacctacaatattaaaagaatcgaggattggatcaatcagattgatatcaatgatatcgctttggatgggcaaggagagaattcagtttctgctttagccaaatctcgtgaaccgatggctggcgttcctgctgtgcggcctgatgctaaaagcccgcttggtatggagatagcttacacttatatttcgaagttaactcctgcttcatcatcggcacagttggcaaaccttggtttggttgcgatcccaagactgagcgcattctcaggtttgcgcgtattaaacttatcagggaactcaattgtgcgagtaacagcaggagctcttccaaaaggccttcacatgttaagcctgtcaaagaataacatatcaacaattgaaggccttagagagttgacacgattgcgcttgttggatatcagctataatagaatatctagaattggccatggattggcctcctgttcctcgttgaaggagttatatctggccggtaacaagatcagtgaggtagatggtcttcaccggcttctgaagctcaagattctggacttgcgccacaacaagatttctacatcaaagggcctcgggcagctagctgcgaattacaactctctagaagccattaaccttgccggcaaccctgcacagaagaatgtaggcgatgagcacctgaagaagtacctgcttggtctcctgccaaacctcgctgtgtacaacaagcagcctattagggcgactggatcaaaagacgtctcggaccgccatacccgcaagatctcttcttcgcaccattctgaccgtggtggcagacccgaccgcagatcttccaggttggtgggtgccccgtctgctcacaagccacagagctcgcggcatggacgctctggatatgtgtcaagctcagcgctcaagtacacgagagcccgcaacacgcacaagacctcgctggggtcaaggccccttgaacatgcgagtgccatagatctggcgaagcaaacccagacagagggaaggacacagtaagatcagtcaagcacgaccatcgatatactaccatggtattgttgtgaagtaaagcgaggcaccagttttgctggtggattttttttctctctcacgtgaataaagctcaaaacagtaaacagagcagtgctttcatatcagcccatatttttttttctaatattgttgagtggtattgatggcaattgggaattgtatgatttacttgccttatgaataaagcttgaaagaaacaaaataaagattagtattttttttcaagatgtcttctataagactgtactattgcttggtggtgaaattttgtgaacat

SEQ ID NO: 36066 - DNA, 2020 bp, Zea Mays
cacctctgagaggtctccaatagttaaaggcatggtaactgacttcagtgaggaaatgcactgccagtttctagaaattctacgcatattgatggattcttttactacgtctggagcacatagagacgtagttattgagattttctacgaaagacatcttgactatttggttgatgtaatagcatcctcttgtcccccgaggagcttgtctcgatcatcatctaactcggtacatgttggtggaaatgctgaaggacactgtatcaagcctgagattttgttaaatgtttgtgaactgctgtgcttttgtgttgttcatcatccctacagaattaagtgtaattttcttatgaacaatgctatcgagaaaatccttacattgactcaacgaagggagaagtttttggttgtagcagctgttagatttatgcgtactattatatccagaaatgatgaccatctcattcgccatgttgtgaagttcaacttgctgaaaccaataattgatgtctttgttgacaatggggagagatataacatgctacattcaggagtactcgaattgttggaatacatacggaaggaaaatataaaaactctcattatctatgctattgagtctttctgggatgaacttgccatctttgaacactttggaagtattcaggccttcaaactcaagtatcaacagtacctggagagcgctgaaccaaggttgaatgctagtgtgcctgacatgagaaagaaggcagaacaaagaggtcttgagaaggaagaggaagactacttcaatgaggacagtgatgaagaagattcaggctccggccggcgggctaaacatgcacagaaccaaaataacaagcctaagtccaaggtccccaatggaagtgaagctgatgacactgatggcgcctctaggcctaaatctgctggacttgtggactatgacgatgatgacgatgaggacttcaatccaccaccaaaggagccttctaggcctgcagaggatgatgtgcccttaaacatatccccgttgaagcggaagccagtgaatgcagtggatgggaaacattcagacggagagggtcgcaggaggcaaaaaatagaaactagaattagttgtgctaaaattgctgctgttactagtacagctattaagcacacagatctacaaaacaagtatgcttcccacttgcttacgtcagccacaccaagtactgaagccaatggtatttttagtgaacatggtactaactatgaggagcaacaacatcctatggagaacacagaaacttcacgacaaactggtggtgattgtataaaagatgtgggcagtatgtctcccgagaaggccgtaaatactaccaatacaagcgattcggagccttattcagtaagatgactactacacagctggttggtccatgtacccatcctgtgctgtggtcaacaggaaggaatcagaatgtgtttggctccaagcgctgaatgcatcgatatcatgctggaaacatgattggaggtgacatagattgcagctacctttacatctcaagtaaacatggtcactccatccgcaaagaagaatcatgtgttcaaccagtgtcaattcaacagaataaagaagaatcatgtgttcaaccagtgtcaattcaacagaataatctgttcagcagtttgctttatccgtgctcattgtactacgaacctccgccgtctacttgaatatcaagcctccacgggcagcaaagaatggcgcaaattattgagactcgacagcaatgagcttgatcagtatgttcagggacggtccggaggtgtccttgagggggtcgccgatgacggcagctttctgagcgtgcgacccaaccgaggctatatctaacaaactgcactatgtaaacagtctacattgtaaaataatattttacacggttatatacactctatttaagcatgatcttagtgtggttgtttaaacatggtcttagtgtggttggatgcaccacttgcccttgtt

SEQ ID NO: 36067 - DNA, 2510 bp, Zea Mays
cagcccaactctctcgcagccaatcccgccgctccgccgcccgcacccaatccgtttctctcacccccgccactcgccagcaacgcggacacgccctccgccgctcttcctctgcaccccagtcctctcccacaaccacttccggcggccacgccctcggcttctccgtacttgctgctcgcccgtcccaccaccataattttccaccagcgattgtaaatttgtgggaggcacattcgccgaggatggctgtaaccctacttcgagggatgagaacgccgataccattcagatcgaactccggcttcttctccactgtcctacggcctcggttgtcccgcttcacgactagggcggagagtgcgcaggccacagaacccaaagcggcgcccaggtcaattcagctggcgaccaaggaggcggctgagcagaaaacacaaggcttcgaagccatcatcgggattgagacccatgtccagctctcgaccgtcacgaaggcgttctgctcctgcccttacagctatggttcccagcccaacagcactatctgccccacctgcatgggccacccggggacgctgccggttctgaatgagaaggtggtcgagtgcgccgtgaagctggggctcgccctcaactgcgagatctcaatgacgtccaagtttgatcgcaagcagtatttctacccggacctccccaaggggtaccagatttcccagtttgacatccccattgccaagaagggttgtgtcgatttggaccttccagtggagtttggtggtgggcataggaaatttggggtcacaagggttcacatggaagaagatgctggcaagctgcttcattctgaatccagcagctactctcaggggaaatccagagggaatgaaaagaattacacagcgtctcatcacataaaagtacagcagcttcagttattgatcagtggttgctactttggctggttaggttgacctaaacagggctggcgtacctttgctcgaaattgtctcagagccagacatgagaacagggatagaagctgctgagtatggtgctgaactgcaaaggattgttaggtacctgggagtgagtaatggtaatatgcaagaaggttcccttcgttgtgatgtgaacgtttctgttcgaccagttggacaatcagaatttggtacaaaggtggaaataaagaatatgaactcattttctgcgataaatagggcaatcgattatgagatctcccggcagattctgctccataaagaaggccaggctgatcaaattgtacaagaaacccgcctgtgggatgaatcttctcagaaaacttttacaatgcgaaaaaaggagggacttgccgactatagatattttccagaacctgatcttcctgaagtagttatcactagtgactatattaatgaaatcagcaagtcaatgccggagcttccagaagcaaagcgtaggcgttatgagaatatgggactcagcatgcaagatgttctgttccttgctaatgatgataatattggtcatttctttgattctactcttgagcatggtgctgatgcaaagctggctgccaactggatcatgggtgacatcgctgcttatctcaaagatgaaaaagtatccattgatgaaattaaattaacacctctagagctttctgaactgatagcatcaattaagaatggaactataagtgggaagatcggcaaggagatactggccgagctcattgccaaaggcggaacagttaaggctgtgatagaagagaaagatttggttcagatagcagatccagcagcaattgaggcaatggtagataaagtaattgctgataatccaaagcaacttgagcagtaccgtgctggaaaaactaagctacaaggattttttgctggccaggtgatgaaagcatcgaaggggaaggccaacccagttttgttgaataaaattcttggagagaagctaaatgccaaataattatttttacccccatactgaatctcaggcgtccatgaagaatgggacttcaaattcatagaatgagattaatgtgaacgacgtagaagttttgtccacaatacagatattattgtactaagctgatactttaaaagggcgtgttcattatattttatgcgatagcttgccctaatcatttgtgcagtttccatggattgtgtactgacttcgctgtttattttttttcgctctctgcaacccacaatatttataacaattttcattaaaccaaaaatgtattctctgttctaaactataattcgttttagactaaatatacattcattaattaatacaataatttgtatgaacgtctacattcattatcaattatggggaaaaaaaaactagaaaggactatattttggggaggaattattgaacagcagcaatgacctgacctataagaaagagtgtttggtttgaagaatttgaagaataagttagtctattatctacttatctcttactttttaatttcg

SEQ ID NO: 36068 - DNA, 1269 bp, Zea Mays
ggaacttttcaccactaggctagctgaacctgaagacgtctgccttcctgccctttatttaagtgctggttcggtgaagatttccctctgccctggtgttctagccaaagcttgcagtggtgtgagggattcatgtgtattgcaagccaaagctcctctcccactgccaccaagttggcactgtccagagctgtgtgcgctgtcttcctgtgtttgtgatgaccacaaccaccaagttcaccccaccatagccagaacattctagggagttgctggcctatatgaagcttgttccgtaatcatctcagaactcctaccagaaggagtgaagattcaagctgaagtggtgactgaagaggaatctactctagtggctgctgatcaagtggaggagccatctaactggggttaatagagggatcgagtacctcttcactgcaataaggcaagccccgatgcatgcaaccccttccttgtgttttgaaatgatttttacacactttaagtctagtgaaatgtgcattaagtttataggaattgtttgaaaactatttgatgcatcgactaccttgatatacattcatgttatagatacttctggtgaagtatcaaatattgtttacaaaaatgcttagccccgcttagatcttgtggatagaggttgtcctttgcaataatgcctagctcaggggttatcctgagaaaggatgacttctacctgcaagaatattttcattgggagcatggtggaatcttactacaaagttccctatagtgctctgttcatccttagaaacataaaacaatcctaagggtggaagtacttaactcgagacttgggttaggaacaggtgatgctccacccaagttaattaaggattggatgcgtatgtaggcctgtatgatcaaggactatcttaactaaccacatgccctggatatgggacagggtaagcttgaacccggctattccatacatgaaaagacaatcgcgcactgggagtggagagatggcgagagtggcacgtaccctcctggcaaaggaccgcctaaaaggggttgtgtgctctcgggtggcactgacctgttcatgtagtggaggatccgtgggaatggtagacatatgcaaaagttacgagaaacatatgtcgtgtggttagagatcctcagctgaggaaatcgattcggatcgccgttatatccccggagagtggagacttgatctccgacctacaacctaagtcaggatgcaaacattatgaataaaaa

SEQ ID NO: 36069 - DNA, 1863 bp, Zea Mays
aaggtttttttttgcaagatgttcaccagcagctgagcgagcgttggcaggccacgggggctgtgctgtgctgaaggtcgtccgtagcgtgatctgctagcgctcgcaattctcctctccaccacgccggcgacggcagccggtgaccagtacctacatgtccagcctgaggtcgctagccagcgcactgatcggggacgccgcgaggcttcactcggccactggctctgccggggaggagcctgacagggtctacggcgccgtgctctgccgggcggactccgctggtgctaactacaggcgccgccggggtgcccttggcgccatcgacggcgacggccactcaccttgcgcgctccacagcgacgtgaccgtctactccgagctgtaccatctccgtttctctgacaggaacttcctcgccaacttcaagaacgcgccgaaatgggccgacgtcaaattatggtttctctcagactgctaatggtacatagcagatttacaagggagtatttactgatggacaagaggtagcaataaaaagactgtctgctcacaacaagacgggtgtttgttatggcttaaaattagattctaaccgtcagaatccgattcttgtagccaaaggcttcacttcttagcttgtttctatgagaatcgtttccatgaaaatcactcaaataatccgcaaataatccgtcaagttttgtcacgatgagaaaaattcgttgctttctagatcctaaactctataaactattctagcttcctctatagtctgcaagtaatcccgcgatatttagattatcttgacaactagactatacaagaatccagattctcagaaaagctctttagaaaaaagctataccaaacatacccctttagatatcgcgatattcaggttttagcaaaacttaagcacaaaatccttgttagactccttggtcgttgcatccatgaagagaagatgctgatatacgaataactgacgaaccaaagcttggaccacttcatttttgatccaatcatgcatgcatcacttaaatagaagagaggagtcaaaatagctgatggtatagcccagggactcctgtaccttcacaacctctcctgaatacgcatcgtccatagggtcttgaaagcaagtaaaatcctgttagatttctgatctaaaccctaagatttctgatgttgggatggcaaggatatttccatcggatgccactcaagcaacagccagcagacttgtgggcacatagtaaggtggatacatggctaatgaattgcatctgatggccttctctcgatcaagtcagatgttttcagtttagtattaatggtgtatctgtatggtgttctacattatttccttccataaagtattgaactcaaagtacagggggtttcctgtacctccctgttttattgctgttgtctagcattttagctacttctaacagctaaagatacaccatcatacgcatgtaaaaaatcatttctcttttcagacctgggaactgtggaaagacaggagatggaataagttcaatgatcaatcatttggtgatgactacgaactggaagagctgatgaaataccttgctgagttgctgtggtattgttgtgtgttatgagaaaaaaaacaatagatcatcctacaatgcctgatgttgttgcaactcttagcagtgatggcatcacattgccagaaccaaagcagccagcttactcctatgcgaaattaaatgtgtcagtcactgtattgagtagcagaaatgatgtcaccatcactactacaaatggcatataacagaatgtgaatatactgttaatcaagtgtgagctacaggtcttggtcat

SEQ ID NO: 36070 - DNA, 3556 bp, Zea Mays
gtgatttttaggtaacccatgcccgcgtccgagaccgagagacaaggccaaaatcatcgctgcgccgccagtggacgcgttcgactccggccgccgcccctgctcctcctgcccacccgcaccggccattgccctcgcctgctctgccacccgcaccttccaccgcccccgcgtgctcctccgcaggtctggccgttgcacccacctgctccccaccaccgccgccccacccacttatccaccgttgccggtcgtcgccccacctgctcccccactgacaccggtcgagtttctagaaccttccagacctccagttcccgacctcggcgccatggacctggacccagaggggatcttccgcgacgacagcgatgaagacgaagacagtgtccaggagagggaggcgaacaaggagatggttgtctaccttgtcgacgcctcgcccaaaatgttcacccctgccaccacccaggacaatgaaaagcaggagacacatttccataccattgttaactgcatcacagagtctctgaagacacaaattattggtagatcttatgatgaagtcgcaatatgtttctttaacactaaagagaagaagaatttacaggactcagccggtgtttatgtttataatgtcggagacagagagcaacttgatagacctactgcaaaactcatcaaggatttttctttgatagaagattcttttatgagcaccattggaagtcgatatggaataacagctggatctcgggagaataccctgtataatgctctttgggttgctcaggcgctgttgcgcaagggatctgtgaagaccgtgagtaaacgaattcttatattcaccaatgaagatgatccttttggtactattacaggagcagtgaaaactgatatgattaggacaacacttcaacgtgcaaaggatgcacaagatcttggcctgtctattgaacttcttccactgagcccgcctgatgaccagttcaacatgtccctgttttatgcagatttgattggtctggatggagatgagatgaccgaatatttgccatctgctggtgataagctagaggatatgactaatcaactgagaaaacggataatgaagaagcgcagaatcaaaactctttcatttgcgattaccaatgatgtgtgcatagaagtcaatacatatgcgctggtccgtcctactactacagggacaatcacatggcttgattcactaagtaacctcccattaaaggttgagaggtctttcatatgcaatgatactggggctctacttcaggatgcacagacacgtttccagatgtacaatgacacaattgtcaaattttctgtacgtgaactctctgaggttaaaagggttgcaagccatcatcttcgccttataggtttcaagccattggattgcttgaaagattaccataacttaagaccatcgacatttatttatccgagtgatgagcgtatatttggaagcacctgtgttttcgttgctttacatagctcaatgttacgtcttggaaggtttgcacttgcattttatgggaatccaactcgaccacaactcatagcccttgttgctcaagaagaggttacttcgtctggtcgtcagtttgaaccgcctggcatgcacatgatctatcttccatactccgatgatattagatatcctgaagaagttcatgtgacttctgatgatgcaccgcgtgcaacagatgaacaaatcaagaaagcttcgaacatattcaaacgtattgatctgataaatttctctgcatgccaatttgctaacccagaaatttacctacagagtcagggtcaactgccaggggtagccaatgctattgaggaattcaagacttcagtctatggtgaaaattatgaccaagaggaggcagaagcggcagcagggaaagcttcccgtggtaatgcttcaaaaaagcggaaggaggtcactgatgcagctgcgcagataagtgctgcttatgattgggcagaacttgcagacaatggaaaactgaaggaaatgaccacggtggaattgagatcctacctgaccgcgcatgatctcccggtttctggtaagaaagatgtacttatcagcaggatcttgactcacctgggttttatgctcagggtactgttgcatgctgcgaaatggctttggcttcaaatgagcttggagacaggagaagctgatgaagtcatgtgttgggcaatccttgtcatctatagggtgacttcctgggctttaggtactcgctttcgcttccaaccagcgcgtcctcagccagcgctggaggccgcccagccgcgcctgcgaccgcagaccgcgcgtcctcactcagccagcgctggagatctcctgtccgcccagccgcgcctgcgacagtgcgaccgccctcctgcccccagtggcgagaagggcatggacattgactgtcacacggtagagttcgatgatgtccggtatcatatccagttttctatgaggaatccaaaggtaatggtgttgtcagttgctttgcctctgccacctcctgaagcgattctgtatgatgggctaccactaggtgccattgaagctataaaagcagcatatgggccagttgtgcagattcttgatcctccaaaggacgggtttgatctcacaatgaagataaatttgacaaaacttccgctagatgaagagcaaaggaatactatcttgacacaaattgcatctattagagaggttgtgttgggtgcaccactgaagctcctgctgaaacatttagcctcaaagacagttgcacctaatgttaacaaccttgttgctcttgttcaccgccctaatgaatcatttttccttgctccccaggcagataaagttactattgtgtatccaatgagattccaggactccattgatattgttttagcaacttccttcctgcagcttgagaaacagagggagcgttgggttcctacggcactgacgcgccatggtcatgatgtcacggtgctccccaagcacgtccgcgtgagtgagcaggatcgagggagcaacatcctctctgggctccggcggcaatgcaaaggtgaggctgcattgcagagagtacggtgtgaaggtgacacgagttggacaaaacagagaagtgtgaaatgtgtggacagtgttgttccagatgtgtggacgagaaggaggcctgaagaggtggcccagtagcctgggtggagtgactatctgttacgtacgtcgtagcggctgtaatatgggcgattgtctgtcatagctggttggagatgttgccgctaagcatgatctccggcgatttagaacactggttctatcagatttgtgccttggaaaagcatttgcaaatattgggctcttcaccattgtaagtgcttcatatgggtagcagacctcaacagatgttggactgcaaataggcttgagaaaggaatcttgccacacccaagatcctgccccttttgtgatcaggatgaggaacaatccagaatttcttaacttcatgcgtttttgcaagatgtgcag

SEQ ID NO: 36071 - DNA, 2991 bp, Zea Mays
ccccatcctctctttctccctcgcgcttgactcccctgccaccccttcccgtctccaccccgacgccgaccgcactccgctccccgtccaccatcccagcgtgatggctgggaggaccgcgcctgccccctcccctccttctctctcacgccctactccctcgccgccccttcatcccagatctcgtcatgggcgctaccatgaccaacagttcggtggagcaggcgccgcacgctacgccatgggacggagcccgtccccacccgacaccgaccatctccaccccgagcccgtccgagaagtgagtgatttccatttcttcgattggatggcgtgcggtcgggcctccgcacctccctgtccccctcccctcctgcggcgatagcttcctcgaggagatgagcgtgccgcccccatgatcggtctacctccgccgcccccgcgcgcaccgcaaccaccacgcccctcgtgcaccttctcgcccgagaaggtggtttcctttggtgtccccacgtgtttttgtcgttgcaagttgaactcgccctttcatgcctgatattttgctcagactgcattggagaatggctacacaaagatcatgctgccaacatgtgcttctggaatagcatgccctatgctatctgcaactataaaggctaagctttaccagccgatgtcctgtatgtcgatgcacgatgggaggtacttgtggttcttcaacttcatggttgtctggcctagccgccatccgcccgcgcaaacgcggtacagctccactacagcagcaggaggcggtgacgtcgccaaaggctggcagatacttgatggctcttgataagaagcctattgcaactaaaggccaccacctttgttgtcctcaccctagccgaggacctcatctcccagggaaccagcttccagtgcctcttgtaccgatcatcagcaagggagtgctagaggaggaggttatggtgagttttgtcgcgactaatggtgagcccacgactacggccacatcaaagctggtctggtggaacctcgtggagcagatgacgatgacgccgacatcctgcacctctgctgcgacgctgccgaccaggacgcgggcccctccgtcgcgcgcgctctacaagtctggatccatcatcgtgctcggcaagactgacttccttaggccagacatggatcccataaccagatggacagccacaaagaaaagtggcctgattagctacaagaagctcttgttccatggactcgatctctggaccgcactatcgttgcctcaacccctaggtcgtgctgccctctggcctcctcatcgtacaattcaccaacatctccaacgtaagtgcagcaggttcagtaatgaactcaaaagtggcatcagaatactctaagagttttttgttctttttgcctggatatataccgagggcaatgcattcaaaactcctatagatgacgaatcccatctctccctcttttcccggacatcgatcccagtctcttcttcaagcaagagatggagctttccttggtcgggctccaaaatgctaggaaaacatcacttgcagcagctcgcagcgacacccccgcctcctcatcatggaagttgtatctgtttcagaataagcaagtgtcgtatttagtaaaccagctcgtgttctaattcttttgcatgcttccattttgttgtaggctacaagaacactttgagtaggtgaagaggatttgcgacactaccacattgtctttggccatgcatcatctcagtgataagataacaagccaactagatatttcaaaattgactgacaagctacagtaagggaaggtagactcaactgcattgacaccaaaggagaagtatgaaacttggaaggagattaaaattatgagtttcagaaaaatagtttctccaatgtgggcaatgacattgcttagcttgtatgttagagttcatgtcaccatattaggcagaatctgacgcctttaatgtaaatggacacaagaccttcgttgcaatggatgattatcttgtcactgacaaaatcactgcattcatagtgcaaacgcaacatgcagcaactgaagtccttaaagaaaagcaaccaaaagactgtatgaaatggaccaagtattgcagacaatattacaaatattggacacgttcatggctctttctgaagatactcatggagaaattatcttgtacctgagaatcccccttatttttgcacaattgatggttgtgtcctgtagtggctttgataattcatcactcctaaacgattttagaaagctataccaactaatgtgtggaggacctgggcaaggggtggtagtcgcgctggttcgctatccacggcggcaagccgcctactcgaagatcccacctccgaggacgccgctacggggaggacatgggcactaatcttgaactaaaactaggggggtgtctatgacggctggttccgcctacaaccacgtggacaacttcttgcccgacatcatctcccagcttgttccacctacaaccgcgtggacaacttttcacccgacatcatctcctagctcctcgcattcgccaacaagttctgctatgagggcttgaagccaacctacgacaatcgggtcacaaccatggtgttggctcttgacgacgcctgatccctcatcgacatcggcctctaggaggcctcccacctcctcgtcacctcgtgcctctagcattcctatgggagcccccaaagtcactcacccacctagacatcgcccgtgttgttatttggtggtcagtatgtcacaatatagtcagttttttttgcttatgttgttggtactgattttattggatgtgaatttatttatcctttcattgtatattggaattcatgacattatctacatatgtacatgcttacatatctattatatttttgtataaatatttttttgatagtttttaatttgtatggcaaagcaagg

SEQ ID NO: 36072 - DNA, 490 bp, Zea Mays
tatgaatatctccatgccgtcgtctcccaaaaggggctctcaaagggccttgcatctccagcgtcggcgtccacgacgccggggaccagcgaccatgcggccactttcctgttgcgctctcgtccgtctccacaatttgtgcagaccaaagacaaagtaagagtgtgctgaaagaagaaattgacctacttaaggtggaaccaaacgaaagcgaagtggatctagaaagaagcatttaacgactggccgcaccagaccaaaccgtagcagaactcaactgaaggcaactgcgggcccgcggccgcaatgagtcaacagatgaagtgtttgagaagacaaattattattctttggggagagtgcataaatcttcgataagcgaaggaatgcagtctatcagatgatgaaaagcagaaggaatcccttctcagagagtgaaatccaaaactgcgacatgagaaacacaacgcgcgcgaagggcgcgtgagat

SEQ ID NO: 36073 - DNA, 2018 bp, Zea Mays
cgagtcacgactcacagcaactgaaaactaaagaaaccgctggcggacgcccaccaaaccaaaaaaaaaaacaaaaaacaaaaaaccaaaaaaccccacgcctttcctcgccggcgaaggagaagccgcagcgctgctcccacgccccctaggagcgcgtgcctccattccatgtgcgcccgcccaccggaggataacctttgatcatttcgtttgctggacattggatcaactggtgctgttatacatagaaaggatttcattttaaattctcatctatatttggtggtgccataatcatttttccactagcgtttggcaataatgtcggagagcgagttagcagtaataaaaccagaggtgttgaagacatatatctggcttcagtgctttgatggttccatacaacaagtggaggaggaggttgcaatgttctgccccatgatatgtcaggaaattgtgaaaaatggcacagggtcatcaaaaaatcatgctattgctctcccggaaagagttaatccagccaatttgagtttgattcttgactactgtcgatttcatcagatcactgggcgttcaaacatggagcggaagtcctttgatgaaaagtttgttaggatagaaacagaaagactctgcgaattgacttctgcagccgacagtctacagttaaagccacttgttgatcttactggccgagcgcttgctcgaatcattgaaggaaagacacctgaggaaattcgtgacattttccatttaccagatgatttaacagaggaagagaaattggagcccctaaaaaatataaatgatggtcctgctaggattcgcctactgaaccggttgtatgccaagaagcggaaagagctccaggagcgccataagctgaaggatgttcaagtacagaaagagcaaaaagatgagagatctttggatgagttacttagttttattaatggggatggaggtatagctacagttcaggaggcaggaaagctaccaagagtaagaaaaagaataaaaggaaggatcatgttgagaaccccccaaaagctgactctgagcctgtaaatgcgaatccagatatgcaagatgatgccgagtacccttttgaagatgctgacctcgatgatggacttgatcctgcaatgaaagaagagcttgatagagaagttgaggcctttgcgaagaggttggattcagtttggaaggagtcacatattggtggtaatggttctgcacggagatttcctgggtttaatcacatgtgagtgttaagctggtaggatcagaaggcagaagcagaggagatttgtggacatacagcctggaagagagtaaaaataccaaacagtcgacttgctcctgtgtgtttgataagggcatgtacaaccctgaaatcatggatcggttttgcgaagtacaaaagacatgttaagagactgtataccctgagcctttggatcataaatgtaagtaagaggcaatgtgtgtagaattgtgtagagacagtctcttcgcggaaagagagcctgtctattgtatttttttcaattaaccctcaagagacttcatattgaaagaggttatacatgtcagagccaagcatgcagacatgctattttgttggggaggaggctgcctagttgggatgaagcttagcatggttcaaggaaaaagtgtagttttttttctttggaaagggaggattagaggtctgtcttgtctgtgttgccagggaggaggctgcctagttgggatgaagcttataatgcagtatatagtgtaaaacagtgttttgaatgactatatggctgaactgttggacacagtttgtatcaatgaaatttcgttgattcactgtattgtggtggtgcacataaaaaatgtcctttttttggctgaccttacgtgggttggaatatactataagcacgtgttcttatttataattaagttaaacaacattttatcgtatatatcaataataatagaattggatagatgaatgatagaag

SEQ ID NO: 36074 - DNA, 589 bp, Zea Mays
ccgccgtcgtggctagaacgcttcaaagcgtgcttgtgacatcgcggcgcggcgctgtgaaccacctctctattgaccgtcaactggtgctttccccggctgtcttcgcgcgagcaccgaagtgttgaacacctagaagaagtggtgtctgaagaaggagttcacttcagtgcctgctgatccagtggtggagtttcatctaactgcttaccacaatagaaggattttagatcttctcctgcaataaggaaagaatttgatgacttgggctttattagttgcttcttgtggaggtcttgaagcttaggttacttatgtgtatattttatggaaaggtttcacctttccaaatattgtagttaagttatgcactctaaagactatcaggacttgtaataatttcaatcccttttgtggtgtaagacttcagttctggaatgtatagtgtattttgtaaaagtcttccgctctatctccaatgtgtgtatcaaatgtgattactgtaatatgcctgttatgtgggagatccttgggatgatgagttcaagttgatgaactcgatagccttgttaagttacccggtacacgt

SEQ ID NO: 36075 - DNA, 2498 bp, Zea Mays
ctagcctcagcgcagcggttgccgcggctgtttctgcttgctgtcgccggccgcagtctccgccgcggctcacggatgccctgcatcctccttcccgcggccgcgcttaatcgaagccttcttctgcaccaaccttatcctgtcagctggaaacgccaaattctccaaaccctagcgccaaaatccccattctgatcgctgcaaccggagccggattctcttggtttacgcctggcgctcgtatcgtgtctccgcatgatgcaacgagcacgcgcatgaactcgatggatgaaatcaacctgctgcggcaggcgcagcggcagcatcagcatcatctcatggtgcgcggcatcggcgaggagatcgacctcgagatcggccctgtcgacgatccctctttttccggagcttccttagtggccgttacgtccacgcacgacactgtcgttcacgccgacgaccacaagagcctcctcatcccgtgttcgcagcccggcgcggcggacgggctggcgccgcagcagcacctgtcgcagggggaagagcatgacgggatgctcaggtcgccgtcggggcacaccaagaagaagaagaaggtggtcaagaaatggcgggaggagtgggcggacacctacaagtgggcctacgtcgccgtgcacgacaccaccaccaggatcttctgctcggtgtgcaaggagtacggccggaagcaccgccggaatccatatggtaacgagggaagcaggaatatgcagatgagtgcgcttgaggagcacaacaatagcttgttgcataaggaggcgctccggttacagatggcctccaaggagaagttgcagcctcccgagattgaggggccggtctatgtcaaagctttatcgaaaacagcagcatcaatacttgaatgtgtcctaaggagggatccccatgaagctgaatatatacagtcgatccaggaggtggttcattccttagaacctgttttggtgaagaatgcccaatatattcaaattttggagcgtttgttggaacctgagagatgctttatcttcagagtgccatggattgatgacagagactttaaagaatgctttgtcactatataaacttggaggtgctgctggaggaagtgattttgatccaaagggaaaaagtgataatgagataatgcgcttttgccaaagtttcatggatgagctgtatagatatttgggccctgatcaggattttcccgctgaagatattggtgttggtccaagggaaatgggttacctttttgggcagtatagacgtctttctggtcattttcagggaaattttacaggacctaaaattttctggtcagggtcaagttttcgaacagaagctactggatatggtctggtgttttttgcacgtcttttacttgctgaaatgaataaagagcttaaaggattaagatgtgtgatcagcggttctgggaagatagcaatgcatgttttggaaaagcttttgccttgtggagccattcctattactgtctcagattcaaagggatatttgttagatgaagatgggtttgattatatgaaatattcacttctaagggatattaaggctcagcaaaagagcctcaaggagtacttgaaatcatatccacatgctaagtatattgatgatgcaaaaccatggagccagcggtgtgatgttgcatttccttgtgcatcacataatgagattgaccaaggggaggctgttgcaatcagcaactctggttgtcgtgttcttgtcgaatgttcaaatatgtcgtgcactgttcaagctgttgatatcctaagaaaggcaaaagttattgttgctccagcaaaggcaactgctgctggtggggtagcacttggggagattgaattgaatccagagtttaatttgatgcaattgtcagtggaggattttgagaatagaattcaagatgcaataaagcaaacatatgaaaggtcggtcaaagctgctcaagattacgggatcatgaaagaaagccccgagtttttggtccatggcgcgaacatttgtgctttccttaatatcgcgcaagccatgactgaccagggatgtgtttagttaggcctggattctgtcaagaagcttcaactggagctttctgcaaccgcgagggaaaaaactttctgacaactagaggtgctttgatgcttaaactttgagtagttctgcacaaatcttgaagccctacaaaacagggagtaactaggatccatttacccctgtttatgctagaaatgtgtacagctaaggtgtaggaaaggcaactaggatccatttatgctagaaatgtgtacagctaaatgtaaatggaaagttctacattgtatgcaaagcctatatccgcaccatctgttacaccaatttgatttcattgttatgaacgacatattattctagtgcaaccacgctaattggtgcaacagtgcaatcaagataagacacgacaatggagttgagag

SEQ ID NO: 36076 - DNA, 631 bp, Zea Mays
atgtcgatttgtgcaataacaaggcttgagcagggagtagaagacaacatggatattttggctatggggaagggacaaaattcagtgtctctgactggtgctatgaaccagaccaggtgcaatgactgtggtatggatcagaaatggacaaatcagatatttgactgttggaatggcccaagttcagtgttcctggctatacctatgagcctgtgttggactggtgcatggaagccatgttggtcagcccatatactgctggcacctcaagaatacttcctcactgcatgtggagcagatcagggacacctgcccttggttagaggctataaaagtcaaggttaattctctccccagccctaggtttgtcgtaacccagagcctggcacgccagcacctagacgtggtgaccaaagccgcccgagtgctcacctcaccgtggccagaattcccagaagaagaagaagatgaaattcaagaagtgatttctgaagaggagtctgcttcagtgcctgatcatcaagtgatgggagccatctaactggggtttaatagagggatctagaactccgtctctgcaacaaaggcaagctccagtgcatgcaaccccttccttgtgtttttaaatgat

SEQ ID NO: 36077 - DNA, 414 bp, Zea Mays
agctaagaaaaatcttgctcaagggagaaggtgatgatggtgacatcgagtccgtggaatttccaaagtgtgtggtggcaagtaattaggcacatagtcacatactcacatggaggaggtggaggagagggagagctaggacccgagagaggagacaagagaggcacatggtcattatattttgttggctctaactgtaagcctataattgttggttgcaacttgtaagttgcaattgttgctaacctggcatattttgttggctccctaaaactttgtcctgaactcctgaacctgaagtcctgatctataattgttggctgcatcactgcatgtattttggttctagaactgaaactctgaaagtatggaattatggattatggaatggaatgaaactattatgaactataa

SEQ ID NO: 36078 - DNA, 2218 bp, Zea Mays
aagagcacacgcaggcaggttagccttgatttcggcagtccaacgacactttccctccctcccagttcgttgaggatccgagagttctgggtccgagcggctgactctgcgagctgcgatgcatcgacgagtggccatgcgacccgaccggcccttctcccacccacgcaccctaaaacctggacacctcctcctctctctcctctagaacgcgcgcaagaacacacgtaggagaaactggaccggcgcgcaccaaccccgaaccacataactaggacgaggcgaaggattgtcatccaagccgcgtgatctttaattcgccgccgcacgcccttgtcatggaaggtggcggctgggctgtcggaggccacgcacttggcgccgcccaagaaccgcgggggcagcagcagcatcgggaggaggagaaggcagccggagctgccgccgagaggaagggcgctggcgccggcggcggcggcggcatgaagttccgcgtgcgcgcgcgggcgccgcacggtgtcggggcgctgctgctcatcggcggagcggccgtcgtcggggccgccgtcctcgcgtggcgccgctcacgccacggcaacaagggtggctccgtggaccagcctgatcgccggctgccagcgaaagtagagggtttggatggcggaattgtcgaggatgggaaggttcagggtggctcattggtgcagaagcttagtcagtctaatgagatcttgagcgtgggcaacacagatattggatccggtagattggatggcaacgcgtcagaggaaagccatcagattcacaaggatggtgaaatcactgcagatcaatcggagagcaagcatgacgggaaaattgatgagaattcaggtatcaatcctgccgaggtccaaatgcacgatcaggagagcaagcatgaagagaaaaacgatgagaattcaggcagcaatcctgtcgaggttcacaaacacgatctggacaaagaacatgtcgaagaagttgaccagaagtcaagcagcaaccatgttgagatcagtgcgcatgatatgtgtgaggacaatgaacatgttgagaaaattgatcacgttgaaagaatcgatcagaattcgagcagggaccctgtcaaagccatcatgcaggaaatgatcaaagtttgtttggtcagtggaagcgtggagaaggtggaggaagaggactcaagcaagaaggacttggagaaagagatagccccaaaagataataaagatatggaggcctctgatggaagcaagctcggcgtcaacggtccagaaactggaggtgctgttgcagacactgaagaagatgatactgttgcagagacagaagatgttgttacagacactgaagatactgttacagacaccgaagatgctcttgcagaaacagaagcagagaaaggtgaaagagcaatcgcggacaagggtgagctcgagcaggacgaaaagaaagatctggtagcactccctgaacttgccagctcaccagcactgtcatcgttggttaagccaacagtagtgaagaaagagctggactttccgagacccaacgaaacggggatgaagacagagcaagattacactaacggtgagctgagggagcacaatgacctggtcagcaaagtgcagggagaaggtggcgtcgcgacgaccatggagtccaggagctctgctctgatgatcattctcgctctgatattcgcgctggccacgggaataacgatcgtcgtgcgcctctactccccttcccgagcaacgaaactccagatggatctgccataagcctgcaatcggtcatcaagtacgatttctgaggctgcaaagttccattgggatttttcgtggcctcgtacgcgcgcgcgcatgaacggcgaagttaggagctgctggagtgtgtgcaagtacaagataggaagagaagtctaccatggtcatgaacgaattcatatggccattgtgcagcacgatctgtctgtgctggagaagttacacgtgtggtgccagctaccaaaagaaagaaccgaggtccgagagcagtagagtaggtttcttccggctgaggagcgcttgtttttcttttttcttcttttaaaagaaatatatattattttgcaagccatgttagtgctgatagtctatggaaatgcctaaaccatgttgaagttcgtgcttggttttgtttgatttgatcgcctgtc

SEQ ID NO: 36079 - DNA, 1977 bp, Zea Mays
gtcggttacggcgtgcggcaacgaacaatgaatccatgatagcgcagcagcgctcgtgctcgcgccccagttccactccgatcgaccgaaccccaacaaaatcctcgtccttcgcgtcatctcgacgccacaactctccgagccccgctccgcaatagacccgtaagacgctgtctcgatccgtccccctacctcccccgccgccgacgctcgactcgatacattggagcaggaggcgccgccgccaaaacccaagctaggagtgggagattccgatcctccgcgcgcgcgcgcgcaccatggagccggtgccccggaagcgcaagggcgcgcccccggtgtgctccgccgccaggtccctccaagatttggcctcccgcaagcgcgcctgccgcggctccgtgccgcagcaatcccactgcaccgacgcccccgcccccgctgtggtgatgacggcccccgcggcgagcggcgcgtcggcgtcagcgggggtcctcccggggcgcgggctcaagcggaaggtgggctgcatcgacaacgccacgcggatcgggcggcggaagcggctggagaacgagtacgacctcggcgaggagatcgggcacggcaagttcggctccgtccgcgtctgccgccccaaggcccggacccggggcgaggaggagttcgcctgcaaggcgctgccgaagaacggcggtgacacggcccaccgcgaggtggagatcatgcagcacctctcgggccacccgggcgtcgtcacgctcagggccgtctttgaagacaccgacgccttctacctcgtcatggagctctgccacggcggacggctcctcgatgaggtggccagggagggtaaactctcagagcgccgcgccgccaatgtgatcaaggagctcatggcggtcctcaagtactgccacgagatgggcgtcgtgcatagggacgtcaagccggagaatgttctgctcaccaagtctggaaggttgaagcttgcagattttggattggccgtgcgagttgctgatggtgtgtcaagagtcgaagtggtgctaacttggtagttgcagtcgagttgttgtcatctggaggtcagcaattgactggtgttgctggcagcccggcatatctggcacctgaggttctactaggaaattactcccaaaaggtagatgtatgggctgccggggtgcttctgcatgttctgttgatgggcactcttccgttccaaggaaaatctgtcgaagctatctttgatgctataaagactgctgaacttgactttcacagcagtcagtgggcatctgtgtcactgcttgctcgtgatctcattggccgaatgcttaatcgagaggtctcttcaaggcccgatgccgaagatgttctccggcacccttgggtcttattctacactgattgcccgcagaaagctgaattctctaacctatggggtactaacaaaactgcagctcccatgattcatcaggagatagtcaggtttggttactgcgagtcttcatcttcaaaatcctcaagtgacaactctgaagagcgagatgaatgcggtatagttgacgcactggcgacagcaataacacaggtgaggatctcagagcccaagaggagtcggctgttcagcctacccaacgggttgttgccaccaagcaggaacagtctccgaacatgaagaggatgaatccgtgtgtggctttctaacttgacctacctagctcccatccccatgcatgtataaacgagataaacgagctctgtgattttatagatggaaaattttcaccgtggttgatgttttgcgattgctagctcgctgaggctgcaatcctctgtaaatatatcactgttgtcatcgtttctatacatcgatgatcaccgtaattgattcgattatttaggttttttcctgtggccgtgggtagtgcttgttaaggaatacttatgatcgcttcggattaaagccag

SEQ ID NO: 36080 - DNA, 1259 bp, Zea Mays
ccccgacagttgttgtgtgtaagaaaaatagggtttcagtggcggcagcctccactcacgccgccgtcgcctccgagccccactgcccgatccagacaaccaccccgcccagatccagatccacctgtactggatctcacagcctccgcttctgctttcctttatgtcgtcgaccgcgatgtcttgggacgggtacggcgggcagatctaccctggaggcggtgttccagcagcctgagacgaccccccttgcaggcgccgacgggggagatggagctgccgagcaacgctggcgacggcgaactcctgcccatggaggagcacaaggagcgcgcgctgcggcacctactccgccgatccaagcgcccgctggaggagttcgtggccgccgtggcagacgtcgcggagcagctggtgagcgcgtatctggacctgggcgtcgagtggcgcggcgcagactggcgggagcggttcctggccagtcgtacgatagcgcgagctcgatggccaggcggcacacgtcacaccgggtggcaactggcagggcaatgcccgatcaggtctccgtcgtcgattcgtctgaacagctatcctcatcatattttaatgtctcgagcataatacggagtacatatctgtatttacgtcagcgttattgcaacgctctctctccgtggtctcttctacatactataatagtagtacattagtactaacaatgtggttggccatggcatgcttgcttcgagatcaacatgaacaatggaagcacaagtacgggaatccatgtagaagcgtgaagattttccggtgccaattgccacggaataatgccttctactcagctcaacctccaaagcatgatggctctgacaaaccactctgtccaggagctcctgtatgccactggtgtggtacctggaaaggtgataaaatatgtagtagctgcaagaaagcaaggtactgttatgagaaacatcagggatttgtttggcttccaaatggtttgttggtcctaaaatagtcagaatcacatgacatctgtgctatagatatggacctcggtggttttctccacattaggaaagctggaagagccttttgaactcagtttttttgctaacagtggtgttatggtgaaacagagttttgtgtgtatgtaccaacagataaaatgtaaacacgacattatcatagttgagtacaggaataattatctcgtatatcttattgcaaaatctgaaacagttctcctgtag

SEQ ID NO: 36081 - DNA, 364 bp, Zea Mays
aagccttacacttcacgtgagctcccacctttggcgagttcatgcagattattccccacaacttgttgagcgatgaacgaatgtgagctcactcttgctgtctcacaccccccacacatgtcaagaacaggtaccataggatgaggcacatggaggatgctgtgatgagttcgtgagtggtcttggtcgtcgtctcccagtcaactttgggttgctggaccattgtctccttataatgtatttatttatttattttgtacaagaacttttgttatgtagtaaagatgtgacattcgatcatgtgccatgattcatcatatgtgtcagacttggtcccagcacacctggtgattatgttcgcgtc

SEQ ID NO: 36082 - DNA, 5060 bp, Zea Mays
aggtagacgagtatcccaccatctctcttcctcttcttcctctgcagcaccccgcagaccagacgcaggcacaccgcaccgtgccccctccctgttcatcgcccgcaccccaacaacaaggaacaggccggagtccagccatccgaccttgaatccgcttgccctcctgcttgatcccaccgccacgcgccacctcaatcgcccactcctccctcaccctctagggttccctgccgctcccacaaatcacgcaatcggagacccccggtccgccctccaatgacgaccatgagcgatgatggcgaccgcacctgcccgctctgtgctgaggagatggacatcactgaccagcaactcaagccatgcaaatgcggctatgatatttgtgtttggtgctggcaccacatcatagacatggctgagaaggaggaaacagagggccgctgccctgcctgccgcacacgctatgacaaggataggatcgtcaagatggccgccacttgtgacaggacagtggcagataaaaatgcggagaagaagcaaaaggcccaaagggttaagccaaaggcagcaccaacagcaacaacaacatcaaccgtagaatctaagaagcatcttgctactgtcagggttatccagagaaatctggtgtacataattgggctacctgcgcatttatgcaatgagagcgtacttgagcgcagggagtactttggtcaatatgggaaagttttgaaggtttcagtttcccgtccgactgggcctccctctcagcaggcatcagcaaacagcagtattagtgtgtatattacttatgccaaagaagaagaagccatccagtgtattcaagctgtacacaattttgtcttggaagggaaagtgttaagggcatgctttggtactacgaagtattgccatgcatggctgagaaacatgacatgtgggaatccagattgtctctatttgcatgatgtaggcagtcaggaggatagttttactaaagatgagataatctcagcatatacgaggaccagagtcccccagatggcatctagtgtttcgcaaagacgtacaggcaacatgttgcctcctccaggagatgatttctcttacagtgcagtggtttcagccaagcataccttcaagaatgcaacacttaataccaccaaccagcccagaccttcacctccaaacagtagttctgggaggtccacacttccaccagctgcctcatggggacaacgtgatgtgaacgccaggacaacagctactggggtgacatcatcacaatctcatacaaaaccaaaatcagaatcacagagtaatccattttcaagttcttcagtaatttccagtacaaaaacaccctcttcatggaatgatgatacaagtacagcagcaaaaatgtctgaaggacagcaagtgtcagaaaaagagtccaaaaccttgcagctgtataagcctggtatttcaatggcaacacaagctacatcatcacttgagttatcactgaacatagacttctcgacaataccttcagcttggaatgacgatgagattgtagtatcagatgggatgtcaaaaggaagcgatgaaaatcaagttgcaaatgaaaatggcgagctaacccatccagcatctaagccactagtcttatctaagaaagacataacaatgaaatctaccagtaccagcaaaagtcctccaaatattgtatcaagtctagcaatatctaaatcagatgtaaatactagtgatggtgaccactcacttaccaatattagccttacttcaaatgctgtagtctgccaatctaatcatgttgctggggcgaaaatattggaggatattagatccagggacactgacatggagaagctatctgttcatatatcttcagtaaaattaggtggcaatgatgagattcagattatggcaggaaatcagcgaccagatgtaatgccatgcacatctgttgatgcgcccatgaatcagaatttcgacagagaccaatctcatctcaatcttaatgagcctttgttaccttcagaaaataaggatactgttctttcttgtcaatatagttctgataagcgtcttgattggagttcagagatgcaaaatggtagtgtgactccttcaaataatatagtagattctacgatgctcactggtaaacttcatagtatactactggatgtttcagagcaaccatcatatgcccgattccctagttcattggatacttcattgtgtaatgatacagaaagtaacactgcagcaacgattgacactacaatttcacatatgcagactgagttctcttcaattaataatatgtatgccttgttaaatggaggtcaagatggactcgggactgtaaatacacacggtaatgtttctgaacagcatcctggaatgggaaatcatcaatgtagagcaatgggttcagtaagaactgaagcaatgggttcagtaagaacagatagtataggaagttttgagaagaccataagcataaataaggatgagagcagaataatttctgatatgttatcatcagagtttaatccatgggatgattcatattcgactgctaacaattttgttaggatgcttagggaatctgaaaataatgatgtccacttcgctgtgccttcatggaaatcaggaaccgggaacaaagagtctagattttcatttgctagacaggataaccaagggaacttattggattcatctctcagaaactgtggtactggtaccgagcagaatttcagtttgctaccccagaattctcgaggaaatatctaccagaatggccttgcattccaatctttggagaacgatttttcgaacagcaactctcttggtgtattagatatgttaactactggtacatcgaggtctaaaatatctgcgcccccaggattttcagcaccagcaagagtcccccctcctggattttctactgcacttccatcccaggagtttccttctggaatttcgtctcatgatgggtctatagcccttcctagattcccttgggcattttcttctcaaatttcagcccaggaactgtctaagccccctagtagactgccttctccattttcttctggtttttcatctctggatgggcctaattcctcgtctaggtttccttctgcatttccttctggattttcatcacagaatggccctaacccttcatctggattccctttttcttctgggttttcatcacaggatgggtctaatcagtcgtatggctcaacaaacccagaaaatcttctccggaatactgttctgggtggcagtagtaatcattatcaatctcagtttggaaggcactcaagtgacatggagttcgatgatcctgctatattagctgtgggcaaagggctgatgcctggaattggcgattcagggctggagatgaaaaatactcctgcttttcaagcacagttgcaaccagcaagcagtgatccaagatttcacttacatatacagccaaatgtgcagtctcaccaaaacatgggattcgcagaccatatgcaggatggtttgaaccatatgaatgataatagatttttaggtcagaaccatggtcctctatccccttatgtgcagattccgcaacaacccagaaactcgcaggttacaaatggtcactgggatgggtggagtgattcgagacaagggaatagcactcctatgtcagacatgtcgaggatattatatccaagtgaagtgaacaagttgcacatgctgggttcaaatgatatctataacagagcctttggaatgtgatcatctcctgggataatgtgtgagtttgagctgacatgttctgacttgggggcgttctgtggaagtaactggttgcacaacacagtatacctgatgtggataatggtggttgtgcttatgagctggtacacgagtattttttgctattggaatttacaaaaacgaacctgagttttggttcagctatttgaaattaccaggttcgttctcttgtatgatctgtgaagcttgagtgaaaagaaagattatgtgccgagaacaaagcagctgaagttgaaatatattgagatatgtctataatgtagtgtggtgtggctcttgaacgtgagcgactaagaagatttggtgggcttgacttgatgatggcagtgttttcttgtgttggtacatgatgatggtgttggtcggtggctgcctggccagtacatgcgttttgccataataatacccatggtataataataataataataataataataataataataataataataataataataataataataataataataataataataataataataataataataataataataataataataataataataataataataataataataataataataataataataataataataataataataataataataataataataataataataataataataataataataataataataataataataataataataataataataatatactggttcctttgctagcattacttaatttgtttctcaaaaaaaatgtagtaaacacattaattactacatacaatggactcaaggtacgagtaggttgttctcatctcatctgagacccggctgcatgagcagctcgtcgaaagatgctcctccattctgctccacgctacctgaacccatcctgttgctgcaattggacacgagcacccgctccatggcaatggcgtcctggatctccttgagcacttccgagatgggaggcctctgggcgcccttgggcttcacacacattatggccacctccgcgatcttccacaccgactgcaggtcatagcagcctctgtccaacgactcatcaatgatggcgtggatgttcccgctctcgatgtgcgatcgggcctgcatttatttatttatttatttaacgcttttgcttcagcagaaccaacaggaatactcttctttcttacccacgcaacaatgttccggcagttgagcccaaagttgtcattcgagatgggttca

SEQ ID NO: 36083 - DNA, 1201 bp, Zea Mays
ttgaacaatgctgagtccactatgtcctccatttcatgttatttttcaccccaagtcaaaaatgatcatgcaaattaaggatatagatgacaaacagaatgtgtggcgccagttataactcttatccaactctcactatgctttggtaacaacaaaacaagcctttagagtaatttatgtatgcgacagcatatatggcgggccttcacatttctggaccttgtgtgtcacggcttacgatttcactcgaatattgagctccttttatttcaagggctacactttactgacaaaaatacagcgcatcgaatggaacaataggggacctattacattccgttattcgataatatccacctctgcgttgggggtttctgtcggctacttcatcactgatcttgcaatgatcttctggctgtatccttcccttggtggaatggaatatgtcctccaccatactgtttccctggttgcaatagcttacacaatgttgtctggggaagggcagttttacacatacatggttctcatttcagagacaaccacccctgaaatcaacttgcgatggtttcttgacactgctggactgaagaaatcaagtgcttacttggttaatggaattctgatgtttgttgcatggctggtggcaaggatatttttgttcatgtatgtattttaccacatctatttgcattacggtcagataatgcagatgcatgcctttgggtactacctgacatttgttgtgccatcagtgctctttgtaatgaacacaatgtggttcatgaagatcttaaaaggtgtgatgaaaacactggcaaaatggccatgacgtggatgacgccaagaggatctcagaactatcaacaggatttcgtctttctggcatcattacgtgaccttaatctgtgaagttatggatatcagggtaactagagaaacataatatgtaaagtattagcaaacaagctatattaggtgaaattgccctattttcagtcgagctggaagttcataaccggtttggtttgtaccggagatccagcacgctgttctgcttaccccacctgtgccatgtgtatatctgaagagaattttaatgggtggtttgttcaacagtacaatcccagtgctgtgtactccctccgtttctttttacaagtcgtttccaacagccaatctataaatatcggcgacatct

SEQ ID NO: 36084 - DNA, 1976 bp, Zea Mays
ttctcgcgccgcaacgcgacgcaatgccccacccgcacggtcgcgccgcgcagcgcaggaacccccaccacgcggtcggcgtcggcgtcggcggcggtgctcccgcctccccgccgtcggcgtagctcccgcgcgcttcggccctgggcgccggtgtggtttctccatcacgctctctcgcgcttcctacctgcgtgcgccctgctgcccggtgatggccagccgtctcttcgtgctccgtcggcacacgaggtggtggcagcggcaggcgccacggcctcgctcgctttgcccgccgtctcacggtggggactcggcgtcttcccatgggacgctggagctgctcgcgcgtctgcgcagctcaccatcgttgttgcagagttgtagcattcaagcctgccattgtatccatacgagtccatcagtcaatagcggaaatcaggctactgcagagcctcaacaacagaatccaggagtgcctgtaccggttgatggttctagtgaactaaaacccaagaggacaaagctgaaaggaaggagggcagtgacaaattttttgaaatccttgagatggaaaaagaaaaaggagtttcaaagaatgactgcagaggagaagattttgtacaaactgaagctagctcgaaagaaggaagagcggcttgttgtggcactgaagaaaattgaaccagaggatccatcagaacctacacatgatcccgaggtgcttacacctgaagagcacttctatttcctcaagatgggccaaaaatgtaaaaattatgtgcctgttggaagacgtggaatttaccagggagtgatcttgaacatgcacttgcattggaaaaagcatcaaactctccaggtaattgtgaagacatttacaccagaggaggtcaaggaaattgccatcgagttagccacactaagtggtgggattgtgcttgacattcaagatgggaacacaattattatgtacagagggaaaaactatgcacagccaccaccagagatcatgtctccaaaagtttccctctctagaaaaaaggcactggataaatccaaatatatggaaaagctcagagctcttaggcggtacattcccagacttgagcaggagcttgaagatcttcatgcacagatgaagttagctggagagcatcaaggacaaaatgcagggaaacatgttgcttcaatttcacataatacaaacagtatgccagtgagaaaagaaccttgtggttcaattcgcaacaaaacagtatctgatctcctatcagaaactgtagagggatccaagaggttagaggatgaaagttctgcgattgaagacgactcagcttcagagtctctgtcatttacagagtctgaggatctctctgacatttttgagacagaatcagaggagcaggaagaggacaacaaggatcgccccttatatctcgataggctggataagtttccctcaggaaaaaatgataatgaaccagatgattttgaggagcatctgcggaggatcgcttcactttcagataagactgattcaccttcaaaagaactgaaagtgtcagagctcgatgagattgataaaatctttctgagagcaagttcgttgttgaagaaaaggtgaacctttgggatttgtatatgacaatcgtcatatttatatgcactgcgaaaagtattttgtgcagttttaatggcatcttcagaaaaaaagtttatgatcgtctagtgatagggccaaccctcaaagtttgtggtcaccattgttttacggtgattataatataactggaattctgtggggttgtttgaatttgttgactgataacttcgatgtgtcatacagcagattcttgttgtttcatgcttttgttgcagtttctgatgttagttgtagccatcctttgtaaaattgtaagtgctattttttttctaaaaccttgaacatatgcgactacccactcgtacaaaac

SEQ ID NO: 36085 - DNA, 3015 bp, Zea Mays
tcacttgcatctaggcttctagctgtactcctcggccggtcggtcccacccatggacagtgacaatgattgcggctccgacgccggcgccgagtgggtctgggtacgccgtccgtcggaggttgaggccgctgccgcggcggccggatggctggcggatgaagaggcgcggccgctcaaggtggtcttcggctccccggctaagtacttcaccgacgcagcgccgatcgggaacggccgcctaggcgccatggtctggggctgcgtcgaatctgagaggctccagcttaaccatgacactctatggacaggtggacctggtaattatacaaatcccaatgcacctgctgttctttctaaagtaaggagccttgttgagaacggaaagtaccctgaagccacatctgctgcatatgatctatctggtgaccaaacacaggtctttcaacctcttggggatattgatctggtctttggtgaggacatcaagtacacaaattacagacgagagctagatcttcacactgcaacagtcaccgtcacatatactgttggggatatagtctacacaagggaacatttctcctcaaacccacatcaagtcattgtgactaagatctctgcaaataaaccaggaaatgtctctttcacagtgtctttaactagtccactagaccacaagattcgtgtaacacatgcaaatgaaataatcatggagggtagctgtccaggccaaaggcctgaagagatcaagactgctgctgatcaacctattggaattaaattttctgcgattctttatctgcagataaatggtgccaatagcacagtggaagtattgaatgataacatgctgaaacttgattgtgccgactctgttgttttacttcttgcagccaccacttcatttcaaagtgcattcatcaaaccttcagaatctaaactggatccaacagtgtctgcttttacgacattaagtattgctaggagaacgtcatattcacaactaaaagcctaccacattgatgattaccagactcttttccagcgtgtttccttgcaactatcacaaggctctaattatgatcttcggaggagtaggctagttcagtcagcagagactagttctcagggtgctaatgtatcggattatggttttcaaatatctggctgcaccagattgacatcccttaatagttttgtgaagcctacggtagaaagaattgtaactttcaaagacaatgaagacccttctcttgtggaacttctgtttcagtttggtcgttatctactcatttcgtgctcaaggcctggaacccaaatttccaatctacaagggatatggagcaatgacacttcaccaccatgggacaccccatccaaatataaatctacaaatgaattattggcctgcgcttccttgtaatcttagcgagtgccaagaaccactgtttgactttattggttccctctcaatcaatggagctaagactgcaaaagtgaattatgaggctagtggttgggtcagtcatcaagtcacagacttatgggcaaaaacatcaccagatgctggtgatcctgtatgggctctatggccaatgggtgggccttggcttgcaactcatctctgggagcattactgttttactttggacaaacattttttagagaaaacagcgtatccactattggaaggatcagctaggtttttgttggattggttaattgaaggacacaggggatatttggagaccaatccttctacatctccagaacattattttattgctccagatggtaaggaggcctgtgtgagctactcaacaactatggacatctcaattataagggaagttttctcagctcttatattgtctgctgacattttaggtaaatccgacactaatgtggtgcagagaataaaaaaagcactgccaaatctcccaccaatgaaagttgctagagatggcacaatcatggagtgggcacaagactttcaggatcctgagattcatcacagacatgtgtctcacttgtttggtctttatcctggacatactatgtcacttgaggaaacacctgacctctgcagagctgttgccaatagtctttataaaagaggtgacgaaggcccaggctggtctacttcatggaaaatggtcctatgggctcgccttcacaacagtgaccatgcatacaaaatgatactgcagctaatcactttggtggatccagaacatgaggtttcaagagaaggaggcctatacagcaatctgttcactgcacatccacctttccaaattgatgcaaattttgggttcccagctgcgttgtcggaaatgctggtacagagcactgggaccgacttgtaccttctccctgctctgccccgcaacaagtggcctcaaggctacgttaaaggtctgaaggcccgaggtggtgttactgtaaacatcagctggaaggaagggagcctccatgaagctctgctatggtctagcggcgggcagaataccctttcaaggctgcactacggggaccagattgccaccgtcagcctatcatcgggtcaagtttacaggttcagcatggatttgaagtgcttgaagacttggcccctgtgatagcacacatttgctgaaatgaaagatacgattgattgtgcaaaaattcatgaaaacttctggctggcaagaaaataatcgatttcatacatcaatcataacacgtatcatatttcttatttactgtgtatgtttagttacatttcactgtatacatgtttactcgttgcccgtgccaagtgctatacagtgcacgactgcatgtgcattctgttaacatttttttagatgggaacatatcgaatgcaaaccacgttttggtgtaaacttcgtcctactaaaaaaagtttcaaaaaattctgaaaaaacatgaatgtacatctcagcttaacttatctatatacaaactttcatggtaaaatttatcttactctagcagttaaaaaaacaaa

SEQ ID NO: 36086 - DNA, 3456 bp, Zea Mays
ctcgctctttcacttgggccgcttctggatctgtacgcggacgcccacgcactgcttggccttcgtctccgcttctcttgcgctttcgactcctgctagctggcggggcggctcgcctctcgcgccacaatggaggtcgaggacgacgacaacacggcggcgccgagcgcgtggccgagttcatccaggcgtcgccacctcctccagttccttctccacgcctccatgaggctcgacctccggcccatcgtcaagtacgccgcgcttaccttcttcgctggacgcttcctcccggcactcccgaggaagatggggttctgcggcgcgcgaagcggccgaatagtcaggtcctggctcctcgagcccctgagggacagcaatctcgagctattcgcgctcgtcgcggtgtggattgccagcaagatccacgatcagaagccaatgtcagtgaagagcctcaaagccctgggtgatcgcatcatcgccgaccagcatttcatgtgccgtgattttgccagtgccgaattggtgttcttggaggtagtggaacacaacattggattttcaagcatttgtttcatatacctggaggagcttctcatgcatttcaggttctttggatttcttacaacctttctctgacccataaacagttgttaaccctgttaaaggcaacctacaaaacttcacagtgcgaataatattggagcttatacaaaattctctctctctcttttttttttggggggggggggatgggggcgagtcaccatttatgtacaagacatgtcatcaacaaacatgtgtagcaagtagtaactgatcgcaactgaaattttaccacattctgttttcgctcttaggaagcagactgtgtagctcttcatagcagcttttaccacaaaatatctttatgagaaatattaaactgggggcacattagtgggaataatctcatatcatttctcctatctacaatacatcttatttaccttgttatcacaagtgaatctgacaatatgaaaaactaagaaaataaatgggatgttggataatcagaaaattctcatagctatctttcttgttacagagataatagctctcctgcatgttagataaaaaaaacccctagacctctattgaatgacttgtttgattccatggttttacagtttcaccaatacaacaacaccaaagctttttagtcccaagcaagttggggtagactaagttgaaacccaatagagcccacgagtcaagattcaagcatatcgatagttgtttttcatacggtcctattcaaggctaaatctttaggtatattttatattctcatgtcttcttttactgtctcttctcatgtcaacttcggccttctcctgcctctcttcctaatttcctattactatcacgccttaggacaagcttttcttcactaagtgctacctctatcctatcatgtatatcgttgttctggactcgatcccttcttatatgactacaaatccaatgcaatgtagcattttcgcaactcgtatctgttgaatatgacgtcttttgtaggtcaacattctgcaccatacaacacaagatgtctaatcgctattctataaaacttgttttttagcttctgtggtatcctcttgtcacatagaacgtcatatgtttggcaccacttctttcaccctgctttgattttatggctaacatcttcatcaatatcactctctttgtagcattgatcctaaataccgaaaggtatccttcataggtactacttgacctgccaaactaatatctccttcctcatgtatagtagtgctgaagccacatatcatgtattcggttttaactttatcgagtctgaaacctttggactctagagtctcttgccacaactatgactgtctttcattaactagcactatatcgtcctaaaaaagcatacaccaaggatatctcattgtatgtctcttctgacctcatctatcaccaatacaacagtcagtgctcaaagttggcccctgatatagtcctattttaatcggtaagtcctatgtgtcctcatcacttgttcgatcactagtcacaacattgtcgtacatgcatgttcttaacgagtccaacatacttcgatgaaactttatgtttgtccaaagtccaccacataatgttgcttagtattttgttataagccttctccaagtcaatgaaaacaatctttaggtctgtcttctgctttctatgctgctccatcacttgctttattaagaaaatggtatccatggttgaccttgtgggcataaaattaaattggttcatagagatccacgttattccttagacgatgcttgaaaactctctcccatagtttcatagtatggctcatcaacttaattcctcggtaattgtcacaactttgaacatcttacttattcttgtagattgggactaatgtacttcacttgtcaggcatcttgtttgaccaaaagatatagttgaacttggttagtcatgttatagctatgtccccaaggcatctccaaccttgattggatgccattaggacgcatcgccttacccctttgattctttttaatacctctctaaccttagattcttatatcctacgcacaaagcgtctattggtgtcatcaaactaaaagtttgtatcccattctccttacaaactaatggccgttggaattattatcattaagtacttagcaagtgaatatttattaatattgctattaatattgccatagttgggcagttgtgtgaatgtattattgctgctagtcactagttcttgatttcttggcataaataacataactttatatttttctaattaattcactgctagggaaatatcaaaaataggcgaacttttggatctggatgtgtgcatggaaattttggacattctgtatgaaacggaagatacctcgttactttttaattgtccctgctcacttgctgcttccactcttgttgctgcatatgctatatcagttcctaagcaaacatgggagtttccaatccttccttgggtcaggtttgctacatcatacgatgaagaggaaatcatgaagattgttctgacaattctcctacatgtgcttaaactggatggtatcgaagagaagggcaagggacgttttgatgccagatgtttgtcgtgaatacatgcttttagaagacactgtagctagtttttgacaggcggttttgagattgagatgcccataatagttatgtgaactaaaactatatgatcaagggagtgcgcgtaagcgccttgcaatggaattctgtattggatgtattttgaagaaagatgcctgctaagtaatgccttcaggttggaattcaagtttgacataattatcaatgtaatgacatttaagctccttgagatctcaaatggaaggatgttgcattgccgccgca

SEQ ID NO: 36087 - DNA, 2706 bp, Zea Mays
aaaacattggagtaaaaatatgtacacaaaaaaaggtgcgtcacaggagtgtaagccccgttctgttagtccaatagtggaccaagtgaataactgtgagacaaagttggccatttaacccagagccggctcccttttaattgggctccacacgtgtctcagccccccaccgaagcagggagagccagctcgtgggccgtacacgtgtccgtgggcgcatcgctgcgcattaaggcccggggactttccagggctttgaaagcccgctcacttcatcctgtgacgcggccaagaatgccaccacgctccttatatacacggtctcatgtacctgaaccggcgatacgggactaatcgtccttgactgggaatgtggcatgctatgcctgtgtccactccctcccaccacctccaccatggcccgaagcagcttatgggccgctcattcccgccgtttattcttagggctcttcctcaactctcgcactgccgccgccgctgctacgcctacgcaaccgtcaccgtcatccccatggcttccacggcgaccacgcgccgccggccgcggcggggttccaagggccccaacgccgacctctcgcgcaccctaaccgactgcacccgccgcggggacgcggccgccgccatggccgctttcgacgccgccgtcgacgctgacgccgacgccgttccccgcctctccgctcaccagtacaaccaactcctccacctcctcgccgccaccgaccgctcctccttccccagcccccccgccgccgccgcgcgccgtgtcttcgcccacatgctccaggccgcggcgccgccctccgaggccaccataacctccctcgcgcgcgtcatcgccgccgacccggcgtcggccgccgatgaggcgttcgagctcgtggccacaatgaaggacaagtacggcctctccccgcgcctccgctcctacggccccgtcctcgcggcgttccggcgtgccggggaggccgctaaggcctacgctgtcgaggcgcacatgacggcctccggcgtctcgcctgaggagcccgagcttgccgcgctgctggatgtcagctccagagccggggatgcggacaaggtgtatgagtatatgcataagctgaggcaagccgtccactgtgtcagcgaggagactgccggagttgtggaggcctggttcaggagcgacgaggcggcaactgccggcaagcctcaatgggatgccgctcaggtgaaggacgccattgtggcgaacggtggtggctgcccaccgccttgggtggcttggaacccggcccttgaccgtgcagcgggtaagagtggggatgctgatcagtgtgggggatgtagattccatcttgcttgcattgacattgacatggagagacacagaggtttgctgattccgttgctgggtttggccctcgagagggagacaaaaacaaatttcagccgatttcaggagtggttggaagcaaataaagactaccaagctatagtcgatggtgcgaatattgcactatatcaacaaaattttgcggagggcggtttcagtttgacccagctggatggcgttataacagagcttcgggatagatatcatggaaaatggccacttgtcatactacacaataagcgaatttccaagcttatggaaaattcgtctaataggcatttgattgagacctggagaacaaatggggctttgtatacttcaccaagtgggtcaaatgatgactggtattggctatatgcagcgatcaaactaaattgtttgcttgtgactaatgatgaaatgagagatcacatattcgagcttctagggccgtctttttttccaaagtggaagcaacgccatcgggtaaagtacacctttaataaaggaaaagcggtgcttgtgatgccacccccttactcttcagaacttcaagtaagagtcggagatgggatcttggcacattccaattgaagagaagtctgggaatgagagaggcaggatttggctttgtattggcaggggaggttcctgcaaagaacatggcgaagttccttcgactaatggagctgtccacaaagttcctcaaactgaggcatctaacgtggtgcagcaggggctgacagaaaataaggatgaatcgataactggtaaaagaaaggatagagattgatcaccttcacctatccaggagcaccatctgctcttgagtctgccatcttgtgagcgattgtggccacttgttgttgattcagctgaggcatttcaagaatagggatgcagcgataatgccatcccagatatgtagggtgtgataattattaatcactttcgctgggttgcagactttcattcttcacaaattgggtgtgatcttagacgatttctgtgctatgtatctgactgcatccatgatcatctagtgttaactccagaataccagctaatgaacttttttattaccatcaaactgaggcacatttgcaagtgcattgttgagctactgcaccagaatggtaccgacgctattgatgttgcagcactgctggagctattagtgtatactatgtaggtttgatggtgtagcagcacttagtattactattagtgtatactagttctataatcccctcctgttcaagtcgaattatcctaatcttcctatgtttaccgtttgctattaccaaaaagacttagtattacag

SEQ ID NO: 36088 - DNA, 1667 bp, Zea Mays
cgggtcaacggttcacacggtcataattggaagagttcgagttgcttgattgcttctgcggatgcgcttcccccatcctcacccaaaacctaccggcaaaacctacagcccttcgtctcccacacgcactctgccactcatctctaggttgtgtacgatcatcagcgagaggagctccctcgcttatttgtctctgaaacagacatcattgcttcagttagggaatgaagggagattccagcagacaaaatagcttagaggacaactcacaaatactaagtgcatttccaagggaaccaaagctagaattcctaaaaaacatcacgaaagacttctcaagtgaacgagtgattggacatggtgtctttggagtggtttataagggcatacttcagaatggacaactggttgctgtgaagaagcttgtgcaaacatccggagttcatgatagacggtttcagaatgaggcaggcaatctccagtttctggagcacagaaatatagtcaagttacttggttcttgttaccaagtagaaaagaaattggtggagagaaacaacaaacattttctatcagatgttccagaaaagtttctatgctatgaatatctgtctaatggaagccttgacaactatatttacgatgaatcttctggaattgattggaccatgcgcttcaaaataatcttggggatatgcaatgggttacattttctgcatgaggagcgaagtgaagccatagttcatttgaaccttaaacctagcaacataatgttgggtgacgacatggtgccgaaaattgcagattttgggctttcaaggttgtttggtgaagaacaaaccagaactctcaccaaaaacgttgtgggatggataggatacattgccccggaataccattacagaggagaaatatcagttaagtcagacatattcagtttgggtgttcttattcttgaaatagtgacaggactgaagagggacctcaatattcaagacatttcttctgagttactaattgacaatgtatctaaaaattggacagaaatgtcgcatatagaatcaaagtatccatccttggaagaacaacacctactacaagtaaaaagatgcattgaacttggtttgaactgtgtggagtctgatccaaagaaaaggcctactgtaggatcaataattggtaaactcaaagaaatcagtcatgaagctagcatacacaaatttatggagaagaaactgcaactgataactgaattcccaagggaaccaaagctacacttcatagaggttatcacaggggactttgccaatgaacgtgagattggtaaaggttcttttggggtagtttataagggagtgcttcaaaatggagaagtggttgcggtcaaaaggcttttggtagttgcaaaaactaatctggataagcaatatctgaatgaagtatctagtctgattgatctcaaccatagaaatatagtgaagctatttgggtattgtaatgaaatacaacggaaactggtggagtcccatggaacatatgtttttgcagacacagaagaaaggatactctgctatgaatatttgcctaggggaagccttgacaagtatctttacggatcgcaaaacaggggatgtgattgggactgaccgtcgccgtaaatcttcacc

SEQ ID NO: 36089 - DNA, 6971 bp, Zea Mays
aactgaagcgcgcgggaaaagccccaaccgccttcaacttttggcgcgcctttctccccttgccaaaacccaaatctagggttcactcttccccttccccggcgtgcaacggcagtccaaactatccaagcggccactgggccagcgcgtcttccattcccgctcaacggagcgcacctgccagcatgagcgggcggcggggtccagctgccacaggaggcggacggggaggcggaggcggaggcggcgggaactggcggcggagcgggtcggcgaaggcgaaggagcagcggctgcgcctgggcgcggaggagctcctcgagagccggctaggattcgcgccatacactgatggggagcggcgcctcggatggcttctcaccttttcaccgtcatcatgggaagacgaggacaccggaaaaatctacagctgtgttgacttatactttgtatcacaggatgggtctacgtttaaagtgaaatacaagtttcggccttacttttatgctgcgaccaaggacaagatggagttggaagttgaggcatatattaggcgacgttatgaaggggaaatttctgacatagaaataattgagaaagaggatttagatctgaaaaatcatctttctggcttgaagagaaaatacctgaagcttcagtttgacaccgtacaacaattaatgcgtgtaaggaatgaccttttacatgttgttgaaaagaacgaagaaaaaatagatgctgtggaggcatttgaatcaattcatggtgtaaaaagggtagaaaggccacaagattacataaattacatcattgatttgcgtgagtatgatgttccatatcatgttcgttttgctatagataatgatgtcagaagtggacagtggtacaatgttaatgtatctggttctgatgttttgcttcagagaagggaagacctgcttcagcgtgcagaagttcatgtctgtgcatttgatattgagaccacaaaactgcccctgaagtttccagatgctgaatacgacaacgtaatgatgatttcatacatgattgatgggcaaggatacctgataatcaacagagagtgcgttggagaagacattgatgatttggagtacacacctaaacccgaatttgaggggtattttagagttaagaatgttcaaactgaggagattggtttccaatgtgacaataaccagggcgagtgtcgggctaaattttcttgccatcttgactgttttgcttgggtgaagcgagacagttaccttccacaaggaagccaaggtctaaaggctgttacaaaagccaagctaggttacgatcctctggaggttaatccagaagatatggttcgctttgcaatggagcagccacagacaatggcttcgtattctgtatcagatgctgttgcaacatactatctatacatgacttatgtccatcctttcatcttttctcttgcaaccataatacctatgtcacctgatgaggtactgcggaaaggaagtgggacactttgtgaaatgctgctaatggttcaggcattcaaggctagtgtcatttgtcctaacaagcaccaagctgatcttgagaagttctacaataaccgtttattggaaagtgaaacctacattggtggtcacgttgagtgtcttgaaactggcgtctttagatctgatctccctacaaagttccaacttgaaccattagcatatgagcaactcattggaaatcttgatcgtgatctgcattatgtcattgctgtagaaggaaagttggatattgattctgtcacaaattatgatgaagtcaaggatgccatagagcaaaagcttgttgcattgcgtgatcacccaattcgcgaagaacgccctctaatctatcatctggatgttgctgctatgtatccaaatattattttaaccaatagactccagccaccatccatagttacagatgtggactgcacagcatgtgatttcaatcgtcctggaaaaaattgcctcagaaagcttgaatgggtctggcgaggagagacctacatggcaaaaaagaatgactattatcacataaagaggcaaattgaatcagagctgattcaatctggtggcattgcatcgtcaaagccttttcttgacctctcaaaaccagaacatttacttaaattgaaggatcgtttgaagaaatactgccaaaaggcgcacaaaagagttgttgataaaccaattactgaagtcagagaagcgggaatatgcatgcgtgaaaattctttctatgtagacacagtgcgtagctttcgtgatagaagatatgaatacaaaggtcttaacaaaacatggaaaggaaaactcgcagaagcgaaagccagtggaaattctatgaaaattcaggaagcgcaggatatggttgttctatatgattctttgcaacttgctcacaaagctgggaagaagctaactatatcttatccctgtgtcatgcttaatgctgacgttgcaaggaacaacactaatgatcaatatcaaacattgaaagacccagtaaacaagacatatacaacacacagtgagtgttccattgagtttgaggttgatggaccttacaaggccatgatcttacctgcctctaaagaggaagggattctgataaagaagagatatgctgtcttcaatgaagatggcactttggcagaacttaaaggttttgaaatcaagcgtagaggtgagctgaagctcataaaagtttttcaggcggaggtatttgacaaatttcttcatggttcaactttggaggaatgctattctgctgttgcctctgttgctaaccggtggttggacctactggataatcaaggaattgatattgctgacagtgaattgcttgatttcatatcggagtcgagcacaatgagtaaatctttagttgactacggagagcagaagtcttgtgctgtaactacagcaaaaagacttgccgaatttcttggagattcgatggttaaagacaaaggactacattgccaatatattgttgctcgggagccacaaggcactccagtgagcgagcgtgctgttccggtagctatattcgagacagatcctgagatcgcaaagcattatttaaggaaatggtttagattctcctctgatgcaaacattcgatctattgttgattggtcttactacaagcaacgcttaagttcagctattcagaaaatcattacaattcctgcagcaatgcaaaagatctcaaatcctgttcctcgagttcttcatccagattggttacacaaaaaggtcagggagaaagatgatcgatttcggcagcgtaaactgcgtgatatcttcagtcccttggctaaagaagaggggctgcataacttgaataggactggagatatggaagatttattaatttcaaacaaggatttgaggaaaaatccttctcatggtttagacattgacaaagaaaacaatccaaatggagcatcagtgggatctggtttgaatattagtaaaaaacaacaaaactgtatgactgggttaaatgttccttgcacttcacaaatccaaaatgctgcttcttatgaaacagttgataagggtactgactatcaaggatggcttgatgctaagaaaagaaaatggaaatatgtccgtgaacaaaaaaaacgtcgaaggttgggtgctgccgccacttttgacgatcctaacgctttgctctcggccagacatgccaatcagctacctgtcaacagtcggaatagatctacatttttccagaaacaagaattggccctctttagatcacattggcagataatccagcttgcttcaagtacagtgcctggtcacttttttgcgtgggttgttgctgaagggattatgttcaagattcctattaatgtgcctagaactttttacctaaactcaaaggctcctgtcacagaagagtttccaggaaggcgtgtcaaaaagattctcccacatggtagaccttgtttcaaccttattgaggttgtaacaactgaagaacagttcagggctgaaggcaaaaaacttgcagctcatctagcagagccagatgttgagggaatatacgagacaaaaattccaccagagctcaatgctgttctccaaatcggatgtgtctgcaaagtggacaagtctgcaaaaagacgaagtatacaagatggatgggatctagccgagttgcaaatgaaaacaaccgccgagtgctcatatctggaacagacattttcatttttctatttataccacagcttgagtgaaggaagggctgtatatgtattttacttccccacgtctttccgaatacatgcagtgattgtcaatcctttccgtaacaaagaaatatctccgtcatttcttgaaaagcaatttggagatgcttgccaagcccttggttctgtccctgagaatctgtctttccatgtggactaccaaacatcaattgatgctggaagcaaatacgcacaaagaatgttacttgagtacaggcaacaacattctggacctgtcgtaggcatcatagagtgccctaagctccaagctataaaggtagctatacgagcacttgatgatttgccatgtgtaaccattcctagcaatgcacgtgacaacaactatcaggctcttggctggcaagcaacagctggccgaacaagtatgcagcgttgtgctgcatcaacccaatggttcaatgaacggatttcactcgctaaatatgcacatgtgccactgggtaattttgaactagactggcttctttttactgccgatgtattcttttcaagggcattgcgtgatcaacagcaggtactatggatatctgatgatggcattcctgatttaggaggcacttatgaaggagagacatgttttgctgatgaagtcattcagcctgcacttacttatcctggtgcatatagaagagtttctgttgagcttaagatccaccatttggcggttaatgctctcctaaagagtagtcaagtggacgaaatggaaggaggatcaatcggtagctttggaaacgacgtgcctccgggttcaaatgccactgaaactgactttgatgatgctagcttatgtatacctgctttccaggtgctaaagcaacttattcaaagatgcatttcagatgcagtgtcgtctggaaatgtatttgctgatgcaatattgcaacatctctaccgctggctttgcagcccacgatcgaaacttcatgatccagctctccatcgtcttcttcataatgtgatgaagaaagtctttgctctattgttggccgagttacgaaagctgggggctaatgttatttttgcaaacttttctaagataatcatagatactggaaaagtagatttgtcatctgcacatgcatattgtgacagcttattaaggaccttgcagacgagggacctcttcgagtggatagaattggaaccattgcacttttggcattccttactgttcatggatcagtataactatggcggaattcaagctaaaacacaaaacgtagactcttcagatggtgataatgatattgatattgtctcaagctggaacatggcagaagatttgcccaaagatacacaggatcattttgtcttaatcgtatcagaattcctatatattccgtggaaattcatgaaggaacaagtagctgctcaagctaccataagggatgatacctcatgcactccatctgtaacaatcatggctgctgagaatcttgagggccaggtgatagaacacctccgtgacaagattagcaattactttgcagacaagcttctaagaactgtaagtgatatacttcaccatttcaaagggaaaagcaaacatgagtcagatgaacctgcaaaatctgatcctcacacgcataaaggcgatgctgcattggagttcattaagcatatctgtgcagttcttgctcttgatcaaaatgttcagcatgatattttgagaatgaggaagaacctgttaaagttagttcgtgtaaaggagtttgctccagaagcacaattccaagacccatgcgcctcattcactctgccaaatgtgatctgcagctattgcaacgattgccgggacctggatctctgccgcgactcggcactccagggccaggagtggagatgcgcggtgccgcagtgcgggcagccgtaccaccgcgagcagatggagaacgcgcttctgcaggtggtccggcagcgagagaggctgtaccacctgcaggacctggtgtgcgtgcgctgcaggcaggtgaaggccgcccatctgtcggagcagtgttcctgcgggggctccttccggtgcaaggaggagccttcgtatttcctcagcaaaatgcgggtgttcctgaaggtggcggtgagccaaaagttcccgctcctgcaggactgcgtgcagtggattcttgaagccagatgacgcgggctgctacttcaacatagttcattagttcacctgatcgctaggttgtacaacgtgcacaggctgtagctccgaagagtgtataaacgggtgtatagcgctgccacagttcattgtagctctgccctgcttgcaaaaggttgttgttgtattgtagatattcaaaggtggatggcgagaaacgatagtaaccttggtatcgaaacatctggataactagccctctcgtatgtgattgctgggcatagactattctaagttatgatgtgggcatgtggttgcataagcggtttcgatgacgtgaatagaaatacacgcgtcggaccgtatgctgccagcctgccagtacactgaccttggccacgtcatactagttgtctgtttctgttgccaatcctacactgtattatctgcacaaaggaaaatgaaacggaggacgttgtgctttcgaggggccaggactcgttgggtggatgaagcacgcgtgcccggtgacctcagccttta

SEQ ID NO: 36090 - DNA, 1509 bp, Zea Mays
atgtcgtcggcggcggcggctccccgtgtgcccggggccgcacggaggctgtctcagtctccgaagccgcctggagccagggacaaggagccgcctccgccggcgtcggccaggagaaagaatctgctgccgtcgccggcgtcggccaggggcgccgcggcgtccatgctactgcgccgtgccgcagtcgccggtggtgggcgggggagcagctacgtgcacccgtcgtcctcgctcagcgtctcgtgcgcgtcggaggcgtccaccgagtcattctgcagccgggcgtccacgggccggatcggccgccgccccgcgggcccgcccgcgggggctccccggcggagggcggcgggctctgccggacctccctccgcgcggccggcggcggcggcgtcggcgtccaggaaggtcgctagtagcggcgtcgtgccaggcggcggtgcagcggccactactgttcaccatcaggcggtgccgccggtggtagcaggcggcttgttgaacggagaacccaccgcggcggcgtcagcggggccgccgaggtgcccctggattacccctaacagtgatccctgctacgctgccttccatgaccaagagtggggagctccagtacatgacgacattcctaaaccgcaggaaactgttcgaaatgctgactctgtctggtgcactggctgagatggcatggcctgcgattctcagcaagagggacaccttcagggaagtgttcatgaactttgaccctcagttggtggcaaagctgaacgagaagaagttcttggcgccaagcagccccgctagctccctgctgtcgcaacacaggctgcgcataatcattgaaaacgcacgtgagttgctgaaggtcatcgacgagttcggatcgttcgacagctactgctggagcttcctgagcaacaagccaacggtcggcagataccggcacacgcgggaggtgccgctgcggacggccaaggccgacgccatcagccaggacctgatgcggcgggggttcctcggcgtcgggccgacggtggtctacgccttcatgcaggccgtcggcatggccaatgaccacctcgttacctgctaccgcttcgaggagtgctgcgacctcgaatcttgcgcggcgcctgagggctacggcggtgacaattgcaagaagccgccggcggcggcgagcgaccaggagttgagcatgctctgtgggctggtgcagtgcgtcgccttggagccatcgagagccgccaccgccactgtgatcagcatctcgtagcagggaatttcagttacctgcatgctatgctggtgactaacgaacgagaacatgtttgtcattttagtgtctgcgagtggtttaatgcttacatgtacagtagctattatcaaccatggatatcattttagtattgccattgtgttgctatttaatacagcatgatttcacacccacaagcaaccaaatagcacaaatgttcgtactataattgtacagaactctctttc

SEQ ID NO: 36091 - DNA, 2744 bp, Zea Mays
cggctccagaatccagtccttcagtctgagcgagatccagacctgatgaaacccgctgtgcaagtcctttcgcctctatccttggcctcaccttagggcctaggtttgtttgttttggtaggatgttgtttactgttacgagaggtccccgactgtcgctccggttttccattgaattttaaggtagggcatgtctcaggatggggggtctgtgcgattatgtgggagctgtagcttggacccaatttagatctgtcctcaacttcaacttcaaccctcaagatcagtatttaaaaatcaagatggttaacttcgggaagaaattgatggcagatcaaattccagaatggaaaggatattatatcaattacaagttgatgaagaagaaagttaaacagtatggccagcagctccagcagggggaaaaagatcgtcgtcgggttctgaaggatttctcgaagatgcttgatgatcagatagagaagatcgtcctgtttctgttggaacaacaaggactattggcaagcaggattgagaagttaggaaagcaaagggcaatactacaagagcagccagatatatctggcattgctgagttacgagaagcttatagggaagttggtatcaatctcatcaaacttctcaagttcgttgaccttaatgcaactggcattcggaaaatcttgaagaagtttgataagcgttttggctatagatttactgattactatgtgacaagtagatcgaatcacccttactctcagctgcaacaggtctttaagcatgtgggtgtaggagctgttgtaggagctttgtcacgtaaccttgctgaactccaagaacgtcaaggaagctacttatctatttatgatcagccatcttctgctcttaaggaccccatcattgatatgataaattcttcagttgataagttgacaaggtcaactaattttcttcgctttttggggcaacatgccatgattgtggatgaggagtctcctagcactgcaggagaggaagaaatagaagatcagaaataccatttcatgtcccttatgctgaacctggtgaacacattcctttacatggtcaacacgtacatcattgtgccaactgcagatgactattcagtgagccttggggcagcttctactgtttgtgcattgttttgttcttggggaatatatgctatgctatggcatatgatatgaagtctctaacggtccttattatcggccgtttactctgtgggatgggttctgcaagagctgtcaatcgccgatatattagtgattgtgtccctgcaaggatacgcatgcaagcttcggctggatttgttagcgcaagtgcacttggcatggcctgtgggccagcgctagctggtttacttcagtggaaattcaaggtctacatggttacattcaatcaatcgactctaccgggttgggtgatggcagttgcatggctattgtatttgatttggctatggttctcattcaaagaaccgaaccgtgctaccgaggtgaatgaagccccacaaaatcctgcttctggacaaactgttgatattggacgactagagaatggaattgcacagcctctgctcaaggattccgtggataaacaaaatgaagatgaagacgaagttgatgatattgaagaaactgcagatgattctcgcaaacctgcaacatcaattggctcagcataccgattgcttaccccgtcagtgaaggtccagttgttgatatacttcatgctcaaatacgcaatggagattttgctttcggagtcgagtgttatcaccaatcactatttcagttggaatacaagcgcagtggcaatatttctagcaatcctagggttgacagtccttcctgtaaacgctgttgttggaacatacatcagcaatatgtttgaggacaggcaactcctcatggtgtctcaaattacgttgctagtaggcattatcttcagcttcaaagtcacgagcacatactatgtcgtccagtatgttgtctcagcactggtcacatttgtttctgccgaagttcttgaaggcgtcaacctttccctcctatcgagcgtgatgtcgtcccgcctctcccgtggcacgtacaacggtggtctcctctcgacggaggctgggaccctggccagggtggtcgccgactgcaccatcaccgcggcggggtacctgggcgtggggaagctcctcaacgtcaccctgctaccgtcgctggtgatatgtgttgcgtccatcgcctgcaccttcctgacgtacaactcgcttttctgatggagcttcgcgacgtatttgtgtcgtcatgattcgttccaaatcaaggcagctgggagaccgccgttgccattgcccgaaggggctgttgtgttattatattatatatgtgcgtcgatttgattgctgtaaattgacaaaatgatggcagccactggccttgccctgcaaaattttgatcgcttatgtccgtgacgttgtcaatgctatgttgtgttgacgtgttggtccaaactgtaattatgctactctcgactgatctgatctccgctgcgatgcggttttgagagtggagtcgtacgagagtggatcggcgtttttgtccattgggcttgattggatttatgagataaatagtttgtcggctaattttagtaccttttcgattattagctgaagggctactaaattgtttgttcattagtcatttgagattactgatagg

SEQ ID NO: 36092 - DNA, 5756 bp, Zea Mays
tccagctccaccctccactgcagcagcttgcttgcctttgctccactcccatacagagtccagacgcccgccccgtcgccgccggcactcagctaccaagccgccgtcccggaccctcgattttcctcgccggagcggagcgcccacccctcttcgctcgcctcggatctcgcccccgatttgctccgcccgctcatccccaaccactattctctcgtctcgatccagcgcaggctactcgagattcagctgccgccgccctctggatccggccacacaatccgcttccgctcccgctgcctccccgacccgaccgcccatctcgctcaggctccctcctagtccctaccctagctgctagctaccactaccactaccatggccgccgggagaggccacgcggaggacatgctgggcttcaaggaggacgacgccatgcgcttcatcttcggcgaagacatcatgggaatggaggaccacggcgccttcgacagatccctcatggagcttcaggttttcaaggaggtcttctgcggggccgcccataacgtcgccgccaccacccatctgcccaccgagatggaccttggattcgtccacaccagcgccgccgctgcccacctcaaggccacggagacctcgccctctccatttgtctcccatgcgcagcagcagcagcctgctgccgctgccactgctgatccacagctcacaatggatcgtagccagccaaactatggacctcgccacgaccttcacccccaggttcaggagcacgcgcacactcgtgcgcagcaaaacgggaccgagctggatgatgctgcgttcatgcacagattcatgggttcctggcagcctggggataagcacgcgatccatctgctcggcctatccgatgaccaacacccattcgtcggcgcagatttggatgtgcacgcgcaagatattggagctgggatgtgcaatgctcccgggctgggctgcagcagcagcactagcgcggttgatgaccccatgccttccttcatagaagcgctagcggagatttctgaattccagagtgccactctccttccagatccctttttgcatcagtggttccaggagcagcagcaattccctaccaatgcatgcttctcttacgatcaaggccagatggatgacaccacttatcccctatgtgcaagtacaaaggatttccctgacagagagcagcatctgtgttacagtgaagaagctcatagtactccaacaatacctcatcagtcccatatttggttcagccctggtcagttcacccagctcgatggcaccaccatttgccaggaaggcacgcctgatgcgaatattagttgcccggatgaaattgatgttcatggatgcggcagcagcgcggtacactttggctcggcagctgctgtttccaagaaggccttgggcagggatattcctgaccagctggaagcacatgcgcatcgccttttcaaggacgctggatggactattaagccacggaaaaggaatgacagggctaagatggcgtcctacttcacagctccaaacaaggaagcggttcatacctcactaacccaggcttggaagttttgtggcaaaaagttatatgaagcttccccagatacagaaaggggaaggtatccaaaggagtggtcagatgttgattcgttttggaaggatctcacagatgcaatgacctatgttgataggatgcttgcaaaccagcaaaatgcactcacgcttctccaacgttggcagattttggatccttttgtagctgttgtgttcatcagtaggaaaatcactgctctgcagcaatataaaactcttagagctgtcgacagttcaacctttgttcttgatggcagctcagacacatcatcggtaagtaagatcatgcacaaagccagtgagcttttgacaagccgaatgatccggttgactccactgatcacagactctgattgcagcacacttgcaactgagagctacaacgggcatcaatctttacagagctgtcatgatgtagaagacaacaactatagggatacggacccaaagctttcctgcaatgagagtctgaattacaatgcaagtgacgagacaaaacatcacatcgatgcaagtaatgatggaagacaaacttatgctcaaccaaaaactcttaatagctctgtaaaaatgtcaagcaagaaaccgaaaagaatatttgatattagtgcagatggactggacgagaccaatgtagcaactatggacatggctgacccaggagacactaatgcctttgaggaacacattatgtattcaggtgttagcacactaaaagacgatatgaaagctgaaacaaaatcagaaaagctagataaagatgatcaaagcagcaagtgtgacatgctcctctcttcagtggtcaagcaacttaaggattacagtacattctcagatacccattgtactacaagggagtcacagtcagatgccacaacattctgccatgatgacaaggtctggaaaaagatagtcccatcccatggagaattttatgaggattcacagagtgagccaacaggaaatactgcacctgttgaattatcccatgatgttctgggaacttatctaatctgtgactcacaaatctgcgagagaggcactgccaaaatgaaaacgaaggattggttgaagtacatgaagaaaagacctcgcgagttgcggatcaatgatgaggaccttttgatgacagctatagtgaaaaacaaggaccttggcacctgtcacaaatttgcttcaggttcttcagccgcaaagaagtttaagaagctgaagagccacaagaaaggtaacaagctactttctaaaattgggaaagctggcacaaacctattgggtggaaagagagtaagtttggcccgtaaaactgtaatctgctggttgcttgcgactggctttctgagcgtaaaagatgtgatacagtaccgggatccaaaaagtaataaaattataaaggatgggatggttacctgggaaggtattgtttgcaattgctgcaaaaaaaacttatccgtatctgatttcatggctcatgctggtcgtagtcacccacagtcctcattgggcctctttctagagtctggcaagtcatacactttgtgcctggttgaggcttggtctgctgaatctatgagcaggagaagcaatgcatggggtagaaaagttgaggcaatagatgaaagtgatgacacctgtggtttctgtggagatggtggtgaattactttgctgtgacaattgcccatcgacatatcatcaagcttgcttgtctgctaaggagcttccagaaggtagttggtactgccataattgcacttgtcaggtttgtggggggccatttagtgaaaaggaggtttcaacattctcggcgattttcaaatgtttccaatgcggagatgcataccatgacacttgcattgaacaagagaagctacctcttgaggatcaaatatctcagacatggttttgtgggaaatactgtaaagagatattcatagggctgcgtagtcatgtcgggacagataatattcttgacagtgacctttcatggtccatactgagatgcaacaatgacgggcagaagctacattctgttcagaagattgcctgtttggcagaatgtaatatgaaattagcagtggctcttactctattggaggaatgtttcattcgtatggtggatcctagaactggtgtggacatgataccccatgttttatacaacaagggatcaaactttgctcgtgtggattatcagggattctatactgtaatcctggagaaaggtgatgaaatattatgtgtggcttctatcaggtgaattgtttttaatcaggtcttcgttagaaattgaacctacttttctgtctgaagtgttcttttaatgaatttatgcgtgttatttctacccatttgcttgtcattaactgctgttttggttttatcagttcaatatattattttacaactacaacatgcatactaacagcatatgccttgttagctttcaaaaaatcccacatagtatagaataacatgatgggataaccataaacaacaacaacaacaaaataataataaaaataactatctgtttcttccattttcagtgtgtattcgagaaaatatactatagataaaactttatttttttctcatgcagagtacatggaactaaagccgctgagcttccttttattgctacttctgtagactttcgacggcaaggaatgtgccgaattctaatgagcatcattgaaaaggtacagtggaatagggaatcagacaaaagcacaaaacagcacaacagtactggaacaagttatggcttcccatgattgtgtatcacacacattaacttggactgcagctgtgcttaaatgttaagatatgatattcctcccatttacctatcgggtccattctttgctaatatgtgatttcttatcaaatcgatatcctttttttatgttactgctaataacttttaactgcatatcactatgtgatttcccctattttctctaatgcagatgctctgttcatttaatgttaagatgttggtcctttctgccatcccagagttggttagcacatgggtgtcaggatttggcttcaaacctatcgaagatgctgaaaggaaacaacttcataatgtaaacttgatgttgtttcctggaacatccttactaacaaagagattggatggatttattatggccacaaaaccaggcgaggaaaaggatatacatgaagtttctggagtgcctaatcttaagcgtatgcctaatgggaaagcaaatgagcatttcaaactccatgaccttgatttgtccgggacagagtttaaagctgaggtttccgtgaatggtccattcagaacactgaaacatgaatgtggttcagcagcatggtttcagtctactaagttagctgttggggaagtgtgatattcttacacaaattatctgggctcatgctctgcatcgatactagctgctttgtgttggccaatttcgtcttcccacttcatggctcaaattaatttgcagcagcaaaatcattcgaacacttgctgctgcatgaactcatccttttcaagttctcacaagactactgggaaatggttgggatgacgcaggcatccatgaatttgggttgagcaaagttgaagaaaccacagattggtgtggtctgttctgcatcgagaaaatggaaattataactgtctctcctgggtgaagtgctctcctgagactgggtaaagtacgcaacacctgagttgatattgcttgcacgttgaacaaagaggatgtatttgcactccaacgtacaaagtgtaacgcattcggccccttttcaaagttgaggcccaaatggcaatgcaatgcatctgtcggcagttgattttcctgagtgccagattggttttgtaatccttgcggctatggaacgattgttcgtcaagtccttaagttattttggtttgtgattaaataatcgggcgtccgatccatggtgggcaccgttctctctacctgattttcttctgtcgctgcctgcaagcaacagagttttggttgccgtcatttcggtctgctgcaacaaagtttcttcttcgccaatctctgtattattattatattgtagaaagaaacaacattggagaaatagaaaccacgtcatattgcc

SEQ ID NO: 36093 - DNA, 2084 bp, Zea Mays
ctctaatcacatccaatcatgcaactccagtatctatgtgacatccatataaaatagaagagcagaacacattaaacctgggaatagaaatcaatggcagtagtaaaatccttttgtcgaaatgcattgtcacccttttttttgtagaaatcaatgggtgaggatcgcgcatcctagaatggcgcccgtcggagctgggagagcggcatgtgcgggttcagagagttgctgctagctgtgtttggctggcagggaagttggaggagagtcccaggaaatcaaggcatattatatttgtcttccacagaatggaatgtaggagagaaaacttgccaattgaatttttagatgttttttcaaagaaatattcggaactgaggcatgacctgatacggacagaacggcatctgttgaaggagatggggtttatttgccatgtcgagcacccccataagttcatatcaaactaccttgcaacacttgaagcccctcctgagcttactcaagaggcatggaaccttgccaatgatagtccctatggactataggaagcggatctgaccggcacgggcgcaaactcctagcagacggaggaggcgctagaggaggactgaccgacgcagactcctagtggacggaggagggacgggaagtgctgcaactgcaacccacaacggcgggcgggaagctccgcgacggctccgtgacggcggccaggaagggccgtgacgacagccggcctggacgatgtcgctacggcgaccaggaagggccgcgacggcggccaggaagggacggtggctgaaaaaaggattagaaaaccctaatcgtaacctgctttgttaccatgttactaaccttgggattaacaactgatgactagtgcctatggactatagaatatatataggcagtaggcctgggcctaatcggccttaacaggagcttgcacattttccatattattatataggcttcatgtgttttccttttgcagtttaatttttgtttgtactaagtactaacatactatatatatgttttgtatatcagcttaaggacaactctgtgtgtgcgatttaagagtgaagtagtagcatgcggagttgtgtatgctgcagctaggagacaccgggttccccttcctgaagatcctccgtggtggactgtctttgatgctgatgaagcaggaattcaggaagtttgcagggttcttgctcacctctacagcttgcccaaggcccaatacattccagtatataaagacaacgattcctttactgttaagagaatctctgatctacaggcttcaaaggaaagtccagcaagggctgttgctagcgataagggtacccctgtaccctcaagttctagccaggagaaggatccagtggctaagactatactgaacaaggtgaaggaaaaaagtgatgacgaaggtaaaccattgcccgctgaatttgatggaaaagaaaacccggtggcaaactcaaaaaatgacaagtctgattctggtgtcgaccggagtcgagaaagagagagatcaagagggcgggaacgtgatgccaggggtagggattctgatcgtgatagcaggggtcgcgagtctgatcgtgagagggaccggagacgctgctctagggaaagaagttcaggacactcagacaaggagaaatcaaggcgccattcatcacgcgaccgggctgactactacaattcgcattcatctcgtgagaaagatcggcataggcaccattgatcaaggtgacgaggatccccggtctgcagggcttcgctgcatggagaccaccacttggcagtgccgaccggatcatgaaaacttgtggattatcatcccactggtggttgtattggcttgattgtgttttgcaccttggattgtaacttgcaagatacgctagccatgagctgtgtgcaacttgaatttataaacacaacatataagatacaattgacgcacgtgcactaactgccattccagcagagcttgtggaatgttataaagaaacagtttgtggaatgttggcactgttagacctagtttggtgactagggaaacgaag

SEQ ID NO: 36094 - DNA, 6026 bp, Zea Mays
gagaggtattccatgtaatgccataatttgtgatggcatttttcagcaactccgggagcaaggccgattcagaagggtacaacttgaatgaaaaggccgatgatgatggcatacacgagtcaatccgggatgggaatgatggcctgaactctaggcagtggaacttaaatgagaaagcagaggatgcttaccacagcgaagcagagcaatatgagtctggccagtcaggtttgtacgcatcaaggcagcatgttcagagaggaggcagatcgtctggtggtccatggggcacaaattttctgaaggattccaggtccaaacagacggccaaggaagttgcatcaaatagcggtagaggaatggatgctgctaactcgcatgatgacatggatggtagcagagaggatgatgaactgaatagagcaaatggtgaggtgcctgctgaggaaatgctctcagatgactattacgagcaggacggagaggatcagattgaatcgttgcatcgtggcgggatgaagcagtcaagctgttccacttctggtggagcagcaaagtctggctcacgacaaatgaagaagatgtcaaagtacaatgcttatgataacgatgagtataatgatgagaatgatgatgacagcgatgcagatgaagatgatcctgctgacatggattttgagccagacggcgaaacagacaaggctactgataaggataagtttatggatagtgagaattctgacggcgacgacgatgatgaccttgaactctcagatgatgaagatgattttgttgagaatcggaggcaacctaaacgacttaagattgtagcaactaaaacttccaagggaggacagttgcccatgccagttcaaccaaaacgaggggtgtctcacagtgatgaagaatatttttcaggaaaagactcagatgttcccagcgattcggatttcaaacacataccgaaaaaacctgacaggttgcatcagaaacctgtgggccgcagtgatgttgccccaatcagttctcataatgagcttagaacttctggaaggaggaggacggtgaaaaagatctcatatgctgaaagcgaagaaagtgatgatagtgaggagaagtcaaataagcgacaaaagctcatcaaggaggaaccggaagaggaggatggagaaacaattgaaaaagttctgtggcatcaacccaagggtgtagcagaagaggcaataaggaatcaccggtcagctcaacctactgttgccagcctaacatcggactttgaccaacaatgggatgaattagagttctatataaaatggaaaggccagtcttacctgcattgtcaatggaagatactatcagagctccaaagtgttagtggattcaagaaggtaataaactacacgaaaagagtttctgaggaacagaggtacaagagggcactatcacgtgaagaggttgaggttgaacggatatttgctgatagggtcagcaaagctgatggagatgatctggttcccgaatatttagtaaaatggcaaggacttccttatgcagaatctacctgggaaaaagatacagatattgattttgctcaagatgcgattgatgaatataaggctcgtgaagctgcctcagctatacttgggaaaacagtagatttccaacgaaagaaaagcaaagctagtttgaggaggcttgatggtcagccagaatggctaaaagctggcaagcttcgtgattatcagctggaaggactaaactttctcgtcaatgggtggagaaacgatactaatgttatacttgctgatgaaatgggtctgggaaaaactatccaatctgtatccatgcttggcttccttcataatgctcaagaaatcaatggcccatttcttgtagtcgtgccactgtcaacattgtcgaactgggcaaaggaatttcggaagtggctgcccaacatgaatgttgttgtttatgttggcaaccgtgccagcagagagatgtgccagcagcatgaatttttttcagacaaaaaaggtgggcgtcatgtaaaattccacacgttgataactacgtacgaggtgattctcaaagacaaagcggttctttccaagataaaatggaactatcttatggttgatgaagcccaccggttgaaaaattgtgaagcgtcactgtatacaacccttttggaattcagcactaagaacaagctgcttatcacgggaacacctttgcagaacagtgtggaagagctttgggcattacttcatttccttgatccagtcaaattcaacagcaaggatagttttgttgagagatacaaaaatttgagttccttcaacgaaactgagctcgcgaatctgcataaggaattgaggcctcatattctacggcgggttataaaagatgttgagaagtctttacctcctaaaatcgagaggattctacgtgttgagatgtcacccctccagaaacagtactacaagtggattttagagcggaattttcagaatctgaataaaggtgttcgtgggaatcaggatcttgattggaacaatgttactattctttctcacctactattgctaggtcaagcagttcctcacctgctattgctagctcaagaagtttctcacctggccgtgcattacctatcaaactggagcatgggcaaggccacaagaaatgctgcaaccatccattcttgtttgaaagtgccgatcatggttatggtggagatagcatcggtgatcggaataaagttgaacgtattgttatgagtagtgggaaacttgtcttgttggacaaactattggtgagactgcgggagactaaccatcgtgtgcttatattctcacagatggttaagatgttggacatccttgcagaatacctctctcttcggggatttcagtttcagaggcttgatggtagtacaagagcagatcttcgtcatcaagccatggaacactttaatgctcctggaagtgatgatttctgttttcttttatccacacgtgccggaggacttggtattaatctagcaactgcagatacagtgataatttttgattcagattggaatccacaaaatgatttgcaggccatgagtagggcacataggattggccaacaggagacagttaatatctaccgcttcgtcacatgcaaaagtgttgaggaggatattttggaacgcgcaaagaaaaagatggttcttgatcacttggtcattcagaagctaaacgctgagggcaggcttgagaagaaagaatccaaaaaaggtggccccatatttgacaagaacgaactttcagctatcttgaggttcggtgcagaggaattgttcaaggaagacaagactgatgaagagaccaagaggaaccttgaaagtttggacattgatgaaattcttgagagagctgagaaagtcgagacaaagggtggtgaaggggaggaaggaaatgagcttcttagcgctttcaaggtcgcaaacttttccagtgtcgaagatgatgcaacgttctggagtaggttaatacagccagatcctgcagatatagttcaggaaactttggcacctcgtgctgcacgaaataaaaagagctatattgaagatcctcagcttgacaaaaataataacaggaaaagacgggcagttgaaacacaagaaaagccaaggaggctttctggcagaactgtggaaacagttaattcattaccattggttgatggagcagtagctcaagtacgagagtggtcttttggtaatgttccaaagaaggacgcttctcgttttgtacgagcggtcaaaaaatttgggaatgcaacccagattggattaattgtggatgatgttggtggtgtacttgcgaaggtaccgcatgaagcgcagatagaactatttgatttgctggttgatggttgtcaggaagcagttaaggagaatacagacattaagggcacagttttggattttttcggtgtagctgtaaaggcctatgaattgctagctcgtgttgaagagcttcagttcttggcaaagcgaattgcacgttacaaagatccaatcaagcagtaccgcatccagctaccttataaaaagcctcagtggtcagcaagctgtggatggactgaaactgatgacgctagattgatggttggaattcattggtatggctacgggaattgggagaaaataaggttggatccaaagcttggcctgacaacaaaaattgcgccagcaacacttggagaaagggagacatttttaccacgtgctcccaacttggataaccgcgctagtgctctcctgcaaaaggagtatgctaagtttagcggtaagagcttaaaagtcaaaggaaacacccgccagacagtcaataacgacagtaatagtggagttcgatcaatgaggggccggcaaaaggatgtaccagaaaaagatgataataagccgaacaaagatgacattcagaagcgtagggtaatagtggaagctgaagcaagagaagaaggtgaaatttctgaatcggaggcagagaccaggtatcgtcaggacaaagaggagaagtggcttgaatggtgctctgaagttttagatgaggagcaggaaactttgaagcgcctggataggctgcagaatacaagtgtaaacctcccaaaggaaaaggttctttcaaggattcgcaagtatctcctgataattggggacaaaattggagaagttgtccggcaacacagtgaatcttataggcaatcccgcatggtcatgaggttatggaattatgttgccaccttttcaaacatgtctggggagcaactgcatgatctctatatgaaacttagtcaagaccaactggaaggtggagttggcccatctcatggtggcaatttcacatccattcctcccaataagggaggtaactcaaatcaacttcatccttcgagaaaccaaaggccaactaggtctctccagtacaattctgagtctttccataatgagagctctggaagttctgaagcctggaagcgtcgacggagagctgacacagataatcaatttgacacccagcctttgtgtcaacctccaattatgacaaatggaaataggttgcaggaatctagtagttctgcaggtattcttggttggggtccagttgaaattagacggtatggtaatgagaggccaaaacgtgctgttcatcctagtcatttccctactgggcatggacctttgctgtagctgaaggaagtagatgatgcgaacaaccttgttcattttggcataaccgttcccagtgaatttcagcttccatatagttataaatggtggatctccgtaggaattgaaattctttttccaaaacaaaaaggaataaagagcaacctcacctggatcacagttttgaattatatgccttaaaaggtaatgccaggactctagaggcgacttatggaattgttaacagctacactgaatatccttctgacaccatcacagcaacacaaatacatggtggcttgtgaactgccaagaggatcaatcgaggaagttttgcctgttcagttttgtgatctctcaacaatgatctatagttaaatctcaatacataaattatgctttacattgtaatatattgaaatatggttccgttatgctccctccctctcgatgtgttttgtgccgtttttctaccgtgttgatgtaaaagatgaaagaaatgcatgttctcattttgaggcaacaaaaagttgcagccgggagcataatagtgaaatgcgatggaattatcggatacttatcgattccatagtgttttccctgagacaatgtactgaatgaggtacggttataagaaatggtgataattagcttagtaggtgctcagccattctacaagtcatctggtagtccgaagttgcatgaggcctactttcccctggttgccccacttatgctcagtaagtatgcttctagggttgtatgatgatggcccaattgaatttttaatcctgtgtatgaa

SEQ ID NO: 36095 - DNA, 1365 bp, Zea Mays
ggccactcctgacctgacccctcccaaatcccaacacctcgtggccttccgccttcgccgcccgtctccgctccgcttccccccgcggggcgggagccgggagtgcgcgctcgcgtccccccaccccctcacctcttcagatctccccggccgctgcctcggttggacctggttgtcgcgcccaggccaagcttggttgtgtccccggcgacggcgatgcggcgaggcgctgcgctgctcctggtggccgtcttcgccgtggtcgccgtagcgaagccaggccttgggaaattggagcagcatgagcaggcaaatcctaataaggagcatgtgacccaccaggaaggaggagtcagcaatgatattggtgacaacaacaagaaggataactcaacagaagtaaccaacatcagaagagatggctccatacagcagccaaagcacaaagatagcatcatgacaaagtcttcacaaccactagatttcttggaagattctcttatcaaggagtgtgatccatcacatagatgtatcattgaaaacaagaaattcatcgcctgcttaaaagtttctggagaagactcattggctctgtcacttctgatggacaacagaggcataaacccactagatgttagcatcatggctccagattatgtcactttagctgaagattccatccatgttgaagcaaatggtcacaatgagacacaagtgagagtttctgtcaatgatgatgcaaatagcacgacaatagtcatcaaagttgcagaaaaatcctgcaacatcagcattcacagtgcaatcacaagggagacggctggcagtggcagagtcataaggatgccacttacgccaacatacacgctactgccagtcttccttctcctcgttgcggtggcagtgtgcatcgtggtccggaggtggcgcaaccaggacggcgaccctgcgtatcagaagctagacatgtcagacttgccggtttcggttggaggcaagaaagaacatgacgatcggtctgacaagtgggacgacaactggggagatgactgggacgacgaggaagctccggtgacgccatccaagcctctgcccaacccttcgtccaaaggtctcgccccgaggcgatcggcgaaagatggttggaaagattagttagccacatgacgccacttaaaaggagcattgcggaaatagttccagtgcatgcagtatatttttaccttcatctttgttgttaaatatttctggaggatgctaatgtcagagagtgcaatacattgataccaagcagaaaattttgtgatcttcctctgccaaactgagtaactggcagctattgaatatagttattggacttccgac

SEQ ID NO: 36096 - DNA, 1839 bp, Zea Mays
cgcagcactaacacccagcccaacccaacagcagccagcaacctcgcaggctcgcaccaccacctcgtccgtcgcagcatcaggccagcagccggcggcgccgggcgccgtcgtgaattaccccaggacttgtcccctccagcaaacggagcgttcagtagagcacgcctcggcgatatcgcggcgacatctgctgcagcccgtggagcccaacgagagcagcatcagcagcagctcccgatcgctcctgctacccacggcctcgcccacgcctgcgtgcgcagcagcagaagcaaagtgattaaccatgattggcagtatagtatcagattcagagttcttcgtggcattctactctgcagctcatttgtagatatatggaattccttccctgagaaatgccgtcctctacaccaccatcagtacaacccacaccaagccttcaaccgttaccatctcctgcagtaagccagagtactcgtattgatgttcgtgagatcaagtccaagatttttaagacgattgggcctgaacgagcaaagaaatactttcagcacctggaaaggttcttatcttcaaaactgagcaagaatgaatttgagaagctttgtcttgttgcacttggccgtgataacctcccattgcacaaccaccttatccgttccatcctacataatgccagtcgagcttgtggcccacctgtaattaatgatcctaggctggtcagaggtgccaccacttctggccatgtgattgttcctcctgtctgggacaatggtggtccgttgaacctaaatgtcaaagagaacagaccattaagcagaagggaaaatctactaacccaaaagccatcactgaatcattgtgacgctattatgctggagaatggtgttcatcatttgagtgatctgaagagatgtacacaatttcaaaacagtgaccatgtggagccacttttcaagcgaccgcgaatggagaaggaaccattcagtttacataattctctgcagagcaatgggtctgctaaggcttcaagagaaaacctgggacaagaaattatacaccaacccgaaggtccagtgcaagcaccacttggcattcagttacgtcctggcaattttggtgtggcccgaatacccctttcttctgtgagttcaaaggatacctctgacacttgtatcgaagttggtgaactctgtgatactttgtcagtgaagaagaggttggacaaaatggcaggagcatctgggttggaaggggtctcgatagagtgtgccaatttgttgaataatggcattgatgttttcatgaagcagttgattggatcttgtgttgaattagttagagcaaggtctcgacatggcaaactaagacatgatgcattgaagcagcagatgtgccgaaaactaataaatggtgtatcagtacatacccatgtttctgggcagagttctattatacctccagagacaaattccatctccatgcaggacttaaaggcagtgatagagttaaacccttgtttgcttgggattaatgcatcactgttactagaaaagatcaattcatatgactagttggatggagctagttgtattcatctcatcacaagatcctatgaccttgatggtctgtcttgtttcatggctgttgtaatcaggccataattttactgacgggtagtggtgaaggcaggtgcattctgtgcagtaccctgattgtttttcatctcatctctggaccactattgggctaaagtgcttcagagataactatgttgctggactccaaacaaattgagccatatcacagatttgatctagaacgatccggtcgaag

SEQ ID NO: 36097 - DNA, 3034 bp, Zea Mays
gcgtcgattccgacgagcagcgctacgaggaacccatcaacgccgacaattggggtggattcttcgatggagcagacgtgtctgccaacgccgagttcgccggccactgggacaacccttcctccaaccccgacgcgactgcctatgtcacaccagaggttgcggtggaatcggtgcacccggccgcacgcggacgcttcttcaacgacgattcgggtgccccgcttgactcggacgacgacagctccgtccacggcggccacggatccgtgatgtcccatctcctggagcgcgaggccgacaccgccttccttccccacttggatcagcgggatggagttgaggcgtggctcatcctgcgccggtgcactcccgcctccttcaacgtcgcctccaccgaccccaacaacgaggtctcgagcgccgttaccgcggacgcgctcgctaaggccgcgcccgcgctcttcgcttcgagggcgcccagaccatcgctcaagtacctggagctgcttctccaggcagaaatcgacttcgaccacattgacctaccgactgctgccgccgcagagcacatcgtcgcccaggtcaccggcaacaacgcggtgtccgtggtggaggaccaactcaggtgcaccctcttcctcacgcgtaacttcctgtcaagccaccaccaggccgtcagcaaggagtgggacatggtcgccgtcgtgcacccagtgtgcaacgtgggggaaaagaaggtggacgccatctgcactggccagatcgagcacctgctactgcatcacctcaagcgttcacctacctcgattggtgccaaggcggtgttcgatgaaatgcagcaaagcaccaattccgcgacaacgacacccgcatcctcagctctgacaacaacaactactacaaccatggctgcaccggccacctggctggacgcgcagcctgctgtgtcgacatgctcatcagcatcttctgctcaagaagatacaccaataccactcctcttccttcgcggtggactgagtatgatggataatgtcttacctgctaattctactttcctgtctaccaacatatcactcagcaacatggagtgtctgagagagtttatgcttcaccttaagctcggcaccgccagattcactatttgtgacgaaagtgtagtgaacctgtggtcgtcgccggtggagcgagttgttcagcaacaaacatggctacaacttgagttgacaaatagtggtcttgacctatggcctatctcatggcaatcgcaacaagtctattttggtactcaccatggattcgctgcatggcccaggagccatggcacaattcttgtcttcgattttagcaataccttgtcctggaacaactcaatgtcaattgttgcttcatgctcaaccaacacccttcttgccaaggatgatggagattctatgaaccggtgtttcagttggtgttggaagcctccatggttacatccaggagtctgccgttctctgcacatgattactaaattttctaagcaatactttgttggcctatttttgctaattacaagggaaaaatttatgtctgggagaataatgttggctcttcttccacttctgaagctatttacatcaggaggagcaaggattgtcaatgcttcctcacttgcgtcggagctgaagagaatgccaaatgagaagttgcgaaacgatttgagcaacattgacatctgggacgaggaccggatacaagcagtactcaacacattcttggaagacctgaggagcggtcggctggaagaggctgggtggcccgtgatgctaccagcctacagcctgtcgaaaatggtcatcaatctgtacaccaggatcatagcaaggaggtatccggagatgcgcatcaactgtgtgcgacctggatttgtcacgacggacatcagctggaatctgggggtcctgacgcctaaacaaggtgcgagagggccagtcatgctagctctcctcccagatgatggaccaacgggttggtacagagatgaaatgggcgataagatgggcagcctattatttttcaaaatggtcaagtattcatcactagtcgagggattttgtggtgtgcagttttcatttcctaatattctattgtgcaagtcttggtcacaggagttagccaccaacacagaaagccatttactaccagaaatgctagaagcggccaatggttatatttgtcatgagcttcatcttatgcttacctctattggagtgacacatatgatcgattgtgaagatactccatccttcctgtgatcttccctaccttctcttgtatcttcctccactcctgctgtgtatcttcctccactcctgctgttcggttagggattagtgagtattgctaacagacggggacagaggatgtttgaaaagcgcagcatactcccgttgggcttcttgactgatttctccattactgatgatgtgcaaggccttcatagctttcttggaagattttccaccccaatcctgcatagcaaattccacaccaattccagccacccgcctgctacgtcttggagcattcgccttatagggctttgaagtcttctgatttgatgcaggtaatggaagaagggtttgtcaatagtcaaagtaaagtaaaactaaaagcgaccaggtctagaatcggaaccgtcgcctggtttgaaagctatgaagtagagtatgttcctaaagttttattttccagttctatagttttactttgaggtcttttgatttgatgcaaattccacaccaatgccagaatgctcttgtatggtctgccattagtcaaagaataggttcagttccataaacatgcatacatagtgcttgtcggaaatttgagcaactaagaggagatctgaacaaagatgtccataaacaaagaaactatctacacgagctcaatctcaatcacagacatccgcaaactgaatataggaacatacgtgtgtactacattcaggcattctggctttttcctgtctaggaagttctcc

SEQ ID NO: 36098 - DNA, 4509 bp, Zea Mays
gaaacaacaagacaagcatctgctgcctcgtctcctcgggctccggccggcgacccgccctcgcccgtcgcccccgccgaggaagcatcgcatcgtacagcagcagtacatgcgacctagagagagagaaagagatagtccagaggaagcaaggaaggagtacgtcgtcgacgtcgatctattcctcctcctcctcctcctccgatccgtgaatccaaagtccagaagcagttaatggtcgagaggggccacaacctccagccgttgcagttcttgcgttgagttggattgggttgccaagccccgccaaataaaacaaaagggcttcctgtaatcctgcgctgcaccgatggtgatagcgtcgggagccgttgacaggggccacctgtccccgattgctcccctgtcagagtcgccgtcgtcctcatcattcttctcccaggatctcgtccccactgagaggcaagttggattctggaaatcgtcagagtcaatggtcgatcacaaagggagcaagcctattttcacttctccactcgataaggcccatcccataggctcaagtcctgcaggtggtctggaacatcaacgaggtcaagccttcaaggggaagctgggcatgcttaaccttggtaatttggtggaccaacaagaaaatgctcctggcataccttcgatttcttggggtgatgtcctcagtacctccaggtccagtcttggcttgtctacaggagggacggcttttgttgaaccacccagtgctgatcaacatgtgcaagactatggagactgcttttcatccagctccttcactgaagtcttcggtagaaaatcaagattgatggcaagtggcgtttatggccaatcagctggtgcaaatgattccggttatgacggagatgaacctctagggtccatgaaagaaatggaagctcaaactattggtgatctccttcctgatgacgatgacctgatgtcgggaattattgatggctttgaatacaccggcttgtctaaccaggatgatgccgatgaagatatattctacactggaggaggtttggagctagagcatgatgattccaacaacgtcgacaaatttcgtgatgtgtccttcaagattcaactttctgagaagcactctatcgataaacaccattccagagctcttattgtaaaaaatattaatccaggcatcgagggttctgatttaagggctctgtttcagcaatatggggacgtacagacattcgacacatcctgcaagagccatggaattgttacagtgtcttactatgacattagagctgcacaggacgcagtgagagcagtccataacaaacctctggggctgatgaaacttgatgttcaattttcccttcctaaggaaaatgttccaaacaaagatcccaacaatggaacactggtggtatctcttattgactcttccatctccagccatgatcttctccaaaaatttagtgtttatggcgatgtcaaggagatttacaagtctcctacaagctgcaataagaaatttgtagaattctatgatatcagagcagcacaagaagcactgaatgacctcaacaagggtgaaatatcatgctcacaaatcaaagttgagcatagcttttctggaggagcaggatcttgcttcgcagagcaatattcaggagaacagaagcaaaatgccgtagctcaccaacttaagaactctccacctgggaccattgggaagttagatactaagagttgggacagcagcactgttcataatttatattctccagttagaccgcaacacgataaatcacaacatggcttctctgtgaatcctcctcagaagttgtcatcgcctatcagaattgaatctacacagcagcatagtaatcaaactgcttttggtgaacatagtggatctcttggtcatggcaactttggaggtgggctgcaagccttccacccgcactcactgccagagtgtcacaatggtatttgcaatggctataactccatgacattaaatgcaaggaattctaacttcagatttactgaaggaatagactacaataatcacaaagttgaccacagtgaccttcatggtcattcctctgatcaaaatgaagcaattagagttgctggaattggaagttgcccccttcatggacatcactatacctggagtaactcaaatggttttcctcaaagcccctctgctccaatgatgtggcctaactttcagcaaccagtgcatatgcattgctaccctgctatgcctcctcacatccggcgcagtgctgcccatcctatggaccaacatcacttgggttcagctccaaacagtgttggtggttttgcaaatgcacactcttttcatccaggatcccttgaaagcgtagggtttcctggcagccctcagctgtatccatcagatctctctgtatttgcatctgccagaggaaattacagggagaccatgttctctgccataagtgccgggtttccatcaattcagcaaattcttcatgcgaccaacggaaggaatcctatgatgcacgtctccacctcatatgacgccactaatgatcgcataaggagccgcaggcatgatggaaatgctgcccagtctgaaaacaagaagcagtttgagctggaccttgaccgcatagctaagggtgaagactcgcgcaccacactgatgataaaaaacattcctaacaagtacaccagtaagctgcttttggctgtcattgatgagaatcaccgaggaacttatgatttcatctaccttccaattgattttaagaataaatgtaacgtgggatatgcattcatcaatatgacggatccacagcagatagttccattttacaagacattcaacggcaagaaatgggagaagttcaatagtgagaaagtggcatcacttgcgtacgccagaatccagggaaggaacgctttgattgctcatttccagaattctagcctgatgaatgaagagaaatggtgccgccctatgcttttccacaaagatggcccgaacgcaggagaccaggaaccattccctgtgggtaacaatgttcgttctcggtccgggaggaacagaccacttagcagtggttcggagactaccaaagaggcaagtccatcaacctctcctaactgaagagaagccggctcccgatattccaactcaggacaggcaggcggtatttgctcactaactggaggctgaagggcatgtaataaatcatccccagttttgctgcttctttttcttttggtcctcgtcagcaaggtgacctgacttgctgagtgtgactagctaacgagaattctgcactgcatgagcctgctgaagattcaccttaaagtaactatgccttggttttgccataccattgacgtcaacggctacaggtaatggagaagacctggagtggtagagggaggtgtgtttcaggcgggtgaaaattcaagttgtacagttgaactcaccaggattggaaaatggtcatcaattcaaatttgagttgtttttcttagggttcttcttgctatgtttgatctcgtttatgtgcgtgtcatgtgtccacggtgtgagcccaaatgtttgaatgccttgtctttgtgcaatttctctcaaacctcagattctggtgtgctggttcattccatgtcctcttttgtttttcaaattcaagatttattacatcataaacatgttacaaagatggggggtcatgttgccccgaacaatccaagtttcaaaacacatgctagatattacaggttggagaatgaagcccctagagaaaaggcatggatttggggtagttgcccgtcttgctttttttttgcaagaacatcagctatcttgtttctctctaggaacctgttgtgccaaaatcatggcgtaagccaacacctggctgccagttaacaaaattgcatctcgcagatcgagtgcagcagctaccttgaaattaaataggaattgcatcctggaagaaagaagcatggggaatacctgtagcaggtcggtctcccccaaaccaaaagaaatggctgcaacactgcgcacagcaaaggttccacacccaaaaaagagggcgcccagcacccactaccttcagcatgctctgccacggcttctggtcctcctcgctggactgtcatcagctcccgtggcattcacactgctccgagtcaccctgcggccgctgctcacagcagggctgccgttgccgtcatcatgcatatcaccactcttcctggtccgtttcataggagtgacgcacacatcaacctcttccactgcagcactgctcttcaccctcttgccaccagtctcagcatcagccttgtgcttcgtctgtttcgcagcagcatcttcatcagccgtgcgcttcttcggctgtttcgcagcagcatcttcaactaacacatccaccacttcagccgcgcccatctttgactttttatcatcttttgcaccctccattt

SEQ ID NO: 36099 - DNA, 1946 bp, Zea Mays
gggccggcgtcgagtggagatccaatcgaaaatcgaactgacttcatcttctgttggtcaacaggagagcccgttgaaatcctggacctctcaattgtccttttctctctccccgcccaccttcccctgttctgccgcctccccagtccggcgtgcatcagcagcgacatcagagtcggcgatgggaggcgtcatcgacgttctcgtccccttatgttgatgaagtggtgtgccgtggagattccttgaccgatttcttgccggtaagacggagtctgccatctgcgtggctggtcatcgcggtgagcaaggaacgacgaagtgcgcccctccgcccttcggctcgtcgttgtgccttgcgtcgtcggacaaaaagagtagagcagcaaaatggagaaccatggaaaattggatgggtgggatgaagttctggaagaagaagatgagttagcgagtgtatgcaaatatcctattagcacatcgtacctttcttatggaacaagcagaaggggcaaaagtgtaaagaagcctagattctcattacgaggatatgattttgttccattagatgttaagactgataacttgtgcattggggagcaagatggttcttctgcagtgccatcaactaaagcttcacaaaccatggtggctgaacggttggaaaacgttgaggaacaaactgaagatttggcaccagagtttgcccttccacccaaagcaaatactttagtttctgagctgctagataatttacagcgtaggggtggttcttttgtcaggacaccatctttgttgcaccaacatgctccaagcatatcaatcagggagcaggaagtttcatccggagtgccaccaactaaagcttcacaagctttgatggatgaaccgtttgaaaatgacaatggacaaactgaagagttgccatcagagctcccctgctcgatcaagagaccaaaattttcagttgcagaacttctagaagacctacagggtagaagtggttcttatgttgagacagcatctttgtcacaccaacacaccagagctaaacattggaagccaaagttcctttcttccgagaagaaaacaatagctattctaggagacaggagtattgacagtgaggaccccttggagcatgtaattgacggaacatctagcgaggaggaagatgctactcaaaaccacttgagtttggtgaacaaagatgagaaccagcaaactatggctgacctatttcaagaagtttttaatccaacaaacatggatggtgccatgaaatcaatgagatcaacaggagctggtaactatggaagaatgcaacagattatgcacatggagaaagattggcatgtggaattctcgaggcagtatagcagagagcacagttattcaggtgatttaaagggaactactgttcagattatgtcaaggtcattggaaggaaagctaacagtctgcagctgcatgttccaggaaaagggcaatgatgccactataagtaatgcctcagcagacggcaccatggatgaaagcagaactaggaggactattatcttcagtccaaagatatgtaacaatgtagatcttctggttggaaacataattcatatcttcccaccatggaaggaagttaaaatacaagaagagcatgtgattatttgcacctacttctcgcaccaccaccggacttgatactcggagatatttctgtgctagctgcaaagctagaggcagaccgccagcataaccgttgctgacagtttaatgttgatgtactcgcagggtctattctgtttgttttgtaatcacaagtgtactggctgcaaagctataggcagaccgcaagcataaccgttcctgatagcctaatgctgatgtacttgcagtctctcttctgttttacaatcacaagttactgaggcctagttcggattctctaa

SEQ ID NO: 36100 - DNA, 2299 bp, Zea Mays
ttatttttttatgtgaatagatacaaaacaaaattacaacctatatttagagaactattggagaactcacatttttttactccaaaagccatttagcaacttcttaaatctataatttagagagctaaaatttagctaactattggagttgctctagagccaacatcgtttcagagtcccatctgaactccgtagcgtgatagcagagggcggcagcagcagcaaatccctgctccttcctcctccccggccccaaaaccgcacaaacccctgctcctcctcccgccgccgccgccgccggggcacgccgggatgcagaagccagtggcctccgtcgtctccctatgtccgcagctatggcaccgccacttccgtcgcgctcccctcctcccccgcgcccgcggcctcccctcctcctctcctatcctcacacgccgccgctccgtactcccccgttccacttccactcacctcgccgcggtgtcaaccgctgccgccgccgccgccgccccatcagccacaccgtacccagtgtacgatcggcttctgccgtgccccttgcaggacgaccctccgagaatcgagcacctcgtggctcgggaggacgaggtggcagccgatttcatcgccaggtcgctcggcctgcctcctctgtatgctgcagacctcatcgagttcggtgctgtgtactacgcgctcgtcgccccgcagccgcctccctacgcttctccggagcattttaggctctttcgggaagtcaccgagccttccgtcctgcgccggagggcgtccatcaaggggaagacggtgagggaggctcagaagacgttccgggtgacggaccccaaccagcgcctcgaggccggcacctacctgcgggttcatgtgcatcctaaacggtttccaagtctttacttcgcgtgcattaggattggaaacgccattgctgacgactcaccagattgacaactgctctgaaggctggtttgtctatcactttatttgtatatacttatttgctaaaatgtgggaataggcaagcaatgtcatcctttttcgaaactttgcagtgtggtactatctaaaacgaaagagttctgctctgttttccatggactgataagggagaaacaggttaaaaaactctatcttgcacttactacagcacctgtgtcaacaggaacgattacccattatatgcgcccagttaatcgcgctcctagattagtttctgaagactgtattgaaagatggcatctctgtcaaatggaggtactcgattgtagcaaggtaccatggccaagctcttcgatcaggaaagcttacaatgtaaatggttgtgggtggccacagcaagaagctgcttacgaatgtaaaatcaatctcttgacagggaaaactcaccagataagggcacagcttgctgctataggcgctcctattataggggattctgcatacatgactgcagcaatggcagcgatggccaacccaagcataaacccattcggtagagagaggctgagttacaacagtgaagaggagaaagaagccgccgtcgaagcatggattgcctcccacgggaaggaaccaaaatccgtaattgggctgcaagcgtcagagatctcttgggatcacgagggcaagcaccattcttacaaggctggagttccgtggtggtggcaggatcctgactcctgagtgcgatggtggattggatgggggagttccatatgaacccctggaatctcgcctttttagaggacagatgtttttctacattgttccgagtgctgagcgaccactgtccaacacgaacattggtttggtttggttgctgcgcagaaattgttgggtcaccgaaaactgaatttgggcttgggagatgaaactaagcccgagtctgagctctcgaccaggccaacacgaacaccacaccagagctccttcaactgggaaaagcagatccaggccaacacgaacattgctttgctgttcattctagggcatgcaacgtcattcgttctatgactgtagctgtatggttgtgtgcaaggcctagcttctatttgggacagctctcaataatattccctggagattgagttggggtgagaccgtctctcataaagtcagtgaccgaaacatcaaattttttaaaggcaagcatcttaaaatcgataatggggcgtttggatccctcatttaataggaattgaagttcacttaacaaagtaacctatttgccttatttgccttaattggtatatgtcaaacgatccaaacgggcgttagagaa

SEQ ID NO: 36101 - DNA, 266 bp, Zea Mays
tcggatattgtaaaggtggtgattgtcattggaggatttatgcacgagaggaaaagaaaggtttaccgaccattgtggttgctgtattgcatgatacgcatacttgcacatctagtggaaggaggaagacgactacaccaagttgtggatgggtagcttttcacgctttaccacttcttatgaagaaaccccagatgggtgccaaggaattgcaagatacactttaaggagttcacaatgtcactattgggtacgacacagtttgg

SEQ ID NO: 36102 - DNA, 925 bp, Zea Mays
agaagtcttttgccgcctgtaatttttatgttatcttcaatgtcccagatgcacactatcaaaccacttgcattcacaggtataatatactgacaatatggagtaagcattagactttctttgcagatgatgcatctgcatgccattaaattttgcagcaagcatgtggtgaatagatcgcaagccaaaccacgcgaaattgcagccaacggaagtgcaggagaagtacatgaaagatgatgagtttgcgcaactgacaagcaggatgcaatgaggctggcggtgccgtcccgcacccccactttggtagcactacgggtgaaccacgacagtgtggcacgttgaacttcggttgccagaacgatgtgaaacctgtctaaattcatgtagctcagttgtaggtgtttactgaagctgattgctgtagttgcctgatcttctgggagtaccctttgggcagtaaaaaaatgcacttgtcaccggtgaccaaccggtcatgtcctgttttgtttgttcgcttcaacctaactgttcgactgcttgtttgaactgctgcagctataatctttagagacaaaacattgtagtgtttggactactgcagttgtaatctttagaagcgaatttttagaaaaaaaaacagaattttgaactttgtcaacattcaaaattaggttagcttaaattggatgttgatatgacgtgccatgatgtaacgtactaataaaagtttaggggtccatgacactaaatgctaagtttagggcttattctcttttttgtgaggggctgcaaatagcctggtttgcagtcgggctgcaacaatttttttcctgtaatatagcatgtcaagtttaaagacttaataccaagttcgaggatccatggcatatagcatgccaagttaggagacctaatatcaaga

SEQ ID NO: 36103 - DNA, 1379 bp, Zea Mays
ttaagatcgaaaccaggccaggagttatgcaatactgtgtttccaccatactcgtgatgatgctaggcaattcatgaagtatcttcatcctgatcttggtgtcgaattgcctgaaagatcttatggaactgattgtcgcatatatgtccctgatcatccaaaaagcaggtttaacaatgtttatgagatcatttttgatgaatttgttatagctcatatccttggatggtggggtaaggctataatgatacgaaaccaaccacttttgtgggtcttgtcaattggttttgagttaatggagctcacttttcgtcatatgttgccaaatttcaatgagtgctggtgggatagcattgtcctagacatattgatatgcaattggtttggtatttgggctggaatgaaaaccgtgcagtacttcgatgggaggacatacgaatgggttggtttgagccgccaacccaacattatcagtaaggtaaaaaggatgctgggacagttcacaccagcacagtgggacaaggacgagtggcaacctacgctgggtccttggagattcatccaggtgctgagcctttgtgttgttttcatggctgtcgaactgaacacgttcttcctcaagttctgcctgtggattcctccgcggaaccctttggtcgtgtatcggttggtcctttggtggttaatcgcgataccgaccatccgggagtacaatacctacttgcaagacagcaaaccatttaaaaaggtgggatccttctgctggctttccctggctatatgcattgtagagctcctgatctgcatcaagtttgggcatggtctgtttccgaggtcaatgccttcgtggttggttacgttctggtcagcagtcgccttgcttcttgcgctctttgtgtggacatggaaataccgaacagtgaaaaggaaaagggtataattgttacaaaggaatgtttattttgcctccattctttacccaattcggtgttaccgtgtacataaaaaatctattcaaattgtgtacatgtagcagtagtagtcagttttggtgatctgaagaggattatccatggtaatttttttttgccttgtttgtcttcctattttccgtcagcaaagtattttgaccggctcttagatgtggattttaattttttcagttctcaatcccaaaccgttgaaaaatgtttctggatggcccaggcaaccatatgtgcaggttacaccacactgacactgccttgggcacgggaatttgcattgtgatgtgtgaagataggggtagccgggtaggcctgtcttgctggtgaatgtactcttgtcaggctgggacactctagtctaggttggtactccatagtcttcccggcttccag

SEQ ID NO: 36104 - DNA, 1073 bp, Zea Mays
ctcacgtctgactccttggatatttctcgacatctattctccctgatttttttcatcgtccgtgactatgtggaccgctgctcgtctctccctcagaccctcacgacatctgctctcccacgcgtcctgctcacacaggatatcactccctcagttatttcttcctctaatatctcacgagcttggctcgcctcgcctctctgctctctccttgtcctcctgttgccgtgctgcaaaactatagcacgccggagcaatggacgggctcaactacagcaagttgcgctcctcgctccggcctcggctccaagcgttctccggcgtcctcttctccagtttgcgctccctagacgggctcctgcacatggcgtctgtcgccgtcttgcagtttgtccacgatccgcacgatgatccaccagtgctaggctgcgtacacttgactctagctcgcgtatatgccttggatcgagctcgctctctttctctcgtcaaggaccacttcacaaccttgggaaaagacctcaccgtcattgggtactgctgcgatgatgctgaaccccgtcgtcgacaactccagttctacgtcgccgagtccatgtttcgggtagcagtatgagattggcatagagagctagatgggtgttgacacctttttggaggggccaatcatttcaaaagaaccagcggcggtgctctctggtcaggcgcggacggtccgcggcacagagccggacggtccgcgacctggcgcgaggcggcggtgctccctggtcagacgcggacggtccgcggcacagggccggacggtccgcgacctggtgcaggagctaggatcccctgcctgacggccggacggttcgcgcgtgcgtaggggcggcggaagatcaccggcggctcctgaatctcgctcccgggagggaccccgtttgggaggagagatcctaggagttgtctaggctcgggcagaccgacctagactcctctaatcgacgtagagtcgaggagaggcagagaatttggggattggaatactaaactagggctaaactagaactagactagaactacttcta

SEQ ID NO: 36105 - DNA, 237 bp, Zea Mays
cacagctcagctcgcttgccacctccgcaaggttgttgcacaacatctttgaaactgagcactggtggaagaacgccacccccccacgaacatctcgcagaggtggacaaagatggccacctggaggatgagtagggcgtgaggtgctgatggtggaagccgtgctcccccagcaacaacaagaagaaaggcgagatcggcagcgccaacacgcaggagacgaagagcacgaactcc

SEQ ID NO: 36106 - DNA, 1779 bp, Zea Mays
gcgtcctcgtctaatcaatctccgcctccctgcctccataccctgaccggaccccgatcccgccggcgtctcgcggaatcgcggcggtcaaagcctatacgccaccccacctcacgtcgcgccgcatcgccgcggtttccgcgtgctagtgctctcgggagctcggatcagaggggcgggctagggttcgccaatcgccagcgtgggtactgccgtcgggcgccggcggccgagtagtacgaggagagatggacgcgttcctgcacaggctcaagcggctggacgcgtaccccaaggtgaacgaagatttctacaagcggacgctctccggaggcatcgtcacgctcgtcgccgccgtcgttatgctgctcctcttcatctccgagaccaggtcatatttttattcgtcaacagagactaagttagtcgtggacacatcaagaggggaaaggctacgagtaaattttgatattacttttccgagcattccttgcacactcctcagcgttgatacaacggatattagtggagagcagcatcatgacattaggcatgacatcgagaaaagaagattaaattcacatggtaatgttattgaagcaagaaaagaaggcattggcggagcaaaggtcgagaggccgttgcaaaaacatggaggaaggcttgacaaaggtgaacaatattgtggcacgtgttatggtgctgaagagtcggatgagcaatgctgtaattcttgcgaagaagtcagggaagcatataagaagaaagggtgggctctaacaaatcctgacctaattgaccagatgtcagtaaagttgctggaaattttcacttcgccccaggcaaaggattttatgaatcaaacatagatgtgcctgagctgtcattacttgagggtggtttcaacattagccacaaaataaacaaactgtcctttgggacagaattccctggtgttgttaatccacttgatggtgctcagtggacacagccagcttcagatgggacataccagtatttcataaaagttgtccctacaatatacactgatattagaggacgcggtattcattcaaaccagttctcggtaacggaacattttagagatggaaatgttcgtccgaaatcccaacctggagtatttttcttctatgatttctcacctataaaggtgatattcacagaagaaaatagatccctactccactacctgacaaacctttgtgctatagtgggaggtgtgttcaccgtttctggtatcattgactcgttcatataccatggacagaaggcgctcaagaagaaaatggagttaggcaaatacagatgatcaacttggaccttgtactggccccgtcgtttccaaattttgaggcatgtaaggagcttatatgcctgctaaacatgacgagtaccacttaagtcggagactgcaaggccatcaaactgatgttattgcacattagctgatcagataacttgtaaaatgacaaggaatagcctggtctgaggggtgggtggcggtgtgtgtgggtgtgtgctttgatgcctatcattgttgactgttgttgaatgacatgtttgaaggtggataggtcagatcacagaatgtttctcatgaaagtttgttcaaggaaacagcttcactcatggtgtcacccatctttctaactttgttcattggttatcgccgctctttattatattgctttacacctaatgaccttagaggattccgttatatcattttatttccagttgaggtatccagtaaatata

SEQ ID NO: 36107 - DNA, 1114 bp, Zea Mays
cctggctcctagcagccgccgccatcccttctccctctccctcctctcctctagcttctctccctcgcttccctcccctgcagcttcctcacgccatgcttccggacccgcgccaagccttggccacgcagcgagcgcccaacccgacgcagccgcgacaccgaccctgcccctccctgcactcgacgcgcctggagccccgccagccgagtactgtgaagcgcgccaccgaccggcatccagacccgcgtcgagccccagcccgacaccccggcttccccgcgtctacgcagcagcgccctgctcatccgcaagaactggcagcgaagcttgtcgttaagggatccaaaaacagataaacaaaattgttttgggctgattccaaaatgacccaaatctgaacttttgcaagacattaaggagttcttttccttttcaggagatattaatcatgtggagatgcagaggattgacggagaggaagcaaaaaatgactgtatgggagaatatgcagaaagctgaagcagaagcagccatacaaaaccttgtgataaaacttgaaaagaaaaggccatactcgctagagaggattttcaacacccttaggtctggctctcggaagacacaggtggtacgcagtacatcaaccgcaaatcagaatcagcatatttccagaactatcaaaacggcgccaaacctcagcaagaacggtcaaatgagttcattgagtggatgcttcagacaagatctatagcatggatcataatctggattgtccttaagtttttattgtgctaggggaacataagaaagtatgtagagcaaaatgagaggagctgttgttaccctcaattctttgtgattattgtgctagagtgatgtagttgtttggctttttgaacaatagctggagtgatatgaaacattagtgatctagttgtgaatgatattataattgtgatggttttgtgaatatataattgtggtgcttttgtgtttatgtgatggatctatgactgtggtatactgattaactgtgtatgtctttatgatttgtgtataaaaatctgtgatttatggtgcttaattaaatgtatattattattaataaaaa

SEQ ID NO: 36108 - DNA, 2677 bp, Zea Mays
gtcgtcttgccttcctcgtcgaatcgcgcgcatctccgctccacaaccttcttaattttctgaagcttgggcgggatctcggctcgcctccgtccatctctatggcgccacggggccaccacctggcggaggtggccctcctcgcctctgcttcggcggacctcgcagccgcaggcgccggcgagagggaggggtggttggacgaccccgccatcctcccctcgctcgggccccgcgcgcgatctctcgccgtggccagcgcggcgcactccgtgctcgtgatcgtcgcggtggcgggaggtggaggcggcggggtcacggtggagcctgcgctggggcccgacgagggccgaatctccgccgttgagtgggtcccgttcgccggggaggacgatgcagagggggaggagggggtgtccgtggtgatcggcacggacgctgggtggctactgttctactcgctcgcaggcgatctattgcacaagcaggtcgttcgtaagatcctatccatctggatctccgtagatacagcgttctgagaattatttctcattattggtgctatttgtcataattctcataatttttaagaatatcaggctgttttttgcccggttttgctatatcatgctcgagtgagaaaagctcaaaaacttgttcacatgacaaaatacttttagtaggatcacgtaagttccaaatataatcttcaaatgtgtgagttctagcagtacagtccgaatgtagtttcagtataaggtggttgttttaaatagaagatgttctgcttagatgccttctacttttatggactatgctgtctatctctaagcgttagcaaatatgcatatttgtttttgttacttcatgccttcatggtaaatggtaatagtgcagtccttgaattgttatttcagagtatatatcctgcaaagatactgaaactcaactttcgtgagaggaaggagaacgcttgggaagattcaggctcagatgaactttctgtagtgtttcctggtgttatcgcgcgctttgatggtgctgaccttcaggctttctgtgcatgttcaaggataagaactgaattcttggttgctcacagaacgttcttaaaaaagcatttcaagatgtaaaatcacgcctgtggaaagataagtttgaagagcaagatgctgaggatgaggaaacttttggacgaataccctttcagatttggaatgtaaacaagttcagttcatgcgctgatgctgcaattgttggtctgatgccacctcccttgttagaacttcagctgcttttatattgctgggcagtcaagtcagcgccactactgtgccatcacagttggagaggatgctgtagtttcagcatataggttatcagaagatagaaccaggtcaattgttggagcaattttgtcaagaggtgtagctgcaacattttcgacaatatcatctttgtccaaaatactatggcggagtgagccgtcaccacctaaaaagtcacggccaaagccccaatcctttgcaaaaacatcacccctcacctgcttgaaagactccccaaggaaaggagaacggcttacactctctccgagtggtacgctggctgctataactgattcacttgggcggatactactgctggacacccatgcgcttgtggctgtacggttatggaagggctatcgtgatgcttcatgtctatttgtggaaatgcttctgaacaaagacaaggcttcgtcagggtcgatgcacatagagtatacgaagagtgactattgtttgtgtttagcaatccatgccccgcgaaaaggcataatagaggtttggaagatgcgcaccgggtcacgcctcctaaccatcccatgccccaaaggaagcaggatcttacaaccctcagcgaggctctctacgtcgtcgttctcaccttcgtattccccgctggaggtttacctgttcaatggagactctgggcaattgtcagttttgaataggcacatcggatgaatcatttgttcctttgttgtgttattaaattgttactgccaagtgttgtagagaattacttgtttcagtgtttacagttttgttaatcaagaaaaaaaagtgcgtgggtcaggattgaacaaacagagatgaaattgggcggatggataaaccagaagcagacatgaatgcgggaggggagtggcaaaaaaaaaaaaggagagtaatcttggcaatagatacaggtttccttttacctctcttatttccagcccgtggaaactaccaaaatataccctaccccttatggcctcatctctttattaccatgaatgggaacacaactgaagacctaccagagtctggagactttctcacgttcgtctctccctcgcttggccttgagcatcgccgggggaagatgtaggcgaccggaacaggggaatccctcctgggtaaggttgctgtcagcagtccctgatccttctctttagaatgtgttttgtacagctgtgagttttgaaacaaagctgatgtgatctgtctgctatgaaaaagttgttgagtgttgtaaaagagctaaaaattatttggttcaaacggctgagtgaattgtctataaataaattgtatatcgtttatatacaattttgttcaactatctcttaattaatgtatcgaataaaaac

SEQ ID NO: 36109 - DNA, 4651 bp, Zea Mays
attggaaggccactggaactggatacagatggcatttggtgtgttttgcctggctcttttccagaaaactttactttcaagacaaaagctgggaagaagctaactatatcttatccctgtgtcatgcttaatgctgacgttgcaaggaacaacactaatgatcaatatcaaacattgaaagacccagtaaacaagacatatacaacacacagtgagtgttccattgagtttgaggttgatggaccttacaaggccatgatcttacctgcctctaaagaggaagggattctgataaagaagagatatgctgtcttcaatgaagatggcactttggcagaacttaaaggttttgaaatcaagcgtagaggtgagctgaagctcataaaagtttttcaggcggaggtatttgacaaatttcttcatggttcaactttggaggaatgctattctgctgttgcctctgttgctaaccggtggttggacctactggataatcaaggaattgatattgctgacagtgaattgcttgatttcatatcggagtcgagcacaatgagtaaatctttagttgactacggagagcagaagtcttgtgctgtaactacagcaaaaagacttgccgaatttcttggagattcgatggttaaagacaaaggactacattgccaatatattgttgctcgggagccacaaggcactccagtgagcgagcgtgctgttccggtagctatattcgagacagatcctgagatcgcaaagcattatttaaggaaatggtttagattctcctctgatgcaaacattcgatctattgttgattggtcttactacaagcaacgcttaagttcagctattcagaaaatcattacaattcctgcagcaatgcaaaagatctcaaatcctgttcctcgagttcttcatccagattggttacacaaaaaggtcagggagaaagatgatcgatttcggcagcgtaaactgcgtgatatcttcagtcccttggctaaagaagaggggctgcataacttgaataggactggagatatggaagatttattaatttcaaacaaggatttgaggaaaaatccttctcatggtttagacattgacaaagaaaacaatccaaatggagcatcagtgggatctggtttgaatattagtaaaaaacaacaaaactgtatgactgggttaaatgttccttgcacttcacaaatccaaaatgctgcttcttatgaaacagttgataagggtactgactatcaaggatggcttgatgctaagaaaagaaaatggaaatatgtccgtgaacaaaaaaaacgtcgaaggttgggtgctgccgccacttttgacgatcctaacgctttgctctcggccagacatgccaatcagctacctgtcaacagtcggaatagatctacatttttccagaaacaagaattggccctctttagatcacattggcagataatccagcttgcttcaagtacagtgcctggtcacttttttgcgtgggttgttgctgaagggattatgttcaagattcctattaatgtgcctagaactttttacctaaactcaaaggctcctgtcacagaagagtttccaggaaggcgtgtcaaaaagattctcccacatggtagaccttgtttcaaccttattgaggttgtaacaactgaagaacagttcagggctgaaggcaaaaaacttgcagctcatctagcagagccagatgttgagggaatatacgagacaaaaattccaccagagctcaatgctgttctccaaatcggatgtgtctgcaaagtggacaagtctgcaaaaagacgaagtatacaagatggatgggatctagccgagttgcaaatgaaaacaaccgccgagtgctcatatctggaacagacattttcatttttctatttataccacagtgattgtcaatcctttccgtaacaaagaaatatctccgtcatttcttgaaaagcaatttggagatgcttgccaagcccttggttctgtccctgagaatctgtctttccatgtggactaccaaacatcaattgatgctggaagcaaatacgcacaaagaatgttacttgagtacaggcaacaacattctggacctgtcgtaggcatcatagagtgccctaagctccaagctataaaggtagctatacgagcacttgatgatttgccatgtgtaaccattcctagcaatgcacgtgacaacaactatcaggctcttggctggcaagcaacagctggccgaacaagtatgcagcgttgtgctgcatcaacccaatggttcaatgaacggatttcactcgctaaatatgcacatgtgccactgggtaattttgaactagactggcttctttttactgccgatgtattcttttcaagggcattgcgtgatcaacagcaggtactatggatatctgatgatggcattcctgatttaggaggcacttatgaaggagagacatgttttgctgatgaagtcattcagcctgcacttacttatcctggtgcatatagaagagtttctgttgagcttaagatccaccatttggcggttaatgctctcctaaagagtagtcaagtggacgaaatggaaggaggatcaatcggtagctttggaaacgacgtgcctccgggttcaaatgccactgaaactgactttgatgatgctagcttatgtatacctgctttccaggtgctaaagcaacttattcaaagatgcatttcagatgcagtgtcgtctggaaatgtatttgctgatgcaatattgcaacatctctaccgctggctttgcagcccacgatcgaaacttcatgatccagctctccatcgtcttcttcataatgtgatgaagaaagtctttgctctattgttggccgagttacgaaagctgggggctaatgttatttttgcaaacttttctaagataatcatagatactggaaaagtagatttgtcatctgcacatgcatattgtgacagcttattaaggaccttgcagacgagggacctcttcgagtggatagaattggaaccattgcacttttggcattccttactgttcatggatcaggtttgtactttttgtcgtgttaccacactatgttgatttagacttctttttttttgcctttgatggttctttatcttatgttgttttatggtttagtataactatggcggaattcaagctaaaacacaaaacgtagactcttcagatggtgataatgatattgatattgtctcaagctggaacatggcagaagatttgcccaaagatacacaggatcattttgtcttaatcgtatcagaattcctatatattccgtggaaattcatgaaggaacaagtagctgctcaagctaccataagggatgatacctcatgcactccatctgtaacaatcatggctgctgagaatcttgagggccaggtgatagaacacctccgtgacaagattagcaattactttgcagacaagcttctaagaactgtaagtgatatacttcaccatttcaaagggaaaagcaaacatgagtcagatgaacctgcaaaatctgatcctcacacgcataaaggcgatgctgcattggagttcattaagcatatctgtgcagttcttgctcttgatcaaaatgttcagcatgatattttgagaatgaggaagaacctgttaaagttagttcgtgtaaaggagtttgctccagaagcacaattccaagacccatgcgcctcattcactctgccaaatgtgatctgcagctattgcaacgattgccgggacctggatctctgccgcgactcggcactccagggccaggagtggagatgcgcggtgccgcagtgcgggcagccgtaccaccgcgagcagatggagaacgcgcttctgcaggtggtccggcagcgagagaggctgtaccacctgcaggacctggtgtgcgtgcgctgcaggcaggtgaaggccgcccatctgtcggagcagtgttcctgcgggggctccttccggtgcaaggaggagccttcgtatttcctcagcaaaatgcgggtgttcctgaaggtggcggtgagccaaaagttcccgctcctgcaggactgcgtgcagtggattcttgaagccagatgacgcgggctgctacttcaacatagttcattagttcacctgatcgctaggttgtacaacgtgcacaggctgtagctccgaagagtgtataaacgggtgtatagcgctgccacagttcattgtagctctgccctgcttgcaaaaggttgttgttgtattgtagatattcaaaggtggatggcgagaaacgatagtaaccttggtatcgaaacatctggataactagccctctcgtatgtgattgctgggcatagactattctaagttatgatgtgggcatgtggttgcataagcggtttcgatgacgtgaatagaaatacacgcgtcggaccgtatgctgccagcctgccagtacactgaccttggccacgtcatactagttgtctgtttctgttgccaatcctacactgtattatctgcacaaaggaaaatgaaacggaggacgttgtgctttcgaggggccaggactcgttgggtggatgaagcacgcgtgcccggtgacctcagccttta

SEQ ID NO: 36110 - DNA, 1879 bp, Zea Mays
cacttcactttttataaaggggtacatgttactttatatagagacttaaaactcttcaagggcagagtcaccattgtcatctcatgcgaacaccctgctgtaggcctctaagtgcggacgaggccgaaaggccaaaagcccatatatctaagcccacgctttcacttttaacccagtgactcccggaccctccgttaccagttacctcgcctcgcggataagaggcgagggctagcaaaccaaagccccttccgccctccgcccaaaaccccacgcgagcaccccattcccatccatggcgaccaccacctcttcctcctcgctgaccactcctctcctccgcccgaaccccaataccaaccctgctcccagatctctccaactcctcaggagcaggaggtgcgctcgtgccgtaactaccgccgtagccggaggtgcggtgccttacggggctaatccgcggcgcgggatttggtcgatcagggatgacttggtggtgccaaggtcgccctacttcccagtggagtccgcggcggggcaggagcgtgggccgtcgcccatggtgatggagcggttccagagcgtcgtcagtcagcttttccagcacagaattattcggtgcggaggccccgttgaggatgatatggccaacatcattgtagcacaactgctctacctcgacgctattgatcccaataaggtgaaaacgaacgggacaaccgtttgctgctgtaattcccatgtgaatagaacatgcttgcgctttaaataaacctttgtttgttgataccagacagtgaaccaacattgtagtactaaactttgtacagtgcttctttaactttctgtgttgcggaattgggttatacaattgtaaccactgaacttgtaggtttatccaatgttgccatttcatctagctagggactcgaatacatggcaattatatattcaaaacgtggtttcttccatctagtgcatgatccttgtcaaccttcctgtaggatatcattatgtatgtgaattcgccaggagggtcagtgacagctggtaatagctcatctaacatagtatgtctgcgttagctgcttcaattaatactaatgcattttcgttttctgttaggaatggctatatttgatacaatgaagcatatcaggcctgatgtatccactgtttgtattggactagctgcaagcatgggagcttttctacttagtgctgggaccaaaggaaagcgatacagcttaccaaactcaaggataatgatccatcaacctcttggaggggcccaaggacaggagactgatcttgagattcaggccaatgagatgctgcaccacaaggcgaacttaaatggataccttgcataccacactgggcagcccctggataagatcaacgtagatactgaccgtgactacttcatgagcgcgaaagaagcaaaggagtatggccttattgatggagtaatcatgaatcccctcaaggcccttcaaccacttccagcttccagttagtcatgaagtgtgctagaactccgtcaaacatttttgttgtatcaatgtgtctgttggaagccctggctacgtaatattctacgtccaaatgcatcaaagattgtacaaaacaagatatgcggttaggatatccatccttggtgatggatattggaactaaattaacagtattagggcttggtttcctcgtctatgtactctatatggatgcctttttttataggaccgatgtctttctattttaggtcaacaggtgacggtaataactgtgtcttcattagggcatgtgcccccattaattaagggtttcttgagggatcaagtgagaaaaaaaaatcaagagatgattttccgtgtag

SEQ ID NO: 36111 - DNA, 2693 bp, Zea Mays
gcacggcacttcccagcgatttcctcgtcctctctctctctctctctctcgcgctccctctcccactcgacggaggagaaaggggggaaagcaatcggaagcgcgagccggcgagcgagatgggcgccgggagcagccgcgcggacgcgccgtcgcggcgccgggcgcgcctcggcctcggagggtgcttcgggacccgatcctcctcctccccagccgccgccgccgaagcgcacgacggcgggagcttcaccttggccgggtcctcctcctccagcgctatcgaggtacaatcagggcgaccagtacgtgccctgaattttcaggcttctctagctgctaaggatctccagatttccaccgcgtcaagtccaaggctgcattcctcttcaagtaccataagccatcacctcagattcaatcacctcaattgccatgaaaacaaggaagatggcctggggactgaaaatgctgaaacaagtggccttgaaagctcatctaggaaggctgtcatggttaggggaagtttcagtaatgaagctgttaatagtgatatgtcaggagaagggataagttttataggatcagagctggaaaatattcctagcacagtctccactaatgaaactggtggctcagccgctgaatctggtttgggcccctcattgatggcatctgaaaggatcatgtctgacttagaaggagaggtatctccgcaagggacctcatccacaactgccatgacaagtgaaagatcagatgtatctcaagctagcttaacatctatgtttcctaactcttcaattgcatcatctgtgattgtggaaccaatgccagatccaatctctaccagggcagatgtccccatattcagtgggccacatggtgagcctggagggagtatattacatgatgacatgatgagcattttctcaaatgacggtctaggacgctctagggattctagcagcagtgaaacaaggaggagtcacagaaggattctatgggacacgttttccaggcgtggctcaagaggttatccagaatttgatgctgatgacctcggattttacagcacatggctagaccttggtgatgacatttttgaagagttgggggaatcaagatattttcatcgcaggcgacatggttcgatcagaattagggagcatcgccgtgctgtttttgatagtggtaatgaacaaggcactgctgcatgtcctttggggattcatcaaactggccgatgcacatgtgattctttcttggttgctgaagaatctagtgcccgagcaagtatatcaagaattgtcatgttaactgaagcgttatttgaggtgttggatgaaattcaccgtcaacctgcatcactttcactttccatggtctctgttcaggctcctgaatctgtagtcaattcgttgccgtgcaagagctacaaaaagctagaggcaccccaacgcagtgatgatatggaacagtgagcttctcatcattataacctctataaatttcctaagacgtatatattttgcagaagaaaacagatccataccgataagatttgtatcgtacattcttcattataattgtgagagttgatttgaaaggaaaacactttcctctaggatattttggtatctcaacagctgcgaccaccacgcacagtgtagctgcctgctggctagccctgttccttttgttttccactccccccaccccaccccacacacacagagacttttgggggtttctgagatgctgaatgtagcatatcattgttctttctcgtcaggtgccatatctgcctaactgaatatgaggatggagaccagatacgaattcttccttgcaagcacgagttccacctgcaatgtgttgacaaatggctgaaagaaatacacagggtgtgccctctgtgccgcggagacgtctgcgaagtcgcctcgtgaagaccttggcgctgccatcccttcctcacggcaccggcagatagcgcatcccccgcctgctccgttgttgaagctggtttggtcaggcaacggcgatcacgtcccgtcaatctgggcgtccctgccgaagagcgtggccagatcctgcgaccaatgcgtcgctgttcctgccatcaactttttaagataccgagactgtatatagctcttgtagcctctccgtgtatgacaacctgtacatatatatgtaaattctagattccaatgtccattattttgtcctacattcagatcttattctcgcagccctgatgctcaaactagctttaccagaatctgtcaacacctcttcaactataaaaaggtataattattgcagaatgaccccaaatatcagacgcttccgattaagagaattcgattcaaatctagaaaggcaacagctgaatcttttccaaataacagaattttatccaaatctagaaaggaacaaactgaaacatttgggtcacaaaaatactgatttattttggcaggggccgcgcggacgcgtaccccctcaatcacaaattatgacatccactctcccagttggggagatggtagatcagcgcatccaccaagtgcaatgtggaccactaatctagaccatgggtcttcttgaacacccatcgatcctgtccaggtaagtatgaaactctgttgtccctgggcgtccttatatagccaccccaaccttgc

SEQ ID NO: 36112 - DNA, 383 bp, Zea Mays
tggatgaggtaaagggttgtgggccattggatgcaaagatagaagtcatctgaggcgtcatttctttctcccacaaaaaccctaggtggccaccccttttttcccttcacccccccctcttggccgccaccccctttttctcccccttggctggacgccccctccccctatggcagccatcctccattgcttcctcccccaagatctccccctacgcaacaaggatcgagaaaaggaggggcacgttgaattgaagaggaagagaggatcaaggagatgttcttccccatctcctcttgaagatttcttggggaaaccctaggtatggatgagatccttgttcctccctgtaattataggcttttggaggttgtggatcatgg

SEQ ID NO: 36113 - DNA, 1187 bp, Zea Mays
aggggcgtttggaagctgttcgagttcgccgacaagtacagggggacatacgacagcagcatcgcggaggtgaagagctactacgcgtcggtgagcgggtacaaggacgagctactgtgggccgccctgtggctccaccgcgccaccggcagagatgactacctcgactacgtcgtcgacaacgccgacagcttcggcggcaccggctgggccatcaacgagttcagctgggacgtcaagtacgccggcgtccagatcctagcggcaaggctgctgctgagaggggagcacgcgccgcgccaccggagcacgctggagcggtacagggccaaggcggagcggtacgtgtgcgcgtgcctgggccggaacacggagggcggcgcggacgccaacgtggagcgcagccccggcgggatgctctacgtccggcagtggaacaacatgcagtacgtgaccggcgccgcgctccttctctccgcctactccgactacctggcggccgccgaggccggcggcgccgcccgggccgtgtcgtgcgcggcggcggccgaggaggtgttcgcgctcgccagggcgcaggcggactacgtgctgggcaccaacccccggggcgccagctacctcgtcggctacggctccaggtaccccggccgggtgcaccaccgcgccgcgtccatcgtgccgtacaagcacagcagggagttcatcggctgcacgcaggggttcgaccactggttcggccggcggggctccaaccccaatttgctcgtcggcgcgatcgtcggcgggccggacaggcgcgacaggttcagggacagccgcgacaactacatgcagacggaggcctgcacgtacaatacggccccgatggtcggcgtattcgctaagctgcgccggatggcgtggctggagcgggaacaggggtccacgtcggtgcccgtcaccgtcacgtccacggcggccgaggtgtaaatagataggatgtagaggaagggggctgtacaattttccccattctttagttcatttttttcgagctttgaatttcattttacacagatcgaggttattgtatacgagaaagaaaaaaaagagaaaagggtggaggcgcctacatgcatgtgcaattctgcaaaatgtaaattcactactggtacatatggagaaatttgacattatgaaacacg

SEQ ID NO: 36114 - DNA, 2203 bp, Zea Mays
ttttcttttcccgtttttataaataaatcagcccgaaaaaaggacgcggtcgtggaccgaacaaacctttccccaaaatttccccttccccgcacaccgaacgaactctcgatctgatccctatccttgcagggcccgcctcggctcaccgatccggccccggatccgctcgtcgctcgacgggatctctcgattgtagtttagacaagcatgctgcatcaggagaacagtgagccgttcgtgaggcaccactctgagcagcttgcgtgtggcaacatgaggggagcagataatggtcgtccgaatttccttcctgagaagtgccagattgcagtttgtcctgaagtttgccagaggggtgaaaaagttagcctatttgatgaagggctgatacatggtgttgatctaaccaatcatattgctcagtcacaattggtgccaagtggtgtcaaggaaacaccaatagtggatcaaaacaagagacctgcatccagtgacatgcttgacatagttgaatgcaaacgtctgaagcaggaaggtcaaatcgtaactaaggaagacaaccatacatctgcagaggattttcatgagtaccccacatacacgacttgcagaagaagctttgactcaccactatctgagagcgaggatagtgaagatgaaggtgtagattcacctctccatttttcacatgctcacacctatgttgaagatgatctatggcctgccagctttcatcatgctctgggcccttttcccttgaggaaacctgttcctatcgggccaaatcatcaggctgaattacctgagtgcaggccattttgtggaagaactgaagaaggcgaaagtgtcaagtggatcagaaacggtgttgtgccaatgcctgatactggtgcatcgtctttggtgttggaacctgttcactgcaaggcagactgtgagtgtcatgatgaaggttcaatcatttgtgtgaaaaagcatgtgagggaagcaagagaaaagctgaagggttctgttggtgcagacaccttcagggagttgggtttgaatgatatgggtgaagaggttggctcaaggtggacagaagaggaggaacatttgttccagcaggttgtcttgtcaaaccctgcttctctgtgcagaaacttttgggatgaactccctcttgccttcccttccaagtccagcaaagaactagtgagctactacttcaatgtattcatgttgaggaagagggctgagcagaacagatttgacccagtgaacatcgacagtgatgatgacgaatggcaggcaggtgacgatggtgagtatccaatcacaggaagaactgatgaatacttgccaactgagtctcttactgatcaagatgatgttgcatgcaatccagttcctttagaaagggatctctatgaagattctgatgatgaggatgagctggacaatgccagtggagacaggcataatggtgcccagagggctggtatgttgtcagagggtaatcgtgtaatgtcggtcatagaacataatcaacagacgttcaagttagatgcagaggcgcaagacgactcttgcacatcatttgaggctcatcaggttggtgttgaaggtgggacacatactgatattgctgatgacaatcattacaggagtgacggctttggtggtggtgcagaacatgggttcttcggtaatcagtgtgacacaaaagagtgggacttcggtctcagtatcggttgggaaaagcatgattttttgtcaacaaacaatgtcatagaagaggtgttcgggaagtgctgtgacactgctgaccaggaccttatctgagccagacgcggaggcttcttgtcagctgcgaaaactttagggttctctgaattgtacagcagtagttggctattttgatttaatgcctcacttgttcttacaggaatctcatctctgtccttggaacatcatctgcttgtgatttcgtcacatgattaatgtaaatccgtagtctgttgatagcctgtggaatgtatgtatcatctttgttgtgacggtgtctcttgacctgagcgttttttctatgtgctagcgagggtcatgtaataaaagctgttgttgttccttgaccctgtctgcaaataaatgtaacctgccagtcaatgtattccgaaaggtcatttttatctgatctgaaatctgtagtcgtttccgc

SEQ ID NO: 36115 - DNA, 2179 bp, Zea Mays
ggacttcgtgcttattgaccatctatacacagcacgcggtccaaccaacctaccaaaacctagctagatttagaggaaaaaaaaaactgtccccaaccgtgagatggctgagtacggcgagcgctaccagggcaacggcgacccggccacgcccgagggtggctacgcgcagaccgagtacgccgccgccggtggctcgccgcccgccgaccgcaagccctccgtgttctccgaccacgctgacggtcgctcctcccagccccagcatgagactcaatcacatggcagtggttcctccaaatctcgagaaagggaccgagaacgtgataagggaaaggacagggagcgaggcagagaccgtgtccgcgaaaaggagagggaccgagacagggacaaggatcgtgaaagaggtgacagagacagggatcgtgatcgccaccacatggatcgtcgcgagcgcagcgagataagggaacaccgtgatcgttctgatgatcgtgaccgtcaccgcgatgatcgtgaccgtcgcaggagtcatgattctgagaggagaagagatcgtgacagagatggccatcgtaggcatcgctcccgttccccttctatgagtcgtgaccgtgaccgcagatctagatctcgttcacgctctagatcgaagagcaagcgcgtgagtggttttgaccaagcacctacacaacaggcacttcctattgttgctgctggtgttatccctggaggcaaacttggcccacattgtcatcggcttccactggattgagctgactgctgtagctttaatgtcagctgcctggtgtcaccgctcctattcctggggttggggtgcttccaaacttgtataatttggctgcaggacagccacaagccatgacacaacaggctaccaggcatgctcggcgtgtctatgtgggcggacttcctccaactgctaatgagcagaccgttgccatattcttcaatggagttatggctgctattggaggaaacacagctggtccaggtgatgctgttcttaatgtctacataaaccacgacaagaaatttgcttttgtggagatgagatctgtggaggaagcaagcaatgcaatggtcttagatggcataatgtttgagggagcaccggtcaagattagaagaccaacggactataatccttccctagcagctgctctgggcccgagccagccaaatccaaatctcaatctttctgctgttggcttaacacctggctctgctggaggattagaaggtccagaccggatctttgtaggtggtctacaatattacttcactgaggcccaagtgcgggagttgcttgagtcctttggacctctgcgtggatttgatcttgtaaaggatagagaaactggtaactcgaagggatatgccttctgtgtgtaccaggatcttaatgttaccgacattgcctgtgctgctcttaatggcatcaagatgggagacaagactcttactgttaggcgggcaaaccaaggagcttctcagcctaggccagagcaagaaagcatcctgttgcaagcacagcagcaggtgcaaatgcagaaattcgtataccaagttggaggtgccctgccaacaaaagttgtatgcctgacacaggtagtgacagaagatgaactgagagatgatgaggaatatgatgacattgtggaggacatgagggaggaaggacacaaatatggtaacttggtgaaagttgcaattccacggcctgaccccagcggtgctcctgttgctggtgttggaaagatgtggagggctcaaccaaagcaaagacagggatgcatgggcggaaattcggcgggaaccaggtggtggcggtgttctaccctgaggacaagtttgcagctgagcagtacgactgaaaagttttagaacccctattctagagttgcagttgtggcacacaatgtggttgttttgaccttttgtagttaagtttggtgattgatccgctgataagtgatataagtttcgtgctcaagtattatatcagctggtaagagtgatacaagtctcgtgcccaagtttcggtctatcaatcgactgcatgttgccctgttggcttcttgcacactgagtgatgtgatcttgtatgacatatacaacatctaggatctagtagttgctgcattagaatgct

SEQ ID NO: 36116 - DNA, 2756 bp, Zea Mays
caaaggttgtgtgcccctgcatctttccagtttgttgctctccagttgtctcggcaacccaaagaagtcgagatatatatcaggaaaagcaaagatgcatgcttgtcagccaattacacccgtaaatacgagacaaagccagaacaacctaatggtttagagagactgtgggaagagaagtctctttcggatctctacccttccctcgccacccgtcaaggagatctggcggcggcgcaggaggaagcaggggcgtccgcttctactgctggtgcggaagaggaggagcggcgagggtgattcggctgcaattcgttgcggcgctcgtgctcggggtggccgtgctgctgtcggcgctcttctggctcccgcccttcgcgggacagggtggcggcaaggagggctcggatccgggcgatgagtttggagctgctatagcggcaagctttaggctacacaagacagttcctgagctaagtggaaataaatcctagctcgtattggatatctgaggaagttggcattcctaattccacggtggttgtgaataagctacatccattagatggatcaaactggacaaacatcatcttcagcattgtccctttcccagagaacgcaactatatcatcaacatggttgagcattcttagatcaaagttcatgtccttggttgtacagcagtcaacaatccacttgactaagcctctattcgataattcatcatactttgaagtaattaaattcccaggaggaataacaattatccctccacaaactgcttttcttcttcagaagcctcatgcgacatttaattttactctgaactatccgatctacaaattacaagacaggactaatgagttaaaggatcaaatggaggcagcactactactcaatccatatgagctgtttgcgtgtccggctgcattgtcgaggagttacagatggaccagtccatgcagctgtacctcttgcgttcgccgccggaaaaaattgatggcagatcaaattccagaatgctccagcagggtgagaaagatcgtcatcaggttctaaaggatttctcaaagttgcttgatgatcaggagtttaatagtaagtattatcatccaagcaacgctaggatctggttctatggtgatgatgacccaaaagagcacacattctaagtgaataccttgatcaatttgaagatagccctgctcctaaatgttcggcagtggtgtgcatgaaggatttgagctccccgtgctctgctcgcccgccagtcgacatcccagtcttgtgctgcagatcggtgtgcccgtgcctgatagtggctagcagctctattcttaattactttgtttttccttttctgatcgaacgtttagatttagatgaatatggttttcacatcttcaaaatacacattacgggatttggtgtgggcggtctgcagagtacagagagatgtgaaacatgggcatcctaaacacctttcaaaagaattgaagaattgcatgttgaaaaatcttgccaaacttcagtgttataacctcatagggtatagtatatacttgtaaggaggaaaggcttgacaaattgaggttaaatttagacataatgaaatgtggcttaactatattaacaatttagagatcacgtatctaattttgtgccttagtgtgctacactattttaaatttgtttatggatggaatgaacaatctgataaatttaccctgatatagctgattatttgatttaatatgtaggcactgtgatactgtccatactatagtaatgagttgtgttatgtaatgctaatacttaacataactacctcacatgcctgatctattaatatgtccattatatatgtttggtttttctttgctttgtccacgttcagttttttttaaaaaaatctcctgaaatgagacaattagtgtggacataggattgtattttgttggttcttgttctgatctccagatatattcttgaaccatctttcccctcttgttaataatttctatttagaatcattaatctaggacacctatagcattatcaagttactccttgtgctgacgactttctgtattctgatttttgcatgcttaatgatattggtgttactctaatgactacagaaaatggcatcggatttcttgggtacttctagatttgggttgatgcgacttggtttgtctgtacagttttgatctagcaggttgtttttgatgatagagttgtctgacgccaagggtgtgaagcagaatttaaagcctaaaggccatttcaacttgtcagctaagggctcagatgactcgccctgcgagtttgatcttgagttgtttgatgttgtctatttaatacatgttgaattagcgttttagattttgattgtattggccttcctatttgcaggagagcaaagcagttgttgtcctaagaaccatatgctaccagaacaagaaagatgagagcggttggtggccaaggctcctgaaaaaggacctgtgttcttgaaggttgactggacaaatggtaggatgaggatgacgaagatgttggatgttagtatttcacttttggttgattatgttttttcttatgcgcctgacaaatctagatatgcaaccagacatgctttattcttgttcctgttttgttttccttatgtattaattacttcacttgtaatgcacatgatgttttccttatgtattaatttcttaacttgtaatgcacatgatgttttcctt

SEQ ID NO: 36117 - DNA, 1340 bp, Zea Mays
ctcccatgcccactccaactgtatcaatctacgctacgcaacaccggctttcctgggagcgtgactccggattatgtcccgttccagatgtgggatacgttgcagggtctctccacatacatccgtgcaatgttgtctacacaagctcttctaggggcaatcggagtgggggaacagtccgcaactgtcataggtgctacttttcagtggtttctgagggacttgacaggaatgcttggagggatattgttcaccttttaccaggaatgttgatggatcttttgagccctctgtttccttcatcgttgatagttataatgtgcttaggcagcctgtctaggtcattcactggtgttgctagtggagcaactagagcagcactaacgcagcattttgcacttgcaaataatgcagctgatatttctgcaaaggagggcagtcaggaaacacttgctacaatgttagggatggggttggggatgctgttagctcaaattaccagagggcatgctttgagtgtatgggcatcttttctttctcttacgatgttccatatgtatgcaaattacaaggcagtgcagtcactttcactcactacgctaaactatgagagagcttccatcttgctacaatacttcaaggaatgtggtgaagttcttgtgccacggaaggtttcccagcaggaacatattcttccttcttggtcaaactggaggaaactgaacagaattaaactgccacatgagcgtgtgcacttgggtgctaaagcctcgatgcttacacacagtgacatgttggtgattgcaaaaacaagataccactatgaaaacgcgaactactttttgctggataaacaaggcatcgtttacgttttcatccacaaggaggcaacaccagccgatgttttaaggtccttcgtacacgggctcgtgctagctagctcgacacagaacagcaaacctcagcacttagaggcccgtcgatggatggacgagatgtataccagttttatctcgaagactgaaggttactcgacggaacgccttctgtcgcattcgattctttggagggcacactggcttcacggccagctggatgagaagctcaagtaggaggaacactgcaagaccgcgtctgcttatccaaggacaggtcacaggtcaagagcaggtactgctggaggagaatcatgaaggcgagtttagagtggtctagaccgtcgtcttctagttaactttgattatggaggatcgtcgtcgtcatatgatgtattttacttagttattttgtacaaaagctcctattatgtaataaagatgtgatgttgctttctatactga

SEQ ID NO: 36118 - DNA, 1554 bp, Zea Mays
tgtttgcaaatattatgtggtcataataatgaagtttggtttgtaaggttctcaaataatggaagctacctggtgtcatcttcaagtgattgcactgccataatttggaaggtggaaaatgatgatacattgaccaagaagcactgcctccagggtcacgaaaaaccaatttcctttgcttcctggagcccaaatgacagaatgctgctcacttgtggtactggtgaatcattaaaactgtggaatgttgatactggtgaatgtaaccttaaattcagaggctcagcagactgcatcatcagttcatgtgcatggtttcctaattcggagaaaatagtatgtgccagctcggagcctgcaagtgctccaaataggatcttcacttgtgatctagaaggccaaaatctggaagtatgggctggagatagaataccaaaagtcagtgatctcgctgtgacacctgatggccgacacctaatctttgtatcttgcaacgatatctggattagggaacttccaagggggcgggaatggagatttcgtgagaagcagacgatttcatctctttctctctcaggtgatgggcagtcactcattgtgaaccttaacagtcaggagattcatctgtggaaaattaatgaaagttgtactgtgcctgaaaagttcatggggcacaagcaagacaagtttgtgattaggtcttgctttggtggttcaaactcttcgttcattgctagtggcagtgaggattcacaggtctacatttggaagaggcacgtggagatgccgattaaggttctacatggccacacgatgattgtgaactgtgtaagctggaatcctgcaaggccccacatgctggcttctgctagcgacgaccgcacggttcgaatatgggtagggcgcaaaaatgcaacaaagtaaacgctgttgaagtgtgaagttttgtatgtctgtgtaaatagttgtacatctggactgcatccacaaacctgtttgggacaatgctctgttcttcacccctgatgaatatgtcgtcgtagctatttgttcagaaataaacctgcaacagccataggtagccggtgctgctgtgtccagatgtgtgcctggctaaccggtgagttttgacatgtgtacaggacaaagatgcatcagaactttgtacatcttgttagtatatgccttggacactcgaagtgctgaaatatgccttctgttgctgtggatctagtgttcgtgtccttttatctttttcgcttggttcatgtgctatcttgctttttgtttagaataccccataacttctttctgatgtccttttcaggtgactttgcaacctttggcatggtcaacaaatatgtataagatttgtaacagcattataattggctagaatcgtgcactagcaaactgtccagcacctcttagcacattttatgtacttgtagttttgctagacagttttggggtgatatcttttcacccttgagagaggggatgaatagatgatattgtaaattttgctcaaaacaacacaaacttggtttataa

SEQ ID NO: 36119 - DNA, 1585 bp, Zea Mays
tgcagcctagttgtagatctgaaaccccagtggctctcatcatttgcacctgggaaaatcattcgctccaatcacctagtaatcagtggatctcaccattcatggcccaagatgatgcggcttgagctcattactggcttactgcgttgtgcggcttgcttctttggtaattggtcgtatagtccctcatcatcggaatggtggggtcacttatctttcccacacctaatgtggatccgaaggcagagaatcctaatgagatggttacagccggtgtgctttcaagccttcagaatttcctacgcaagtgcctcatagccatcctctcatatggcccaatgccgaagcacattgcatttattatggatggcaatcgtcgatatgctaaattcagaagcatgcaagaaggagcgggtcacaggatgggtttctctacccttattgcaagtctgatgtactgctatgaaatgggtgtgaagtacatcactgtctacgcattcagcatcgacaattttaaaagggacccaagtgaggtggaatccttgatgcagttaatggaggaaaaaatcaacgaactcttagagaaccgaagtgtaatcaacaagattaactgtaagatcaacttttggggtaacttggacttgttatatgagccggtgcggttggcggctgagaagctgatggcgagcacagctgggaacacagggctggtcttttctatctgcatgccatacaactcgacttctgagattgtcaatgctgtcagtcaagtctgtgcggaaaggatggaaatgtttcagagcgaacatattggcgaatgcaatggtcatgctgcaaataacggtgtgcgatcagagatttcagtggcggatttggatcgccacatgtatagtgccgaatgcccagatcctgatattgtcatccggacttcgggcgagactcgattgagcaatttcctcctttggcagacaacgtttagtcacttgcagaatccagatcctctgtggcccgagttctctttcaggcaccttgtttgggctgtcttgcagtatcagagagtttaccctgctctggagcataacagaaagttggctaagaagcagttgtgattccatgttacttgcaaggaggtatcatgaagggctattaacatcaaacttttccttctcaatttcctggtaatggtaaatgcaaagaagaacatactagcatataacattatgaatagatcaccatgtaacttaagtgtgattgctaccgtaaccatgtaacttatttgagctcgtacaaatgctgtgattcctaaatatatatatatatatagagtgcctggggtaacatggtgtgcgagagcatttctttgttttgcacgacaaagaccggatgcttcaaagcgcccatgtttgacaagtgaaaagaaaggagttcgaagtaaaacaataggccaatgtctgttttccatagtccaataagtagaccactgataatgtctgttgatcatattttgcatccagccaagtagaccactgaaaaccaaggtcatgcacgtacagaaatatatatgcaagtttaacgtctgatggct

SEQ ID NO: 36120 - DNA, 2009 bp, Zea Mays
atggaatcggactctgccgatcgtggggaggcatcccgccaccgctcaaagagggagcgaccgcccgacccagagggtgatgcctgccccgacgtcggcaggcgaagggtggccgccgggcccggagtggacgccggtgctaatgttcctgacttgggcgaccaaaaggagtttgaacatggagaaaaactgcaaagaataccaaaacagaaatatcagccttcccataaccagcagccccaagacgatcagcagtggctagtcacttgtatttcacaatatcttggattttctgggagcaaacctgttgcagctctccttatataccaatgtcttctccattggaaatcatttgaagccatgaagacgggtgtctttgatagcattttgcatgctataaactcagccacagaggttcaaaatgacatgagaacattggcgtattggttgtccaacttatctacattaacagttttccttcaacggtcattcaaaactactaggaccacaatctcaactccacaaaggagaagattttcgtccgagaggatgtttggaaatcaaacttcaaatgctgggcttgcttatctcagtggtcaatcagttggatctgctggattgctccaagttgaagcaaagtatcctgctttgctattcaaacagcagctcgtggatttaattgaaaaggtttatggcatgataagtgacagcgtgaagaaggaactaaaccctttgcttgaattgtgtatacaggatccacaaacttctcagtcaagtattgcaaaaggtaatcttaatggcatgggtcaacagaaccaactcacacattggctgggcatagtgaaaatcctcactagctacttggatgtactaagggaaaatcacgttccctcaattctggtgcataaacttttcactcaaatgttctcacttattgatgttcaattatttaaccgattacttttgcggcgtgagtgctgttcttttagtaacggggaatatatcagagctggactagctgaactaaaacattggtccgacaatgctacaagagagtttgcaggttcagcgtgggaggcattgaggcatattagacaagctgttgatttcctggtgatttctcttaagccaatgaggacattaagagagatacgcactgatgtgtgccctgccctcagtatacaacagctagagcgaatagttagtatgtactgggatgatgtgaatggtacaaacactatttcagcagagtttacatcaagcttgaaatctgccatacgtgatgaatccaatatggccacaaatttctctatactgctagatgatgattccagtatacctttttcacttgatgatattacaaagacattgccggtcattgagctggctgatgacgactttctgccatttgtccatgaaaacccaagctttgcgtttttattgcaaagaggggagtagtcttttttttttgtcaccattgtgacttcacctacctgtggataagtcaggattcctgctaggatgtacagtacgcgtgattctttttgtaccaggtagcaaggcatcaaagattagatgctaggtgagcttataggcttctggtttctattgatttgtttgttggttgtatatttgtattcaggttttccttgccattttttctacttgtagccgttttttgggcttgtatactaggtggtaagggcagaagaccctgccctgtaagcatagttacacaaggtcttgctgtaggtatggaagctgtacatgtgttgtaacggattataaaagggggaaagtagtgcgtagtgatggctttgtggttggtgtgttgcttacctttgatcaatgatcatgtattggttcgtcatatattgtttattgtactgcacaccattccattgtagataacatacacgctcaagacttgttctgggatgtcaaatgagtaatctgttacggtacagaaatgtcatgcttacttccagatcttctgtaatgaacacaaa

SEQ ID NO: 36121 - DNA, 3628 bp, Zea Mays
ccgatgcggatgcggatgccgatgccgatgccgaagcgcacctgtctcttctccttgccgaccctccacccccagccgaagtgaggccaccaatcacacagccgctccccccgctcgtcctcctcccctgcccctgcctccgcccccgcccccgcccccgccccgccacgccagcatttggattggattgccggcggccgagtggaggcggagatccatccggactccggtgagtccgttcccgctgccgtgcttgatccaggcacgcatgacatcacatcagttcagctagatgcctgaaggagaagttcagtagcacaccactacctcacaaaacagctcttctgctcgtgcaaaagtatccagggtccagatgggttcagacaagcagattggtagcccacgccaactcttggaaacactaaagatgggcagagttaggactatcctgacacatacatacccgtaccctcacgagcactccaggcatattatgactgcagtgattattgcctgtctcttctttatatcgtctgacaacatgcacacgctcatacataaactggataacaatatcaagtggtggtccatgtatgtttgcctcattggcttcttctatttcttctcatctccttttcttggaaggaccattcagcccagctactcaaattttaaccgctggtatgttgcttggatttgctttgcatccctgtaccatcttcctagcttccagtcaatgggggttgatatgcgcatgaacctctcgcttttcttgacaatatatttctcctcagtgcttttcatcattgcctttcatatcatatttattggtctctggtacattgggttggttgcacgcttggcaggaacgaggccaggcgtatggacaattctccagaactgtacagtaatcagcattgcatgttgtgtgttctacagtcattgtgggaatcttgctgtgcacaagagcaaatcttttggtagtagttctgatcccaatttgcttgcttttcttaaaaatgaaaacgggagtacctggatatcaaattttctccgtatgaatcagttgaaagatgagatatgttcgtcttggtttgctcctgttggatctgcaagtgactatcctattctggcaaaatgggttatctacggggaggtgggctcttacccacccgtcaacagatttggaggatgagaaactgaagaggcatatgaaaccagattttctggacatggtaccttggtattcagggacatcagctgatttattcaagacagcatttgatcttatggtctctgtgactctttttgttgggcgatttgacatgcgcatgatgcaggctgcaatgaaaggaccaacaggcaacactccaaatgatgacctattgtatgaccacttcaatgaaagggaagacctttggtttgactttgttgcagacaccggtgatggagggaattcatcatatacagttgcccgactgttagcccaaccatctattaggactgttatcggtggctctatgcatactcttccacgtgggaacttacttattatcggcggagatcttgcgtacccaaacccttcatcatttacatacgagaggcgcttctttaggccttttgagtatgctctgcaacctccaccttggtacagagatgaacatatagctttggataagcctgagcttcctcctggtgtatcaaagatgactgaatatgatggaccacagtgtttcataattcctggaaatcatgactggtttgatgggcttcatacttttatgagatatatatgtcataaaagctggttaggtggatggtttctgcctcagaagaagagttattttgcattgcatcttcccaagggttggtggatatttggtcttgatttatctctccatggcgatgttgatgtataccaattcaagttctttgctgatgtttgtcagaataaggttggagagaatgattctgtgattgtagtaacacatgagccaaactggcttcttgattggtactggaatgagactacaggcaagaatgtatcacacttaattcaggaatacctgaaaggaagatgtaaacttcgcatggcaggggatttacaccattttatgaggcactctgccactcgatcagaaaagaataattttgtgcaacacttgcttgttaatggatgtggtggtgcctttttgcacccaacacatgttttcagaaactttgagaggttctctggaaccacctatgaatgcaaggcagcttatccatcctatgatgagtctactgggattgcattgggtaacatattgaagttccgcaaaaagaattggcagtttgacatcattggcggttttatatacttcattttggtgttttcaatgttcccacagtgtaatcttgttcgtatcttaaatgaagaaacttggtctgggcgtctgaaaagcttctcaggcacaatatggagtgctttgctttatatttttgagcactcttatgtctcttcagtaggaagtcttactttattgacggcgtcatattcattcgtaccatccaaactatcaaggaggagaagagctattataggcggcctccatgttttggcccatttaactgcagcactacttttaatgttgctgctggagttgggcattgaaatttgtattcgtaaccatttattggcaacttcaggttatcacactctgtatgaatggtatcgatccatggaaagtgagcattttccagatcctactggtcttcgtgctcgtttggagcaatggactctgggactgtatccagcatgtataaaatatcttatggcagcctttgacgtccctgaggtcatggctgtgacaagaataaatatatgcaagaacggaatgatgtctctttcgcggagtgttctgatcatgtactacacttctgtgtttatctatttctggattttctcgactccagttgtttctctcatatttggtagttacctatacatctgcatcaattggttccacatacactttgatgaagccttctcgtcgctgcgcatcgcaaactacaaatccttcacaaggttccatgttaagaaggatggtgatctagaaatatttactcttgcagttgacaaggtcccaaaggactggaagttggatccgaggtgggaatcagagggacgagggcctcatcagctcagccatgaccggaagcatccaagcaagtggaggtcagcctcatcaactgaccctgtgagatctgtacgggttgttgatcatttcaccatcgaaagaacaagaaccccagatatggagccctcttcctgattgtgcagcccttactattataaggagttgctactgctgctagaaaaattaacaataactagcttcaacacacagtattgtttttgtttccacatccagccaataggtggaccgaggtgatctgcccttgtcggcgtccccgctttactgacctcacctgcagcattgtaatctgtatagaaagaaaattcacctgctgcctattgcttgtattcaatcaaaggaactctaaaaaaaagagtgttacagaagaatgttttgagaaagcaaagggatgaatcgattcatcatcatttactaaagattgattctat

SEQ ID NO: 36122 - DNA, 1183 bp, Zea Mays
ctaacattttcaaagagacattgttcggggcatggagggctatatagtcacaggatccaaacaagtcgaaatagggaataaattgtctgacgacagccaaaaatatggtgctgaaaacacatgtacaagtggtgatactttatccaaagctgctacatacttcgggaaggcacgctcacagatggaaaaggagcgcggcaacatgttgaatgcatttggcacacaggtctatgttcctaatgctggatttgcttcaccttgtggcagagccactgcgggcaatggtaatgggtgtgcacctttagaggatgcaagacatctggcccagagatatgacagaacgaggcaagaagctgaagcacaggctgtcgaagtatcaagacggcagaatagggtgagggagtcagctgggaatggagatatgatatcgaaattggaagccgctgagtacaagcttgaagaactgaagtcaaacatggtggcattagggaaggaagctatctcagcaatgtcagcagttgagactcagcagcaatggttgaccttacaacgtctcattgcactggttgaggctgagagaggttaccatcagagagttctggagatacttgaccagttggaaaaagaaatggtgtctgagcgccaaaaaattgaagcacccctgactccagcagctgacaattacatgccaccaccaccaccatcttatgatgaagttaacggagcgtttgcatccacttctgttaatgaatcagtccaatctgtcaatttcttccttggagaggcccttgattccttcaaagctgaaagtgagtttgagcttaccttgtcagctggtgacattgtaattgtccgaaagatttcaagcaatggttgggcagaaggtgaatgcaagggcaaagcaggatggtttcctcatgcttatatcgaaaggcgagaacatgttctagcaagcaaagttccacatatcttttaggagtttttggctggtacatcatttctattgttgggagctggaatagtatccatgttttcattttctcttacgtcgcgtatgtacttaccggctgtcatgtgcataattaaactttacttccttattttagtctggagaagattttggatgtaacatatatttgagggaccaattggacactggttgcctcgatattgtgaaatagtt

SEQ ID NO: 36123 - DNA, 7870 bp, Zea Mays
tacatagagcctatccattccaccgagggagaaatggaccaactcataggttttcgatccgacgaccacgtccttcacacggagttgcttcgccttgacgcaccctccgcgatcacgctgcgtgccgcagccagttccctccggaaccgccaccgccgagttttgaggcccaaactctggtgggtttgaggcccaaaccaccaaacctgccgtgagcaccgcacttcgtgcacgtcctccacgatcagacgcgtgtcccgccagtccctgaccacaccggcaacatggtccattccaccacgtcctcgcataagtgtgtgtcacaggtgtcagccaccacgattggtcaattgactgctttgatccgccagtcaagacccatcactcgtcccttcaccgctccgggtccatcagtacgagcccgcatgactttcacctcagtcgtcgaccaccgttcctgtgctccacacctgcacaccacaagtcgaccgacatggttgcacaagcataatctcacactctggactaacatgcaaatacggcgcaaatctatggtgcaatgtggaaaagcgttggtcgggttttgcggtgccagcgacggacatgagcgtggagagcccaggggagctagggttctgaagcgcaccgtggggcacagcgtggcgaacgacggcccccgacatcctgctaggttttccatgggagatgggggagtcgcgtgcgccgtccgctcagtcgagagcttccgtgccggcgccctcgtgaggagaggaggagcgggagaagcgatgccggacaagggggagagggcccatggccaccgccaccagcaccagcactggaagaaccagcagtcggcgacagctgctgacctggaggagggggagctgcttaatggggaggccgggaccaatgggttgcccgagaggagcatgccacctaagaagtggaggaaggtgctggcagcctccgcagctgctgtggaggtggagcctggggagattgtgagtacaaagcaagcagtgccattgaagaaggaaagaagaaacggggacgttgagaaggtagagctgctgccagagaggcagaggaaggaaaagtcttctgggaagagcaccaggaagtctatcaaggatgatgtggagccaggggagattgcactgccaggaaaaaggcgggatgccaagtcccaactggcccatgataacagcaggaggccaagttcgtctgcccagaaaggctccttgcgggattctgatgaagaacctggtgaaattaagccagagagcggcatcagtggcagtgtaaggaagaaccggccaacagagcctcatagcagtaaccacaagcaccacactgacacctctgaccagtcaggatcaaaacatcgcaggaagggagaaggaaagagttcatctgctgccagacatttgtctgggagaattcgtgaggtctcgccaccaacacgggatcggcgtgataagcacgagaggagcccaggcatcttgggccgttttcctcatgaccgttttcgtcatgacaggtatgacaggagcccgagccgcttggagcgttccccacatcgcactcgccactatgatagcagagaccgcagtccatatatttcacctcgacatagagctcgtccgccccaattcagggataacacaccaagtcgtgttgataattcccctcgtgggagggtccagcatgaagatatcagagaccgtagcccatttcgtcatgacaggtcgccttctgaacgttgtcgtcctactgacacgcatgaagcaagcaagaagagcagaagtagcaacaactcagagaagtcacatcacaaaagcaaatcagcgaagcaatcttcaaaaatcaagagtggtagcaatgggaagaatgaggagaaaatctccaaagaaaagcacactgaaagcagtcagtacactgaactgccaccaccacctcctcttcctctaccaccgccaccaccaccgccgccgccaccgccacccctgccgcctgctgtaccacctccattgcctccatcaccagaacctgagccacctggagttctagccgaggatatgatagaagacatggatatctgtgacaccccacctcacactagtgcagtacctgaacccacagaaccaatttgtgatatagggaggtggttttaccttgatcacttcggtatcgagcaaggaccttccaaacttgctgagctgaagaagctggtgcaagatggatatcttctttctgaccatctgataaaacatgctgatagcaaccgatgggtgactgtagagaatgcagcttcaccactggtgccatctgatttcccctctttatattcggacacttcaacacagttggtcaacccaccagaagccccaggaaatttgctcgatgaagctctagaggaggcttctaacttggcatcaggagctgaggataaacaaatggaggaaacgtctgcagaagatagtgaagaattctgcattgatgatagggttgaagcactgatggatggatcaattttggtgcatggccaggagctcgagatcattggagagcttttaggtgcagattttcagcctgctgattggcaaagatggagtcgtcgtgaagattttactaggctcaatgtgcacactgaagtaaacaatgaaatcaatggaggcacagaaaatagagcaacagatgcttatggtcttgtttctgtggagaagaactttcatcataacgctgagtctagcgaatggttttctggtagatggtcttgcaaaggtggtgactggaggagaaatgacgaactaagccaagatactccattcaggaaaaaacttgttctcaatgaagggtatcctctgtgtcaaatgccaaaaggtagctgtgaggatccacgccggccctgcaaggatgagttgtactaccctgtacgtgctaaaaagtatgaactgccattgtgggcattctcattgacagaagaagatattgatagtgttaatgacaccactaaaagcggtgttgtgcctgggaggccaggtcagaccagacagccttctaggggagtgaagggcatgatgctttcagtggttaggataaattctcgtgttgttaaagatcaatcatctgttgaaccccatacaaaacccagaggaactgatcgaccactgtcgaggtcttcacgctcccattcaattggagctgagagaagttctgtccatgaaggttcgtctcatttcaggaagcaccatgaccatgattcacaaagttcgcacaagtccaagcctgttccaaacattccaaaggaccgtgtatgcactgttgatgagctgtcagtttatcggggtgactggtattaccttgatggcactgggcatgagcatggtccattttcttattctgaattgcaagaattagttaaaaatggcactatcattgaacaaagtagtgtgttccgtaagattgataacacatggtttccagttcttaaggatttaaaacctggaagctctgttcccagtgcagcacgaagctcaagttttactgctgctcttatgctcccagaccaatataattttggtgtgaaccaaggatcaggtagcttcaatcagttgcacccccagtttgtgggttatacacgtggtaaattacatgaactagtcatgaaatatttcaagagcagggaacttactttagctataaatgaggtcttggatccctggatctcagcaaagcagccaaaaaaagagtttgaagcatacttctcccacaattcagcatctagaaatttgctgccagaagatggtgggtctgcaaaaaaggcaaagttgctacctgatcagagtgatgaagatattcatttgtcacaagacattcttgccagtcggaaggaggacatctgttttgacgagctatgtgatgcagaaccttctgttgataatgattctctgaatcccggagcaggaaatgaaacctggggtctactaaacggccatgtgttagcaagaatcttccattttatgagggcagatgtgaaagcacttatttcttctgcagctacctgtaggagctggaatgctgctgtgaagtattacagaaacatgtgtagattcattgatctgtcttctgttggccctctttgcactgattctgtgttttgtgatattatggctggttatgagaagcaaaatattaggacccttattttagctggttgttcgaatcttagttcgcatgcccttggcagagtacttgagcagcttccacaaatatcttatgttgacatccatggttgcggtcatctaggggatctgaaaaataaatttcagcatgtaaaatggatcaggagctcattgaatccagaggagtcatatcggaaaattaaaaccttgaagcagataggtgatgggaacaactacgcatccaaagttgcaaggaacttcaccaatcatctggatggttctgatgagcttgatgggtattttgctgatatttcaaatagagagaatgctaacctttcatttggacaaggtttctataaacgatcaaaattgcttgatgctagaaagtcctctgcggttttgtcgagggatgcagaaatgaggcggttgatgcagagacaggcagagaccagttacagaaagatggaagagttcatcataaacagactgagagaaattatgaggagcaacagatttgattttttcattccaaaggtttccaagattgaaggtaggctaaaaaacgggtattatgctcgccatggctttcgtaccatcaagcatgacatccgtaccatgtgccaagatgcattgagatataaagatggcaatgattcgggagatataaagcaaattgttgtctccttcatacagctagcaaagagactagggaacccaaggtacatttctgatagatatggagcaggagcccaggacagcctggacattaatcaatattcatttgatactaaactcaaaaagaagcaaaataaaataagaggagcaaattcattggctgctggagcagataattcatctcgtgcatttgaccttgaaatcaaaagaagcctatctaaattaaagaaaaaggatgtctactctggtagcgaaacatctgatgatgatgatggctactctgaagttgatgaaactgagagcgaaactactgtttctgatactgagagtgaccttgatgtaaattctggagcctgggatttaaaaggaaacagtctaaagttaattgaacctggggaatctgtgaccgatgatcgtatattgggtgcccgcatgacaaaggccagccttgttcctccagttactaggaagtatgaagttatcgaggagtaccttattgtagcagatttggaggaagtacagcgaaaaatgagagttgctttacctgatgactattctgagaagttgctgtcacagaagaatggcaccgaaaacttggaacttccagaggttaaggattatcaaccccgaaaagtagcaggagatgaaattcttgagcaagaagtatatggcatagatccatacacacacaatctactgagtgacattatgcctgctgatcttgagttgtcacctactgacaagcatatctttattgaggagttgcttctgaatacattgaataagcaagttaggcatttcactggttcgggaaatacccctatgacttacaaccttaggcctgtcattgaagagatccaaaggtctgcagaggataatggtgatagacgaacttcaaagatgtgcttggggatgctaaagaccatgagaaatcgctctgaacagaacttcgttgcttatagaaagggtctcggtgttgtttgcaacaaaaaaggtggatttggtgtagatgactttgttgtagagttctttggggaggtttacccttcttggagatggtatgaaaagcaagatggtattaaacatatacaaaacaacagtgaagatcaagctcctgagttttacaacattatgttagaaaggccaaagggagacggagatggatatgacttggtttttgttgatgcgatgcacaaggccaactacgctagtagaatctgccactcctgcaacccaaactgcgaagcaaaagtgacagcagtgaatggtaaataccagattggagtttacacacttcgaccaattgcagaaggcgaggaaatcacttttgattacaattctgtaactgagaagagcatgaagcatcagtctgcctctgtggaagtcaagtatgccgtggcagctatttgaatttttctggtgaaggagcctttgagaaggtattaatggaattccatggtgtgctcgataggcatagcctgctgctacaggcttgtgaaacagactctgtctctcaacaagacttaattgacttgggtagagctggtcttggtacctgtttgcttgctggtttgcctggatggcttgttgcttacacagctcacctggtgcggtttatataccttgagagacagaaactccctgatgagatcttaaggcacaatgtggatgagaagcgccagttccttatagaaataaacatggattctgagaagaatgatgctgaggttcaggcagagggagtattaaattcaagattacaacaaatagtgcatacacttgacaaggtgagatatgttatgagatgcatatttggagacccaaagaatgctcctcctcctcttgtaaggttgtctgggaaaagtctggtatctgccatctggaaaggggacagttcaatagttgctgaactcattcagtcgatggaacctcatgttgaagaagaggtacttagtgatctgaaggccaaaatccgtgctcatgatccgtcagagtctgaagatattgagggaggcatccggaattctctcttgtggctgcgtgatgaattgcgaactctttcatgcacttacaagtgccgtcatgatgctgctgcagatttgattcatttgtatgcttatacaaagtgcttcttccgagtccgggattataagacagtaaaatctccaccagttcatatcagtccgcttgacttaggccccaaatatgctgataaactgggaccaggctttcaggagtactgcaagacatacccagaaaattattgcttagcccagcttatctattggtatagccagaattcagaacctgaatctagattaacaagagctagaaaaggttgcatgtcgttgccagatgtctcatccttctatgtgaagtctgcaaaaccatcacaagagcgagcttatggaaacagaactgtgagattcatgttatcgcgcatggaaaagcaggcacaaagaccatggccaaaggataggatatgggtgttcaagagtgatccgagattctttggtagtccaatgatggacaccgtgttgaataattccccgcttgacaaggagatggtgcactggctcaagactagaccaaatgttttcctaggctagtaaaaaaggtttgtaggcagataaggtggtatttggttctttctcctttttggagattttagtctacatgattctttttccgactcacaccttggctacctgatcatggggagtttagcttttagatagcagggtagtctcaccacccccatctgtacattcctctctccctactttccttgtagagatgtatctggttaataactgatagattcgtcattgatttgatgtagtgaattttccccataggaatgctccctcttttgtttcatgtaaatgcagaacaatttcaatcttgaattcagtaatgtgttacaggcatgttgcatttctgtggttcagttcgttgtttcaatcaataaaatgttttaggggcttataggtttcattcataggaaa

SEQ ID NO: 36124 - DNA, 2977 bp, Zea Mays
aaaaaacagtagaaatgttctccgcaactccgaatacaccttgctaatatctacccgccggccgcaggccgccgcccggcttccagtctcgccgattcgaggagacgacgaccatgccaaccacagcgccaccggtggatgcagaacctcccgagtgcccggtgtgcctctccccattcgacgcggcctccgttgtgccgcgcgtcctcccgtgcggccactccctctgcgggtcttgcatcgcggccctcccgcccgcctccgcggccgcaggcgcctcctccctccgctgccctctctgctcccagtgcgtcccctacgcccgcgcgctcggcccctcctccctccccaaaaacctcgccctcctcactcttctcccctccccatcgcatgctctcagcgccgccaccctcgtcacagcgccgcttccccacccccatccgctccacgccgcccactcgcgcctcctttcgcgcttccgccatgccgtcctccccgagtccgcctccccgctcggttccgagccaagccccgtccacctcgcgttcggatccctcggctccgacctcggcgcgccctggttctgcgcgcggggccgccccgtgagcctcctcccgatcgagacccaaccagtccccccgacgaagcaggaagccgaattctaccggcccagccacgcgacgcgggtcctcgccgcggtcgacgcgctcagcgacgcgaccaaggaggagctggccggtctgatcgcctcttccgcgaggctagcacggatggtgagcaggctctacggtgtctggatgtcccctcacgcgccgccactatggatggtctctgaacggcacccacgtacggtttcccaattgttggaggaggagattatcaatagagaggagacggtggtgcgggccggattccttgtaatggaggcatgtgaagtgatcatggggttgcacagcgaggggctggtgctggggtgcctcgggctggactgcttctgcctcgatcgttttgggcactgcatgcttgatttgaatcaggcgttggccttgtgccggggagtccaagctggggctagctcgaacagtgttcgagctttcatcgctccagaggtggcggcagtgctaggtgacacgttgcggacggagggtcgtgattttgatggtttggttggctgtacctcggatatctggtcgttgggttgtgtgttcgtggcacttcttactagggatgaacagcttgtgcctgtggcaggttggaactctgaaggactgtatgatgattgggagaaggaagtggttacaaggcttgatgccacattgcttggtactatacttgaaccattggctgcagttatagcatcgtgcttgagatatgatccaaaatcccgtccagagattgctgatgtttggaaatgtattagaggcttgttgacaaaatttggtgatgttactttagctcctgatgatgatgttgcagctcagaagagttttagatgtttactccttggggagttatcctccatgtttgttgattctggtgctgttgagtcagatgataaaacacaactgtctcgaggagctgatggcaacagttcgaatcaggatcatggaagtaatgatggtttcttaaacaatagcggaaatgatttgtcaggaatcgatggtccacagtctgtcggagtgtttaaatcatcaacactgcttgcccaccgtgattgtgtaacaggattagctgttggaggtgggttcttgtttagctcttcttatgataaaactatcaatgtgtggtcactgcaggacttctctcatgtgcattgtttgaagggtcatgaacacaaaatcacagcaatagttgttgttgacaatgatagccattctctttgtataagtggagacagtggcagcggaatttttgtctggcgtgtggattctactctgaaggaagaacctttgaataaatggtatgaacataacgattggctctatcgaggggttaactgcttggctgtctctggaactggttatctttacactggtagcagagacaaaactatcaaggcttggtcactagaggattattcacttcgctgcactatgacaggtcataaatcaactgtgtcttgccttgcagtggccagtggtattctttacagtggaagttgggatggtaccattcgtttatggtggctcactgatcatacaccattgtctgtcctggaagatgatgcagcaggaagcatagcccctgtattgtcgatttcagcaggaaccaattttgttgcctcgtcatatgagaatggctattttaaggtctggaagaacgatgtgcttgtcaaatcagaaaagcttcaaaatggtgctgtttatgcagttaaattgagtggcaaatggctctatactggtggatgggataaagtcataaacatccaggagttgttggatgatgagtcagaggtagaactccgagacgtcgcttccattacttgcgactcaattataacttcgatactgccctgggatgaaaggctgatagttggactatccaacagggaaataaaggtttactacaaggcatcatgactctttgcttcaaccccatgtatacattgtgaatagttcagtatacagtaaacgtgagatagaggattggaatccccaggactagaatacatcaaaagtacaatccgtgtttttttctttaaacaacaggggcgttcgtgtcccctccttttttttatattttctacaaagggatagtatacaaggggcctgtttggttcagcttttttctgaccagcttttctgaaaatctggctgtggggagaatctggctgtgggagagaatctgggtatcattacgattacctgtggaggaagataaagttgttcataggcgcagtatctaaaaagtgacgtattcctactattacaacgactcaaccgattatgtgtttatattgattttggatggtttttgc

SEQ ID NO: 36125 - DNA, 2934 bp, Zea Mays
agagagggagggagtagaaaactcttgcaaagaaacctgcaactctgcaagcaaccccacaaggcagccgttctccactctccatctcgaggatcaaaagttcaaaacaacagagaccgaaactcgccatccaccagacagaaaaagcttccagctcccctcgccgaaactcgccgccgtctcctcgccttctgcctcgccaccggtcccgtcgcggtttcacacgcatccgtccggtggacggagcaggctaggttgccggctgcccccggtcgtccctccttcgccgtcgagctggaggacacgcgtagcaacgccgggttcttctgcggcgagctgtggtgtggcctcatggagcccaagggcgagttggctcagaagcgtatccttccttctcgtttcgctcacccgtacgctattgaagaagcaatcaacagcttggaaattgatgctagcacgaaggcaagcaatgtcaacttgcctgctaagaaagacgcaagttcttcagatgcagtatcttgcatttcctccggcgatgcagctagtactgccaaggaaagtgaaatgaaccgagaaacttcttttggggaccaagggatgtattactatgggtattattatcctggttcatacggaggatgggatgagaatggctactttgttggatataatggcgtagaggtgcacccagcagtggttcaaactgacaatggttcatatctgtgtcatcttccgggatatgaaaatggatatgcttcttatagtcaggttgttcctggaggcattgctagtgtggatggtcaatatgtcagcaaagaaccatattattccactgcacttccaattcaggatcctaggacacctggcatttttgctcagccaattgcttacagaactgaactagcatctgcatactcatgggacccttctttcgttcttctggatggggttcagggacatccagttggtgtgcatcaaacaaattatgctgcaagaccaaaatattcttttaataagcatgttattccttcttcgaaagccacccgcagtgcaaaatccgcagcagatactgtcaaaggctcatcatcagctctagaaactgtaacaaatgctgtcaatagcagcccaccatcaaagagtgcaaataagacacctggtgcttccataacaaaaggatatcttccatatagcaagtctgtgatgcacactaataaccaagaaaaaaacagtgtttatcaaagcaaaggcatcaatgtgaaagaaagtggcagaagctggaacagccgagagaagcttgggagaagtaagctaaatggacagggtgattctgaatctaatgagaacaaccataccgataacctgaaacatagtttgagccatcggtctgatgttgttggattgtcaagtgcaggggatgccaatgctagcataccttcacctgttgcaataagcaaaaatgcatgcaatctttcagatttcgttacaaagtatgaacaagctctattctttgtaattaagtcctacagtgaagatgatattcacaagagtgttaagtacaatgtctgggcaagtactcctaatggaaataaaaggcttgacaatgcctatagggttgcacaggaaaggatagcagaaaaaggaaccaaatgtcctgttttccttttcttctcagttaatgcaagtggtcagttctgtggcgtggctgagatggttggtccagtagatttcaacaggaacatgaacttctggcaacaggacaagtggaatggtttcttctcggtaaaatggcacattatcaaggatgttcccaatccacaatttcgccatataattttggagaataatgagaataaacctgtgacaaacagcagggacacacaagaggtcaatttttcacaaggtacagagatgttgaacattttcaagaacttcacatgtaaaacatcaatactggatgactttgacttctatgaaaatcggcagaaagtaatgcaggacagaagaggcaagctgcttactacatcgtttgatcacccattgccaaaagctgaaaaatctccagaaattaaaagccaaacacaattgataagtggcccagaagttggtagagccaagagtgatgaggggcagggcaacaatgttgggatggtacttgatacaaccaagaaaaatgaggagcagagcagcaatgttccagaaatactcgatgcagcctgtagtaacaaggagcaacccaacaaaattgcaatagaaggatgatgcctcggctagttggtctgggaaaacgagatagcctctggaactgacttcaacctgaaatgataagtttgatgtgtgcaatatcaagaaaccaccattggtcatgggttctcttccattatctcatggaagcggggaaagggaaaaaatgaagcaaaggagctgtcttcccacgagaattgttcgatgactgggaaaaaaggttctaggactcatttaggttgaggaccctagtgctaaggcattagagcgccctccatgtctattttttccccatcttggagggtcctttcttttgtcgtgttgtgtctttttttctcttctttttttctattatactgcggctgatgtccaaagaagccagtctgccttatgggtgggtgtgctttaagggaatgtttgttgctttgtgggttgtcctctaggatgtggtatgttttgtttgttttctttaatctgtgcacttgttctagagactgacatagaagaaaagagaaaaaaagattgtgagggattaggaattaattacagtaacattatcttatgtctctgtttcttccattatcaagaaaagggaacaaaaaggattttaaaagctgttgatgtgtacttcgccgataccatttgtcttgcagcctgctacgagccttccgttttcgcttggttctttccggc

SEQ ID NO: 36126 - DNA, 2256 bp, Zea Mays
atggccgccgcgacagagaagacggctgaggacatccgccgcgagctccaggagctccagcgccagcaccgcgaggtacaccttcttctttgtccggcgcatctcgaagcctcgagtctccgggccgtctgccctgacccccttgtcgtcccctcgcagatcaccgagcgcctgcgcgacccctgtggccttcgccgcggcacccccggccctggtcctggacctgggcccccccgcccgctccgtggcttcgtgagacccgttgatggctctgaaaataatgaagatgacacaaaggatgccgatggggaggggcaagaggcgggttcaggtgccactgaaggcagtgacaggaggactttcaacattggcgggttcagaagggacgggagcctgtggatgcagaggagggtggactataattcgctgccagagccagctccaagggagcttcccatgaatgaggacccgagtttggctgagcaaaaggttcgtgaagaaagtgaaaggctgcgacaacaggaacgtgagcaaattgcagagaagcgtaagtgtgatatgatgctccacgctcgtgtagctgctaaggcagaagaaaagagtatggagctgttgtacattcactggactgagcatcataaaaggctgtccaatttcttaagttgtttaagtgagtatgcagtatatatatcgtacatgaatgctggatgtatggttatcagtggtgactcatacaccgtttatgcccattctaaaattatatgccatcaatttgcaatgttttgccctacagaggtggactacacaatcagcaaaaagaacatgacattccaaatatattgttgcccaaggactactgcagaattggaggcacatgtagctgatacatctcttgtgtctgctgatgcacctcgtgtgcttgctgatactgtactggatatatctggtggggagcgtgcttttattgaggcagatgaagcaaaggaactgcttagtccacttacgaaaccagggaattcatataaaagaatttgctttagcaacaggagctttggtattggtgctgctaatgttgctggtccaattcttgattcagttaagaatcagctcacagaggttgacatatcagattttgtggcaggaaggcctgaggatgaagcccttgatgtgatgcgcatattctccaaagcattagagggttctgtcctgagatatctgaacatctctgacaatgctttgggtgagaagggtaggaagctgcgaaagctctatctgagcttattcctgcaactgaagcttaaggttctccacttccacaacaacatgacgggagatgaaggtgctatgtatattgctgagatggttaagcgttctccgaatgtagagagtttcaggtgctcagcaacaaggataggatctaatggtggagtcgcattgtctgaggcattagggacatgcactcgcctgaagaaacttgatctcagggacaacttgtttggtgttgatgcagggttagctctcagcaaaacccttccaaagcttcctgatcttgttgagctttatctcagtgatctcaatcttgaaaacaagggtactatagcaattgccaaagccctcgaacagtcagcaccgcagttggagatactgttgaagatgctaccaaaatattacaatcatgtcagagcttatgataatacactcattacaaaaaaatttggcgtccacaggattactctgaaaggcggaagaaaggttcgctttgttgtgatgggaaatatgttttgcactgagctgcgaattcctcgtaagtatgacttaaagggttctacacaaggccgatcaaccaaaaagcaaaatataaatgagaacgcaacactgaaggaccttgacctatcatatgtttttcatgtcgataaaccatggcgggacacacttttcagaggagcatacccgtgaggtgaacaacagttagtttgatagggaagttatgaaggcactgtcatcaagtgaccctccacttctgactcaaacagaatcagatgaagagttaactggtgatgactatgcatgcttgagaaggaccttaaggaacaacaggttgtgcatggtgaggtggaaaacactttagggcctggttttatcaacttggcattagagaatccaataccaaaggattggagaactattcatatgattggagctgaaagcaatctacttgatattgtctctaattctgttgccacatctataacttaa

SEQ ID NO: 36127 - DNA, 1947 bp, Zea Mays
gccataatgttatgctcatcgacaggcctagatggggatgacataccagagcacgggaggacaccatcgctgctcacctgttcctggagagccataacgttaggctcatcgatagtgaagaacaatttggagtataagtaacatgattcctgagcatccattaatgagagcaaggggaagatctatacttggtggtgagaagcaatcatttcaagaatacacagaatctggagctgcttcaagatggtcttgggggcacttcaacctctaatgctcgaagaataaggcgtagaagcattagcatcacccctgagattggagatgacattgtgagggcagttcgggctatgaacgaaacactaaagcaaaatcgccttcaaagggatcatgtcgaaggttcatgctcatatgttacggaagaccaaagcaacgccaatgactgcccaaataaagatgatgcatctcggataattggtgctactgacagtgactcaagaaaccgaactggtcctactcaaaaggccatgtcattgccttcttcgcctcatgaatataggggtcaagatacccaaaaaggtgatgattttataagtaaagagaagatggcattggcatggaacaaagttttccagagctccccatttcttaacaagcccttgctgccgtttgaggaatggaacatagatttctctgagataacaattggcacgcgggttggaataggattcttcggagaagttttccgtggtatatggaatggaaccgatgttgccatcaaagtatttctagaacaggacttgacaactgaaaacatggaagatttttgcaacgagatatacatcctgagccggttgcgacatccaaacgttatattgtttcttggtgcatgcattacacctccacacttgtcaatggttactgaatatatggaaatgggatcactgtattatctcatccatatgagtggtcagaaaaagaaacttagttggcgtaggaggttgaaaattattcgtgatatatgcagggggttgatgtgcatacaccgcatgaagatagttcacagggatctcaaaagtgcaaactgcctggtgaacaaacattggactgttaagatatgtgactttggtctatctcgagtgatgattgatagtcctatgactgataattcctctgctggcaccccggaatggatggcccctgagcttatacggaatgaaccttttacagagaaatgtgatatattcagccttggtgttatcatgtgggagctgtgcacattgagtcgcccatgggaaggcatctccccagttcaagtggtgtacgcagttgctaatgaaggttcgcggcttgagattcctgaaggacctctcggcaggttgattgcagattgctgggcagagcctgagaatcggccgagctgccaggagatcctaacccgtttgctggactgcgaatacactgtcagctgaaatggaagctgctcgctcgtccactcaattcctgcacaggtggaaacatttcttgtataaaacctgtaaaaaaggctgccgattctgcggacttgaggtcacatatcgaagcgctgtgtttttttttaaacaatggcgaccctttctcaaaaaaaatgtaaaaatgattccctggttatagaagaacatgtctgattcgatagacgtgccttgcatcgcagggcaagctggttgttgtaccttattctagataagtagcacgcccgcgaatgctgttcggctttcaaatagctgcagctgcaaatttttacctgttgctacagtatttcctttctatataaccaggcggcagcagcagccgaatgttgccagtacgttggagatggcataagcaactccatgttgtgaactgttccctcgcgaccataaagaacatgccatcctagatttggaataaaaatattgtcaaaatttgtat

SEQ ID NO: 36128 - DNA, 3882 bp, Zea Mays
gtccccaccaggctttttcgctgtctactgatataaaaccaataattacacgaagggaacggccaccgaactccgtccgtccgacgcacacacgccggtaaatttcctccccagttgattccagcggcactgcacttgtgctgcctgcgttcttctcccctgagagctgcggaaagatccaagcgcaaggccacctaaccagaaccaaacaaggccgcctccggatcgccgagcaaattccatattattttcctcccgtttcttgtttttctcctctcgcttatccgtctcccagaaggagagggagagggagagccgaaccggggtgatcgttgccgtccctgtcacccccacaccccgctgtcgtggtgtcctatgcgactcgtttgttgccgtcggtcgcctggttgattaatccaaggccaaggatctcccctccacgaggacctccggagaggccaggtccagcagagttcctttgcttcattgctcgctttgaaggggatttttactgctagtctctgagccgtcaaatttttcaccactcagctgtactcccccacgtccaccaggtggctgcttgttgagtccagtgtgtcagtgtgtgccacttctctcacaaacactgcgagcttgtccctatcctgcaagaaacagcggaccaaagcatccgctccatttctccgctagttcgtgcgtcgatccaaacgccaatcttggatttctgccgcaaggactgtgcttcttgtagcaaaagcccccaaagatttgatccaagccagctcggaatcggatccctgcgaggaccaggcggcctgccatggcgtcccgctcctactccaacctcctcgacctggcaaccggagcagcggaccaggcgccggcggtcgcggcgcttggcgcgctccggcggcggctgccgcgcgtggtcaccacccccgggctcatcgacgactcgccggcgtcgccgtccacgccgccgcggccgcgcaccatcatcgtggccaaccagctcccgatccggtcccaccgcccggagtcgccggaggagccctggaccttcgagtgggacgaggactccctcctccgccacctccaccactcgtcgtcccccctgatggagttcatctacatcggctgcctgcgcgacgacatcccgcaggccgagcaggacgccgtcgcgcaggcgctcctcgagacccacaactgcgtgccggccttcctgcccacggacatcgccgagcgctactaccacggcttctgcaagcagcacctgtggcccctcttccactacatgctgccgctgtcccccgacctcggcggccgcttcgaccgcgcgctgtggcaggcctacgtctcggccaacaagatcttcgcggacaaggtgctggaggtgatcaacccggacgacgacttcgtgtgggtgcacgactaccacctcatggtgctcccaaccttcctgcgcaagcgcttcaaccgcatcaagctcggcttcttcctgcactcgccgttcccctcgtccgagatctacaagacgctccccgtgcgcgaggagcttctgcgcgccctgctcaactccgacctcatcggcttccacaccttcgactacgcgcgccacttcctctcctgctgcggccggatgctcgggctctcgtacgagtccaagcgggggcacatttgcctcgagtactacggccgtacggtgagcatcaagatcctgcctgtgggggtgcacatggagcagctcaagacggtgctcgggttgccggagaccgaggccaaggtgtccgagctgatggagatgtactctggaaaggggagagtggtcatgctaggcgtcgacgacatggacatcttcaaggggatcagcctcaagctccttgccatggaggagcttctgcggcagcaccccgagtggcgggggaagctggtgctggtgcaggtggccaacccggcgcgagggagggggaaggacgtcgccgaggtgcagaccgagacgtacgccatggtgcggcgcatcaacgaggtgtacggtgagccggggtacgagccggtggtcctgatcgatgagcctctgcagttctacgagcgcgtggcctactacgtcatagccgaggtgtgcctggtgaccgcggtcagggacggcatgaacctgattccctatgagtacatcgtctcccggcaggggaacgagaagctggacaggatgctgcggcaggggaagccagaggagaagaagagcatgctggtggtgtccgagttcatcgggtgctcgccgtctctgagcggcgccatcagggtgaacccgtggaacatcgaggccgtggctgacgccatggagaccgcccttgtgctgcctgagaacgagaagaggctgcgccacgataagcacttccgctacgtgagcacccacgacgtcgggtactgggctaacagcttcctcctggaccttgagaggacctgcaagtatcattctcagaagaggtgctggggcattggcttcggcctgcggttcagagtggtctcgctcgacctgaccttcaggaagctttccttggagaacatccttatggcataccggagagccaagacacgggcaattctgctggactacgatggcacgctgatgccacaggcgattaacaagagcccgtcaactgaatctgtgcggatcctcaacagcctgtgccgagacaaggacaatgtggtgtacctatgcagcgggtatgaccggcgcacccttcatgagtggttcccttgtgagaaccttggcatagccgcggagcatggctacttcctgaggtgtaagagggacgcggaatggaagacctgtgtcgctgccacagactgcagctggaagcagatcgcggagccggtgatgtgcctgtacagggagacgacggacggctcaaccatcgaggacagggagacggtgctcgtgtggaactacgaggacgcggaccccgacttcgggtcgtgccaggccaaggagctcgtcgaccaccttgagagcgtgctcgcgaacgagcctgtgtcggtgaagaccacgcctcactcagttgaagtgaaaccgcagggcgtgagcaagggcttggtggcccggcgcatgcttgtgtcgatgaaggagcggggccagtgcccggacttcgtcctgtgcatcggcgacgacaagtccgacgaggacatgttccagctgatcgccaccgctgcctgcggggactcgctggcgtccaaggcggaggtgttcgcgtgcaccgtcggccgcaagcccagcaaggccaagtactacctcgacgacgcggcggaggtggtgaggctgatgcaggggctctcctacgtctccgaggagctggcgctggcgaaccagcgggatgaagacgaggactcctctctggacgacgtgtgggagtaggaaggagcgttcccttcccgtgctgctcctgcggtaatgtctgtttgtgttggctcggctggagctttcgccgagtagtttaggtgtgtaaatgaggtatgctttccagcgtaatgtattgccagtggtctagtctcgagagctggcttgaatctagtgatgctctagtactttggtttgtggtgctatttacctgatccgtggaaggcagtactatgagctatacaagatgcagacctgaaatctcattcatctgaagaccatgacctttctcctaggcgtgtgtatacgtctttggattttggaactaaccatcatgtgccagtattagaggagctcgtttttacgtgatgatcagtttttttggaactagcgcgaacaaaagctgcaagttcccaagttgcaggctttgcgaaggtctttgggcagagtgaaactttaggctgtgtccagcagtccgctaccgaaaa

SEQ ID NO: 36129 - DNA, 3145 bp, Zea Mays
ccaactgagtagggacagagagggcgggcaccatcacgcggccccagatcctagccacgctcccgcacccactcttccatcgcacgcacgggcgagtgcggcagatcgctggcggatccaatgctgctgccctggtagctgctgcaccgcgcggctgctggtttggtgccctccggctgcggcgccgggtcactttcgatgtgaccatctgaggaggaaaggatggcggcttcggcggcggcagcgcctgggtcggctgagaggcaggcgcgcggcggcgcggcgtcggcgatcggcaacgcggtatttaagagtggccctctcttcatatcatcgaaaggaattggatggaaatcatggaaaaaacgttggttcatcctcacacgaacgtcactggttttcttcaagaatgatcctagtacattaccacagagaagtggtgaagtgaaccttacattgggggggattgaccttaataattctgggagtgtagtggtcagggaagacaaaaggctgctgaccgtcctttttccagatggccgtgatggtcgcgcctttaccttgaagtacacatgcttacctttctcctaaacagtttggtgcactcgagtgagcccaaaaggcagaaagttctaaagatttgttcgagtggaaaacatcactggaagaagctcttgcacaagctccaaatgcagctcttctgatggggcataatggaatatttcgcaatgacacaacagatgtgtatgaagaggctattccaaattggagagagaagagacctaccaaatcactagttgttggcaggccaatactacttgcactggaagatatagatggcagtccttcttttctggaaaaagctttgtgtttccttgagaaacatggaataaaggtggaaggaattttgcgtcaagctgcagatgtggaggaggttgacaggagattgcaagaatatgagcaaggaaggacagagtttgcaccagaagaggatgctcatgttattggtgactgtgtaaaacatgttctccgggagcttccatcttctcctgttccagcttcctgctgtacagcattattggaagctttccgtctggacatcaaggaatctcggatcaaatctatgcgtgcagcaatatctgaaacatttcctgagcctactaggcggctgctacagagaattttgaaaatgatgcataccgttgcttctcatactgccgagaatagaatgactccatcagcagttgctgcatgtatggccccactcttgttgcgtccccttctttctggtgaatgcgagctggaagatgattttgacatgagtgatgacagtgctgctcagcttattgctgctgcaaatgctgctaacagcgctcaaggcattgtaactactctattagaggaatacgagagtatattcaatgatgagcactttaggtgctccttatcacctgattctcaaacaggagatagtggaagtgaagaatcaactgatgatgaaactgtggatatcaaggataatgggtttcatgatgcagaaaatgatgtagatcaagaattagatgatgccgagcgaatactgaatggaaaattgagtgaaaccagtgcatgtgtccatgctgacctccatgactacaaggaagttaatggcaacgattcagacgctgagctctttgttgaggataacacatttgaaccaaatgtaaatttaaatgatactcccctaagtcgtttaatagaaaatggaaagaaaccatcaaatctggcgtccagtcatgaaactccattatcagtgggagaaattctttcgtctttggatgctggagttccattacctggtcgtgcagctgaatattccaaggacagactctctagcaaacccaatggaattcagcagcatgtgaagcgtactaacttatggggacggagcaatgcaagaaagggccaacgttcagagttagttgatccttcaagtgaagaagagcttgctattcaacgacttgaggtaatgaagaatgacctacaggtcaggattgcaaaggaggctagaagtaatgcaatcctacaggcaagtttagaaagaagaaaacaagcactacatgagcgccgtgtggctctggaacaaaatgtgtcaaggttgcaagagcagctacaggctgaaagggatcttagagctgcactggagattggattaagcatgtattcttcacaattttctagctcgcactccatggactcaaagacaaaggcagagcttgaggaaattgctctcgcagaagctgatgttgcaagattaaaacagaaggttgcagagctgcatctccaactcaatcaacagcgccagcaccagtatggctcttcggtagatgcaaatgattgtcctccgcaccttccaaatcatctctcacagaacactgtccaaactggatttgataggaccgttgctttttgtaatcaagagaagcaaagaaatgaggagagcttgccgtgcacatcccactggagaagcatcaaacagcatgtgctctctcaggattcttcaaggcctttctcccgaaagcattcctcagacacctccttgagtgattcaatggaggcatcaacaagtgtgcttgcagagggcgggccactgttggtgaacatcgccagaacaacagaaggtgttgaatacgggagacctccgactgtgccgtcatctactctagttgaactaacaaccaggctagatttcttcaaagaacggcggtcacaattgatggaacagctccacagcctcgatttagggcatggatccgcgtcccatggtttcccatacaaatcttcatctccctggaacaacccaaggtagggggcttgttcagttgctgcattaccgcgcatctgtatattcttggtataggatcccttttgtttcactttatctctgtagaagctggtctcgtttttgtttcacttgttatctctgtagaagctggtagtgagaatgtatataccccttgcctgccttcacttgttttgctagtgcttccagcggacatttttcgagcgtgatttttgttttgcttttgtatttattgtgtatgtaatgactcaaggggaaatatatagatgcgtctttttttcttggggatatattccactgcag

SEQ ID NO: 36130 - DNA, 3226 bp, Zea Mays
gagtaaccaaaccaagcaccacgcgcggccatggccttccccgccgacgcgctggttctagagatcaccgacacatcatcctccgccaccgccgccgccgcccgtgctccatcctcaccttctcccccgccgctgtccatctccgacctcgcgcgcttcgacccgctcccatccccaaccgttgccgttcgcgtcgaccggcacaggctaatcgagagctcctcctacttccgcgcgctcctcggcggcagcttcagtgaatccggcagagagcatgtgcgtgtgggctgcaatttggaggctgctgtgcaagtgctgcgctacctttttgagccttccgagagctttaacatcacgcacaacaatttcctccccctgttggagggagctttgtttcttgctgttgagagccttctagtggagtgtcaaagatggttcggcaccatagcctctcaaacttctgccatgtcagttccattagatttcataattgaagtctggtactttgctgaagagcatggtgttacttttgttcaagacatttgccaaaaatttctagctcagaattttgtaggcacatgctatctcaggaaggtcatttaataaaataccttatgatttgctatgttcagcgatcaaatgtccacatctgacagtggatagtgaaaaacaattgtgtgaagcaattttgtattgggtttcagaaaatatgaaagcctgtgaacaatcaaaccccaactcagtagatggccacctcttcattcttagcaagcaggtgaagatatgccttttaccattaggatttgcggcagggacaatgaggcattggtttgactttggaaacaagatcatatgcactattcttgatcttctcaaagacagtttgaaaactttattggatgctgttgatgatggtaacttggatcgatattgcattcgaataacagaatattcaaagaacatagtgctttcaggatgtccccaagtaactacagcattcttgtacatatctgttctccctaatgatctgagtgtttcattgaagagaaggatagtgagttcatacacccaggttgatcatcaaaccttcgttctttatgaggaattagagaaggctactaaaaccttatcatttaagaatgtacacatggtggatatttcaaaatgtccaaacgttcattttggcgcagcaattgactggttgaagttgggttttccagaattaagggtattcagggtttcacattgtttatcatttcaatttgatgatttactatatctgttaatgagatgtccatggattgatgaaattgatatgactattgatacaagcactgtaacacccagacattcagtaatctcgtctagttctgaagtcctaagcaaggcaaaaccaaatcagaaaagatatggcatacattgttcagcatatgacaggcaaccaaattcggttttcttaaatatatcaagattgacattggaaggcagaaatgatattgatgatatggacttgttggagatatctgtcctgaaaaattctctgtgctatataaacattagaaactgcttcctgttgacggatgatggtatttctaaccttctgatgaagtgtacaaagatccattcgatggttctttcttatacttcttttggaaatcgatcaattcaaatgctatgcgctgccaatccttctggccacaacagtggacatgctcatgttatggcatcttatatgcaagaattacatctggatggctgcaaaggtattgactctgttgctttgtcgcagctagtgagcattataagtatcacaaagtttttgagcttaagggaaacatcacttacagatggtgcactctgcaagtttgttggctctagtctggagtatcttgacgtttcagagactgtgatttctatggtatcattagcaccagttattcaaagaaactgtaaattgaactgtctgaaaacagctggatgctgtagtcttctgttgcaatgtgctaatgtagaacatatcaatggtaacaagtatggagattttctacaggagttaggaactacctactgtctggaggatgttgaaatgggctggggattttgccctattcgaatcgaagaccttgttccttcttttagtaaagtaaggaagatgaaaattggtctcggcacatcattagcggagaatgttctgtgtgctcttcctatgatttgcccattcctcgagtctttgattctaaggtttcaggtgatatctgacagagttgttagacgtctattggaatcagcaacaaatcttcaggtgctttgcctgcactattgtcttggaagtttaacttcatttagtttccaaacaaaggcacctgcattaagagtattgcggcttcattgggtaacttcatggcttacaaatgatgacttgacaatccttacagagaattgcaatttggctgaactttcactttctggttgcaaacttcttgactccagctctcaagacattatctcatctgggtggccaaacttggcacttttacaccttgaggaatgtggtaaagtaactgttgaaggggtttcttcttttttcaactgtaaggctttggaagacgtcctactacggcacacgggtaggggcatcggaaggagcatcatagacgatgctatcagagagttaccactactgcggaagctggctttggatctttgcgatgcctgtgaagacggttacgatagcccaaacgatgcggaagggaagatgattagaagtgtaaggatgagtcgatgcaagaagatggcggggtcgtgtttggaggtccccagacaagggtcttcaacttcaaggccggtgcacaaggacactgtagtgctggaatggagcagcagaatgttcacaaccaccatagtgaaagaaagagtgtgatgagcctcttctgtagttttgtccctgatgaagaacacaagagcaggccacaatatatatgacttgtatgaatggtctccccgcttctgattttgaatgctttgtatgtggacatatcctcgtgtgtgaatgtatttgtatggtatcaaacgaagatcatcttttgcagtcgtactgtacccatgcactcttatgttgatccacgaacaaagtttggaatttttaggtgaccgtgttcatgtttgaaaattattgttgtactagtccttggtaaaataaaggaggcaaggcaggagccaaaaaaaa

SEQ ID NO: 36131 - DNA, 625 bp, Zea Mays
ctcttaactaaatttgatttaataatcataaaaatggcgatggttcacgattcgagcatttcatcaaacacctagagagtgttgccctgctttgcctctccactcaaccctccacgaatacagacacgcacaaacacataaatacacataatcaatcatgcaagtacaagcatcgaccatgaacaaacacaagacgaacagcgggtcctcaccaaggtggatgacgtggtagcgaggacgacatgtgcaagtggagccagctaggatggcaggagagtgcgcaagtgcgtggattctggcctacagcaaggaggagctcgcacggccctggacctagaccggcgtgcagggagagccagaggtgtggcgttggacggctgctgcgatgacttccctgacatgcgcgcaaaacaaagaagatatgggatcgggtcgtggctggaagcaggctgctgcaggggaggggctgtgccatgaaaatagggggatttctagagggggctcgacgacatcctgtgaagaagccagccatggtgagggagagagttgcgcccgctcgggggaagaaggccacatggtggagcagagcaccatggcaataacatggaggagctgggagcacgtc

SEQ ID NO: 36132 - DNA, 1531 bp, Zea Mays
cgaacggtccatgatcaagtctagcagggagaaactcactttcccaaggaagtcaccgaatccgcattcgataaacctgccgtgtcccgttcaccccgcgttcgcttcatccgggcgtgggctaccgccgcagccgccgccctacgtccggtgaccaggctttcattgagctttgccgacgacgaccacgcaccagatggctgggtatatgtcaagagggccccaaaatggttctgtgtatgtctgcaatctacctcctggaactgacgagaatatgttggctgaatattttggcaccatagggttgctaaagaaggacaaaaggaatgggcgcccaaaaatttggatctatagggacaaagtttccaatgaaccaaagggtgatgctacagtcacttatgaggatccacatgctgcttcagctgctgtggaatggttcaataacaaggatttccacgggagcactattcaggttcacatagctgagtcaaaaagcaaagatgctttcgataaccccacaaatttgaacaccattgctggtgtcagtgaacaagatgaagtggataacggagcaggcagaggtagagggcgtggtgatggtcccggcaaggcttggcagcaagatggggactggatgtgtccaaatacaagttgtggcaatgtaaattttgccttccgtggtgtttgtaatcgctgtggagctgcacgccctgccggtgctggtggaactggtggtggaggtggcggtaggggtagaggccgtggtaactctgatgcaagaggaagcagtcgtgcgggtgctggtgctgctactggtggtggtccacctggattatttggcccaaatgattggccatgtccaatgtgcggcaacatcaactgggctaagcgtaccaaatgtaatatatgtaacacctccaagcctggtaccaatgaaggtgaaactggctcaaaggaggtgcagtgccactttggcccattgccaattgttgtttgcattgccatttttcttcattttaggggtggccgtggtggtgggtacaaagagctcgatgaagaagaactagaggaagttaaaaaacgccggaaagaggctgaggaggatgatggagagatctatgatgaatttggcaacctgaaaaagaaatttcgctctaaagctctgcatactggaagtgcgcagacacttcctgggtctggacgtgctggatgggaagttgagcatcgtggttctagtgaaagggaaggcagggagaggagcagggatcgtggtagggacgactatgatgaaaaggaaaccaggagcatagatagaggtgatcatggaagggaccagcgccggagccaagaccgcgaaagggaaaaggggagggagagaagagaccatgagtatgagagaagtagggagcgtgaccggcgccacaggtggtatgaaaattttgcttggaccaggcttgcactccagccgtccgatttcctatgctgccatatccaggccagggcagcaaccaaacaggccttaaggaaataa

SEQ ID NO: 36133 - DNA, 1936 bp, Zea Mays
gaggcgataccccctccctgatgttccaggtggttgttttgcgtgcgttggtgaagatgcctcgcgggcaggctctttgatcgcgcggggcctcgctcgttggtgtgtaaggcggcaatggggatcaaggcggtggagaagctcaggtgcccctcgtcggtggccgccgcggcgcggtcaggcttgaagctgtggatgctgcgggccgtgacgacggtgttgctctggaccagcgtcgtgcagttcacggcggtagggaacacctggacctgggggcctcgcgtgctaaagggatggccgtcgtgccggacggcgcgggaggcggccgcggtcaccaccacgcggctttcaacgccggagcccgtcgtggagaaggctgcgctgccaccgaagaatatgcgatatggttgccatcgcaagatctttgaatgtgactttaattgtgcctgagttggataagacgtcattttggaatgatccaagtgaatttcaagacatatttgacgttgaacattttataatctctctaagagatgaggttcgcatacttagagaattgccaccaagagtaaaacggagagtggagttaggaaagttctactcagtgcctcctgttagttggtcggatatctcctattaccataagaagattctacctgcaattcagaaatataaggtactccatcttaatagaactgatgctaggcttgctaataatggtctgcctctggagatccagagactgcgttgccgggtcaattattctgcactgaaatttacgtcccaaattgaagtgttaggaaggagagtgattagaatgcttcgccaaaatggccccttcttagttattcatttacgatatgagatggatatgcttgccttctctggctgtactcaaggctgcactcctaaagaaaccgaggagcttacaaggatgaggtatgcttacccatggtggaaagagaaagtaataaactcttttgtgaaaagaaaagatggtctttgccctttgacgccagaggaggttgctattgttcttagagcattggatatcgacaaaagtatgcaaatctacattgcagctggggagatatatggtggaaaacgcagaatggcttctcttaccttggcttaccctaacgtggtgagaaaggagacgcttctggaaccttctgatctcatgttctttcagaaccattcgtcgcaaatggctgcactggattacttagtatcactggaaagtgatatatttgttcccacatatgatggcaacatggctaaagttgtcgaaggacaccggaggtacctgggattcaagaaaacaatcatgttggatcgaaaacttatagttgagctggtagatcagtataccagtggttctttgcggtgggatgagtttgcttcattgatcaaggctgtccattcaaaccgtatgggatcagcagccaccagggcagcgatccctgacaggcctaaggaggaggactacttctatgccaaccctcaagaatgcttgcaaggtcccaatatgttgcaaacattgtgagcttgtcacttgtcagcgctcttgccattctttttgcaacttggcatggctgaacataggattatccatcatatcttctgaacctgccaaatggaataacatgcttttgttagcagttcagagcccaatgagaaggtctgtgaacgggttctgaaacaacaaaggtggatatatgacttgaatttaggtgataggcaatgcttgagtggagaggcaatttgtttgtggattaaaccagcaaaagctgtcaagcagagctgatgctcatgtacgagactgtagtatagatggtgcagtaagtccaaaagtgatctttgtagggaaatattgtttcaaaagaaaaacttttctacacgtgccaacatttggataagaaaatctgtcaacttt

SEQ ID NO: 36134 - DNA, 868 bp, Zea Mays
ctcggccaggccaaaacggcccagctgaggcccatttgccgccgccgccagggggtttcctccccctctctgtgacgcgcgggccccacccaaggcgcctcgcctcctcgagcaaggccgcacgcaggcgcaccgtcactacgccgccgccgggctagctagggcgcctgggcgtccgcgcccaaattaatccgtcgtcgattcgtctccctgcgtgatggagcagtgatggcggccgtttctttctcccccattcctcctctcaccattgatgccgagaagaaacagccacgccattgatggcgcttgatggagccgtcggctacctctccctctctctagcgccctctcctctccctctcctcctctataaagggcaatcgagcctcctcccttcctccccctgccccaagctctccctcacctctcacagccacgtccacgccgaccactggagcgtcgcttcgtcgccgtccgcggaagctcgccggagccctcctcggtcgcgtcctccccgtgccgagcccctgcctcaacgaagcagcacccatgccgccattccccgtccgagcctcgccccgcgaagcccctgtcgatcgtgtcatctgttcgtcgcgaggttgaagataacccagaataatttattaattttcgaaatcacttgttgattcagtttatgaattttataattattgtgttgtaatatgggaatgtcgtgcttcagaattcatgtgtatgtgaattattgatttttgggtatatatgcgataaattagtacaccgttattagtcatattacttgtttacaatgacttttagaaggttggattagaaagaagtatgatacattttggtagacaggtgctag

SEQ ID NO: 36135 - DNA, 5927 bp, Zea Mays
caggcattcagcctcaccgcacttgtggcctggcacgtgctgcgcgcacacccaattctagcccacgcaagcggccgatacgagcgcctactacctctggcgctgccgcgcgctggcgaggccatcgaactagattctagcagcatctacgatgaaccctgctccccggcacccaagcacgtgcatatggcaaagcatgagtttggaaattatttcaagttttatcaaagaatggacttttgataagcagttgagacgaggaacaactcttatgaggcgaacataactatgaactagtaactgggagtccttgattctttaaattttcgtttcccttctcttgttggtagatgttctgtacattacttccctttttctctgctctttgcttctccttggtggcttggtagtcctagctgtgttactggttccaaatatatttttggacatttattactccatattactctgagttgctacctatggtgagttatctttgtaagattgtctccagcagttcaccccatatggtcactcaaaacactgttctgccctgtaagcactgttttgcccccgtaagcactgttttgccccgtagactgcactgtttgcagagtggagtttgaatatgaggatgaggatggttaagctgttggagatagcctaacgagtttgtttgtccaacttgcccctgcatgtgtgctgtatgcatattattgttgccattttacatgtttttcatgattttcaaaaaatgggtgctggaaggaagattgaaaccttttttactgcaacaccaagtgcacagacacaaaatcaaaccaatgaaaggtatggaacatatcctgttgctgcccgtaatcttcgggaagatgagctaggaggagtgatttttggctgcaaacacaacacaatcggtgaatgcctctctaaacagctgtttggtttgccttcaagccatttctcatatgtgaagaatgtcaaacctggcatgcctctatttctgttcaattatagcgatcgaaaaatgcatggaatttatgaggctgcaagtgctggcaagcttaacattgaccaatttgcttggagtgatggtggtagaataaagacacaatttcctgcacaggtcctcatctctatgaagactgcctgccttccagttccagaatctcaattccaaagtgtgatcagtggcaattattacaaacctcggcacttcttctttgagctagaccatgaacaaacaagagctttgatatttttgtttaagcctgcccctgttcatgatgtttcaaacaaatgtcatccttccaaatctattcaatctccaatagtcgaagcatatgtcaatcctgatggtgaatatgctagtgagagtagaacgtcaacgagccaccttgacaaggaggcttctaactgggatgatgttacgaccaaggaaggaactgaatttgtcaataatgaccatccacatattaatccaccacatgttgaacaatatggtgaagtggctgttacgcagaaacaacaagatatgtttgttttacgacagcatgaggctgaatcctccaaggacactgtggattctgcttcaaataaatcaatgcctcaagaagcacagtttgatgccactctccccacagacccatctaattccacttcagtgggtgatgtatgtattaaagacctgacatcactggggcaatctcgtggaaatgctgagctgcttcacattgtcaaagagttatccaagaggaaccaagcaatggagaaaaaactgtctgagtcagataaagaaatactgtttctgagggaatcaatgaaggacacaggaagaagaattcaggagctggaatatcagtatgagaaactacaatcaaactataactctttagtcccactccttggtagtcgacatgataatatggaagggccatcaataatcttaatgggtggctacaggggcagtacttgcctgtcatcactagattccttttgccctacgacagacagagtagtgcctctgtgttcaatgagctcagcccgtgcatatgcagccgctgttgcattgaaggaccatctctatatttttggtggtgggaatggcagttcatggtatcacacagtggaatgctacaggatgggcagtaataaatggatagcatgcccccgtttgaaacatgcaaaaggaagccttgctggaactacattgaatgataaaatatttgctattggtggtggagatgggtctgcagttttctcagaagttgaaatgtttgacccagcacttgggagatggatagacaatgtgtcaatgcggcaaaagagatttgctgctgctgctgccgtattaagtggcacactctatgtaactggtggttatgatggcaacacgtacttacaatcagcagaaagatatgacccaagggaaggtttctggactctgctaccaagtatgagtgcaagaagaggatcccactccgtagctgtcatgggggaatccttattcgctgtgggagggtacgatggaaacagcaatatttccaccgtagaaatctttgatccgcgtgccaattcatggaggataggccgttcatgcagcattgcaagaggatacggatgcgcggtgacgatggacggcaatctgtacttcattggtggggtcaacgatgctggagaaactctcgggactgtggaggtctacaatgagaggcaaggctggtcgatctctggctgcaaatccgtagggaagagggcctttgcctgcgctatcaccgtttgacatgatcgcggatctcataccctacctttttttttttttttttttttttgcaaccagcagtcactcatggttcgcagcctttgccctcctgctggtcctactcctaccacgttggtccgagtatacctgggttgagagaaattttgctgcctccccccccccctacttatactacttccgtccgtgaacaaatcaacttctagaggtgaattgagccaaacttttgcaaacgttagaaatgttgaacttaaggtaactataaaagttaatttatttgggggatggagagagtattagacaaagccaccaaatgttctggtggtgcatttgggaattgacaatcacagagcaccaccaaatggctaagggccacagtagcatgttctgctgtgtaatgtccaggcagtctgctgctgtttgcgcttttgagaaactagacatggtgtcatggtaggtgatgagacgtaggaagatggggaccaattgctgaatgctgccgatagctcaaattggcagccggttcataatcgtcgctgcaagggaatcgctctgatcgcttttgtgcgagcggttggtggaatctggactctggggcaatgcaatgtgtttggtgaaccgagtgcaacgctgctaagcaaggaatacgaacctaactcgagggatttggtctgccaaaccatcggagcaaagatgcgcgcgactgtgggcctgttcagttcagtcagccaaagacgtctgattgccttgcgcgttatatccggatgagggctggttatcttagcacagacaagacaaacaaaaaaggaatttttccgattaccaatcgacaggttcccgtacaaggctgagcatccgttcatcgtccagaacggcagaatctaaaaatcatcagtggacaccatcagacgtgcaaaccagcacacctccgtgttgttgttcctcagtgaaagcaatcatcctggaattcttcagttttcttcgctacagcataagatgccaacttcagcaccggtttacctttggctcagcacggaaatataaaagctaccgagggagattcctcaagttccaattgacaacaggaattcttcaactcagacacacccatcttcaaacagagaatccgttttacctgaaaactttgacgggccttattggacatcaatcatcgtcgaccagaattcccccaaaacactgccttccttcctctcctctataaaaccaacccaccagctcaaagtttcaagcaccagagcaaactaccagcttaagtttccagcaccagagcaagctaagtttccagcaccatagcaacgatgacatccaacttcacgcccaatgtctgggcttggatcgccagcctgcccccattcacccagtggcgcaccaacaccatgtccctttgcatctgcgccacgccatcatcatcatcttcgtcgtcacagccacagccatcgataaacctctcggttacgaaaactacttccatcgcacagcctccttatgttatcttctccgtcttcgcaaactacagcatgccagtttcgctgtggaagtcacagccagtccacctgaaaacaaagacgcagcaaactctagacgaacaggatatcatacacatcttcgtcaacatcgtcaactccgtgctgaagtactgtccagacaagaactcgtcgtttcggttccctggggcacagcctcgtggcaacttcagcgacgtgttcaacatagctttcttgtccctggccttcctgctgtgcatcttcgaggtccctcgcgacctccgtccaggatgcttgggttcactaggagcccagctcactggttcgaggtgcagagatgccgcaaagagccttgtgaggatgctcggtgcaaacctcgaggaccagtggatgcagacgatgaacctcgcagtaaccaactggatagtcgagctgagatcctcgagccgctcgtccgggcccgccgtcgccgctcttctcatacgccgtctcagcaagcgggctctggaaggtgcagctgtactgcccggtcatagccatgggtatggaggaagctgcagagacaccacaggatgagcgtctcctcttctcactcatttatcaacaagtcgagtgtgtcattcagctggcctatagaacgacaagaagggataactggatcgatgtcgaggtgaaggtggacaacgtaaggtgtgatgtggactctttggtctccgagacccttatggcggagcgtggatatggctccgaagagaagcacttcccatctcgtgtgatgctgcaaatcacacctacgcaacaatctgatgtgctctctgtttctgtcggcaagtccaacgacaaccccacacacgaattcggcatcgagaagggctttgagggttcatttgaacccccaaacgcatttggcctgaaggcgtcagtaactgaaagccttacactagccatgaagccctggaaattcgagcagtctgtgcatgggaacactgcaaccttgaactggtttcttcatgacggtgtcaatgggagggaggtttattcctcgaaaccttcaaagatttctctgctccaaccgaaggcctggttccgtgacaggtactcaaatgcgtaccgccccttcacaaagcagggcggtgtcattttcgcacgtgacgagtatggagacagtgtctggtggaaggtatgtggtgcagcgttaggacagactatgaactggcaaatccgaggctggatttggctaacctactggcctaacaaacaacggaccttccacaacgaaacgagatggcttgaatttagagaatgcctgcagctcccccttaccaagttttcataaaccacttgtactctgaaatgaatggctgtatagcagtgtagaaccatagacatcgaaaaaatccatgcatatttggggggcacaaaaaagagtatgatactctattgtaactgaatgtactgttacatcgaaatgacttcctcatatgcctgccttgcgatttaatgcaatcctaaaaatttattcctttttcttgagctaatttagagttcaccccacccgaacaaatgtgcaatattaacagccaagagagctcattaaacacgaactcatccctactatagtacaggaactcaacacaaaggaa

SEQ ID NO: 36136 - DNA, 1594 bp, Zea Mays
ggctcgccaaggaagcatccactgaccagcatccaagcgaggcagcctgaccgcccaccgtactacacgcgagcgcgcgcttctgcccccgccctgtaaaactctgaacataaaagtgcatcgccctgcctccctctcttcatctccctcttccaaggagaacacccacctctctctctctctctctctctctctctctctctctcttgttgggacctggagaagaggaaggaacagggagcaggggggaagaagaggttgctgcgacggctcaagcctcaagcagacaagcagagaaacaccagttggtcaagatgtcagctggtttccagctcggtgtgatcgggtcacttgcactctctgtcgcatcctcagttgccattgtcatctgcaacaaagctctcatcagcacgcttggttttccgttcgccacaacattaacaagctggcatctgatggtgaccttctgcaccctccatgtggcacatcgcttgcatttcttcgagcccaaggcgattgatggacagacggtgatactctttgggttgctgaatggcacgtcaattggccttctcaacctgagcttaggattcaactccattggattctaccagatgacaaaattggcgatcatacctttcactgtgctattggagactatcttcttgaacaaaagattcagcgagagtatcaaactctctcttctggtcttacttcttggagtaggaattgcttcaattactgatctcaagctaaacatgcttggttccatcctttctggcctcgccattgccactacttgtgttggccaaattctcacaaatacaatacagaagaggttgaaggtctcctcaacgcagcttctgtaccaatctgcgccttaccaggcaggaattctgtttgcaactggcccttttgtggatcaacttcttactgaccggagtgtctttgcacacaaatactctgctccagttctgggtttcattgtcctatcttgcttgattgcggtgtctgtgaacttcagtacatttcttgtgatcggaacaacatccccagtgacataccaggaacatattgggcattctaattgccatatttggtatggcactatactcctacttctctgtaagagagggcaagaagaagtcagcaaatgatgctctaccagtttcacagatgactgcgagggttaaagggagatggctagggttacagggcgacgactagggttaggggcgctgggaggctggccgcaaaactttgcccacggtcgacaagagagaagggattttcttctaatctcttgcttaccttcgactgatacagtctctctccttatatagagagggttactttacctctaagcactagatctaatcttatctttaattttaattttaactaaaactaatctatctttatctaaacaacctgaggggcgtgctacagcgacgacattactgtagcgggccctcttgggccctgacacatacagtttttatggaataaaagggaataaattgataagtgataagcgtagaacggccatgccaatgactgtcttgcttcctatactaactcagcagcaataatc

SEQ ID NO: 36137 - DNA, 2506 bp, Zea Mays
gtttcagccgtggagcatcagcgcttcacctcatctcccatggccgagcggctccctcgtggtgcccaggatcccctcccgcacatcttcctactggagctcgagctcaacccaggtcggcctcccatcgcgccgtagttttgagtcgtcatgtcctgtcatcgagtcgtcttctcctgccaccatctgttaagacgacgagctcgccccaagctccttctatggccgtcatggctccttccccaggcccttcgcgcgctctacttccaccccaccgtcgatttggtggctgcgcccaggctgcagtttccagcgtgctcgcctctacatcctagccaccacgacgtcttctagctcaaactgcaccaccgatttaccctgcctctgtctttaaggttcagctcacgtacgcacgccggacgcgtttgccgctaggccctgtgtcgttaggctcgtcaaccatggtctctgccgcgcgcacactcttctttgtcgtcgagtccgcgtgcgctgctcgcctcgagccgccccgccgttgtaaaacaccgcgcaggtctctaacctcactgcccactctcgccatcatttttgtatgctgtgtttggggtaaaggaatcctaggagcaccctaccagccattgtcctacgctaccaggccccaccgtcaatcccgtctaggccctggcatcggcttagtgcgctccaccttgaggtggtgtccgccgtcgtggagcaccgctgcgagctcccagcgccctcgcctccagtctcgccctagtcatggacgcccaacgctctatctcatcgtcactgttcgcgacggatgtcaaacctccgcatgcccccagatgcgtcgtcaccacgttcatgcgttgccgtccgtgccttgtgttcatgccggcaaaagaatcccaaaacagtgtgtagaagcaagctccaggtcgatgcccccaagtgctcggcgaaaggcctgaacaaggatcatcgccatttgtgcggaattctagtcaatatggagagattccaagagttgtggatggaggagcactacagtaaactgatgaatatccgacggtcactctatctccgacgacttcctacgaggccgtcggatattatcttatgtccgacggccaacatgggctctcggaaatatagacttatctccgacggctagttacgagaccgtcggacataaggttatatccgacggcctcgtaactagccgtcggagataagcttttttaacacggtcccggcccggtgcgcggttcattttcacgcgcgcgcgctcgcttctctcttctctctgtctctgcccgctcgccgccgtcgacgcccgcccgccgtcggccgccggtgtaagaaacggtacaagttgccggacgatggatcatatgatatgaacgctcgttacgtgtttgagtataacgcgaacgatgtcgttgcagatgcaatgtactatgcacgaattcaggctataaaggcatggtacagagcaaatgctgatgatcgaccgatgccaaataccaaggtcgagtggtcatcaatttacttgagggaggagcaatacctagaggtgtcggtgccatggatggccacccgatcagacggttatcgggcattgtgcagatggtgggcttcccctgagtttcgtgccatttccgaaaggaacaggggaaaccgtggaactgagtcgttccacaactacggcggtgatggtcatgtgcgcttggctaagcgaatggaagtcaaatccggtcgtatgcccacggatgtggaggtgtatatgcaagggcataggggttttgatcctcagaatcctgatgtgttatgcactcagacggccaccgaccgtctagcttcgtatgggcaggagatggttcaacgccatggggaggagtacgattggaggagccagccaatcgaccctcaggcagcatatgctagcgcaggaggacaagcccatggacggttgggtatttttgattctacgattgattccagagagctgagacgtcgtggacgacaatccacatcgtcgtcttcacagtcgtcccgttcacgatcagcagcccatgagatagagcttgcggtgttgcgtcaacaggcagagtaccatcaatcagtcttgagggaacaattggagtaccagaggcaacaatctgaataccagagacaacaagccgagtaccagaagaagagggacgagtattatccaagcctccaggcccaaaatcaagctcttctctcgcaactatcccaacaagcgggcgtcccgatgccgacatatgggatgccgcctccggactttgcactgccaatgccaatgttggcgcctccgcctccgcctccgtcacaattccctatgggatttcagacaccacccgcttcagttgccgcacctggagatgggtctggtcaagacgacacaacacattcgtgggtgaataatcttttcagcacgcatagtccagccggaggaggtggcgatggatatgagtga

SEQ ID NO: 36138 - DNA, 2806 bp, Zea Mays
gtcccaattaaggcccagcccattgttacctgtctcggctgctcctccacgacaggaaaccctgtaccaaaaccctcgtcactccatcctcgtccctcccggcgccggaaaaaccagttcgcgtccatcctcctcccctcccacttcgccatggaccccagcttccggttcgacccggacagctccgacgacgaggcggcgggtgctccaccgcggggcggcccggtgcagtcgccgtgggagttctcgtcgtacgcggagtccgtggcggcggagcacgcgcgccgccgcaccacctccatcgacgagaaaatctcgctcctgcgccaggaacgcgggaatcccgtcgttcccgatgactcggggagcgacgtgagcggcagcggggaggatgatagcgacgacgaggagatagagggggagagcggtgacgaggaggacgagctggaggagagcgaggatgagggcggggtcgaagggggcactgatgacgaggagattgaggggagtggcgatgaggaggcgatcggcgatagggagggcgatgaggacgggggtgacgagaagggaggaggcgagctgggagaagaggatgatgcccatgaggaagaagatacggtcgatcagaatgacacgagtggaccagttgatccttctaattttttctcttcttcggatcgggcatcatttcatgcaaattcattccttgagcttaacttgtctcgtccgctagtgcgagcttgtgaagcacttggctaccagaaaccaactccgattcaggctgcttgcattcctctggcattaactggaagggacatctgtggtagtgctattacaggatctggaaagcgtgtacctgcaattagggtgcttattcttactccaaccagagagttggctgctcagattcatagtatggttgagaagttagcccaattcactgatatcagatgttgtctcatcgttggaggtctttcaactaagattcaagaagttgctctaaggtcaatgcctgacatagttgtagcaacccctgggcgcataatagatcatctgcgcaattctctttctgttgggcttgaagatctagctgttgtgatccttgatgaggctgatcgcttgcttgaattgggcttcagtgctgaaattcaagaactgattcgtatgtgtcctaaaaggaggcaaactatgcttttctctgctacaatgacagaagaaattgatgaacttgtaaagctttcactaaacaagcctgtacgccttgaagctgatccttctctgaaacggcctgcaacattgactgaagaggttgttaggatacgacgagcacgtgagtcaaatcaagaagctgttcttcttgcactctgtttgaagactttcaagcgaagtgttatcatttttagtgggacaaagcaatctgcacacaggttaaaaataatatttggtctctctggcatgaaagcagctgaacttcatggcaaccttacacaggcccagcggcttgaggctctggaacttttcaagaaaaaagaagtagattttttgattgcaactgatgtcgctgctcgtgggattgatattgttggtgttcagactgtaataaatttcgcatgcccaagagatgtgaaaacttatcttcatcgtgttggccgcactgcgcgggcaggaagagaaggctatgctgtgacatttgtaaccgatgatgatagatgcctcttgaaagcaattgcaaagaaggctggttcacagctgaaaagtcgcattgttgcagagaaacctgtggctgagtgtgcacgactgattgagcaactagaaggccaaatttctatcatcattcgagaagaaagggtggaaagagaagcaagaaaagctgaaatggaaatcgcaaaggcagaaaatatgatagctcataaggatgagatatactcacggccaaagagaacctggtttgctactgaaagggagaagaaacttttggcagcagcggctaaagaatctttggatcacggtaagagtacctctggagttattagtgctaagaaggccgaagaccttcgtctaaaggagaaaaggagacgagaacatgagaagaatctaccaaggaagaagcgccgaagattggaggcccagcgtgagatgttggaagatgaggatgacgagaaaacaaaggaaaatgatagagggaagcaaccaatgaaaggccaatctctagtggatgctgcttaccgaaaggcaaaatcattgaaggcagccagcaaacgggcccctggtgcaaggaaaggaaagaaagagaagaatgaaaggcaacattctgagaaggctccgaacaggcatgaagagatgcgtgacctgttccaaaatgatatgagtgaatggaaacagggacgctcctcaaagaaaaataacaaatttgcgcccaaaaaatcaaggaactcttttaagagcaaagcaaggtacaagcggaagtagaagactcggccatctccgggtttatattacattcccttgtttcaattttgactgactgatcctgaagaaatatctgggatccagatgtttgcagttaattcaagtttgctttaaacatattctcatatcatgtattgaaactcaccgttttctggggtctcttatgatctcgcgaactgtgttgccgttttgtagttcgtaccatcttaaattttagggttatttggtttctatagacttagcttttaggacccgtttggtttgagctattaaagagtagtcccttcgttttagtcccatttagcatataaattgccaaatgatatgactaaaatag

SEQ ID NO: 36139 - DNA, 2455 bp, Zea Mays
ccccatcccgcgcgtccatcttggtcaagaaaccccaacggcgcgtcgcccccaaaccttagaccccctgcggaaatctctagagccagggtctatccatgggccatcgctgtgcgccagctcttgctccatctctccgcggcggcagcgcaacagccgcccccatgaaagtcgccatcctcaccccccgcgagcctgccccatcccgcttagcgtcgtcccccgccgctgcgcagccgcgacccatctggataaggatgcatccgcttctcccatagccgccactacccctgcctgccctctgctacgaacacgaagataccctggatggaggtggagctctcagaggcttaagatctagaactctatcgcgtactacggattccacagggtgaggagagatacgagcaggtgtcccaccggcgatgcgggtccaatcttcggcattgggagcaatccgcctactcgaccacgaaggttctctgaggcggtgtagccagagatcatgcgggcaacagggaaggacgatagctacgcagcccacatcacgaaggcatataagtgggagttcgccgaaagggaaggtttgcaactggttgtgctaaatccagggactactctgggcccatttttcatgtcatcagtcaataccagcctgaataatctattgcaactcctaagaggttgaaaattaaccaggccaacgtcttgagttggaccctgtcaacacagggtgggtctatcaaggaggacaaacaggttggttgatgagagcaaaggagctttccaagaagttgattgatctgggcatttgtttccttccgtttgatgtgaccatcagggagaccgtcgattgcttcagaagcaaagggctcatctagccctgtgaacatttccagatgttaaaagaacagattatccaacagctgatggaacctgcattagagatattatgttgatgtcacaaatttagttgatgctcatgtgaaagcgctcaacaaggcagacactagaaaagtcagtatttacaacgttggaacaggaagagagaggcccgcaaatagttaatctgggacaacatatctctgtactggccatagaggacaacaaaaaaatcaaaagttgaagaatcaccaacggtgcctcctttgcaccctccggctcaagaacctaggcccgagccagttcaacaagtcatgcccacagctgaagtgctgaaccaacagatttactgggaatcaatgaatcagcccgaggcacatctgaaatagatcaaaacaaggtagtcgccttggtcgtggttccacatgataatccgccaaaagcaccttcttctaccagtcctggaagcgtggtgactagctggagcaattcagattctgtgcgttgaaaaggaagtgaaagaggtatatcttgtttacattaaaatatcaaagtactttgcagattttatttcagctctgttgcatgatgcactcgcactactgtctactgcaagtaccatcaccataaactctgaacgctctatgttcggtttcatctttttctttaactagattcgctttcctgtttcttataggctattgttcaggtactaatttgccatagtgttggtctatgactgaatggtacaaaatgcatgcaatgaatggatgatactttccagttaaatcatgtaattggaatacagtggtgccgtcagtggtgcggattgggggcttctagagaaagggtctagcgtcgtgcccttcttgacgaacagtgtgttgatgtgtgccatcatcgcactgggaacgaacgtgatggctagcacggggagcatcttgagcatctgctttgtctccaccactcaccatgctctgagcctgtgttggtatgcagacttttccctttgtttcagaagaagatgcagttgcattgcacattgttagaacccacgatcaccacaaaattgagggaatatgtcataactcattagtcattaccttgtcaaggtttatgctttccatcacgaacggttggagttgcaacataacgatactttggtataccaaataaagttactctattcaccaaatcatgcagtgttagttttttgttgtgctaaatactgaatataatttgggtgtgttaatattttatttattgtctgcacatggttttctgatgatggctcatgaatcctgtaaaatacgtgttaggatttggagatccatgcgggcactaccacagtccatagggtgctcatctcttgtgttcttggctcttgcaagcattaggtcgtttctaaaatcacattggcacaatgaactctatggtgtttgaggttgctgaattggatggagcaacaatgatttgtcgcactaacagtaaaagaaacggttacttgttggttttaaatgttagtaattactacgaagtacaataatttgtatggagcatatccagtttagca

SEQ ID NO: 36140 - DNA, 256 bp, Zea Mays
cagtacgcgttgttggaggagaggtatgatgtgaagcaccaggtagagaggaccaagcaaggagaggtaggttctatgtaactattgcaaattcacaatgcccatttaaatttagcaacaattaatttgcaatacatgttctttgttcactttgcatattattttgttgatataggtgtgcatgtactaaggtgaatgaaccatgactttcctatagtaatctaatgcaatgagcagtacacgcccctcctaaagc

SEQ ID NO: 36141 - DNA, 1172 bp, Zea Mays
cccaaaccctagcgcctcagcacgcctcctacagcagccgcagccgcgtccagccgccgggagcgcccgcgcgccagagccacgcccagggcaagtcttcttctccagactccaaccgtccgagttcccttgcccacgtcgccccaaaacaggaattggcactcccgttgcctcgtccctcgcgtccagctccgccagaaccacccacaaccgcgcctcgcccgttctcgcccagctccggccgcccgcgctgcgcatcaacatgcagggagccgtgccacgctgctcctcgtcgtgccgcgctgcatcctcgtggctgccttggctgggcgagcatgcccctgcagccccatccccgcgctcctcctcagtgcgcagcgcggcacccccggccgtgtcctggcctcccttgccgagttgtgttgccgctgtagccttttcatcttctccctgcaagcctgagcgcgccactgcgctggccgacgattcgcccaacatcggcccctccccaggcgcagtctcctgcaccggtgagcaccctagcgaccacgtctcgtctcgctcctccctgctccctgcaacgcagaccgcgtggagcactggagcccccagcccccacgcgtgcgtgtattcttgcccagccagccatctctccaagcaccgtgaacagaggagagagagaaaaacaaccgctcatgtgaggtgttgaggaagatggaaccaagtgtctcattggtctgcaagaccttctgtggccatgtactctatagtcctctgcgtggccccgacgcaacagcaatcttgccgttctcatgcctcgccgttgactagtctggtcgtccgctgtcgttgcgagagtgcgatccatttttgagcttcgatgaatcgacggtcaagcttcggcgaccaaatgacccagttcttcgagttctacaaagttgaagaccctgagcatctgtttggtgaagtcaagtgtcctctgaccctattatgtcacatttactttataattcatcaactcgcataccatgatcaacctaaggattgactagctttttatttaccttgtccttggttaccttttgggttactatggttagcttcatgctagcgctttactttaatcaatgaacatgatgagatacaatgatggtactatgattttattctgg

SEQ ID NO: 36142 - DNA, 324 bp, Zea Mays
aaagtccaagctcccaaaatgatgagagagttaagccccttttttgtgagaccaaggactgctcctcccaccacttcccaccatcccaggaaggagtttgcagtcggctatggtgcaagagagtgaagaccgaatttcctgagtaaaatgtaccagaattctcgggagaaggaacattgcacaaggaggtggtccatattttcttcctcttgatcacatagaagacatttctctggatgatttaggcctcactttgccaatctatcagttgtccagcatctcttatgggcaaccaaccaaaggaagaaacgacattttggcaag

SEQ ID NO: 36143 - DNA, 2460 bp, Zea Mays
gctgttcctgtttgcgacactccctgctaccactcagccgagccgagtagccgaccgaatcggcgtctcctccctccgcagctccgtttctccgacgcgctcagccgccggctaaccatctcaattctcacgacgtcaccgcctagtcgccctcactgacgacgcggcgccatgcctcctccccaggatggggtcgatgactccgcggcgcgggtcccgctcctcccgccccctgctccgcgccgcgcggccgtgaggctgcacccgctcccgctcctcatcgccgcgacactggcggcctcctaccgcctcctcttcctcgcgcccgcgccatcctactaccagtccctcctcctctccctcggttccaacgacaccgccgccgcccacctgcacgcgctcaccatccgcccccacctagcgggcacgggcgccaacgccctcgccgccgcgcacgtcgccgccacgctctcctcccactccttccggacccgcctcacgagctactccgtgctcctctcctaccctgcgtaccgctctctctcactctccgcgccggatcgcgacactgtgctcttcgctttgaagcaggaaacctacgcaggcgacccttacgaggcggtctccgccgaggccgtccccaccttcctcgcctacgcggcctccggttcggtctccgccgaggccgtctacgccaactacggccgcgcagaagatttcgcttacctcgccgcccgcggcatcgacgtcaccgggaaggtcgccgtcgcgcgctacggcgaagtgttccgcggcgacatcgtcaggaacgcgcgggatgccggcgccgccgcggcggtgatttactccgacgcgaaggactacgcggccgggaagaccttcccggacggaccgtggatgccgccgacaggcgtgcaggtgggtagcacgttcaagggggtgggggaccccacaacgccgatgtgggcgtcgtcggagggctgcgagcgcctgaccatcgcggaggcgatgagctccgatgacatgccggggataccggcgctgccggtgtcctggaaggatggggagaccatactacagctcatcggcggcgatgtggcgcccgagaattggcaaggaggcgatggcgcggcggcctataggtttgggcctggcccggcagtgctcaatctgacctacacagggaatgagacgatggttactattcagaatgtcatttcggtgattgaagggggagaagaacctgaacggtatgtaatccttggaaatcaccgtgatgcatggacatttggggcagttgatccgaacagcgggacagcatccttgcttgagctcaacggttgtctgagctgcaaaagaagggctggagacctcgacggaccatcatcttgtgcaactgggatgccgaagaacaggatccactgaatgggtcgaggagaacagggcaatgctaacttcaagaactgttgcttacctaaatgttgattctgcagtggctggtcatggattttatgcatctgcaactcctcaacttgatgaattgcttaaagaagctagtaagcaggtccaaaatccggacaatgggacacagagtctctatgatttgtggatgtcttctaacagttctcctttgattggaagattaggagggggaagttcggattattctgcatttgttcaacacattggtattccatcagtggacatggcgattgggtcagactatccggtctatcatagcttgtatgatgacttcatatggatggaaaagtttggagatcccttgttccagaggcatgttgcagctgcaagcatgtgggggcttgttgctcttaggctctcagatgaggagatcctacccttcaactacagcaattatgccacagagcttgagtaagtccaaaatttgagaatcgtgacagttggtccttgttatcagaatggagcattgggcataagtgaaagagtacagggaatgcctgtcagcttatcacccctgcacaagtcaatcaaagagttcagaaaggcagttgcaaaagtggattctgaattgaaggctctacagacatggaaaatttggtccccatggagaaacaaccccttaaaggtcagagacatcaatgatcggttgatgatgaccgaacgggcattcacagaccgggaaggactgtctggacggccatggtacaaacacctgatttacgcaccttcgctgcacaacgattacggggctgaagtgtatccaggcattggtgacgccattgagagggtgaagaaaacaaatacttctgaatccttgcaatctatacaacatgagatttacagggtctctcgagtcataaaccaggcagcgcttgttttaagtggagggctcacgtgaatgcagtagctggactgatacagtattgcatagtatggtgatattaaggggaaaaataaatttcactggcaaaaaaaaaa

SEQ ID NO: 36144 - DNA, 1123 bp, Zea Mays
atgcacaatctacggtccgtttcaaagcccaacgcgaagctctatttgggccttccgtttacgcccaaccgacaatgcgaagccttatttggcccaaccgaaggcccaacgcggtcagctgatgtctctttgactctttccaccacacgaccacactgctcgtgctctctcgatgcggtcaccagtcgaatggacggcgcggatatcccctcccactccgccgccgatggcgaccggcctccggagaacgcggacgacggcggcgtggaggacgagcgtgccgccgcgccccctccggagcggtgcggggcgttggcttccgcaatcgcaggggtgctggccggcgcgctgcgggagcacgaggagcgggcggccgccaccgcccggagccaggacgaggtcgccgctgccatcgaccgcctcaacggagagctagacaggctattagagaatgcacccacaatggtaataatgcatcattcagcaaggatttccagcatccgcaagaggatttcagcaatgaacatgctgctcaagtccatacaacgacgcatagatagcatggatagaattatttctactgaccattcatctcctgtacagaaagccggtaatgaagttggaacaagtacagttatggctttcaatatcacgaagttagtggtggagaggtgagcttttcctgggctttggtgctgtggtatgaaatacagtaaacaataaataatagaataagttctagcagaattctggtggtgtcccatcaattgcgcaccatttctgttttggtagagctgccatccaacaatcacacggtgctgtgcatagaagtgagacgtcataatgtcgattttttccccagagatgtgtcatcaaaatatttcaatcctttttgtagcatattggagtggggaaagtcttttgtactggatggtcaatgttgcagacaacgaatcgtgctttcagctttggcgtttacccttgtattcaaacatgaaattgtcttcagaaatattatcatattgtcactgttgagcggttttgatgtatacttgcttgttgaagatggcaacatctggaattcgtgttgttatattttatcataaatgcttctagatacgaa

SEQ ID NO: 36145 - DNA, 1522 bp, Zea Mays
gtacatttctgggaggaaggaaaccgcacttttggttacctggttgtgcatgctttgtgccttttttggtaatgctgggttttgcagtgtaatgccatgccatttctcgaagcttgtaccgttccctgatggaaggggaaaaaatgatgtccagtgctgctgcttgttggtgttggagatttgtagtctcattcggtctgtcttcacccctgagctccccattagtgtggattttggagccatgacagaaggtgatatccatggacaatttgttgatctcttgaggctctttgatttgggtggttatcctccaacttcaacttatattttccttggagactatgtggatagaggcaaacaaagcttagaaaccatatgtctgcttctggcatacaagttgaagtaccctgataatatataccttttaaggggaaaccatgaagatgcaaaaattaacagagtttatggtttctatgatgaatgtaaaaggagattcaatgttcgactatggaagatattctgtgattgcttcaactgcttgcctatggcagcacttattgatgacaaaatattatgcatgcatggtggcctctcacctgaattgactagcttggatcaaataaaagatattgagaggcctaccgaaattccagactatggtcttctgtgcgatctcctttggtctgatcccagtcatgatacagaaggttggggggagagtgatagaggtgtttcttgcacttttggcgcagataagcttgttgaatttttggagaagaatgatcttgaccttgtgtgcagagctcatcaggtggtagaagatggctacgagttctttgcagagagaagactagtgaccatcttttcagctccaaactactgtggcgaatttgataatgcaggtgctctattgagcatagatgaaagcttgatgtgttcttttcagatcttgaaaccaaatgaaacaggtgcaccacattcaaggaaacctcttccaagcaaggcaccaaaaggagagaacgtctaatttgtatccagtgacctaatcacaatcgatgtcagctcgaagggggcgatctcgttgtctcggatccaccagggcatggcattagcgttctacacttgctgaatttgtgtggactcaatcggcagcgcttacattcttctgtacagcagcagtgtttctaacttggcatatcgtccgttctgatagtgacattgccacagctgcaatattttagtcgggtggacaaggcattttgttgggtacagtagctgttgttttgttagcctttttttggtaatgtttgtttggttgattgaacgctgtgagttttgtttgccgcgtatcttcgtcaggctcgggtatttacatcctgcaactgtgtaaatgattttgtctaacgaatgtctgttgacataaagattgctgcttacagtaacaaccacactaggtggcacaactgggcctgtatgtgtccgtcctccatggtcacgtgaatcctactcctttaaatcggca

SEQ ID NO: 36146 - DNA, 2183 bp, Zea Mays
gtgagctactcactcagtattccacgcttgacactccgtgacggacgcgcgccctttcccctcttctgcgactcattccggagcgcgctgcctccgatccgcggcaccgcgtcgcgtccgccgatgacgagggcgcacctgccggcggcggcgcagcggcggccgacggtggcgctgcttctgggcctggcgctcgccttctgcctcgccgtcctctccatccagtcctccttcttcgccgccccaggggcgccgggcaggaggctggatctggacgccgacgacgtgcgcgagctcgcggggttccagtcccgcgtccagcagtgcgtggctagcagaggacttggtctcacagcacatattattgatcactgcaagctggtccttaaatttcctgaagggaccaacagcacctggtataatgctcagttcaagatttttgaacctctagaatacaaatatgatgtctgtgaaactatcctattgtgggaacagtaccgcaacatgacaactgtattgacaagggaatacttggatgtgaggccggatggatggttggattatgcagctaaaaggatcgcacagctttcgcgacatgtgcagttgttggtaactcaggagatctcttgaaaacagagtttggacaagagattgatgcgcatgacgccgtgtttcgggacaatgaggcacctgtcaataagaaatatgcaaaacatgttggattgaaaagagactttcgactggttgtccggggtgctgctcgaaatatggcaccaatactgaagggctcctgtaatgctgtaatcctgatttcttccaatatactatttgtcccttttatataatatgctgtaatccggatttatataatatataactacattcgtgttaacaaacaaatgcaaacttattatcgtttttacaagttccatttatggctgaagttaatgttatcgaatagagtttacatgggtggtaaatatttctgttatagcacatgtgggctgcttttgaaacaagatgtgactatcttgctttccctgcagccgatgaggcacttatcattaaaagtttgacgcacaaagaaatcaatgcggtgataaaggaacttccaaatcctgtctacctttttcaaggtatagttttaagaagaggtgctaaagggactggcatgaagtccatagaacttgccctttccatgtgtgatattgttgacatgtatggttttacagttgatcctgggtacacggaatggacacggtatttctcagcccctaggaaagggcacaatccactgcaaggccgagcttattatcaacttctagaatgccttggggtcattcgtatccattcccccatgagagcacagagagtggaagattggtcagacataccaagcaaagaagagatcagaagggcacacaccatagcttttcgtctaaagaagcatgaaactggccagctagctgaactggggccatttagcaactgcaaggtatggggaacagtcgacccagactacggaccggtatcaggtacttcagacatgagcgagacgcgcaagaattcaaactacagcaagtgggagttgcttccgtttgagaagctgagaagagaagcgcaagaacaccatatccaaatgggtggcgtgtctctatacaagatggacggaaacaagttggatgatcttgtctgtgtgaggcatcagcgttcatcaagttaagaccgtggccgcctaagcctagttgtttggacgctgaattgatttcatggtggatctgaaaggatgctagacagcaagagccagaagatccgatgaagcagctctgctgtacccacttgtaaaattacatgagccatcgggttcagagcgaggcagccctctacctggaatatggaattcttttattggttgttttgggacttgtagccttctaggaatagctacttaagctgtctaggggttgttatgcgcacaccacatgacatggttttcacttcttttaacacagctgtaactgatgcaaatgggtcttgccatttctcaactatgaggtgcagttttgttaccgatccagcagtctctcgattccaaattcgtgacgtttgttgttaactgacaccttatttgactgtcccagttgagttcatttacaggattaatggatacccttcaatcttac

SEQ ID NO: 36147 - DNA, 293 bp, Zea Mays
gagagccatttcttcatcattaagcccggccgcctcaatttgcgccaccttgcttggtagtgcctccttgcttctcgatgccttgagagcaagaggctcgtggattggaccgttcaacgcgtcatcgacgtaccttgcctccttgatcatcattcgcccgctcacgaattttccaagtacttcctcgggcgtcatcatcgtgtacctggaattctcacgaatattgttcacgagatgaggatcaagaacggtaaaggacctgagtagtaggcggacgacgtcgtggtccgtcc

SEQ ID NO: 36148 - DNA, 1382 bp, Zea Mays
ttaaattcgttgatcacggatcacggtccacatattcttgggtgggcctctcctctcgtttgcctgcgccgccgcgatcgccaatcggcatggctcttcccaaaccccgcccgccaacgccgacggcgtcagcggccacgggcacctcctcgtcgcgaatagactcgccatcgctaaaggccgcgctcgcaatggctctcatccactacaaccgcctccctggcaaagccaacgccaccgcgggcacatcacccccgtctctcctccactggaagcgcaaggccaaggaccggaagcgcgaaatcctccgcctccgcgaggagctcaaggtcctccaagatggggtgcgcggggaggagatggagcccccggttgcgtcgtgccggtgccacttcttcgacgggtgccgggaccttcgaccgcagcagggtggcggtggtggggagcactgggttgacgaggtgctgaggaggaggtttctcagactggtgcggtggaaggagaagcgacggcgagtggatcgatctcttccaagttctagtttgatcggttggttctgtcttgaatccaccgtcataattttgatgtcattcaaacatctaaaatttgaaaagtctgtaaacaacagcctttcacttgccttggactgcatttctcttgcagtagaaaatctgtcaatgtacagtagaaaattttccctgtgacgctcatttctgattatctgggttactcttggaagagaaaatgttatatttcttaggttatagtttcaattgtttcacttctccagatttcaacagtgaggatgagatgcagcagctcagcatgtcgactgatttcctggtggagctatcagacggcatttttgccaaaagtgaagctggccactcatttgctacattttctcaccaagcagtagatttcattttggctacactgaagaacattctttcatcggaaagggaaaaagacttagttggggagataatcgatagtttagtgactcgtttgatgaaaaggatgtgcactgttcctgaaaagcttgtcacatcagattcaggtctccaattttcatcagctagggcttcagacaaaccttcaggttctccagtagtagtaagacaggaactccatcttgaagccttgtgcccttgtacgaggagacaatattggttatgaacttccagacacaccagatgctgggtctgggtctgcatcttctgtaggttctggatctgctgcaggcacattaggtgctacatctgcaggttcagatgctgcatcagtttgtgcagtagtatgcttcctccctttttgttgacattgatagacattgctccgtgttggcttcatttcatacaacctgtcacattattgttcag

SEQ ID NO: 36149 - DNA, 1485 bp, Zea Mays
ttctcttccaggcttccacctccacttccacatggccgctcccatccacgcgcgtctcctcccgctccccttgcacccgaacccaagccccagtctccacgcgagcggcacacgacgggtgccctggcccccgcgccaccgccgccgctgcttcgcgacgccgccgtcgcggaacgggagctcctcctcgccggagatcgactggtgcccggtgccgccggaccagctccccgtgaacgagtacgaggcgcttgcggcctccctgcccttctcctgggcggcggggggcctccgcgtctactgctcccgcctcgcgctcacgggcgccgccgtcgcgctcttcgtcgggctcccggtcgccgccttcgggggccgcggcggggccggcggcgacgctctgcacctcgcgctcggtgccacggggtccgggatcctcgccgtcacgctcgctgtcgtgcggatgtacctcgggtgggcctacgtcggcaaccgcctgctcagcgccacagtggagtatgaggagacgggatggtatgatggtcagatatgggttaaaactccagaagttttagctcgtgatcggcttctaggctcattttctgtaagttgtacttactgacttctgtaaacgcaacattcttttatgatcagttagctctttgttttccattgagtatcagctgcatgccataaagcttattgagtgaacactgaactttacatgcacatggcatgagctgtgatatcccctcagggaaatatgaccatatcatgaacttggctgtgctctggacctacacctgagtctgggtctgggtgttatctggtgcatctgttttctgaaaacgttacaaattgcaataccaaaaaaacatcatagcatcgttgggaaaaaaatcttttgcgttgctactaagcattgtttttttccttcttttttatgctctaggtcaagcctgtgctaaacagggtgaagttcaccttggtgggtctggcaggctccctgatcctttgcattcttctgtacgtgaacacggaaaccccaaaggaaccttatggaaatacaggtggaaggtctatcccgggagtgtacagcgacgctgctgcaaggtcgtttgagcccgatgcattctgtggagaacctgatttgtcgtagcatcgtaaagcgtggagcatggaaggtttgtagatggcagtatatatggtctcacagggtatatacgggggtttctgtacggggtttttaatccatcaaactagggtaatgtaaatatttggccacacccacactagtatcgatattttagacgcaagcctcttatgaaaatttatgctgacgggccacggtgaagtgaaagggggtcacgcctgtttccgaagagcggagccgggtgcatagcatatgtgcgccagaatctatttatacacatatattgacgtcacaagtgtaatatatcaaaagaacaatgcataaaagcgtaaata

SEQ ID NO: 36150 - DNA, 2710 bp, Zea Mays
gtccggcctccagacatcaggcagctctcccgagcatgacgctgtctctgttcacaactcttccgagcacgccgccgtcagtcctttgtcatcatcatcagctcagatctagcagcttcgccttctcagtgatggaaggtactaccatttctattgagattgatggggaggccatctgtcttgacagtgtcggagataatgaacaagaagctgcggagaatggagaaatgcaccaaacaatttacactgatgaaaatggggaacaagtagcctttgacaaccaagaacaggggagggaggaagatctggcaggaaatggagaagaggatagggaccataattctatcattccaagccgtgaggagttgactgaagaattaagaaataaagtcgcatatagtgaggaagaagcttacaggttgtactgtgactatgggcaccgcatgggctttagtgttcgaaaaggaaagcagtactactttactggaaccaaaaccatccgtactaaagattattactgctcaaaagaaggcttgaaggatgatgaacagcttactgaagcaaactttaataagccggagaccagaactaattgcaaagcgatggtccgttttagggttgattctgaaggtcaatggcgagttattcaaataattcctgaacacaatcatgagctagttcgaccggaagaaatacacttactgagatcagtgaggactctttctgttccgaaatctggggtgctgaatgcaatggtgaatgctgaaattcaagcaatgcatgataatttgcatataaatgaagatggtacagaatgccacagccaacttagcatccgtagttacacactgcttgaaccaaaggaatgtgaggcccttgttggatatttcaagcgcagaacaaatgaacaatgtatgttctattgggatgtagaagtagatcaagaaggccgaatgactaattttttctggagggatgggaaaagccgcgttgactatgacagtttcagagatgttgtgatatttgatacatcatatctcaccaacaagtataatatgatatgtgctccatttattggtttgaacaaccaccgacaaaatgtcatgttcggctgtgcatttttgttagatgaatccttaacatcctatgaatggttatttaagtcattcttggagtcagtgggtggtcgtccccctgaaacaatctttactgatcagaatgaatttatctccaaggcaatcgaagttgttcttcctgggacacgccattgtctttgtcaacagctcattgaaaaaaaacttatgtcccatttaggcagtatcaatgattctggaacacttcatagcttgttttcaaagtgcatgagagaatgtgagtcagaagcagaattagatgaaacatgggcgatgatgcatcatgagtataacatgcaggaacacccgtggctcactgatctgtaccagcaaaggcataaatggtgctcggctcttcataaggatgcatttgatggtgggattgaatcaatggataggaatgagagtttgaacaatgttttgagcaacattgacgatgaatcagcttcgctttccacttttgtccttgagttggataaacttgcagggagttggcgtaaaactgagtctttagaggacattcagtgcaaccaagctgctccggagtgtacagaaatgttaaacaagcggttttgccccagacagctgacccggtttttgttgatccaccaaatcaagatcaatattttgctgcagaagatattgcatcaaaccaatctgttggtagacctttcttctaccagggatatcccatgactgttgtttcaacaagccagattcaggggcatactaatatgcattctgagcctcagtgtgcatctcaggaatattctgcttatggcacagttcagccaccatcacaatttggtggtggaagaaatttctgaaaggtgtagtgtcattgacatgtgaatatctgaagctcatatcagttctactgattgttgtatgtgaatgacttgttcatttaggcagtagacacccaacctagcaacagaagaaacaggttgctctcttccattttgtgaatgtactgattgtaaatctgttgtccacttaactgtatggaatatggaagcatcatgttgtaggaaactaaataagaatttgtttttgaagtctgtaccatttatatgctagctaaacaaaccagtgagcactataatagacttcaccacgtgacactgattgccaaattcaaccataaagttctttaccttggaaggttattcactgaagcatggtcttaagggactcccaacatttttggtacagtcagctcttgttcagtaaattatgtaactgtttatgggtggcatacttatttaagagtttgagttgagaagcaaaactgggtcatgaaaaaaaatgttctgtacatacttcagttttaggagcatataaatccattggaatagctgttgaagcaattggctaaacttccgggcctcctttggatcaaaggatgatttcctgaatcctgtgtttttcttgtgtttttgaactaattcttatgaaattcttgcgtttcaaagtttcaaaggaggtcttaagtttgaatcactgatagagttgaaggcttgagtcatatatccactatccaggaaccaagcctggtgcatgaaggccatgcaaat

SEQ ID NO: 36151 - DNA, 2300 bp, Zea Mays
actggaaagcgtcgccgggtcgccgtcaaactcgctgccacgtcggtccgaaccaaatccagcaccctgcaccctcttcctccatcgcaccctatcctcctcctccccggtccggcggtccccaccggtccaccacggcaccaccgtctccccgccccccgcgtccgatcaccgcaccggcgaactcggcgagccgctcgtcgctgcacgctaagctgggaatggccgctgcgctcgccagctcaccgcttgttcacctatccacctcccgcctccgcctccccaggccccgggcctcctccagttccgctccaggctgctcgatcggcgtgtgcttgggatggaggctgaaggtcgggtggagggctctgaggcggtgcgaccggcttcgatgcttctccaccgacggcgacggcgtggaggagggggagaagcgtggcgaggaggaggcctcggcgacggcggccccggccccggacccagccccagcggagacacaggtgggcgctgcggaggagctggcgtctgagcggagccgatcagggagcttttcgtcctcatcctcgtccgggaatcctggtgtatcaagcgagccaccactgttgagttttagtgttgataatatcgatacagttaaactattggaacttctaggcccggaaaaggttgacccagttgatgtcatggcaattaaggaaaaactctttggttatacgacattctggttgacaaaagaagagccttttggtgatctcggtgaaggagtccttttcattgggaatctccgtgggaagagggaggaaatctttgcaaaacttcaaaggcaactacgcgaacttgctggtgaaaaatacaatctttttatggtggaggaacccaattcagaaggggatgacccacgtgggggaccacgtgttagttttggtttgcttaggaaggaagtttctgagcctggacctactaccctatggcagtatgtcatttctctgtcacttttccttctcactatgttctcctgtgttgagctaggaattgcatcaaagattagcagtcttccaccagaaattgtttcatatttcactgatccaaattctactggaccccctcctgatatgcaacttctgctcccatttgtggaatcggctttgccagtggcttacggtgtcttggctatccaattatttcatgaaattggacactttttggcagcatttccaaaaaatgtgaaactaggcattcctttctttattccgaacttcacccttggaacttttggtgcaattactcagttcaagtccattcttccggatcgaaagacaatgtttgacatatcaatggctggtcctgtggctggagctgcactttccttttcaatgttctttgtaggcttattactctcttcaaatcctgttggggcaagtgatttagtagaagtacctagccagctgttccagggttcattattgcttggactcattagtagagcaacacttggatacagagctatgcatgctgctacagtttcgatccaccctctagtgattgcaggctggtgtggtttaactactactgcatttaatatgcttcctgttggatgtcttgatggtggaagagcattacagggtgcttttggcaaggatgctttgtttggatttggcctcacaacatactcgttgcttggactaggagtggtaagttgctccatcttgtgcttcgtgtttctattgcagtcatggacggcttggtttctgagcttttcagaagtgatttcatccatatgccatgcacacaataactccatgatacggttaatcttggaggaccactgtctcttccttggggtttgtacgtgctaatttgccagagaacaccggagaaaccatgcttgaacgacgtaagcgatattggaggttggaggaggacggccttgatagcttcagtgtttcttgttgttttgactctcatcccgttgtgggatgaactcgcggaggaactaggtgtagggcttgttacttcgttctgagatacggtccttaccgatagaattaggccgtgatgtagctcaattttgtattgaaatgtagcgtcccatagcgggactgctgtaaaggcatgtgcagtttcctgattaggtgagcaatgatatcacctatgcgagtgtcatgaaattgtgccaagacgctgacgattattatcaattacatacatgtacgcacattttgaccatacgagtacagatacacacaacctacccttctatgagcatcttcaaacgattgggcgtgaagccatgaagtcag

SEQ ID NO: 36152 - DNA, 1749 bp, Zea Mays
ctcgtattcgccgctcaccacacccatctgccctcccggtttccctttcccccctcctcctcctcagcgtcatgatgtcctcgacgccgctgtcgcagccggccaccgccggcgacgacgacgacgatatggagtccctcccccttgccgccgcctccgactacgcctcagtcgcctccacctttgaccccctcttctcctccacctccgccaccgccacctcgccccgctcccctcccacgcgcgccgccgctttcaccctctccccgaccttttcctcctccttcgttgacccgccctcctacgccgacgccaccggcgccggcgccggcgccgtctcctcctccccgtgctccgcctcctcaccctcctccgcgtcgccgagatccgcgcgcgtggcggcctccgagtactccttcctcgccgtctccgacccggagactgaagcagagcctgccgccacctcgctcgtccccggatccgcgcccacctacgtctcctacctcgtcaccagcgtccgccgcggggaccccgaccagcgccgccattccgtgcgccgccgcttccgcgacttcgtcacgcttgcagaccgcctcgccgacgccttccggggccatttcgtgccgccgcgcccggacaagaacaccgtcgagagccaggtcatgcagcgggacgagttcgtggctcagcgccgtgctgcgctcgagcggtatctctggcgactcgccgagcacccggccatcggccccagcgacgagctgcgcgtctttctgcaggccgagggcaagatgccactgcccggcaccactgatatggcatcgcggatgctggatggtgcagcaaggctgccgcggcagctcattgctggggaagataccgtcaccgcaccacaggaagtcgtgcagcctgccaagggcggcagggacctgcttaggatattcaaggagctcaagcagtcggtggtaactgactgggctggtgtcaagccacccttggtagaggaggatagggagttcctggagaagaaagagaagctgcaggagtgggaacagcagctcaccagtgcgtcacaacaggatacgctgcatgaacatttaagcataatgttgtctgtccgcactgcattttctgatcgggcaagtgcattattgactgtgcaaacacttatgtcggatttggcatcattagagtccaggatcgagaaactcgaggctgcatccttgaagatatttggtggtgataaagctaggactcgcaaagttgaagagctaagggaaacaattagggctactgaagatgctaagttctgcgctttaagagagtacgagagaattaaggaaaataacaggagcgaactccagcgactagacagcgaaaggaaagaagaattcatgaggatgctaaaaggatttgttgcaagtcaggcggcctacgcggacaaaatcgtggatggatgggagacggtagcggaggagacgagcggttatgttggtgtgcgtggatctgatagcatgacttcgtagcttcgtttggttggatgtcaagtgtttgtacaatgtaatctaggttatggatttgggaatagaagaaaggtgcgccaggttcgatttgtttgtataatcaaataaaggtactgccatggagccacgatttcacgtcctggatgtcaagtatacgttgttcttctgtggataccacaaatatatcattgctccggttcgttccagagcaggatacgacctattcaca

SEQ ID NO: 36153 - DNA, 6148 bp, Zea Mays
ccgcttgcaaaatcacttttcacctctcacattctcatcctctcctcgctgcggttagccgggtcaccaaccaccgactcaactgaaccacgcccctcgctgccgcggcgccgcgctatggacgttgaaatgctgccgtacgggattatttcgacgtttcattgcttgagtgtccgtacttcgccgctaaacatggcgttgttaccgtgcgtgtacatgcagatggacggcgtcactctgcgccacctgctccgccccttcgccgcgcaggaggccgcggcggccggccgagtggcagcagcgccagagcagctgttcgcaagtcattcgaccctgcaatccgggccgcctccgagagtggggccgagcaatgagttgcttactcaagttccggggaactattgcactttcgatcttgcgccggacctcactcgggcaaatgcgagcaatgctgctggtaccattgattttactcgggctggtccctccagcagtgctgccactctgcccaagtatccgagacatggattgccagctagcagtagcaatgagcagtcctcttttggagcgcttttcccgaacagaagtgctaatggaatgggtatttttacttgtcaaagttcggctaacgaaggaatagcaaatgttggtgtgcagtttcaggactcaagtgtccatggactgcagaaattgccattcaaatcgatgactcatcagcatcctacactgcctggtgatcgaatccgtgtcacctgtatgaatgttggcggagagttttttgtgggcgaagctgggctttttggagttatctgcttgtgtcatcggttgcgaatgtctgtagctaaattctgcgagcatgctggaggaattccagaaaaagctggtgaaattgtctgcttggagaatggcatgagtattgcacaatggttcaaattctgcataggggtcggaggatctattgctaacaccaggtgggattggccggaatgggcacatatgaaaagttctccagaagagcacatattgaaaagtcttgcatcaagaaacagtggaacaggaaaaatggggttgttaagtagatatggaaaaatcactggacatatgaacaaaccggcttattccaatgatctgtccgttgagggtggagggcacactaatgttgagaagctagtaaacaggacagatgaaacatattacagaaagagtgttgatgtgcatgaaacttttacaaagaactctgctttacttcagaattccgctgtggtgaatttagggcccgctaaaaaccatccagttcatgcattcgacttgaacccacttaccactcctagtggaagcccacactttgaagcaagcatgggaagacattacaatggaaatcatttggcccatagtcatggaatccatttggagaaaaactttgatgcgtcattttgtaatcctatgccacgttttacaggagttatgaaccatgatagtagggcgtgcagaccaaatttctccaataaaacattccaggacacttcaacgatgattgaatttcagaaaccccaaacacataggcctccgataaatcaaaatccttctccaaagcaagcaacaaagatcagcaaaagtctatccgaacataatgaaccatccattagtaccggaaataagaagcaaccacttgaagttgttaatggcatgaagcgttctgaaggtgatgagcttacagatgatacatccaagaattcatttatctcattatttctttcacaccttgagaggaataatacacccgaacccatcgatgacattctcaacagtaatgagcactatcttcctaaggccctggatgttgcatgtggttctgatcatccagaaagtgccactagacagattgaaacaagggtgcctaatgataagcactcaaagttggcctcagccattgttcatacgaaaaggagatcagagggcatttctctttcagtggcttcttctggatataatcctcaagatgcatcccatgctaatagtcaggaacacttgattcatggtgattccttgtcacatttgctgcctagtcaacctaacaccggaatctcgaaaatttctgcaagggtttcatgtcatgcaaattgcatgagctgcattcacgtgggtaataaatcccatcaggttgcacatggtgagattggggttccctgtttctatgataaaatggccaggggccatggtacttttgagcgagttgatgactgcacacatagaagtttgagagctttcacaaaaatcagttgcgataatgggaaatcttgttgttcttctcgtgagcttctacctagcttttgccaaaatgatcagccaacattgggaaaatcgatttgtggatgctgttgcaaaattcaggaagatgcttccaagcttggttttatacctggtcacatgtgcagaactcatttttctagtgatgttggtccagttctagccaataagcctactattgaagggctagatgaattttgtgcttgcagttgctccacttttacacaacgatcatcattatgttctcgggaatacgtcttgcagtcttcctgtgactcatgtcccattaatggactgcactgcagaagttgtatgggacatgcagcagatagcttaacaaaacactctctgtttgatcctcttaatacaaaagaacgaggttcttgttgcaatggaagatgctgctactctgtagtcccaaaatgtttgtctagttgtgactttacaaaacactgtgatgtcataattgaccaaataggtcatgctgcacctaaagataaccatcagctgcaaatgcctaccagatgctgcacactgggggagaatgagaagttaatatgccaatgcttaagcaataaaatagctgtaagaaacttgcctcaaacttctcattgtaaagatgtctctgagaaagtaatgaaccagccttctattgctataacggagagactggagaatgtatcagaaccttcagtggctgatgacagttcatccaaagctgtagcagagaaaaaggatgcttatagagattctgcagtatctaaaggacagccaaattttggtttctcatctgggtcgtccagcattatagtgacaaagttccagaaatcacctgaatttaacaatgtatcctctactgctaaacatagcaaacataaaaatctgtgtgatgaaggatcaagaattgagaaaagttcagcatccagctatgtgcctaccagtacaggatgtgaagaacccctaaatagttctgccaaatctgagctgggtccatcaagagtgaagcgcaaatgtaatcagatttctgagggaaggagactggaagaaacagataatgaggaacattgttctgaactgctaaaaaagactagaacactgaggtgctctgttaaaggttctgaatcagatgattgtactagggctagttcccagtcgtcccagaagggggtttatcaaccacaaaatgaggttaactcattttcttgcagggtgttgagaaccaagcgaaaacatcctattatgcatctaaataagcatgtgaaacagcttcacagacagaccaagttttttgaaggtgatgagcaaccagatgccaagggcaattttcttggtggattagattcctatgatagaaagaggcaagtagaggatatgagcactctggataaaacaagacatcaccaggaagggagtcgagcatttgtccgcaaacttcctaaatatgtgtctctgaattgcattgttaatgaaccgaatactaacagtgaaggtgcttgcagtgggagtggtgggattgattctagtttaattgctacagggattacaaacgataacaggaaatctcccaaaattgttcctctcaatctggttcttaaaaaggctaagagatgcaatgctgttaaactccgtaagacagaaagcacccacttgtatgaggagaaaagctcagattgttctgtgaacagctcagattattctatagaaaagtattccgttgatgatgaaaattgcagcccacaagctgaatatgaactgcaggattccaaaaggagtaggtattcatctaatgatctgaggtcacatgtggctctccacaaaagaacatctggtggaaccaagaatcgaagaacaagtgtatcccttgccaggattaagaaattcgggagcaaatcagtatgctattctggcagtgacaaagacaatgctgtgctagcccatgaagtgaatgctaggagatacagtggaagactcagctcaaattctccatgctgtgtttgtgggatctcagacctggagccttgcaatcgattaatagagtgcagcaagtgctatatcaaagtgcaccaagcctgctatggtgtactaaaagttcctaggggtcaatggttttgcagaccgtgcaagaataataccatggatacagtctgtgtgctgtgtggttatggaggtggagctatgacaagggcactgaaaaccaagaatattttgaaaagtttgctccaaggtttgatgaatttagaaaggtcagaatattatgttgattccttaggaaatgcaagcagtgagtgtacaagcttgcaaaatccagtagacagtgcacatggggataacattatgaatgcgaagaacatcaccagcaattcctggacctctggaaaatactattcgagtttacttggaccacaaccaatgcagtgggttcacatggtctgtgggctgtggacacctggcacaaaatgcccaaatgacaccacaatgagcgcttttgatgtttcaggtgcttcacctgccaagagaaatactgcatgttcaatatgtgacagaactgggggctcatttgtcaagtgccgagctgtaaattgtttggtattctttcatgcttggtgtgcacatcagaggggtttgctgcaaagtgagcctgaaggcgagcacaatgaaaatattggcttttatgggcgatgcgtgtctcacgccattgttttttctagtcacgttaatcctaagaaagaatactttagaaacaacaattggacatgtgcacgtacagagggttttaaaggccgaaagggagaaggcttttctgatagtagccataaaaaatatgaagagtacagtggcgagttcggtgtttcccaagaacagataaatgcttggttacgcataaatggttcaaagccctgcggacgaggacagaaggagtacatccattacaagcagttaaaagggtggaagcatttggttgtttacaaatctggcatacatggacttggtctctacacatcagtctttattccacgcggctctatggttgtagaatatgtgggtgaaattgttgggcaacgggttgctgacagaagagagatcgaataccagtccgggaaacggcaacaatataagagtgcatgttatttctttaagattgacagggagcatattattgatgccacccgcaaaggtgggattgcaagattcgtcaatcattcatgccagccaaactgcgttgcgaaaataatctcagtcaggaatgagaagaaggtaatgttctttgcagaacggcacataaacccaggggaggaaattacgtacgattaccacttcaaccgggaagatgaaggccagaggatcctttgcttttgtagatcaagatactgcaggcggtacctcaattagtttccggtgggcgtaacatgtctatatataacttatatatctatatgtatatcttatatatttacaaattacaattgcgattcatgcctgctgtatatgtaggaacttgcatctagaactgcctgtttatcttttgtgaagtcaaatgagttatcagctgttcatgtgacactgaataacaaaagcataaaaagtgtcactatctcgtttatgagaaatcatgcgcctaatctgaatgatggatgatccagtgatctactttggcaagaagggcttgaggtcagacttgtccacctgaagctttgttgagatggcctcgatctgctgattcctgcaaatccaagagccatccatctttgggaaacagaatatataaaaaaaaatgaccaataacagagttctttctttgtgttttccaccaggaccttcacttcagtaattccagatgaaa

SEQ ID NO: 36154 - DNA, 2411 bp, Zea Mays
atgcccgagaggacaatggacacgcacgcagagggagctgccggctgggacaccggacaccacaccattcacatatctcgcgacagcagaaaccacgtcgcgacgctgccacagcagcaggctatgatggtgctcatgagttccatcccagttctcaggccgcgaatgcggttccaaaatactccaagcaaacaggcagtttcgattgggcgaagcgcgtggaaaatccaccgcgccaggaaatcccagagcggcgtcggatcgtggcctcgtgcagcggcatccgcagcaggaataatgaatcgtcatgatctacgttgccgagcccgcagacaggaacgggggtgtaagccgatccgcgagaaaaatccaacctacaagacctacaaggccaagcgacatcccaatccgagcgtttcatcttgccctctgctctgtcccctcacaccttctcgccaggctcagtggtgacatcagctgaggtccggtagtttgcctctgcagccatgcctcaaatccagaacaccatgcggcaaaactgcacactcctagctgttctttgtggggagtttgctgagaagcggcagacaccagcttccctggcgccagacacaaagcggctgcggctgtcataccctttccctgagctcgcttcgtctgggagactggaggtgcacacgctaatcaatcccactttggagcaatttagagaggcacagcaggcggtgcatcctgtcttcttgtatcttcaggggcagcagcaagagaatgaggaggagattggcacgcttgtctggggtgatacagatttatctgacccgcagatgtttgtctcactcatcaccccaccatttccgaccatggtttatttagaggttcccactggggaaaagcttgcccagtcacttcattcaaaggggataccatatgtggtatattggaggaatctattttcatcttatacagcatctcattttcgtcatgcgttaatgtcagtcattcagagttcctgcagccatacatgggatgcatttcaacttgcacatgcctccttccgactatactgtgtaagaaataatcatgtacaaagtgttaagcttggcccctgcctacttggggatgctccaaaaacaaatgtcatccctgctggggatgaagtgaatgaggaacaaggttgttctgaaggttttccagatataagaatatatgatgaagatgtgagcatgaaatttcttctctgtggagtaccatgcaccctggatgcatgtttgttgggggcactagaagatggtttgaatgcgctcttgaatatcgagattcgtgcgagtaaacttcagaaccgagccagtgctcatccacctcttcaagctgaagatcttccacatggagttgttacaatgcgctgcgatatcacaacttgcagttctgcacatgtgtcgtttcttgtttcatgcagtgcccaaacttgttttgatgatcagcttctagggagccgtatcaagaatgaaattattgagaagaggcagttagttcgtgctctattgaataatgaggataacaagccatcttcatatgagcctttgccttccatgtgcgtggcttgcggagcttctacttttgaagtctggataaccatgccaaaatgggcagcacaggttttgaaacatcttgcgccagaaatctcctacagaagcttggttgcacttggaattgcttgggaagacttcttgaaagatgtcatgcagtttctacttcagaggggccacatccgacttgtacctcagggaggactggcagaatttcctgacgcagtgttaaattcaaagcgtcttgatttatataacttatacaaagaggtggtataccgaggtggcttttatgtaggcaatggcataaattggaaaggtcaaatcttttcaaagatgcacaaccatacagttacaaacaaaatgacgggtgttgggaacaccctaaaaaggcattatgagacgtacttgcttgaatatgaacttgcacatgacgatattgatggggaatgttgcttgatttgccacagtggtgctctgggtgactgggtgaactgtggattatgtggagaatgggcccaccttggctgcgatagacggaaagggctgtctactttcaaggactactcgaaggcggatgggatggaatacatatgtccccagtgtagccttgcgaaatacaaaccgccgttgcctgcaccatgaaatatgttgattaacttctgttactttcttaagggtgatggtttggatagaaattagtggctaaggatgtgtagtgttgacctgtactattgaatatgatcctgtacgatttgtacaatttttataaaatttctgatttccgaagggtgtctggtctgtttgtaagaccttagtttttaa

SEQ ID NO: 36155 - DNA, 3960 bp, Zea Mays
ggccagcgttacggcgcgcaaacctccgcctctcccctcccctgtcccctccaatcctccattctccggccaccctcgcttctccgtccctcggcaatccgcttgtcccccgttgcccgctccgttcagaagcgcctcgccgctgaccggtcgtgacccgcctcgcacctccgccttctccgtccctcgcggccgcggctgccgccgaatggaagccgcctcatgctgccgcgtcttctccacgcagcggtgccgcttcccgctccgcaggctgtcggcgccgccgtggccgcagccgttctgcaccgagtccagcggcggcctcgtcaccccgtcggcctccaagcggaggtccaggggccccgtcatggccgcgaagaaggccgcggagggcgaaaaacaagaagatggaaaatacaagcacactgtggatctcccgaaaacaacatttgggctgagagcgaattctgtacagcgggagccagagctccaaaaattatgggacgataatcaggttctgaaaagggtttctgaaaggaacactgggactgcttttgttctccacgatggccctccctatgctaatggtgatcttcacatgggccatgcgctcaataaaatcctcaaggattttataaatcgctacaagctgcttcagaatcataaagtgtcctttgttcctggttgggattgccacggccttccaatagaactaaaagttttgaagtcaatggataaggaaactttgagtgctcttacacccataaaattaagacaaaaagctgcaaaatttgctaaagcaacagtcgatgcacaaatgaaatctttcaagcggtatggtgtatgggccgattgggacaacccttacctaactctgtcaccggaatacgaagctgctcagttggaagtgtttgggcaaatggttatgaaaggatatatctatagaggacgaaagcctgtccattggagtccatcatcacgtacggctttggcagaagctgaactggagtattccgaaaatcacatttccagaagcatatatgccgcattcaagattactaatccatctaaatctgggatgctagacgatttttttccaaatgtatctttggtcatatggaccaccactccatggacaattccggctaatgctgctgttgctgtgaacccaaagcttatttatgcagtagctgaggtacagtctgtatttgaaagtgagtcaacatccggtggtaaacaaagaaaagttggaaatatattgagttctgagaaaggaaaactgttcgttattgtggcttctgatcttatcacaactcttgagtccaaatggggtgtgaagcttgtagtacacaaatcatttcccggatctgccttggagcactgcaggtatgcccatcctgtgaatagcaacgaatgttccgtcattctaggaggagattacattacaactgaatcgggcactggccttgttcatactgcccctggccatggccaggaagactacataacaggtttgaagtatgggcttcctatcatttctcctgtggacgatgaagggaacttcacggctgaagctggacagttcggtggtttgtctgtcctgggggctggcaatgctgcagttgtgaagtatctggatgaacagtattcactcattttagaggaaccatacaaacacaagtacccctatgactggagatctaaagaaccaactatattccgagcaactgagcagtggtttgcatctgtggatggttttcgtgatgctgcaatggatgcaatcagacgagtaacttgggttccttctcaggcacaaaacaggattgttgccatgacctctagccgttctgattggtgtatttcacggcagagaacttggggtgtccctattccagttttttaccatgtggactcacaggaacctcttataactgaagaaacgattgaacacatcaaggctattgtgttgaagaaaggtagcgatgcatggtggtatatgacaactgaggaacttcttccagatagatatcgggacaaagcatctgaatatcgcaagggaactgatacaatggatgtttggtttgactctggctcttcatgggcagctgttttagcaaaaagggacggtcttaattttcctgcggatatttatcttgaaggttcagatcaacatcgtggatggttccagagctcattgttgactagcattgctacaacagggaaggctccctactccagtgttattacacatggatttgtactggatgaaaagggtttcaaaatgagtaaatcaattggtaatgtagtggacccagagaaaatcattgttggtggcaaaaaccatagggaagaacctggctatggagcagatgttctccgtctatgggtttctagtgttgattacactacagatgtgttgattggcccacaaatcttgcgccagatgtctgacatgtatagaaaactacgaggcacgatgcgatttcttttgtcgaatctccatgattggaagccggataattctgtgccgtacaatgatctgccaaaaatcgacaagtatgcacttttccatttggagactgtcatgacttccatgaaggatagttatgaaagttatcaattctataaagtataccagatgggcttctggtaaacataaatcatgcttggtgatcacatagttgactccttggtaggcattggtttatcgatcatagcttggatggtcaaagcgtcaacatttagagtttttgcttgaaagtggcaattatgttgttcagtaaactccctggccttttgaatctatccttcaaagatttgctactgttggtttgtccaatttctatttggatgttgcaaaggatcgcctttatgttggaggccgagtcagcttcacaaggaaaagttgtcagactgtgctcatggcacatctgctctaccttgttagggccatttccccgattatgcctcacctagctgaggatgtctggcagaacctaccctttcaatacaccttgcaggatggatcccttgcaaactttgtttttgatctgaaatggccagaaaagaatgaagaatggctctcggccccgaaggatgatgttgatttcctgggtgttatcctggagttgaggtcagaggtcaacaaaattttggagaatgctcgcactggaaagttgattggttctagcttagatgcaaaggtttatctccataccgaaagttcagatacggtattaaagctaaaggagctatcttctgcatccaatgatgcagacgctctgcatcgcctgtttatcacatctcaggtcgatattcttccaatcctaaatgaagagattacatcatctgtaccatacacaggaaagttcagtaacccacgcactggagtcatatggattggtgtgactcgtgcggatggtgcaaaatgtgagaggtgttggaattacacacaggacgttggatctttccatgaccatcctactctctgcgttcggtgctatggtgtcattgagttgcagacacaacctgcggccgcagctgtcagttgaaaggagtgatgttaacgtatcctatcgaaccatctaattttgaggatcattggtggaattcattcttttggagagctttcacgctaccatgtggcggtagcctgggactccagcttgaatcaagttttgcatgcagcaagctgtactttagattcttcatacataggtcacgagagttgtttggagcttgggtcatcgcttactttcccatactactggggggcttatttggaacagttttttacacaaaactcctgacctgtaaatcaattttggaaaaccgtatccggtggtcgatccatgtattaatagagtaataatgttactatgttcatccaaatctcaaagacgtgatggttgtgttgaaaaaacagcttgaatcacttgcttatgctcaactgttttttct

SEQ ID NO: 36156 - DNA, 4239 bp, Zea Mays
ccggtaccggccggcatgagctccacctcatcgggccgccgcgccccctcatcttcggcggcggtcgcctcgtcgccgggacagaagcgggcgagggatgaggccagcagcgggtccccatccgaccccgacgccgccaaaaaccctcgccgcgcttttgcctcctccccgttcgccgacttcggcacctacatggctgcgaagaacagcaagctcgctgcgcagttcgatgccgacgccaacacctcaggcacggacgccggcggtctattcgatggcgtctccatcttcgtggacggcttcacagtcccttctagccaggagctgaaagagattatgctgaacaatggaggccggtttgtcaactacttttccaggcacacggtaacacacattgtttgcagcaacctgcctgatagcaaaatgaagaatctgagagcattcagcagaggacttcctgttgttaagccagcatgggtggtggattccctggcagagaaccggctcctcaactgtgctccttatcaaataaatcagaatagttcttcaagccgaaagcagatgaagctttcttctttcttttctgagaaacaaaatgaaatatgccacaagggggaacaaaacaaccaaaataaggatattgagttccaaccttcatctgctcaggagggatcacagtatcaaagtggggattgtgaaagtgaagcttcaatggatactttggagctatcaaaggactcgttgtcctcagatgaacagaaggcatcagcatttgaagaaagagagagcggagatttcacggttgatgagggtgaatacgattatgaaactgcctgttcggagagccgtaatgacacagatggtaaccttggtgtgcctcaatcccctaatgcaaagtcaaggtgttcaaacttattcagtacaagatctacaggcagtcatttgtccttgtcattggagaaaagtgcagctaaaccttctggccgaccacattcaaccctaacagatccaaattttgttgagaactatttcaagtactctcgactgcacttcattgggacatggagaaaccggtatcggaagcgcttctcaaatttgctagaagctaaaggcattaagttgagtgctgatcattcagggaagaagaaaacaatcattcatattgatatggtaatcttgtagtgctatggattgctttttcgtgtctgtggtcatcagaaatatgccagagctgcatgataaaccagtagcagtttgccattcggacaatcctaaaggaacagcagaaatatcgtctgcaaactatcctgctcgaaactatggtgctgctattttattttccattaattgagacttataatttagttatgtgaacacatttgaagagataaaggctggcatcctcattggtgcattccagggataaaggctggcatgtttgttagagatgctaaagctcggtgccctcacctaatgatcgttccttataactttgatgcatatgaggaggttgctgatcagttctatggtactttgcacaaacattgcagtaaggttcaggctttgagttgtgatgaagcttttttggatatgactgaatgcttacatgacaatcctgaggaagtaacacagagaataagaagtgagatttttcatgcaacaaagtgtactgctagtgcaggaattgctgaaaacatgctcctagctcgattggctactagatctgcaaagccgaatggacaatgctttattccatccgaaaaggaattgtgaagagaatacactgcctgcaacattcgtctgttcccaacagacctaaaaagaagcttggaggttcggatatcacatctatgttgttcaatatctctatgaaaatattggctgttgaatcagttattttttctgggagttgatttaatagttctactcattcccacaagcttgttgggtattgaattgagttactaatttgtttgtctttccttgaattcctacctgattaaagaaaatcactagtggtgccactccctctaaaaggatgtactttgtactacatgctgctgatgattatctgagtagtctctctatcaaagcacttccaggcattggtcatacagtttcatctaaactgaaaagcaaagaaattgaatattgtagtcaacttcgcaatgtttcaaaggatgccctccacaaggatttcggaaaaaagactggtgatcttttatggaattattgtagaggaattgatcattcaattgttggatctgttcaggaaacaaaatctgtgggtgccgaaattaactggggagtcagatttaatgacaacaaagatgccgaacattttcttaacaacctttgcaaggaggtttctctacgcttgcagggttgtggagttcagggacgtactattacccttaaggtgaaaacaagaagggaaggtgctggggaaccaataaaatatatgggatgtggtgactgtgaaaccacgagtcgttctatgacgattgcaggtgcaactgacagttttgtcactctccagagaattgcaaaacaattattttcagctcttcatcttgatgtgaaggaagttcgtggaattggactgtcactatcaaagcttgagcatgcagatttgggccggggagcatcgcaaggacatatgcttgaatcgtggcttgcttcaccagccgccaagctcaagaaacagcagagtgagatactggggaatgttaatgttgcagggaccagcggactgaaggatttgagatctggaccatcacatacagcagaagcgaaccttagaaatgataggtctactgtatttcacaatgtcgagctgcctccgttgtcccaacttgatttggaggtcctgaagaaccttcccccagagataatgtctgaaatgaatgaaatgtacaagggagaattacaaagtcttgtggacaccctcaatagtgacaagggcaaggaaaatagttcaaaatctcttgctttgcctgcagttattcgtaagtctgtacctgccgatgcaaagcttcaaggatacagagaccacagagactccatgcatttggaggaggaacatactaagggaaaatctgacaaacaactatcagaagctaaaccagccaataatgcttcatgctcaagagttagtgcatcaattgagaaaacaacaaaaagtgttacacaacttgatttgatgcctgattcgctaagccaggcagatctaacagttctgcaggaattacctgaggatgtgaaggctgatttgtttagtgcacttccactgcatagatcaggagatcctgcatgcagcacttccaatgtatctgaaagtaaatcacctaatgtggttagagctgaaaatagatcttctaatgatggtggaactgatgatctgaaaaccccaaggtcttttctcccaccaggaagttctcaaaaatggatcgaacagtttagagttagcagttgcctgattttgaacgtaattgcagagcaacacacagattccagctgtcaacgaccattgtcttctgttctagagcctgtagcttcgttcctacctttgtgtcctaacccaggtagtgaagaatggaatgaaactcattcatgtctctccgagcttcttagacactacatacaactgaaagttgaatatgatattgaagagctctacaaatgtttttgccttttgaaaagattctcgtcagcatcagagttttttctggatctacatgatagcatccttcctttcctacaggattctatcagccagcattacggtgggacactgcaattctagctccttgctcaagttgtagccattctattttgctagaaaggaagaagcaatgccgtgaatgtgcggagagacgtgttatgacaatctgcgcctccaagcagctactcaaatcccgtgctggcagattccttggacgcgtttataactttattataactaattgatgccaatgctggaagttttattgatatattcattgcatctatggatcaatagatgccatgtggttcgatatatcattcgtggagcaatggtttgaagggacctttgctgtgctttgatgttcccaggcgaatttcatgtttgcttcataacccatatgaatttcatgttatctttgtgttgctaccaaaaaggttcctggtttgaagttctttgcgtcaaattttcacctatgatctgaagtaccatccgtgcatcctagttattggaag

SEQ ID NO: 36157 - DNA, 1794 bp, Zea Mays
gagacttgcaatcccatctgctccggacagagccctcgctccacaccgccggcgacctttttcctcctccgctcgaggagtgggccaacggagggagaccatatgggcgcggaggcagcgcatgggcatccgcagcagcagcctccctcgtccctccgacccggcagggaggccgcggcgccgcccgcggtggtggggctgcagctctcggcgctgatcgaccacgtcgcgcgcgtcgactggtccctcctcgaccgcgtccctggcgaccgcggcggctcgcagcaggtatccattgatgagctgaatcatattcttgatgaagtgaatgcccacatccttccttcccgcaatgatctcactccggtaactacaatagccggtggaagtgttgccaacacaatccgtgggctctcagctggttttgggatatcaactggaataattggagcttgtggagatgacaaccagggacttctgtttgtcaacaatatgagctttagtggtgtagatctcacaagattaagggcgaaaaaagggcacaccgctcagtgtgtgtgcttggtcgatgcaagcggcaatcgcaccatgcggccatgcctatctagtgcagtcaagatacaggccaatgaatttagaaaggaggatttcaaaggctccaaggtgcctttcttcttccctttttggcgcacatttcattttgtgatatatgcattcctcttaggagaaacatccagagcatatgtctttgttaagggctcctttggaacgcaggaaattcacaggaatgtggctcattgtgagatatgcacaacagaacatggaacagattgtcgaagctattaggattgcgaaacaggaaggcctttcagtatcattagatttggccagtttcgagatggttcgtgactctaggtctaaacttgttaaccttttggagactggtaacattgacctttgcttcgccaacgaagatgaagctagggaggttatagggggaagcctggaatcagatccagaggaggcgcttgcattcttgggcaagtactgcaaatgggccgtggtgacacttgcttcaaagggatgcatggcaaagcatggcaaacaggtcgttcgagtcccggccatcggggagagcaacgcggtggacacaactggagcgggcgacctgttcgcgagcgggttcctgtacgggctggtgaaggggctgccgctggaggagtgctgcaaggtcggggcgtgcagcggcgggtcggtgacgcgggcgctcggcggggaggtgcggccggagaactggcagtggatgtacaagcagatgcacgccaggggcttgctgctcccggagctcaagaactgaatgaaactattgctgctgtagctttagctagctaaatgcctgcatgctgcaccagctgttgtatctcccagctctcgaagactcgtagcatcacccagggccggtcgagtggccagtatccagccttccgttgttaattgctggcgttacctttcccctgctagtctgttaatgttactagaatattggtgtccatgaccatgcttgattgctggcatggtgaaggacgggcagatacattagttgatttgtagagccactcctaagactgaatcaatcagatggagtatattgattactgcacttcatgtgtgtgctagctgcctagctagagtactattttctacgcccaaaatttgtatgctgttttgtctttgtaagtacatactcattccgtccaaaaataaaatttgttttagactaaacatacattcata

SEQ ID NO: 36158 - DNA, 1043 bp, Zea Mays
aaacatcaagggctttttataaatctgctcggcgcgctacaggcggaggggtacagagactttcaggccgttggatctacatccagtggtctggattagatccagccccccgtgaataggtacgctacaacagccacaggatcgaggatcgacggtctgtaactaacaaaggtcgaaccattgatacccattcgatcctgatcggacggatcatcgatcgtctggacgaaacggtccccgacttcaatcgtggccgctcacgagctgatcaacggccgaggcttcgtcttccacaacccacctcagccacggcggcggagtcaccaccccggcggtgcgcccaccggcaacatggccgatcgacctcatttgcccaaacccaagcgctaattggtgcaaacggaagagacagagatgcagaaccaaatggagaccttcctacctgaaatagtggtgacagccgtgctgccgacgacacggtgtggattggtgagcgccgtcgtgcaattgtcggcgtcccgaccacggcccacgcctgacgaggccacatatatgtgcggagggatccttcgctgccccagtaccacctgtcgaggctggaggatcgcacatgggcagatcgatggcggcagcggcaatctcttctccccgcaccccccatccatgtgcctacggcaccaagttgtacacggcttcggctgggtggggagtcataatcctcgtgctttatagagtcgcggcggaatccggccagaggagatcacggagtgggggtcggagtttctttcgaagctcacgattgttgcggtcgagtttgttgcggcttacagttgaagatcccacacgcggggcccttgtgtcgaaccatcagtgcgtgctcgtacgtggtggaaggggactgagccgagaaagttcgtggcgagatcatcgggggttgtcgcatgcacggtgcgcatgagaagtccgccagtgcgcccaccggcatctgtttcagtccgtcccaaggaggacgacgaccgctaggccgggtccaccgtgcagtg

SEQ ID NO: 36159 - DNA, 2879 bp, Zea Mays
cgaggtctctgggaccgggcggcggcgtgcgcccatgcggcgctcctcctcgtactcgtacgcctcctccaggagcacttccgttcccgcgccgcctcttccaggtgcacgcgctgctccttgacccacagtgctctctcccactccggccagcccatctctccctccgcggccagcagctttctcttccagtccggccagcgagcccctgcgcatccacttccaggcgtagcagcggcgtgtagggactccgctcgtggcggccggcggcggcggcattctgccattgccaactactcacataatcccaggcgctggcctctcgcatgcacgagcacaagctatgctcaggcacctaaccaacaacccattgctctcgcgccgatgccaccgcatgttccatcacaaccggctctgtaccaccgccacatcctcggcggccgccggtgagatcgcgccggatcccgccgcatacgagactaccgttggcgttgaatatgacctcgcgcaggagttgcgcagccacctcgtgcgcgacacctgcaggctgctcgagctccgggactcgtggagcgccaagctggaggcgcagctccggcacttcctccgcgcgctgacgccatcgcaggtccgcgccgtgctgcgcgcgcaggcgcagcgggacgcccgcgctgcgttcgagttctttcgctgggccgaccgccagtggaaataccgtcacgccccggaggtgttcgacgaaatgctggcgctcctcagccgcaccaggctccacgacccggcgcgccgcgtcgtgcgcctcatgatccggcgtggtatacgccggggcacgcggcagtttgcacacctcatgctctcgtacagccgcgccgggaagctccgctccgccatgcgcgtgctccagctcatgcagaaagatgggtgcgcgcccgacatatgtatatgcaacgtggctgtgaacgtgcttgttgtggccggacgtgttgacaaggcgctcgagtttgcggaaaggatgaggcgtgttggggtcgatccggacgtggtcacatacaattgcctaatcaagggattatgcggtgctcggcggattgttgaggcattggagatgattggctcaatgctgcaaaatgggtgcccgccagataagattagctactttacagtgatgagcttcttgtgtaaggagaaaagggtggcagaggtgtggaatttgctcgagaggatgaggaatgatgcaggtatatttcctgatcagatcacgtataacatgcttattcatggccttgcaaagcatggtcatgcagatgaggcgttgactttcttgagggagtcagaggggaaaagattccgtgttgatcaggttggctatagtgcgattgtgcattcgttttgcttgaatggtaggatgtcagaggcaaaggaaattataggcgagatgatttcaaaggggtgccgccctgatgttgtaacttatagtgcggttgtagatggattctgccggattggggaactcgatcaagcaagaaagatgatgaagcatatgtataagaatggttgcaagccaaatacagtcacacatactgcactgttaaatgggctttgcaaagttgggaaatcttcagaagcatgggaactgctaaacaagagcgaagaagagtggtggactccaagtggtatcacatacagtgttattatgcatggatttcggagggaagggaagctagtggaatcatgtgatgtggtaatgcagatgttgcagaagggtttcttccccacggctgtggagattaacttgttgattcacgcgctatgcaaggaacaaaaaccagcacgtgccaaagacttcatggagcagtgccaaagcaagggctgctttattaatgttgttaatttcacaactgtaatccatggattttctcggcagggtgatctggaatcagcactatctttactggatgacatgtatctcaccaacaggcatcctgatgttgttacatacactgttgttgttgatgctttaggaaggaaaggtaaaatgaaagaagcaacagcgcttgtagagaaaatgcttaacagaggtttgctccctacacctgtcacatacaggactgtgatacataggtattgtgaaaagggtgcggtggaagatttactcaatctgctggataagatgttaacaaaacaagggtttagtagtgcatataatcaggtcatcgaaaagctatgtgcatttggtaaacttagtgaggcttacaatctgctcagcaaggtactaagaagtgcctcaaaaagagatgctcaaacatgccacattttgatggatagttttctgaacagaggactcccacttcaatcatataatgtggcctgccgcatgttccagagaaatttaattcctgatcttaaattatgtcaaaaggttgacagtcagttggccctagtgggtgagagacatgctgctggaaagcttatcacgaagtttcttgaaagaggtattttagaacaagaaaaacaagatagctgatctgtaccacagtcctgtggtgttacctgtctttatttataggaaatttatagcctaatgttaggtcctgattgcatatctattggatttggttctgtgacagagtaatttttttatatagtgatggcaagcacaagtgtgcgtgttcggctgctgctcgagcccctgttgcttccatagctgctcatggaggaaaaggtggctggacgttatggctcactgtttttctttagatgtcctatttggctctggtggacagaccaagaagaaaattattaatccttctagttttctgtttcatccggttcatattttagacagctttatgtttaataaaatcatagcttgaagcgtt

SEQ ID NO: 36160 - DNA, 886 bp, Zea Mays
  misc_feature (886)..(886): n is a, c, g, or t
cgtctcggctcttcttttccccctccccgactccctctccgcgtctcgtctcgtctcgtcgccgcccgaccctcgctcgcctcttcccgaggtacgtgagggggtcggcgatgttcttctcgggtgacccgtcggcgcggcggcgggtcgacctcggcggccggagcagcaaggagcgggaccgcaaggtgctgctcgagcagacgcgcgaggagcggcgtcggcgccagggcctccgactacagaacacctccgccacgaagatccagagggaagaaggctttggaattggcacgctcagaggttcggaagaatttttgctcaacttttggggagcattgcgagcggatagagtggaacaacttcggaactaattctgactttcttcgtcaattactgtttttctttaatgcaaatgaagacaatgacatagctatactttgtcaaatctgcaacttgctgctgcaatatgttaaacaaggcggagatgttgtaactctctttactggtgtgaatggctcctcactgcaacctctcgttgctcacagagtaaaaaaaattactctcatctgtgtgcaagcagtctatcaaaagaggcatgattggggcagccaacttttgacaacacctggaagcacatcagtgccttctgtctcattactggaaactgtaggttgcttgataaatccaaaatttccttggaactgcaaagtagtaggttatcttcagcagagaaagatctattgcttattccgtggaattgtcatatctgtaccacaaaaggtcagaaattctgggcattttgatggtacatctgtgctggagcaagttctcatgcttgttgcttcacatgttggccatcatccctgttgttgtctgaaagtgn

SEQ ID NO: 36161 - DNA, 2267 bp, Zea Mays
cggcggtgcgagggctcctcttctccaacgctcaacaaccccgcaccccgactccaatcccggcaccaaccctagctcccgaagaggcagaacacaaaatcaacggaccaccggaacaggaagcaacagcagcggggcgccggtgccgtacccttcactcattccgcccctgaaagtgaaacgtacccagatctacaagctactccactcgacttccataaataccactcctgcgattccaccttgcagttggaccggccgttgttgctttgcttcttcgcaaaaaaaaaacaaaaaaacaaaataggcctgtcttgctccgatcaggcgtgttcttaggcttcgctgcccctaccgcgtcttcgccgggatcggtccatggccggcgccgagcgcgcggaggcggtcgcgctggaacaagggctcctcgatccggaggaatccaaccaagtagtatacactggagatggatcagtcgacttttctggaaatcctgttgtcaaggaaagaacgggtagatggaaggggatgacactgctgactctttcagcatcagttcctatgctcatgcctccatcttgtgaaggatccttttgcccagcagcaagcccttttcagtatactgtcttttttcttggtctttatctgattgccctgggtactggtggaattaagccgtgtgtctcatcctttggagcggatcaatttgatgatacagatccagctgagcgaatccagaagggctctttcttcaattggttttatttttcaataaacattggtgctctcatatcaagcagctttctggtttgggtgcaagacaatgtaggatggggactggggtttggcattccgactgtattcatggggctggcaatcataagcttcttctctggtacatcactttataggttccaaaaaccaggaggtagtccaattacacgagtatgtcaggtgattgttgcctctttgcgcaagtggaatgtgcctgtcccagaggatagctctctcttgtatgagctacctaatggggtatcaacaattgaggggagtcggcaaatagagcacacagatgaactcagatgtttagataaggctgctacagttaccgaagttgatgtgaaaacggctgacttcaacaacccatggcggatatgcactgtcacccaggtggaagaactgaagatactagtaaggatgttccctgtctgggcaacaacaatagtgttttctgctgtatatgctcagatgtcaacaatgtttgtggaacaagggatggtgcttgacccatccttgggctctttcaagatccctccagcttcactatctactttcgacaccctaagtgtcatcatatgtgtcccgatgtatgattacatcgtggttccgatagccaggagattcactggcaacgagaggggctttacagagttgcagaggatgggtattggcctggtaatttccatcatggctatgtcagtcgccgcagtcctcgaaatcaagcggctagcagttgccagggaagcacacctggtggatcagaatgtcccggtcccactgagcatattctggcaaatccctcagtatttcctgattggtctagcggagattttcacattcattggggcgctcgagttcttctatgaccagtcaccagacgccatgaggagcctctgcagcgcgcttaatcttctcactactgcgtttgggaactatctcagcacgttcattttgacaatggttgcgtactttactacgaggggaggtaaccctgggtggattcctgacaacttgaacgaaggccatcttgattacttcttcttgctcatcgctggcatcagttttctgaacctgattgtttatgtcctctgtgctggcaaatacaagagcaagaaggcagcttgagttgtgaaggccaggggctggatggcgtgctgcgcgccatgttatggtggacacttcagttcaaaatctgtatatatgtttcccgcattaaccaccctagctgaagcaaccatctgcaattgttgcaaagtttatattcttcattgtgctggactaagttgattatacattcgtgcttctactttgtgtatgtatatatctgacctaaagttgctgaacatagacaatttcacttgcctctggtatccagggttttgattgttttttaacctagatatgtgaggtcacgttttaacttttgtatgtagagtaagcatcaatgtgctggttgaacaccaggagggcttggggcgtacttatgg

SEQ ID NO: 36162 - DNA, 2475 bp, Zea Mays
aaaattaaataagacgagtcggtctaatttagtctataaagtcaaacgaattaagacgaaggagtactgaggattgttcaaagtttcatactatgccaccatccgaaaaggaccagcaccggctgccaaggtgccaacgcagcaggcgtgatcgcgcgacggtccgcttccattccaaacccacccactcatccacccgcctaaccccaccacccgtcattgctgcggctgcctcatacttccacaatttcaccgctccggcctccggctggttccactccgcaccgcggcgcggaggcgatggccgtcccttcctccgaccgcgcgagacgccccttccccctctcgccctcgctctcgctcttcctcctcatctccgccatcctcgtcctcctcttcctcttcctcgacccctcgcccggatcgctcgcgttcctcccctcccgtctctccgcatcagccccttccctcgcacctcctctaaccccccagcaacaaagccgcgccccgcgaagcagaagcccacctcactcgagaccagacggctcgagcgccaccgagaaagcggaggagggcactactgccaccgcatcgcaacccgtcacaaaagccgatgccaacggtagcgcatcgggaccatccgcaaaggaatccagcggtggcagcggctcaggcggtaacagcggcgccaggggagtcggggcggacggggagacgggtacaagcgtcgtcgccccggtggagaaaggtggggacgacgaggaggaggcgccggtgagcgtgaggtggcagacgtgcagcaggctggggaggggcgtgtcgtcgacggactacatcccgtgcctggacaacgtgcgggcgatcaaggcgctgcggtcgaggcggcacatggagcaccgcgagcggcactgccccctgccgccccggctcaggtgcctggtgccgctgcctgcagggtaccggacgcctgtgccgtggccgcggagccgtgacatgatttggtacaacaacgtccctcacccaaagctggtggagtataagaaagatcagaactgggttacaagatctggtgattatcttgtttttcctggaggtggaactcaattcaaagatggcgtgggaagatacattcagtttgttgaacaggtggaaaaccattgttggagcttaatagagtactgaggcctggaggatatttcatttggtctgcaacccctgtctaccgtcaagagcaaagagaccaagatgactggaatgcaatggttactctgactaaatcaatctgctggagaacagtggtaaagtctcaagatgtcaatggaattggagttgttatatatcaaaagccagcatcgaattcttgctatgctgaaagaaagaccaatgagccccctctatgctccgagagagatggatcacgctttccttggtatgctcctcttgatagttgccttttcacaactgccattaccacttcagatgaaagatataattggcctgttccatggcctgaaagacttgatgttagctatgcaagtgtacctgatgattctgcttctaacaaagagaagtttgaagctgatacaaagtattggaaacagctcatttcagaagtatatttcaatgacttcccacttaattggtcaagcattcgcaatgtaatggacatgaatgctgggtttggagggtttgccgcagcactcattgatcaacctttatgggttatgaatgctgtgccaattggtcaaccagataccttgccacttattttcaacagaggtttgattggggcatatcatgactggtgcgaatctttcagcacctaccctcgtacctatgatcttctccacatgagtaatctcattggaaatcttacaaacaggtgtgacctcatcgacgtggtggttgaaatcgacagaatactgagacctggaagatggtttgtgttgaaagacacgttagagatgataaagaagatacgcccaatcctgaagtctctgcactatgaaattgtcgtcgtgaaacagcaatttcttgtggctacaaagagtttctggcgtcctggcaaaccagcttccacatcagggtgacatatagatcgtactttcaagggagtcttcaacaaccaacgattctattgattctttgagacctgatcaaactaattctttctacaacacagtctatgtagattattacctgtataagtatagaaaatacatatggtaagttgaggtaataccccttttttttgccaaagcataataacaaggatgttatagacttatgcagtagtaggcaagttttgacaaatacatacaaagggaagggatcatgaaacgtgttgtgtatacttgctcgttgataacttttgtaaaaggagtttgaaataaccttgtactcagtactcatcatggttctgcaatgccagtgcattctgacgttcagctcccaggagctatttttatacctctg

SEQ ID NO: 36163 - DNA, 2257 bp, Zea Mays
ttcgcatcccgttccgtgagaaacctccgtccgcgttccccgtttctctctcctttgggctttggctccgagcctccgatgactctcgtggcgtggcccgcttggaggttggtcttctagaggagaccttgcccctcgagagggaggaagtgaaggaaacttccagaagcctttcccgcagccgatgaaggaaaccagcagcagccatgtcggcggccccggcgctgaggacgtctgttcctcgtccgtgtccaacaattgtttcccacaagatgagggtacaagctccagcgaaatgatcaatactgaatgctctgagacgtcctcagaggtgtcgggttctgaaagaacaagacctgaacatagcaaaaaagcatcttctgtacttgctaaaaatgtttagtcgaatggctacattgaaagatgatggaactgtagttgtcgatatccctactactattgaagctgcatcacttgatcttcattcagaggatcaccaggatgtggcctttggtggcgaacccttggactcttcagatcttcaggatagaccaccaatgcaaattgctatgctgattgttggtacaagaggggatgtgcagccattcatagctataggaaaacgtttgcaggactacggtcatcgtgttagattagcaacccatgccaacttcaaggacttcgtgatgactactgggttggagttttatccccttggtggagacccaaaaattcttgctggattacagggttggtaatttgagcagacatggttaagaacaaaggattcttgcctgcaactccatcagaaattcctatccagcgcaagcagattagggacattatattctccttgcttcctgcttgcaaggacccagacattgatactggtgtttcttttagtgcagacgccataatagctaatccagcagcatatggacatgtacatgtggcagaggctctcaatataccgattcacataattttcacaatgccgtggacgcctacctgtgaatttccgcatcctttctctcatgtgaagcaacctgctggatatagactttcataccagattgttgactcttttgtctggcttggcataagggatatgataaatgatctccgaaaaaggaagttgaaattgagaccagtcacatacctaagcggtacacatgcttattcgaatgatattcctcatgcatatatctggagtccttaccttgtccccaaaccaaaagattatgagcctcccgagacccttttgaggtggttagggagtggtgacagtcctatttatattggttttggtagccttccaattccagaaccagataagttgacaagaatcattgtccaagcacttgaaatttctggacagagaggtatcattaacaagggttggggcgggcttggaaacttggaagaatcaaaggaatttgtgtatgtacttgataatgttccacatgattggctctttttgcaatgcaaagctgtggtacaccatggtggtgctggcactactgctgctggtcttaaggctgggtgccccactaccatcataccattctttggtgatcaattcttttggggcagcatggttcatgccagaggattgggtgcaccacctatacccgtggagcaattacaattgcattcgctgattgatgcaatcaaatttatgattgatcctaaggtaaaggaacgagctgttgagctagcgaagtcaatcgaatcagaagacggtgtggatggggctgtaaaatcctttttaaaacatcttccacagaaaagggattccgagacgacaccaactgcgccagagccaacgttcgtgcaccggctgcttcaccctgtaaacagatgctttggcatggcatcctaaccccgcatttcaaagaacctgctttgattttgtggcatcaccggaacaagttgcaccacatgctaaaggagaaggggggagcaccaacatcgctagccagtcgttacatcctatataaatattaaaagaatgcaggtagggctactagttattcatatactgtaagttttttgaatctttattatatttgtatagcttgtggtcagtgtggataatacggtaacttgagactgcggctcctcaaaaatgtttgtcattacccacattttttttctttttaaaatactggtgtatatagattacagaactaggctggcctttgggttgctgcggaatttcatccaaacttttgtccacccaatgatttggtctgaa

SEQ ID NO: 36164 - DNA, 982 bp, Zea Mays
ggttctttttccttggatgaacgtgggccaagctcgagcggctcggcccataacgaagccgctagggtttttgcccagtagttggcttgcatagttgcatgagcatctcaacaccgccttgaggaccccccaactcgccggctgcagccatggtgaaatattcgacggagccaaccaaccccaccaagtcaaccaaggccatgggccgtgacctacgtgttcacttcaagaacacccgtgagacagcttttgcccttaggaagttgtcactcaccaaggccaaaagggacgctggcctgtcaaatctgctagattcattctagaccttctcaagaatgctgagagcaatgctgaggtaaaaggtcttgatgtcgataccctctatgtgtcacacattcaagtgaaccaggctcagaagcagcggcgcaggacctaccgcgctcatgggcgcatcaacccttacatgtcctccccgtgccacatcgaactcatcttgtcagagaaggaagagcccgtgaagaaagaggctgagtctcagatcgcaaccaggaatgcttagagaatgggaacataccttctatgattggctgagtgaagattttggctgattatttgtcgtcccatattgtttacctgagtattgtttgcaagtgctttatcacatggatcacagcctggaattcactggccctgagaattgtctctggattgtttcatttttatgcccatggtatgccaatgctcatgttcagttgccttggttgatgacgcttgtcccaaactcccaaacttaaggctttggttgttgcatcctgtaaaacgttatttattactcaacggtagcattgtgtgctcaacaatagtatggcgaggggagctctacaatagtgaggccaggccgggggagctctgcgacagggagacaatgggagccgtgacgttcacgggcaatagaaggccaacatttagggcttttggttag

SEQ ID NO: 36165 - DNA, 2093 bp, Zea Mays
gtatgctccttcctccttcctccaacatggaaatatgtttctcaccgattatccctgcaccagttcgagtttggagaagacgaacttccaccgtcttgggaccctatatcctctccttttaggtacttgttatattctaaatgttctttattacaccatgttctatttttgttggtgtttattttctgtcatgaattttgttttagttagcaatggatgtggcactaagagatcaccttagacagaggagagatgatgatgatgatgacatgatgttgttttttctccctatgctacatatattgggttctagttcaaacatagtaacggaaaagaagcgaaggcatacatcaaagttaagtggcgaagaacatgttcaggagttgctccaaggtcatttgaagaactgtcgggtagcgttcaggatggagcctgaaattttcaaatccttggcaagttatcttagaagggaggggttggtccgtgatacaaggattaaggtcgaggaaaagttagcattcttcttatacatgctcagccataatgcctcatttgaagatctaatagaagaatttgggcacagtggtgatacatatcatcgtcacatcaagcatttctttgacctagttgttcctacactctccaagcaattcctgaagccaccaaatcctaatcatgtccatcaaaaaattgaaaggaatcctaggttttatccctacttcaagaattgcattggtgcaatcgatggcactcatgtgcctatatcgatatcacctgacaaagccgctccatttaggaataggaagggcactcttactcaaaatgtaatggtagcgtgtgattttgatctcaatgtaactttcatatccactaggtgggaggggtccgcgacggatgctagagttcttagggctgcaatgaacaatggctttcaagtacctctggggaaattttatttagtagatggcggttatgccaacacaccatctttccttgccccatatcgcggagttaggtatcatttgaaggaatatggggcaggtcgtcgaagaccacaaaactacaaggagatctttaatcatcgccatgcagtgttgaggaatcatattgaaagggccttgggagttataaagaaacgcttccccatacttaaggttgccacgtttcacaaaatagaaaaccaagtgaagataccggtagcagctgccgtgttgcacaacattattcggtctctcaaaggagatgaacaatggttagaagatcaggcagaaaatgttcaaggcaatgttgttgatattccagatggagatcaaagcaatgatcaaggcagtgaacaaggcaacaatctcagagacacaattgcacaacaaatgtggattgattatcaacaatgcaattagtgatgcattataatatgttttattgttattgggattgcaataagttcttaggaaatgtagtttgtactagttatgatgttttaatgttattcgaatatgctttcagttatgctttaaaaattattgttgttcacaattatgctttcatgttctaattatgctcatgttataagttaccatgcttggaagggggtctccaagattaaacatgcttgcaagggggtctcctagatttaacatgctcttatctaaaggtgcacaaaagaaaaaatctcctatagctactgcttcaaagacacatggaggctctccaaaagatctgctatctttcacttatgtccaatctttcacttgtgccggtgaatggtgatgatgcattgctgcttattgctgacggccgcctgctactgcttgctacttgtaccacgacaacaacgattgctgcttgttgttggccatgtgtgcgaggcctggtcatgcataaacaatggtgcatgtcatgaactctttaactgtagggcatttcagtgcattggatggattacttgtcctgtaatgaaacctataataatggtgcttctatgcgactgctgcaagacatcacttgtctgctatttcttgtgtaaactgaggataattatatgctgttgataaaactatatgcatgaatagaagcctgacgattcctggcct

SEQ ID NO: 36166 - DNA, 2144 bp, Zea Mays
ccccgccattctcggcgcaccgctcgccatccccataggccatcattgctagcgcgcccatgccccctgcccctgtcatcggcaccagaaaccgctcccctcgcacgccggccctagctggctagctcccaaatccgcccctccgcctcagatccctacggtgggatgcgagggaacgacaaccacgcggcctcccgtccttagagcctcaaatccgatgccccctccctaagccattccctcggccgcgacatcaacgaaaacgagcatggcccccctctacctcctccaccttgccgtttatggcctccgcactgccccaacgtcgacaccttcgtcctccccctctactcccagtgcaccgccgccgcgtatgcgctatcccacccgatggacgtgttgccgcctctgcagcacgccctgtcgctgtcgaccccacccagccatgcatttggagtttacaatgtggagacatgatttatccaccggacgacgaggttggtgcgcggatggcgagggaggacctccactgggcctactccacacctcttcctgtctaccgaggtcgagcacatggaggacctgctccgctgtcgggcactcctgagccagcgactacaaaatccactctggctctctacttcaccctccatattacaatatgtactttgtatatgtgagatgagacacccaagcagtcaaactaaacactattgtccaatcccctcttccaaattcattacaatcctattagcatgcaaagatttaatttgatgcaatgttttgatttgtactacgtttttactagctttgcagatgcttcagaaggttatgccgtgatggcatgggaggctggcaagtcgattctttgtatatagttagtagtacaaaactatatgctatgagggtccagagaaattgatgatgaggagcagctagaggtcgtggtggagaagggctagagaaagggatgacgagggacagttgcaagttgtggtggagaagggcgacgaccccatgacaacatggggtgaatttctatatcagttgccaatcataagaaacaaatcttattattgcactccagggccagatgctattattgttggctatatcagacagtttgtcatcaagcctttgtctggattcctttttggcactcttatggagtactaagccacactgaagaatttgggcttaagagtgaggttttgaaggtgactcttgcaactgacgtcgtgaactgagtgtgaatatctactggatgggcaagcaagtttccaaccccatgccctcccatcgattctgctgcctgatccggctagagtttattaggactcgcaactacctcggagttcactgctgtaaatatgggtaacaccctaccagtgcatgatatgtcggaatccacagcagccataggatctcccaacaaggaggatcttgcaacaatgacattgatcaagaattggatgttggaaattatggtttggcattgttacttctcttactcctgtttcatgtcccaatctgaggtgactcgtgttggtaatcatggcatctcagattgggagtgggaggaggatgaggagatgatttggtgctaccagggacaggccccatctcctagaaatggatcttcctcctttgcatgggcaacttgtgcatcgggctactcttcaccaacagtgttcggtatgggagccacaaatagcagcacgatgggaatgcagcagcagcagcagcaaggggtatacgggaacatgcaggcaggtgcacagaacgtgcaaagtatggtgggccttcagaaccagacccagaatcccaacttcactcagcagattcaacaaaaccaacaatgattcaacactaacggtcatggaggttgaaagatgagcaatatagccatcgttttgctatttgtctgttggtctttactcagcttatctgtgagactgatagtagccccaggttgatagccttcgtttttctgtaaatcaatgtagatgcatcgccattagcgagatgcaggtcaattatatacgttgtaactgtgttttggatatgtgaatagtgttacgtgtgttccttttatttataattaagcctcgcagcaaggccgacaatcgaattgcatacgacta

SEQ ID NO: 36167 - DNA, 438 bp, Zea Mays
gtaaagagctggattgctggaaggcagcaatgaatctgacagaaatgaaaagagacaacgcaccaaagttttcttcaagtctcagcaagcagagacaaacgattggtatggcatcgaaaaagaaactctggattgtacagtaccccgaatgagctaaaaatattgtcgtagcacaaggaatgaaaaaggcacccatgtttgtgcaatgttgaagagatgtgtgagatctatgtcaatcacattttgcagtggttggtcctgattagttttgtgcttctgctaggacaagaaaagccagggtagtaaacaataccctactaaagcttggcagcaaatggaaagaacccaatgagctatattactatatatcatatctccaagataggtgagtatatgtccactgaggcttgaacacagatacggcagaggcgcaaacag

SEQ ID NO: 36168 - DNA, 1028 bp, Zea Mays
cttccaggcatctgtttctgaacagaaaaaagtctgtggaaccatatcttttaggtttcgaagttaccaaatgaaagagaagctatttatggtgcattggacaagtggagtgcttttgaacctgaatttcctattatagcagcagcaaaagctttggggatgttgaaaaggcgacgacaatggttaagaataatccaggtaaccaagtggttgatgagcaaaggacaggtgctgacatggacaacatatgatacacttctgctcgcacttcttatggataaacgggtagatgaagctgagtcagtttggaacactgtaatacagactcatacccgctcagtgcccaagaggttgttctctcggatgatcttgatctacgacattcaccagcgtccagataaagttttggagatattcgcggatatggaggaattaggtgtgcgtccggacaaggatacagtgagacggatcggaaaggcattcgtggcttccggccaagaagaaaaagagaagcatgtcttggagaaatacttgaagaagtggaagtacatccatttcaacggtgagcgcgttcgcgtgcggagggacggaccattggcgtagtgcccgttttctgaaaaatgctcgaacctatcagagtatcgtgccggtaggcggtagggcaggggcgaagctgttactgccgatgtgacagtcaggcacatggatatcggcactagtccctatcctatgtggaatggaacggaaactggagattggttccatggctctagcctgtggaggagacgagcggatggggggtggctggctactaccggcgagatagtgatttaataggcactacataggcgtccagtgattgtgatggctttaacttgcgtatgtgcctgcggaatggtcccgtgctattttggtgatttgtgcttgtgaaattgtgaacacccactggaaagtgtatatcatgagagggacgatacctgacggctgggcccatgtcttgctgatttcacgcaacgaaccattttctg

SEQ ID NO: 36169 - DNA, 2111 bp, Zea Mays
gacgaggtgagcggtcttccttcctggcgcgcacgttcaggcgcgcttctcttcggcttcccgtaacggcttttaactaattcctcctcctcctctctctctccccgatccagctagcctgacctcccaccctccctcttgaatccgctcaagttcccgatctcccacctcgtcctccagctcgatcgcgttcgcggcaccccactccgtgctccagaaataagtagccggcggtttcctcgccccaggttttgcggtcgctggggagtgggaattcgttcggctccggtctggccaatgctcctgcggtttcttggagaggccgctgagattgggatccaagctgcgttaggcgagcagcagcagtagccgcatcgagattcgccgtcgttgtccgagggattctccgtttcttgggcggggatttcggttgcggcgggaaaaaaaaaagaattctttcaccggacttggcccaactccgctgtatgttagggtagccttttcgacgcgtttctttcgtcgccccagatccgtctccccgcccgattctttcggagtaatcggcggcggatcggaggcagaggggtttggaggcctgagctccgatggagatgcacgccgacgtcgacgggtgcagcgtgcccctggccgtgctcctcaagcgggagctgtgcaaccagaaggtggagaggccggacatcctgttcggggaggccaacaagagcaagaaaggggaggacttcacgctcctcgtgcccaggtgccaccgcaccccgggcggcagtggcggcggcgagaatgccggcgacgacgacaccatttccgtatttgcgatttttgacggacacaatggctctgcagctgccatatacacccgggagaatctaataagcagtgtgttggctgctattcctccaaatctcacaagtgaggagtggaaagctgcgctgccaagggcactagttgctggttttgtaaaaacagataaagacttccaaggaaaagctgcacgctcagggaccactgtgacttttgttataatagatggatgggttgtcactgtagcatcagttggcgattcacgatgcattctagaatctgctgagggttcaatatattttttatcagcagatcatcgcctggatgctaatgaagaggaggtggagcgtgtaacagcaagtggtggtgaagttgggagaataaatatcgctgggggtgccgggattggtccactcagatgctggccaggtggattgtgtttatcaaggtcaataggtgatatcgacgtcggggaatttatagttcctgtcccacacgtgaagcaagtaaagttgtccaatgctggtgggcggcttgtcattgccagtgatggtgtgtgggatgcactgcactttcaagaggctctgaactacaccaggggcctgccagctgaagctgctgctaatcgaattgtcaaggaagctgtcacttcgaagggattaagagatgatactacttgcatagtagttgatatactacctccagagaagttaagccccccactaaagagacctggaaaaggagtcatcaaagctctgttccggcggaggccctctgatgaaatgtctgaagatcagatggacagaggatgcttagaaactgatgttgtggaggaaatatacgaggagggctctgcaatgcttgctcgaaggttgaatataaattacccagaaggaaatatgttcaagctgcatgattgtgctgtctgccaattggagatgaaacctggtgagggcacctctgttcatggtaacatgcccaaacattcgagagttgacccctggggtggtccttttctctgttcctcctgtcaattgaaaaaggaggccatggaagggaagctacattcaagaaggaatcttggctcccttccgctaatgtgctaccagaagccagatctaacacgacgaaggatgatcccaacttgataaatggacaaacaaattccttttcgatgtaagaagggcagaacgagggtgtaaagcaaagaaagatctgggtaacagcatcctctccaagaacatcatacaaagacatacactcagtcttcttcaagtatgagacaaatagac

SEQ ID NO: 36170 - DNA, 3581 bp, Zea Mays
ctccacccgacggtcgcccaagctgaaatcagcaataagcagtcactgacgatgggcctaaggccttgtgtcccagcttgacggcgtgacaggcagcaaacggccgcccccttctccttccctccacccctcttcgtctcgtctcggcctctttccttcctctgttcctcatcttcgtctcggcctcacccccgacgaccccgcaccgatccctccacgcgctcgcgcgcagcacgggcggagttgggcgaactccgtgctcgttcaacccgtactctagtacctccagggttcgggtcgggtctgccttcctcttcgtatggcttccgccgccgcggaaaccctcgcctcgttcccaatcgcatccccgtcccgctcgctcctacgccccttccccaggcgaccagccggcgctaggacaggcgcaccgtcgatccggatatccgccgtgccgccgcggggcctcgggctcgcgctcgtacaccgccgctgcccgccagcggcgcgcgcgaatgttgagcgcgacggcgacggcgcctccgggaacggcgagccgtcgtcctcgtctggggatggcgaccgcgacgcggctgcggagtcggggggcgatagcaccagcacgagcaccacgagcacggccgcgacaccgccgccgccctcgtcgaagaggaacgaaaataagtggcggcggaggctgactaagggaggcggcgtggggcggtggctatgggagcccatagtccagggacgggagatgggcttcctcctgctccagctgggcttcgccatatttgcgctacgcatgcttcgcccagagatcgcgttgcccggttcagagccccgcccacagacgacgtacgtcagtgtaccatacagcgacttcctggccagcataaacaaggaccaggtgaagaaggttgaggtggacggggtgcatatcatgttccgactccgcccagaggtggagtcccaggtccgtgttgagcagacaccgacacagcgcggagcagattatgtcattgataatgctggagtttcaaggagaattgtgttcacgacgactcgtccagtggacataaagacaccatacgagaagatggtggaaaacatggttgaatttgggtcaccggacaagaggtctggcggcatgctcaattctgccctggtaggtcttatctatgttgtattgattgcggtagttttgcagcgcctgccaataagcttttctcagcaatcacccggtcagttgaggaataggaagaattctaattccggcggagcaaaagtttctgaaagttcggatatagttacatttgctgatgtggctggagtagatgaggcaaaagaagagcttgaagaaattgtggcgtggtgtcttattggtgggtcttccagggactggaaagacacttcttgcaaaagccgtagcaggagaagcagaagtcccattcataagttgctctgctagtgaatttgttgagctatatgtaggcatgggagcagctcgagtacgtgacctatttgctaaggccaaaaaggaatcgccatcgattatttttatcgatgagattgatgccgttgcaaaaagccgtgatagtcgatatcgcattgtcagtaatgatgaacgtgagcagacattaaaccaattgctcacggtaggacagtgccctttcttatttcttgagcattcaccaaattagcttcatcgcaagttgggacccaattaaagcttatacttgtatttttattggctgataattgattttttgctcttggtaaaacttaaaaggggtttgagccacactctacttcactactaaggatactgctttatcatgcaatatttgtttttgagaaagggcggaaatggtattattattggtttagctgccttgattttgggttctccccaggaaatggatggctttgataccaactcggctgtcattgtattgggggcaacaaatcgagctgatgttttggatcctgcccttaggcgccctgggagatttgaccgtgtggttatggttgaagctcctgataggtttggaagagaatcaattctaaaagttcatgtgaaaagaagagagcttccactgagtaaagatgtagatctagccaatattgctgcaatgacaactggttttactggagcagaccttgcaaacttggtaaacgaagctgctctgttggctgggcgattaaataaagaaatagtggaaaaggttgacttcatccgtgcggttgagcgatctatagcagggatagagaaaaagcatgcaaaattgaagggtaatgaaaaagctgttgttgcgcggcatgaagtaggtcatgcactcgtgggaactgctgtagcaaacctccttcctggacagccacgtgtggagaaattgagtatattgccaagatctggaggtgcattaggcttcacgtacacccctcccgtcacagaggatagatatttactctttgttgatgaactacgtggccgtttagtaacactactgggtgggagggcagcagaggaagttgttttagcaggacgggtttcgactggtgcacttgatgacataagacgtgctactgacatggcctacaaagctgtagcagaatacggtcttagtcagcgcatcgggccaatatcacttgctacactgtcaaatggtggtttagatgactctggtggctctccatggggaaaggaccagggacatctagttgatctcgttcagagggaagtaaaagcgcttttacagtcgtcactggaagtagctctttcagttattcgtgctaatcctgcagttttggaaggcctcggagcatacttagaagagaaagaaaaggttgaaggcgaggagcttcaagagtggctaaaatcggttgttgcatcaaaagagttgacctcttttatcagaggacagcaagagcaagttcttcagctggaagcaggctcctagcgtcaggagtatgcaccgggctcttaaaattaattacttaacaaaagtgactcagcaattagaacatacaatatgagacacaaggtatgcaatggaaaccttcatatactgggaagagacctgtggccatgtgtggtgggttgtatgaacccccacccattcatgctaagacaaaccgggtctgctaagacaaactggtcggatgcccaccctttgttcggtgaatcatgagatcgagccctatacgagaattcaggaaaaaaaaagaaaatctacatgcccgagtgaccatgtaaatatctatcattgcagttcctgaacccttgactacaaaaaaagaaatccagagatgattcatattgagctgtaacattgtacgatcaacctcaggaatattgtaagtgattcagcttcacatgttgttccatagattaggtcggtgttacacatgtaaaagattcttttttggcaatatattcttgtactcaccctattggaagttgttttcctctatataccatcctagaaatgatcaataggataatgcttatacggactatggttcctgtattgagaattgttcttcagaaatcagaatagtgatcgctttttgaaagaataaaa

SEQ ID NO: 36171 - DNA, 3998 bp, Zea Mays
tgcctctctctctctcacctcctgtcccctctcctctccgtgtccggtggagcttctccacctccggccaagatctggaaccagcgagggtgcccggcggttctcatcccggaccccgactctttcctcatctctgcaacctctggatcctccatctgcccccctgcaggatctggaagctgcacccgtcggggggagaagcaagcagcacatccagcccgctcgagctcgctcatctgacctcaccactgagcttccgcaggatcttcacatccccattccattgacaacgtgaaagagaacatgtgacggggctgccaagctacatgacaacgacgccgattgccgaatgccgagacaccgcgcacgctcttgcagataaagatgatcggttgatcgacgtggtatttgtaccactttgctgtccgtgaaagcccgctatataggtggtgacatcaagtgatcaagattttatggtgcgcaagaggttgggttatagttcccgtggccatcgaattccaactatgccacgtgttccaaactcagctcgggggaaacgttctaccagaagaaagaaagatgagaatgatgatatgtgtgcaatggatttgctcgcaactgtggcaggaaagttactagcagatcaggacaattcatctagcgttcctaataccagtgcagcgaaagctaaaaaaaggaaatcagttaaggaagaacactttgatgaaattccgcctctaaaaaatgtggctatggagaaagatgtgggttctggtagcgttagtgccttccctaggcaagctaaaaactgcctggcagaaaactcatcgacaagaaatggagctgatacagtattagagtcactaacagtgaaatcaaatatgctagcaaaaattcctgagtgtggatcttatggaatacaccatgcaggctcctcaagttcagcagagcctgaacaagtgcatcaagctgaacctaaagtgagcagaagacaagcagatggacatcctgtggcttatgccatgacaaggaacatcaaacctcttccttgtatcggggtgtagtgcagtatactgcagatagagaagatgatgaaaattcttctgggtgcacgcatccaagcaccatagaaagtaagggttgcaaaccacaatatctaggtaaccataggataaggaaattgcttgcctcgaaggtaaggaaggcagcacgtaataagatttgtggagggattccatcaaaaaagatctgtggagggttgtcaaaaaaagctagtgggacatcatttgctatggaaggtcaaaataaatcatgtgaagctgagaattaccatgttaagctaagaatcaagtcattcaacatcccagaattgttcattaaggtcccagaaaatgcaaccattggatcactgaagagagctgttatggatgttgtcaatagtataatggaaggtggcctacgcgttggtgttcttcttcaaggaaaagatatccaagacgacaacaagacactttgtcaggctgggatatgccacgataaaaagctaaataacatagacttcacgctggagtgcgagcgtgagcgcgagcctccctctggagtcattatacaagaacagatggatttcctcaccacagatatggtggagccattagctaggatgaagtgtgaggaaccttttcctgaagccgacgtcggagatgacagccagcagcctagagcgccttatcgaagccgctctctctctgacctgtactctgtccattgtcctgttcagatggcttcacaggacacgacggcgagctcccaggccatcgtccctgtttcgcctgcgccttcagacgtgggcgctctagccattgtgcccctttgtaagtccaaggggtctgaagtcgggcagaggcgcatgaggaggcccttcactgtcggcgaggttgaggcgctggtgggagcggtcgagcagcttgggactggaaggtggagagctgttaaaacgcttgcattcgacagtatagatcaccggacctacgtcgacctcaaggacaagtggaagaccctggttcacactgcgagcatatccccgcagcaacgaagagggcagccggttccacaagaacttctagaccgtgtcctcctagcgcaggcctactggtcccagcagcagcagcaggcgaggctctaggacaagccccgcggcaaggctcctctcctcttcctgagatctgttttccaagggaaagcttgtacttgtcctagattggcaacctatattgtttattttaccctatattgtttattttaccaaacaaagatgctaacatatagattggcaacctacaacacctatagaaaatggctgcaggctgctatgacaaattagtcactgtcagtgactgacatccgtataagtggaaaaacagtgacatgacatgctccggtcctgcggcttccagccaaacaacaacgaacccgcctcctcccctggcccgacgcgggctctcccgtctcctctgatggacgggaaccaaacctggccgccccctaccccctcgccgccgcccttctcctcccggccccgcgcgtcgccgtccccggcgacgcaccgccggcgccgccggcactccaaaaaacataagccccggcccgcgccggcgccgacgccgcagggcgcggacttctccgcgctcccgccggatctcgtccaccgggccctcgcggccgcgtgcgcctccgacgtcgcggcggccagccgagcgtgccgcgcgtggtgggacgcgctgcggccgttgcgcgaggccgcggcgctgcacgcgtatggccgacgcgtcaagcacgaccccgtgacaggagccagagccgtagccgcagccgctgcctcgcgcgggggaggcgaacgtgtggagacggagaggcagcgcgctctggggctgttccggcgggcggcgaggctgggctccgcggcggcgatggtggacgccgggctgatgtgctgggaggacgggcgccgggaggaagccgtcggttactaccggagcgctgcggacctgggacatcccattgggatgtgcaaccttggggtctcctacctcgaagctgatccacccaaggccgaggaagctattagatggttttatccatcagcatctgcaggcaatgctcgtgctcaatacaacctaggcctttgcttgcagaacgggaagggtgtcaagcggaatcagaaggaagctgcaaaatggtatttgcgagctgcagagggagggaatgtacgggccatgtataacatttccctgtgttacagctacggtgaagggcttgcacaggatccagtgcgtgctaagaggtggcttcaactagctgctgattgtggtcacaagaaagctctttatgagtgtggtattaagctttgtgcggcaggagacaaggtcaagtgtctcatgtatctagagctggcgacacggcgtggagaagctgctgctgctcacatgagggatgtaatacttgaatcgctctcggttgtgaatgcgcagcgtgccatgtcggatgctgataaatggaagcctaggacactccatcctagacctagaaggtgaggaaatgacgacgccaaagtgcagaagaaccatatcatcaagatgtccacaccctagtcatctgtggccagaattgaagcacagaaggtcgaagcaaacatgtatgcttcctcggcacccacagccacaggaatgtcagtagccatcctgtggctctctgtataaagccatccattggcagatgtaataccaggagaacttgtagtacagaaagttctgtagcaaatactacttcctcccttccaaattgctaccttaattctcgaatatttgtcaccactagttcatttttgaactaaaatgtgacaaatagaaataacggagcgagtataaaatactttggcttttctagatatgtattttttatacacttaaatacaaagtaaaaggaatgtatctataaatgca

SEQ ID NO: 36172 - DNA, 6240 bp, Zea Mays
atggctgagtcggaggacgccaccgccgccgagcccgggtccgggccgccccacgaggacgaggatgcgctgctcgcccgcgcccacaccgtcatctccaggatcatcgaccgcgagctcgaccccaacccccgcctcctccacaccctcgccaccatgtgcgagctccacgaagccagatatcttgagttacgttcagctgacacaatgttcaatagcacgaacacaaggactgcatttacaattgggaagctggccaatttgctccgggacaatgacgagttttacgagttggtgttttgtaaattcttgtctgacacctcctactctgttgctgtacgagctgccactgctaggttgctcttgagctgtcaccctgcctggacgcctccgtatcctcatgtctttgaagactctatcatagataatattaagaagtgggtaacggaggatcctgaagcgtctaatgaatgcaaatggaagtatctaggaaacaataaacccacagatgctgagatgctgagaacatatgggattggtttgcttgctatggcgttgtgcagcagtgggcaattgatagaggatgtcttgactttgggggtatcagcgaagctcatgcgctatttgcgcataagagtccttggggatgcctcatcttctcagagagatgctaatcatccacaggacaccaagcatccttggggcggagacgacagtaggggtaaatcacgtctgtcccaagatggttctcgattggacggaacaagggttgggtatggaatgttaaccaacccgacagcagagaagaacaacgaaccttgtgttggaatgatgcaagcatatggagcaaggtcattggatgacagttttgcttcattggatgattctgatgtccctgaggctgattggaccaatgatagatcttatagcacacgtgtttgtgacacaaagtcaaaacatggggaaaggaattctgtgacgaggttgcttaaagatgaagaggtcagcgaaaatggtgaactgttgaagagaaagctgaatcgagccccctcccgacttagagtgaagggaaaagcaggtgacagcttgccagaatgtgaaatgacacctttatcgccaacctctggattgagaataggaggtcaggctacaagagacaggaatgtggcgagggttgatgatccaaaggaggcaactgatgtgaacaatagattgtttaacaccatttccaaagaagaatacgaagatcgattcagggattgcattattggcttgaaggatatatctgacatcgttttgaaggcagtgagagccgctgaggctgaggccagatctgcaaatgcacctgatgaagctgtgaaagcagcaggtgacgctgctgccgagcttgtgaaatttgctgctttggaggtttggaaaagcgaaaataacagtgatgcggttgtagtagtggcggagaaagctgcatctgctgttgttgaggctgcattgtcaattagtgtctcacgaagtgcaaatcaagttggtgaagagcgtgcaatggaagaagctgtccaaaccagcgaagaccaggatttggaaaattttgttatcagtgacaaagcacagctattacaacttagagaaaattatagcatccagtgtctacagattttaggagagtatgttgaagctttgggtcctgtactccatgaaaaaggtgttgatgtttgcctcacattattgcaaaggagcatgaaaaaccaggagggatgtgaccactttgctcaactccttgatgtccttaaattggtttgtgcactggctgcccatcgaaaatttgctgcactctttgttgatcgtggtggtattcagaaaatcgtctctatgcctagagttacccagacatatatgggtctttctgcctgcttattcacttttgggtctcttcagtctaccattgaacgtgtttgtgcgctttcctcagacacacttgacagtgttgttgaattagcacttctacttcttgagtgcccacaagatttagctagaaaaaatgtggccatctttttcgctgctgcttttgtgttcaaagctgttctggatctatttgatgcccggaatgggatgcaaaagcttctcgatatcctttgtggatgcgcgtctggaaggtctggtagtaattctggaggagcaggatcctccaatgtaaatcaagggaatgatcggtcgcctgctgaagttttgactgcatcagagaagcaagttgcataccatacatgtgttgctctacggcaatactttagagctcatctccttcagcttgttgattccattcggccaagcaaaagtatccgtagtattgcccggaacacttctagtgcaagagctggctgcaaaccttttgacatcagcaatgaagctatggatgccatcttttgtcagatccaacgggacagaaagttaggccttgctcttgtgagagcttgctggcttgcgttggataaatttgttgcctcaaatggtcacatgactatgctggagttgtgtaaggcacatggtgatcggtatttgcgtgacttaactcaatatgcaattggagttcttcacatcataacacttatgccacagccacatgtccgcaaatcaatagtgcaggggacattaagcaacaatcgtgctggcatggctgtcttattagacacggtgaaaagtctcgactatattgatcatgagttttgtgagaagactactcaagtaatggtgatctgtccagcactgaatgtcctcgtcaatcttgtatgcccacctccttctatcagcaacaaaccattgtcaagttccaatcagcaacctgcagctgcacaagcgcttgcttcagaaagcagagaaaagaactttgaaaaaactatttcagataggaatctacttacaaacctgggtgaatctcgtgaaagatctggtgatggcaaccctgctgaaaagaacaataccttgcatcaaggaactcctagcacacctgttgtgccatctggagtagtcggtgatcgaagaataatgttaggagttggaggtggtggtcctggtcttgctgctcaattggaacaagggtaccgccaagctcgagaagttgtaagagccaataatggcataaagattcttttgcagcttcttggttctcggatggttacacatcctgtggctatagattctattcgagcccttgcctgccgtgttcttcttggcctggctagagacgatacaattgcacatatactgacaaagctccaggtggggaagaaattatcagaactgatccgtgatatcagtgctcagacatctgggggcgatagtggaagatggcaaactgagctgacccaagtggcaattgaactaattggggtattgacgaattctggaaaagaaacaacactagcggcaactgatgctgctgccccagcattgaggcgcattgagcgagctgggatagctgctgctgctcctatctcttaccattcgagggaactgatgcagttgatacatgaacatctccttgggtctggttttgctgccaccgctgctatgctccagaaggaggctggccttgcacctttaccattgacagcagcggtgcttcctgcccatcaagttgctgccctggaagcatcatctgttcagcaacagtggccctctggacatgttcagggatttctctcagataaaataaacacgtcgacatatcaatctgcccagagatcagatcctaagctgccttcatctaagaaaaaggcactggccttctcatccagtttctcacgaagagctcggtctccgcatccaagcaacatccttaaaagtcctgtacctattgcggctgatactggagatgcagaaatgttgaataaagcaccactgtcgctgccacttaagcggaactttgtggatgtgaaggatattagttttgcatcagcatcgaagcgccttgcaataactgatcaaatataccaatcctctgcattccaaactcctgctcctactcgcaaaggtctgtcggtatcagttgattctcctacttcatctcattgcggttggacaaacttcaacaatgcttttactgaaaacttggacaattctcaaggcacaccaggagcattgaccaccacagcacttcctggtgtaaatgaccaacaatcaggaaatttggagcgtatgacacttgactcactggttgtacaatacctgaaacatcaacaccgccaatgtcctgccccagttacaactttgccaccactttctcttttgcaccctcatgtttgccctgagcctagtcgcagccttagtgcaccggcaaacatagctgctcgagtgggaagccgtgagataagtaggcaatttagtgggatccagatacctcgtagggatcgtcattttatatacagtaggttcaagcagtgtcgtgtttgccgtgatgaggcatcactattgacttgcttgacatttcttggagatgcagctcgagttgtggctggtaaccacacaggtgaattaaggatatttgactgcaacacggcaaatctccttgagactcaaacgtgccaccaacatcttgttacaatgatggaatcgacatacactggtggaattgagatgattctcacatccagcctaaatgaggttaagatctgggatgccttctcggtatctgcagggcctttgcacacatttgacgactgcaaatctgctaggtttaaccactatggaacttcatttgctgccctttctactgatacagctcaacgggaggttcagttgtatgatgtacagacgtatactcttgctacacggcttcctgataacactagcagttcaggttcaggccgtggttatgtacaacccattatacatttcagtccttcagatacaatgttgctttggaatggagtcctgtgggatacaaggcaaccaaatcctgttcatcagtttgaccagttcacagattactgtggtggtggattccatccagcaggaaatgaggtgatcctgaattcggaggtgtgggatctgaggaagttcaagcttttgaggagtgtcccttccctggaccagacagtaataaagtttaacggaactggtgatgttatctatgccaccctgaggcgtaatcttgatgacgtgacatcatgcatcaatgctcgtagggtcaggcatcctcttttccctgcattcagcacgattgatgcggtgacttactcggatattgcaaccgtccaaatggaccgctgtgtacttgatcttgccactgagtccaatgattctcttattggggtggttgctatggacgatcaccaggagcttttctcttctgctcgcttgttcgaagttggcaggaagcgaataactgatgatgattccgatccagaggacgcaggtgaaactgatgatgactccgatgacgacgacgacgactccgatgacggtgttcttgcgccggtgctggaagggggtacagattctgaagatatcagtagcagcagcagcgatgacggtgatgaagatggtggtgacgatgatatacccagttcggatggcattgaagatgaccggttcattgatgagagacgacgggagttcatgatggatctttttggtgacggttgggacgacgatgaggcttatatgatgggatcctttagcagtggcgacgaggagggttggatcatatgttcgtggcgtgggcgtggcagaagctgacgccgcaggccgcgcaccagctgctggaacaaattattaaaggatacaccggaaaaaagcacaaaggcctgaagaacgtaccgaaatagataaacacctcatttttcaaaaggactcttccacccctggtaaattttcgagtacactctcccacctcgactaacgtacgtgtgttggtttgcggtttgcacgttcattgtaaaatagcaagcaagatcacaagaggtcaaaaccagacaagaccgttcttttaggacgtatgcaatgcaatacaatagtagtgacgagcgcgagaagatagattaatgaagaatatagctagggcaaagagattcggtccctagtaccgtcgtcaaaaagtatatatgttgcaggaaagtttcagtctatagtagtctacacctggccaaatgagcccggccggtctagcttgtttcgagcagctcccaacaatactcggtcgacatgatcaaatttctctctataaaaaacagtgtagtttcgtatatc

SEQ ID NO: 36173 - DNA, 716 bp, Zea Mays
gtaggttcattgcaaccgaaatgcgctgatcccgggcagatccactcctctcgatccgacgagctcgcgcccaacctcctttggcctgaggtttaaaactgctccctcccctcgtccatccttccgatgcacgtcaaagccgctgattaagcccaccgtcgaaccatcgatggggtgcaggggagggcagtgtctgccattggcgacttctgtctaaaccactatgtagggctctaggattgatcatggtgaagcgccatatgtcgaggatcacgtgtgtcacggtggcaagcaggatgggtggtcggagctagagcaattgctcgatggagcaattggcgccgtcgtggatcgcaccgcaccgtggctgagggccaccccaacttcacccactggtaagccacatcgatccagactgcttggattcctgccttgcgttgcaccgacctcgagaggaaatggggtagtggagcgcggtggcgggatcacaccgttgaatccgtcgcggtggagctacgggcgccacccagcgttgtcctttgagaaagaagatgtcctacgtcctagggtcgttgatgaacgaatcaatggagtcgattagatcaggtttaataaaagtgtgggcagttgaaacccagatgagcgcatgatatcacatctatcatacccttggatctggtgattgagattgcatgccgattcggactctattgtca

SEQ ID NO: 36174 - DNA, 297 bp, Zea Mays
gggccattggatgcaaagatagaagtcatctgaggcgtcgtttctttctcccacaaaaaccctaggtggccacccctttttttcccttcacccccccctcttggccgccaccccctttttctcccccttggctggacgccccctccccctatggcagccatcctccattgcttcctcccccaagatctccccctacgcagcaaggatcgagaaaaggaggggcacgttgaattgaaggggaagagaggatcaaggagatgttcttccccatctcctcttgaagatttcttggggaaa

SEQ ID NO: 36175 - DNA, 2792 bp, Zea Mays
atggataacatgctaggcgacttgtacaagccagatgacggcgacgacttctacagcaaaaaataccgcgacgagctagagaatgtgtcattccaactattagaagaaattacagatggtttctctgagagtcgagagctcggccgaggatcctttggagtggtttacaggggattgactaaaaatggtgattacgttgctgtgaagaagcttcatgctaatgtcactgatcttaaccataagcagtttcaaaatgagttatataaccttgcaaaacttaagcatgaaaacattgtacggatttatggctattgctatgaaattaagaaaacatttatggagcacgatagaagaaaaattcttgtcgaagagccgcgtatagcgctctgccttgagtatttacacaatggaagccttcaagatcatatttcggatgagttttctggtcttgactgggacacacgctacaggattatggaaggggtctgtcgtggtttatatcatatccataggaatctaaagaaacctctttatcatttggacctaaaacctgccaacatattactaagtaaaaccatgcaaccaaagcttgcagattttgggttatctaggatctttcggaatgaagaactaacacgaacgactaaaagtcctctaggaactcttgggtaccagccaccagaatacattgaaagaggtgaagtctcagaaaaattcgacatattcagcttaggtgtcgtaatgatacacctggtttcgggacgtggaggcttcgaaagatatgcatgcatgcatagtgaagaatttatcaatcaggtaaaaacaaactggaggaaaagatttaagcaattacagaggaattccttacgtaaagtcaaagtgtactgccacgaggtagagacatgcactcggatagcactgaattgtgtggagaaagacacacagaaaaggcctgatatagatatggtcatcaataatctaaaggaccgtaagacccatagattcaagagtacttggacaagtagttttcggcaggatggaagaatgtatggaagctatatgccatattcaaacagatatttaaacaaattgatgtcaggctctatttgcaccgaaacaaaattttatcgaagagaaaaattaccgaatgttggagaagaattcattatagggagaaaagaagagaaacagaaaatagtggcatctttactacagagcatgacacaacacatcactatccttcctatctatggcattggaggaattggcaagacaaccattgcaaagttgatttactatgatacaaatttcaatagttactctcgagtatgggtctatgtttcaccgaaatttgacttgaagaaagttggaaacactgtaatttcacaactctctagtgaggagagccaaattaatgaaacacaaatgatacatagttgcctgatgaaattactttctggtaaaaaggttctgattgttttagatgacttgtgggaggatagtttatttcaactgaataatttgaaggatatgctaagttatggtgatagcatcaatgtaatagttatagtaaccacacgcagtaaacatgttgcagagaatgttagcactaatgttgagccacacaagatagaacccttgacagatagcatgtgctgggatataatgaaacaaagaagcaactttgaagctaaaaatcacaaagaacatttggcacatataggaatggagatcgctgtaaagtgtggaggtgtggctttggcagctcaatcccttgggttcatgttgaagcccatggaattatgtgatgaatggattgaagtcagagacagtgacatctggaataaatctatttcgaaggatgccaattcaccaaaccatatatgtgagaagtatattttgcagctcataggattgtctttcattcaagatacaatgtcaccaaagggtgcactctctgtaggtgctgcagtagcctggaagtgatgacagacatatatggaggctttcttctactggtgtttgcacagccaagtcagcttatgggggtttcttcattggagccacggtttttggtccttcggatctaatctggaaatcgtgggccccaaagaaatgtcgttttttcccctatggctggttgctcttgacaaatgttggagtgccgaccgtctagccagacggggtttacaggcagcaccctatgtgttgtttgttttgtgaccaagatgaggaaaccatcaaccatcttctggtttcttgctccttctctcggcaattttggttcgtgctgttacaaatggtgggtcttcaacgcctatctccacagccagacacgtccttcttcctagaatggtggtcaggttctgctgcagtggtggatgagcaatttcagcagggtttctactacatcatcctgcttggtgcttggctcctttggaagcaccgtaaccgatgtgtcttcgatgggattgggatcaaacccgatgtgcagcatgtgttgtccttagccacagaggaaatgagactttgggggctagctggtgcgaagggaattaggatgttgacttgttggcgagtaatcctctagcttgatccaggtcatgtttctttgttctggtcgagatttgtgagtgtgttgtttttctattctttttcttttttctttgtaatctgttttggggttctcagttctctatcccttttcatcttcttaatacaaagatacacagttgtcctgcgtgtttgaaaaaaaaatacttttaaacatagttaatgaactagtacatcaa

SEQ ID NO: 36176 - DNA, 3438 bp, Zea Mays
gctgtcaatcgcctccccactgcggcagatccgcaatccgctcctccaccaccgcgctcctcacccacgccagggacaagactgtctacctccacgcccgcctcaccaactccgcggccaccgccaccgccacgcccctcccccatggtcgtcgagtccgagtggtggaaccagcgacgcatgcgcgtcgagggcgacgtgaaataggtgctccaccgcgggcacaacgggcacagtggaggtggaacgagcaccatcgagttctggttccaccgaatccaccgctcgcacaccggatccatcgctcccacatgcccgcacaccggatccaccgctccctcccccgcgatggcctggttccaccgagacaactgcggggctagggtttggattcgtgggtggagcccaaggctagatccagcagggggagggaggtagaggaggggagggaactgctggtggtcggcagtgggcgaaggcgcgacaatccaggatatggattcctgagcgtcacccacccgcccatccacgtcgcgcggtgtagtcatcccctatccgcagccgcctcgctccctctcccacaacaaatccattctcctcctcccactcgacgaggatcgcgaggatgctggaggacgtcgtcgctgtcacgcttgacgttagggcctccgatgcttgacggcgggcgggccgaaggtgtttaagaaaatgttgttgtcaacatcaacctcctggaagggccagaacgcaggcagcgcctcaactcgtcaccccatcagcacggtgagccccttatctggattgttatcatggtacgcggtgcgctgcaagcctgcaagtgacatcaaattggattggtagtcagcgggtgtcatagtgtcagttcgatggaatggttctgcagtgcatgtgcttctgtaatttccgcaagaagcagtcaacttctccctgatatggcactaggacattgtagtgattcccgcacgtttgtggaactcgacaacctaccagagcgccagatgtttcattgagaagagaactcctccagtctggctttccactggtctagtctctcctttaaaccaaatttgataccactcattgaagtcaatagctgggatgtagacatgtgaaaccacacctgtggaactttcagcgtgtgatgactgggtcactggtggaataccgtgttttttgagctgctcgctttcagttcgcggtcatagtcctgtgttttttgccttcagtttcttgatgtagttattgcctaaaatttctatatcttgttcatcgtactggagatgctacttcatgtggagctggtatgtaggatgattatcacgagtacttcaagcgctcattttaggaagacatcgctgcgcaagtgcctcaaggagtggaatgtaccggtttttggttgatggtgtctggaggtgtgatgagacaaaaccctttgtacgtgatgaatatggactgatcagcaatgaagtgcttgtggaaaacaatgtactacccgttgtgcagccagagccttctatcagaggaactaatatggataagggtaccattttgaaaacaatgcccctggagccatcatctcagaacccaagcatgcaaatagcagttatccgccatgtggtctctggaatattattacacaataccatatatgacgttgttcccctttctagcaagttaacagttttggacactcagcttcctgttaaacaagcatttaaaataatgcatgatgtgggtcttgctctggttcctttttgggatgaccgtcagggaaccataacaggcatgctcactgcatcagattttgttttaatcttgagaaagttgcagagaaacattcaagttattggcaacgaagagcccatttctgcttggaaagaagcaaagctacagttctatggtgggcctgatggtgctgtcatgcagagaacgccattaatccatgtacttctccatatatttgctgattctttcatttgattcaatgtgtaagcagttgcaagatcagcactttcataatataaatatattacttgtatgaaattctagatatggtctccaatacaacattaagcttaatgtcgtttgtgttaaaaaattacaaatcatcttatgtcttgaaataaggagaaattgtttgggtttctcctccccaactttcagaattacctatttctattgtatgtttgatcatttggacttccattccatcaacaattttggtttattcagtgaggaactatgtttttaaccactctgtagtttgtacagacaggcaacattgatctcagggccaagaaagaagctcaactcggcatgcttcctgtttgaagcaagggcaacaaacttaccccaccagatctctgtcgccaaagcagggctagtgaataagctgtgtttcctcccggattgtcactgcttttatatttgtgcatttattttgagggaaacattttgcccaaaaaaggcctgcagtgcacgttttaaacaagtcatttgaaccaactcttatgctgaaaactgtatgtgatactgcagaaggcaacacactagcttgataggaaagttggttggcaagcataggtagtgtaaccacttcaccaatgatatcagtactcttcttgcctttaactcgtgcatctttaaatttagcctcttcaagtctggttctcatggcaggtggactctggtgccttcatatatctatatatatattttaagttgacgatcttcgtgatgctgaaactgatgaagacctccgatgaaaaaagagacatgctgcacatgcacgagggtacttgcagatcgatgtcggctctatggacgaacactcgaccaagtcagatgaggagtatgagggcctagccatgcgcgacgtgatggctactggtccgacgatgagcagcaagctgtgagttaaagatgaactcacctgccctggagagtaacatccataggagtgaggcaaaatggctggtaccaccacaacatggacccgttcctgaagatgtccaaggaggtggtagccgacaccataatgtcttgtgtcattgtgtcaccggtcggcaacacactgcgctggtaccggcgggtgttgtgtttcttaggcgtctgcttctgtgctttgagttgtgctatagagtggttgtgccaactactgattttaaaagaaaaaggtgagctgagaatcattgttgaaaacaaacatgtaattgttcgttctcatcagttgtgccaactaccaagcatttcattgatcagaatttatcgttgctcatgagaaccaaaagtaagacacttctcaataacattggatgcaaatttctgctagcttatcttcactatcttttctcgtatcaatataacacacatttatacataatttttgtgttattatatgttttcgttgcaacgcac

SEQ ID NO: 36177 - DNA, 3439 bp, Zea Mays
cgaaacaaacgggtagctatttcctcgtcgtcgtcctccagtcctccctccctcccactcaaaaatcgagttcccgtttagctctcccagtccacctccctcccccctctccgtcccaagtcctccccgctcgtgcgcggtggatgcgagcgatttgctttgtcgccgcatcttatcgggcttaggagcggagatgagcatggcaggcattgcgcgcggcagatcgcgatggagacagggcgacgggtcgtcgaatcggaatgcggcacactccactgttcctaaccccgatcaccaaggggttgtgtcctctaggaagcaagcaacttaccctgggatgctatctgattcggtgtttgctacagtagacaggcaaagtaaaacaagaaaagccattgctgtaccaatgaaaatactgatagaagaagaattttcaaatgatgtcaattctaggcatatttcaccaggtgctgtaggaaggctcatgggtcttgattcgttgccctcatctggaatccataataagcatagacataccaaaagtcatgcaccaaagacttcacctagtagttttcatggtcgaactggtttgcatgacattccacacaggaggagtgtagataccattaatgtttttgaaggtatggaagccacaaaaacaaatatgcaccggagtccaagatctaaaattggaagtacaacttccagatcagacaaggttgttagtgctgatatcgatttcataaggcagaaatttatggatgctaagcgtctttctattgatgaatcccttcacatatcagaagaatttaatgagacacttgatgccctggtatctaacagtgaccttttgttggattttcttcaaaattttgatcctgctgtcataagggacctacataatcatggttctccatcctctaccgcaaactgcatcacaatattgaagccatctcgaagaaatcaatttattgacatggacaatatttatccgcaagagaaaggaaccgagagcatcttcaacgagcaaatggaagggaaacattctttatggaagccatattctaatgtgcccttgcagtccctaaaagaagattcttgttcatcaaggcagaaactgtcaaggtccagtcaccaagaaaatactggaaaacgtggctcccccacccggattgttgtcttgaagccaaatcttgagaaacctcatgatattgaagaagcccttcccctacatcataaaatatcccattctgattatagaaggcataaagaatgtccggaggttgatagatggactccaaatactgaagattacatgtgtcaggtgccccttggagattctgaaacattaagtcgtatggggaagggatctagagaaattgctagggagatcaccaaacagatgagagctgctaggggtggaagtaggaaacattctgtcaaaccggagactagaactcttgcttcagatgaaaggtcacagtttcagtcatctgttactagacccaagactccagagtcaattcatagatattctgagtcatgtgatgcttgggcttcttcaagtctcaactctttgccaacatattcgactgaaacatcagaaagcaaggaagcaaagaaacacctctctaacagatggaagaagacccgtcagtgtcagcatcaagaaactgataatgacagcttcaacacgcttggggatatgcttgctctctctgatcagaatgcatcaaatgttgctacccataaaatgacatgcaggaaatgtccaaagtcagaagtgcagagtgatagaatacaaagctcatatcctcttggcatcagcaccaatgatggttggaaagacacaactactagtaaattgacaaggtccaagtctcttccaccatccttcattcgtggagttcaaaagtcaaacaatagaaaaagaagcggcagcgttacatacaatgagttttcaatgcttaaagatgttcttaaggaccagcaagtgcttaagatgaccacaacagcactagataactgctttcttgtgcctaatctcgatgatctgatgcctaagcatgagcaaattgaataccatcaagctgatgattacccagccacttatgatcctcatatagcatcagattctcctgaggagaataatcatcacctaggggatgtcagtgaaaccctttgtattctacctgatgtattagaatcgccagcgaactccaacaaagatgaccagcaaagtccaatgtctgttcttgaatcttccatggacggagaagatgtttactctggggattttgagaagatcagtgcagatctccaagagctcagattgcaacttgggcttctgaagagggagactacagacactagagatggcagcgagctttctatattgagtgatgatgagacagcacgtcgatcacttcctgagactggggaatcccatgcttttaggaatacggaagaaagggacttctcctacgtgtttgatatgcttgctgctctgggcatccacgcggccaacgaggatgacctccttgacaactgctacttactggagtgctctgcaggccttgatttatacgatgacctcgaacagaagtacgacagcctcattttatggcctgtgcatgagaggaagctcttgtttgatatcacgaatgctgttcttggggacatgatcacctccgtgatgaacggctgctcgaagggactgatggcgaggtgctcgcctggatggaatcgggaagagtttgctgagctcgtgtggcaaagggtggtgcagctccggcaagagatagagttcaaccaggaagccctgctgttgagcgtagagtgggctggctctgaagatggcgccagtctggtcgggcgcgatatcgggaatatgttgcaagatgatctcgtacaggaaattatagctgactttctgggggcaactaaatccgccaagctccgtggctagaattgccagtgtttgcatccgaggccattgcaagcatatgcatatggattggtcgctggtgaactctagtggacgatgagccttcgatgaattgcttaaggaggggactgtaattcaaggaattcacctcatggctactgaagacatgagctaagatggcttaggtgatggtggggcatcaaacaagcagtgtcgaagtttgacctagttgtgtcatgctcgtcagctcatcaccattggccccgaactcagcaatagcgtacaactggatgatttcccccctctgaactttgaaaatattttttttcattaggttatcataatgctggaatatagatgcacaattttggtgtaaaataatctctggcggattttagtttgtttatcatgggatgcaataaggacagtgtcagttgagacatctttatctgccagttttagttagtccttttgacggtgtgctgagtggcg

SEQ ID NO: 36178 - DNA, 5230 bp, Zea Mays
gctcattgaggataagctgcggttactgatcatctagtcccatgtccaccgccgccgtgctcccgtcgccggcgtcgaccagacacccggccggcggtggcgccctgacggcggaccgcgcagcggcgctactggcgggctgcgcgtccgcaagccgcgccgccgagatccacgccgcggcggtgcgcgccagcgtggaccaggacaaagcagtggccttccggctccagcgcgcgtacgcggcgtccggccgcctggacctagccgtggcgctcctccggcgcacgcccgacccgaccgccgtcttctacacgtccgccatccacgcgcactcctcccggggcctccaccgcgcggcgctggcgctcctctccgagatgctgctgtcccaccacggcctcctccccaccgcgcacaccctctcggcctccctcccggcgtgcggcggcctcgcggtcgggcgcgcgctgcacgggtacgccgtgaagctggcgctctccggcgagccgtacgtggccaccgcgctgctgggcatgtacgcgcgcgccggggaggccgccgcggcgcgcgcgctgttcgacgggatgcggccggacccgcacgtggtgtcggtgacggcgatgctgagctgctacgccaagatgggccagctggacgacgcgcgcggcctgttcgacgcgctgccccgcaaggacctggtctgctggaacgccatgatggacgggtacacgcagcacgggcggcccagcgaggcgctccggctgttccggcagatgctgaggtccggggtggagccagacgaggtgtcggtggtgctggcgctctccgcggtggcgcagctgggcacggcggagtccgggaggtggctccactcgttcgtggcgaacggcggccgccgggcccgggtgcggctcaacgccagggtcggcacggcgctcgtcgacatgtactacaagtgcgggagcctggaggaggccgtggccgtgttccgcgacctcggcggcggcggcgacagggacgtggtggcgtggaacgccatgatcaacgggtacgcgatgcacgggcgcagccgggaggcgctggaggcgttcgggcagctgcgggcgcaggggctctggccgaccgacatcaccttcatcggcgtgctgaacgcctgcagccactccgggctcgtcgacgagggccgcgcgctgttggcggcaatggaggaagagtacggcatcgtgcccaaggtggagcactacggctgcatggtggaccttctgggccgcgccgggcgcgtcgaggaagcgttcgacctggtgcggagcatgaaggcgaagcccgacgcggcgatgtgggcgtcgctcctcggcgcctgccggctgcacaagaacctggcgctggggcagcgcgtcgccgactacctcgtggccaacgggctggccaactccggcacgtacgtgctgctgtcgaacatgtacgcggcggcggggaagtggcgggaggtggggcgggtgcggtcgatgatgagggcgagcggcgtgcagaaggagcccgggtgcagcgccgtggaggtcgggcggcgggtggtggagttcgttgccggggaccggagccacccgcggtcggcggagatctacgccaagctagaggaggtgaacagcatcgcgagggcgcgcgggcacgtgccgcacaccgagctggtgctgcacgacctcgacgacgcggccaaggagagggcgctggcggtgcacagcgagaagctcgcgctggcgttcgggctcattagcacgcctccccggacgggcatcaagatcgtgaagaacctccgcgcgtgcgccgactgccacgccgtgctgaagctggtgtcggaggcgacggggaggaagatcgtgttcagggacaggaacaggttccaccatttcgtcgacgggtcgtgcagctgtggggattactggtgaatgctgctagctcttgtgcacaaagtttgcagaaccaaccaaaaaacaaagaaaaagacattgccatccgtcctaaaattagtaaaaccggaggctttttttttttttgcgctggctggttgcaattgcaaagcagcggcgattaatgcagaccaccaaatgaatggcaagcagggatccctatttattaggccgatggaagcagaagctccagtcagtgagggacgaaagaagtcgcctaattctttcgatcgaattaggcgccttcttcgtcccacgctccgtctttatttgtaatctgaagcttacaggaacatttgagtggatcatggacggattggtaggcctcttgaaagtccgggtggtgaggggcatcaaccttgcctaccgcgacgcaagaggcagcgatccgtatgtcgtcctacgacttggcaagaagaaacttaagacgagcgtgaagaagagatctgtgaaccccatctggcacgaggagctaactctgaccgtcacagatcccagcctagctctgaagctggaggtgttcgacaaggacacgttcagcagggacgacccgatgggggacgcggagatcgacgtggcgccgctggtggaggcggcgaacgcgagcccggaggcgagcctgaggaacggcgccatcatcctgtcggtgcggccgagcgccacgaactgcctcgccgacgagagccacgtgtgctggaggaacggcaagttcgcgcaggacatgatcctccgcctcaggaacgtggagagcggggagattcagctgcagctgcagtgggtcagcatccctcctgctgcagccagcaggtgaaggaaggaagaacaggcgacacgaagcaatcgcattttcacctcttgtgaatgtcggattgtaaacttaatggggtctgggtcagtcagggtagttcatgtgttgcctattaatgtacagttggggacagcatgaaatccaagccaagtcactcaagtgttgtaggatccttcctgttcctgtttgtgtctggtctacaacaaaaatggtgcagtgcagtgcagccgtgcaggggataaaaaggccctccagatccagacaaaaggctggaggagtggtaggataccataccatgtggcacaatggaatgcatgcaatgcaagctgagctgagtatagaacaagcttcgttctcgtcagtgccagtgcacgctgatggggcgggcagttcaggttcagtgctgaatgaattgcaaaagctgcatgatctggcacgggtcgtcgtcgtctcgtcgccggccgccgggggcttctccaccgcaggcgcggcgatatcccaaaccagtggccgttgatccgcgtctcctcttatcctctcccacccaaaattctccacggtcgcaacgcgacaagttcacattatttattccaaacctttctgcctccagccagcagtcagcacagcagcggtagagtacaaatcctcgcctgcccccctgcttcctgcttttcgtcctcatccacccacaggccacagtccactcacaactcccccggaacggcggcggcggcgacggcggagaaacctctcgactacgaggagctgaacgagaacgtcaagagggtgcagtacgcggtgcgcggggagctgtacctccgcgcctccgagctgcagaaggagggcaagaagatcatcttcaccaacgtcggcaacccgcacgccctcggccagaaaccgctcaccttcccgcgccaggtggtggcgctgtgccaggctccgttcctcctcgacgatccccacgtcggcctcatgttcccggcggacgccatcgctagggccaagcactatctcgccatggcgcccggcggtctaggtgcgtacagtgactcccgcggcatcccgggaatcaggaaggaagttgccgacttcatccacaagcgtgatggatatcccagtgatccggaactcatctacctcacagacggtgccagcaaaggtgtgatgcagatcctgaacaccatcattagaaacgagatggacgggatcttggtccctgttcctcagtacccactttattccgccaccatttccctctatggtggttctctggtcccgtactacttggaagaagaggctaactggagcctcgactttgtgaatatccggcaaacagtggcggaggcacggtccaagggaatctctgttcgagcgatggtgatgataaatccaggaaatcccactggccaatgccttagtgaagcgaatataaaggaacttctgcaattttgctaccatgaaaacttagttctgcttgcagatgaagtgtatcaacagaacatttatcaagatgagcggccatttataagcgcaagaaaggttatgttcgacatgggtccgccaataagcagtgagcttcaggttgtttctttccacactgtgtcgaaagggtactggggagagtgcggacaacgtggtggatacttcgaaatgacaaatcttcctcccaagacagtagatgagatctacaaggttgcatcaatagcactgagtccaaacgttcctgggcaaatttttatgggagtaatggttaaccctcctaaacctggagatatctcgtacctgaagttcgctgctgaaagcaagtccatccatgaatctttgaggaggagagcacgcatgatgacagatggtttcaacagttgccgaaacgtcgtgtgcaatttcactgaaggagctatgtactctttcccccaaatacgtctgccaccgagagctattgaggcggcaagaagagccggcaaatcagcggacgtcttctactgcctcaagctcctggaggcgacaggaatctccactgtcccgggctctggttttgggcaaaaggaaggggtgttccaccttcggaccactatccttccagcggaggaagacttccctgccatcatgtcgagcttcaagaagttcaacgactcgttcatggaacagtacgagggctactccaggctgtgagcaggaagagaaacaagagattacagatctgaagaagagattattgattggaagcttattagttattgtaactcccttgaaaagcaggttgtgcggggattattgtttattgaataaaaagtccgccatttgattatactgccataccagtatataattgtgaattgttttgtacttgctggtggtggggagaggtggaaatagctagccctccttgaccgcgcgcgataagaatgtcgcctctcgttctggagattattggagagttgaatagttcataatcaaa

SEQ ID NO: 36179 - DNA, 4157 bp, Zea Mays
ctccagcctcccggaccggaagctccacgtggcgcgacagctcgtctctgtcgtctatggcggcggcagaggtgtactcgccgaccgcggcggcgcagcagcagagggagaaggcgacgtcgcaggtgtggcgggcggtggtggggtggatcggcttccttgttcaggttctgcttcagatcctccggggcacgccgtcctgcgcccaactctttccttcggcggcgtccggtacccgctcctcttcgggcctgcggcctcgaactcgtcgccggaggtggcctccgtccgtccagctctgaggcgggcccatggaaatcgttgccatatcagatcagcttcgccacggaccccatctgcgacccccggtgacgcgctccgcccacagctctgaggcgggcccatggaaatcgttgccatatcagatcagcttcgccacggaccccatctgcgacccccggtgacgcgctccgcccaccgcccaccgccgcccgggaatggctcgagcgctgctcctgctgcgagtagctgtagctcgctaccctcctctcccggcctcacccgcgctcctccagccgcagccgctgctgcgctgccacgcgccctcccagtacaaatcccagctccgcttcctctcctccctctcctcgtccgtgcccaacagctcagatgctcccagcgacggcgggggcgaccgcgacggggaagaagatggcgcgaagagtggcagccacgtcgattacttggggatgagcgacgaggagctcatggagcagtgcgatatgggcacgttcaaggcgtccggccccggcggccagcactgcaacaagcgcgagtccgccgtccggctgaaacaccttcccatcggcatcatcgcccaggctgtggaggatcgatcacaacataagaaccgagcgtctgctttatctcggcttcgaaccctgattgctcttaaagttaggaggccgataaacctggaagactacactccacctgttgagcttcttcagatattacccctgaagtccagcgttagaggaaatgatgttggcccccaaatcggtccaaataactcaaaattttctccaggaatgcaagcattattagacctgctgtttgctgttgaagattctgtatcagatgcagcaaagattttaggcctaagcaccggtgctttgtcaagattgattctgtcagatgattctctccgaacggccgcgaatgaactgcgagcttcgaagggcaccggtgctgtactacgtgctcctgacgttgcaggacagcgtgcacaaggtcttctacgccgtcgtcgaggccgctgcagttcgcgcagacaacagccatcttggagggttggcgaggtatccggtctctgcaactcttccacagattggatccagattattccttacatggggtgtcttctggagttttcctgaggtatcgccactagcaaattttcgtgttttcatatatgacaccatttttaggaatacatcttaatttgtacatgaactttagagtttccaatttataattttaaattttagattagatacatatctatgtgttgttgtttggcgggacctcgaattatgacgcagttctaggtttaatagcatttgctagaactagagaacacatgtgttagatgattatgggacttttaggactaaggttagtcgattatttaattttttattccaataatggaataagaaactatgagtgggtattgtaacaagtttctacagcaggcgtattagaaattgataaatagcgctttttaccctatttcaactgggctgttctattatatttctggacctgcaattggatgttgatgttatgttcttgccataaagtccaatgtatcgtgctagctgtacactgatctgtaacaggtgattgactgactcgagaatttgccgacgcttgaagaaggacctaatgtgagcttttacatacttgatgaacagcttgagctcttgagcaaggtgctgaatgcaggggatgacatgattggtgttgagtgcttagaagaagattgtgatggcaaggttctatttgtttgaggttgcttcaccattccccaaagcacattgcatcttgttttagtgtttttttgattgccgtcgtcgaggccgctgcagttcgcgcagacaacagccatcttggaggtatctaattccaatattgtatgtctcggttgaacttgtgaaggcgttgcaagcacatatcattaactgggatattcatatgtttgatgaggagatcggcaataccactcagggtggcaagtttgaccatgcagatcgtttgttccaaagcattgagaacgcttacataaatagcttatcaaatacaagtgacgtcaaagagcttattccagaattcttttacatgcccgagtttcttgaaaattcaaattcatatcatcttggtgtcaagcaggatggggaacctataggcgatgttgctctccctccatgggcaaaggatgataactcaagtgacgagtttgacaaagattctattgagagtgatgatagatctcttgaagagctaagctgggagacactagaacttcttgtggtacctcatatattcaggtatccaagctctgtgctaccgattaattgctgaaaactgaacttgggttcatgttaaatattcccaaggaaatataattgggcaacggtgtgtgtatatgttcagattcagaaagtgaggacaatatagcgtttgcagcagtggtcgtcgccctgtgcagggagggcctgctgatcagagatcaagagggaaagcagaagacacgttgtgccgggaggaaacacacgacgaagtagagacttagaagcaataagctaaatatttagacaactttaattcgagcactccaagaggtgtctcaaacaactggttaattcgttttatgaccaaaagaggaaaaatggccatctaatagttttgtaaaacaactccctaaagataagcacttgcttaatctccccctcaactcgccaacatgtgtgtgccttctgcgcttgctatttgcttgggtagttttgtaaaacaactccctaaagataagcacttgcataatctccccctcaactcgccaacatgtgtgccttctgcgcttgctatttgcttgggtgcccctcctctggttgtacctgcaccctcctgtccatctcgggaatatatcaaatacaaaccacgttttggtgcaaaccctgtgtaaacctactaaaaaaagtttcaaaaaattctaaaaaaaaacatgaatgtacatctcagcttacctcatctatatacaaaattttatgatcaaattcatcttactctagcagttacaaaaaagacaaattttggtgcatttgaactattaccgtttatcagaaattttgtcttttttgtaactgctaaagtaagatgaatttgaccatgaaattttgtatatggatgaggtaagctgagatgtacattcatgtctttttttagaattttttaaaactttttttagtaggtttacatagggtttgcacaaaaacttggtttgcattcgatatgtttccatccatcttctcctcctgctcgattttttttttgagtttttggaagctaccctcctatctctttccttaaaaccgcaacccctttccctccgcgccctcacttcacggctgccaagaagtcttcaacgcccgacgcgtggccgcacagggcgaggtctcgctcgatggccaggcttggccttcgtgccaccacccacccacgcttcctcaccaccgtggagatggatgtgtcgctgctgtggtggccctagcttctgcgtgggcccacgtgtagatgccgctggagaagatttattagggcgttcgatggtagcctcctcgccccagtacgctgacgtgcgcctcaacactgcccccacgtcccagcagcagcactaagggctagtttgggagccaaaaaactgaaggggttttatggctcccaaactagtcctaagacactaacgtcagcgtgttgctcccctcgtcgaccatgtgggtacgttccccatttgttttctccttccttgtcctcgccgttccccatttcgcatttctacatccgtacctcggcatttcccctaagtctgccttcct

SEQ ID NO: 36180 - DNA, 1918 bp, Zea Mays
cgcagacccgtggacggcgcaccggtccaaagtcaaaagggcaagagggggcaaaaagggagaaatttcctctcacaaaaccctcgccagcttatcccccttcctccctcacacgatctctcctcgacggctaacccggattgccgtctcaggctcgggatccgggcgctcgcggcgatggacggcggcggcggcgctggcggcgcggagggggagctcacggcgcaggagacagcgctctacgaccgccagatccgcgtctggggcgtcgatgcccagaagagactaagtaaggcgcacgtgcttgtgtgtggcatgaacggaaccaccatcgagttctgcaagaatattgttctagctggagttggaagtttatccttgatggatgataatgtagtcacagaggaggatctgaatgcaaatttcctaattcctcctgatgagagcatatatggtggtagatctcgagcccaagtttgctgcgagtctttgatagatttcaatcctatggttcgagtttttgttgaaaagggtgatccatcattaattgatggagaattccttgacaagtttgacattgttgtacttagccgtgcatctcttaaaacaaagaaaaagcctggaggagcaactgaacaacaggagttgacatattctagccttcaggaagctatctctgtgccttggaatagtctaccgaagaagacggcaaaattatactttgctatgagagtactggaggattatgaattatctgaagggcgcagccctggcgaaacaacactttctgatatagatgcagttctggctcggaggaaggatatgtgtgataaaatgtctttgaatgagtctcgtattcctactactctcgtggaacgactgctagcagctggaaagaaggagcatcctcctgtatgtgctatccttggtggtattcttggtcaggaggtgatcaaatcgatatcctgcaagggcgatccagtcaagaatttcttctatttcgatgtggctgacggtaaaggtgtcatcgaggatatcccaccaccaccacctgcaaaataaagcactcagctgcgtaactctcgactcgacttggttcactaatcgttttctgtacccactcagcttcgaacatgtagtagcaacttttagatctagagccatgtgaaaaaaggcaggtttgactttaacccagatgtttagggatttttcgagcagcaaactgtgacagtatgtatgcattgacaatttaaagctgaagtctggaccggtttccatgcttttgggggcggatttcctttgtcgtccctttacccatttgtcaaatttggtagcggtggttgtggggaggggggaatgaagtgagaaggctatgtttataactgtgaaccgacggttgcagctatacatatcgtcatgcctgtgtactcatgtggcatgtttcatgcttgattacaatgcctgttgcttgaatggctccctgcatatgcgtgtcgttgttgctcactgccagattgtttggtcgcattcgataacatagtttcactggtgccagacgaggaacagcaacggtgtgctgaacttgaagaggctgggatgcagttttgggcgaaagtagttgaattatgaaagaacttgttagttctctagccggcaaggttggtgttatcgagatggtgcaactgaatttggacagaacttaccctagtagccatccgaagcagctgtctggaggtgatttctgaccagagactaccccagtgcagttcagatatcagtttctttgctgtagatgcgtcatttctcccggtcagattgtggtctgtctgtgccatgggatctgatccatctgtagattctgtagtatggtgttcctgagaaaaggatcgattagaagcaggaagatccagaccttgtg

SEQ ID NO: 36181 - DNA, 1588 bp, Zea Mays
atcataaatagatggcttgcattgcaacacaagagagatgcttggtcgttgtagccaagttcgaattggcactcgtagcatctattctttccggtccggcggatgatcgatgttgatatgtgcggtcgtcggcataatatataatactcgacatcaaacagctagcactagtagggctgcatatgtcccgtgggctcattgcgtgcctcctgccgtgttcgatcgatcggatccccatacgatctactagcctaggctaagctacacgactcgaccgaggaggaggagcgcgctcaggcccgtatagaaaacttggagcatgtcgttaaccacccaagtgtttgggcctccccggctacagggcggtggtggatctattacatcgtcaacgatactgatcaattgagtaaagctctgaaccgacatgatcacctggtactacctgcctacatacgcggccttccttcccaagtggtgttcatgttctcggcggagtggaacgaaccctgcaaggcgatgaagaaaccgttcagggacatggccagggctagaaagatgcaggccgtattctgcttggtggacatcgacaagcttaaagatgctgtggcgcagcagttccaagtggaggcgctgccgacgttcgtgctgtacaagaacggcatacagaaggagagggtcgttggcgccaaggtggacgacctcagagccgccatcgacaggaacatatgattccatctccgatcgatcgatccattcatgctgcatgcatatacggtcgactaataacaacatgaggctagcaaaagacgacggacgatcggatcgtccaacaataaacaaataacattattattaatcttcatttctcatccgtttgctctctctctgtctcctatcgatgggacttgggacgtcatactagctaattaccaccgctacatatttcatttgatttgcagcgaccccttctattcttaatttgagacgctcggtaaacagtcgactctagaaagaacaaataaataggtctcagagctgagccacccctctactctctaaatacatacatctgtagaggtagatattattctcagcaatctctacctacctttatagacggccgcatcaagtcagaaatagacacaacagcaacagtaagcattttcggcggccaacctaaggctgccaaaaattatcagtttaaaacttatgtttttgcctttatgtctctgctccacatgcccctctaccctcttctcgaccgcgcgctcctctgccccgcgtcaaccgatgccgccctcgtcccgaccgtgcggcgctcgccacccgtccgcacgtccctgtctgtccaggtgtataaaaagaatctcccttaaaaaagaatctcgcgtttgtaataccctgaatttgggatataaaatttcttctctaatatccacaaaattcaggtgttaccttttttcttccctctatagatttttttctcttccttttagtagagttttgattatttatttggagatgtattatgactttagtagattaaacccaagggaagacatgaattgttgcatcattctgagcctag

SEQ ID NO: 36182 - DNA, 2353 bp, Zea Mays
cagatatccgatctcggaatgaggatagtgactgggccatgggaatttgatcgagaaagaaagggaaaggtagagatagtggggacaatcgatttaattgtagctggaacatttctaaaggtattagtaggtgacttgctgcagcaaacttgaacacacaagcaacaaacatatgcttcaggtccttgatgctaccaacaggtgaaaaaaatgcagaatggactacttagagatagctacactatcgatgcatctacatcattttggactatatgggacaccatcagtaatggttgatcttgtctactgtgctttggagttcctttcaactttgcttggagcctttcatgccactgatggagtcatatgcctctgcccagaaattcagtttctgactgaactaaacggtggtggtttgaatcatcgtggttcactggttttcacaatattgggattcttggcaaccatgaggacattatgagattcttggctaccatgaggacaaattgttcaattacattttctacgtctatttcgaagcgtcgatggcggatgtccgcacacaaaatgccttgaagggtctggaggaagttgcaagtttcctgcgtgtccttggctactatccgtgcaacacaataacgatatgagctgttgcgtcacactgtctatcttggttgctccgccttggaagaccagagtgggagatggttgctatttctgctcaagttagcgagaataaatactttgtttcgatggcatatcgttgaataaaaggttcctcttcccttgtttggaagagattatggtcattatacactcccgactgaatatgaacactcttgaaatacattgcgaagctgcagaggatcgtcattagaattgcatgaaggttgtatgcgaaaccactggattgaacaattcgagaaatctacagaggaagtcgtgaacagctatgcacaagattgagtctaaggtataggcatctgatggaggacatgttgtctctactcccgcatatgaaggacaaccaggacaaggtcgagtccaagcagagcaaggggaacacgccgagcaagctgcttgagctcaggagttgctccagctgcctttcttcgagattctggctgttgaccatgcgtcggatgagggcgcgattgtaccaattggttcgcagcatgatgcacatttgaccaaactgatgaatatggaaaatgaccaacctttgttgccggcaccaccagttaatctggaatcagccatccttgagcaaaatgcaaatatggtggctctcaaggaaggctgttctgtgggaagtgagctgccacctggtctgcagggtaattttggtggtaacaaagcaaacacgtgtacttcagcactgcattctattgatgaaggtgaagaaataacttgtggtttcattaaacatgagaggagttatgatttacagaatttgactatggataagtcaattcaagtgtctaatgaaacaaagtacaagtttcttgctcataagcccagagtaggctgtgaaactgctattcaaaactgtgagttggcttctgcattgccagatacagaatttcatggccctgttgcaaccatttcaactacgggtcaatcagaaggatctgacactgagattaatgttccaaactattctgacctagaagcactgatacttgatctggacctgattccatgggatcaagaatctgacttcatccaaccagaagtttcaaggtttcagtatcctgaaagcaggaaggatttgataagattagagaaaggtgtctgctcttatatgaaccgatctatcatgtctaagggtgctttcgcaattctttatggccaacgcacgaaatactacataagagagcccgaggtaagtcttgggagagaaacagaagaagtacatgttgatatcgatttgagtaaagaaggaaaggcaaacaaaatatcccgtcgacaggcagttattaagatggacgatggtggatctttctacataaacaatactgggaagttttcaattttcgtgaatagcaaagaagtaccctgcagtaaacgtataaacttaatgtcagactcattaattgagataaggaacctgaaattcatttttcacgtgaaccacgaggctgcaaggcaatacatagttcgaaaaaggagaggaagctcccaaggcgggatcacggcgtttgattggagtcagaacccatgagtagttaacgttatgatcaaggttgtttataatctgcgatagctacctctctcttcaagaaagtattggataagcgtaaagttatttataatttccgatagctaatatttctctcttccagttagcact

SEQ ID NO: 36183 - DNA, 400 bp, Zea Mays
gtattgatcaactttgaagaaaagtgacaccatacatgaagcgattttttggttaatgtaagttcgttgagacttttttgcgtaaatttatacttggcaaatattttgtcgagtgtttttctagcacttggtaaaacagctatatgcggtaataatatgtcaattgtaacctgcaactcgctgacgaccgccagattgccaatcaccctgctaacgtgctgtagagatctgccgcccgaccaacgagcgacagttccctggcgccctcaagacgaacagcagatactgatttgtaaaaaaatagaagaattatgtaaaggtccttaccgctctacccataactacaaatcagttatttttcaataaaaaaggaaaatgttacctttaatttggtgggtgg

SEQ ID NO: 36184 - DNA, 799 bp, Zea Mays
gtcggtctcactcctcctacgctaatgacgcatagacccgaggccactatagatcttcctatcaccgggagcgcgctggcgacggaccggccctggccgaaatcctcgtgggggccagctggcgacgcaaccaccatcccacctcggctacaaaagcggacacccctgccgctcctgcagatgatccccttccgccgtcgcactaagagcccaaaagacatcgccgccgagcgccattaatagaggaaagctgccgccggtgaatctcatctatgccaacgcccccgtcttcgacgcaccgccaagcagaatcacctgggcataggaaagccgtccgtgcccttagggtgaatcaggagtcttcgggacgcgtggaattccatgtcagttggccgggaagatcaccgccgcgtgcatcgtggcgggcagctccaccctcaccgacatagcgagagaagaacaggtagcccaggaggaggtctagtacaaggagtacgagcttgtctttgtggcgtctcgcagtcagcttgatggcgccaaggaataattatttgttttctttattgttatcatttatttttgtaagacacttccactatgtaataatggttgtgacatttatcgctatacacttggtcattatatgtgttgttcttctttggcgtacatatgagacgcacacggctttatcccttaaatctgggtgtgacaatgtaagaatggctaagtgttgctagagttcaaataagagtcccatttacaaaggggttgtccccctttatagatcaagggagaggga

SEQ ID NO: 36185 - DNA, 2686 bp, Zea Mays
atcgccttcaccgccacacgctgccacgcgccatatataaccagccgttccctcctctcatgctcccctttccaaatccgtctccgccctcacgcacgcggcccaactagcctaacaaaccctagctagatttagaaaaaaaatttgtccccaatccgaaccgacgaggagctcgccgccgtgagatgtccgagtacgacgagcgctaccagggcaacggcgacatgcccgcagccgaaggcggctatccgcaggccgagtacgccgccgccgccgcgcctgccgccgggggttcgccgcccgcagacagcaagccctccgggttctccgaccacgccgacggccgctcctcccagcaccagcacgagacacaatcacatgacagtggttcctcgaaatctcgagaaagggaccgagaacgcgataagggcaaggatagggagcgtgacagggatcgtggccgagaaaaggggagggaccgagacagggataaggatcgtgaaagaagtgacagagatcgcgatcgccaccacagggaccatcgagagcgcagcgagaaaagggaacaccgtgatcgttctgatgatcgtgaccgtcaccgtgatggtcgtgaccgccaccgtgatgatcgtgattctgagaggagaagagatcgtgacagagatggtcatcgtaggcatcgctcccgctccccttctaagagtcgtgaccgtgaccgcagatctagatctcgttcacgctctcgatcaaagagcaagcgcgtgagtggttttgaccaagcacctccacaacatgcacttcctattgttgctgctggtgctatccctgaaggcaaccttggcgcactttgtcacctgctgccaatggattgagctgactgctgtagctttgatgtcagcttcctggtatcactgctcctattcccggggttggggtgcttccgaacttgtataatttggctgcaggacagttcaacccccttgttattcagccacaagccatgacacaacaggctacccggcatgctcggcgtgtctatgtgggtggacttcctccaacagctaatgagcagaccgttgccatattcttcaatggagttatggctgctattggaggaaacacagctggtccaggtgatgctgttcttaatgtctatataaaccatgacaagaaatttgcttttgtggagatgagatctgtggaggaagcaagcaatgcaatggctttagatggcataatgtttgagggagcaccagtgaaggatcttaatgtcaccgacattgcctgtgctgcccttaatggcatcaagatgggggacaagactcttactgttaggagggcaaaccaaggagcttctcagcctaggccagagcaagagagcatcctgctgcaggcacagcagcaggtgcaaatgcagaaactcgtataccaagtcggaggtgccctgccgacaaaagttgtctgcctgacacaggtagtgacagcagatgaactgagagacgatgaggaatacaatgacattgtggaggacatgagggaagaaggacgcaaatatggtaaaccgcacgaggcccatcgagttctcttataccttctttgttttaaaagctcttacattcagctgttatgattatgattgcctaccctcagttactgaattggtttccttttgtgtttttgtcttttgtgtgtcttttttgtagtcccacataatgccattgcagagtgttttatagtccgaccctatgcaatattggcaatcgggctttaacccacagaagacactattcttttgagtttgattaatcattatatcattagcctcttgcctatatatctctactcactaacacttggacaggtaacttggtgaaagttgtaattccacgacctgaccccagcgatgctccagttgctggtgttggaaaggtgtttttggaatatgcagatgtcgagggctcgaccaaagcaaagacggggatgcatgggcggaaatttggcgggaaccaggtggtggccgtgttctatcccgaggacaagttcgctgctgagcagtatgactgaaagttgtagaacctgttctagagttgcaacacacaatgtgtgtgttttttttaaaatctttgagggtaccgttttctcttgaatttgaatcttatctagttataagtttggtgcaggaccagtcgataagcgataagtttgtgcaggaccattaggctttgtttgggtaattagtattgatcccaatccaaatctatatatgttaatgccttgttcagttattcttattccatatggattggagtgtatcggaatgagttttgacttgctatagatttaaacaaactcaatatcatccattccacatggattgacgaagaaatgaacaagccctaaggccttgttcggttattgatattacatgtgtattggagtgtattgggtggaattgagatgaattttgacttgttatagatttaaaccggctcaatcccacccaatacatgtagattatcaccaaaacgaacaagccctaaggtggattggggtcaatactagagtacccaaactaggccttagttggagggtttgtacttgctactagggcagctaagatgaattcattcgctgtttgttctgggtccattgtttgctcaaattaacaggtgttgttatggtgctg

SEQ ID NO: 36186 - DNA, 3620 bp, Zea Mays
tccactccaacccagcccgcccggctaaaaccctcccctgttctgacttctgatgttcgtcctcacagccaccaccagcaccaccacggccacctcacttctcctccgatgccgtccactcccctcgcctaaaactgtaacacttgccacgcctcctgctatcctccccttctgcatccgctcccgcttctccgcctccgcctccgcctctgcatcctccgtctctccccaaagccgtgcgaccgcggcagccgctgcaggcaaatccagggagaagaagccgccgaccgcgagggcgaagcgggccgacgcagtacctgcagcggcggcgcctggaatgtcggcctccggtggcggctccgctgggaagcgcacggtggcggacgtgctgatggggaacgcacgggccgccgccagcaaggcgaagaaagcagcgccgtctccgaagaagccgcaggcgaagaccgacggcgcagaggtcgaaccggaggctgcagcggtggcggagaaaccgccttcgccggcgaggtccaagcgggcgtcgtccccagcgaagtcccccaaattgctgcctgatgggtctacctcgtcggctaagtccaagggtccagccgcgctcgctcaattggatgcggcgaaggagaatcccccgtcgccaaagaggtccaaaaccctagccgctaaatccgacacccagccttctggtgaaggtgttgttgggcttgggcacaccgatgggaagaaggggtcaccctccccgaccaaggctaaaggccaagcttcccaatcagaggagaagaagcgggccgcttcacccaagaaggcgaaaaccacagattccccgaagacagagaagaatatcaccctagagctaaagaagaaaggcagtgagtttgacccaatggctgttgcctattggaagcctggtgaacccgtgccattcctgtttctggctcgcgcacttgatctcatctccaacgagagtggccgtattgttattacagaaatcctatcaaatgtgtttcgtacagtgatggcaacaacaccggatgatctccttgcaactgtatacctctcagccaaccggattgcgccacctcatgaggggattgagcttgggattggggatgcatcagtcatccgtgcacttgcagaggcatatggacgcaaagaggagcatgttaagaaggacctcaaggaattgggtgatttggggcttgtggcaaaagcaagcaggtcatcacagaagatgatgtttaagccaaaaccactgacaatagctcgtgtgcttagcactttccggacaatcgcaaaggaatcaggcaaagacagtcaagataaaaaaagaaaccatatgaagggacttcttgttgctgcaactgactgtgaaccccagtacatcacacgccttcttcagtcaaagatgaggattgggctagcagagaaaactgtccaaatggcgctagggcaagctgccgtatatgctgacaaaaatcctttgccaccaaaagttcaatcacctttcgaagaggctgcaaaaataattaaacaagcatattcggttcttccgatatatgataaaattgtcccagcgatactcgaagtaggagtttggaagcttccagagacatgcaaattttccataggtgtccctgttggccctatgttagcaaaagcaacaaaatctgtctcagagatcatcgacaagtttcagggtcttgaatacacttgcgagtacaagtatgatggtgaaagggctcagatacattgcatggaggatggttcagtagagatttatagtcgcaatgctgaaagaaacaccggaaagtatccagatgttgttgatgcagtttctagattccgtaaggctacagtcaaatcatttgtcttggactgtgaaattgttgcctatgatcgtgaaaaacagaaaattttgccttttcagatacttagcacaagggctcgcaagggtgtcaccataaatgacatcaaagtttcagtctgtacttttggcttcgatattctttacataaacgggaaacctcttctccaggaacaactcaaaattcgtcgagagcatctttacaactccttcgaagaagtgccaggtgtttttaaattggctactgcaattacatcaaatgacctggaggagatacagaaatttcttgacacagctgtcaactcgagttgtgaagggttgattatcaagacattggataaagacgcaacatatgagccagcaaaacgttcaaacaattggttgaaactgaagaaggattacatggatagattggagactctttggacttggtacctattgctgccttctacggtagaggaaaacgaacaggtgtctttggatcattcctcctcgcatgctatgatgagcagaacgaagaatatcaaacaatatgcaacataggtactggattttctgagcaacagcttgaagaacgttctgcgagccttcgaagtaaagtgatagaaaaaccaaaggcatactatagatttggcgacacaatgaaccccgatgtgtggtttgagccatcagaggtctgggaggtcaaagctgccgatctgagcataagccctgtacatcgtgctgccaatggtatagtcgatccaaataaggtctgtagttcttttttgcattgccattcctccccatctcgattgtatacttctggtatagtatgttggaaggctaatgctgaaatcgaaccagggtatctctctaagattccctcgcctattgagattacgtgacgataaaagcccagaacaagccaccacgtctgaccaagtcgctgacatgtaccggtctcaaaagatcaaccacggttataaccaggaggatgaggacgatgactgatgttgacttaattcttgttgctggatgggatggttcactgtgtaaacactagtcttcgcagtttccagcttgttctcaaccgtaacctgttgatttaccggttcctgtttctatgatcaaatgaacaggtattgaccggagattgcattttcagttgtttggttcgtcctgattcgaacggcttagggtatactccgatttgtgcatttgctttgcgcacaacttatccccacgaacccgcacgctgtctttatgaaccagcagcagaggcgatcttcatgcgttggcgcttggcggtgcgttctggggctgcttggattcggatacatctggcattttgagcgcaaacctgcaggcagggacgtcgggtctggggtttcattagcgtcattgcagagatcacaggcaccatttttctccaaagaaagatcactagctagacaacatcatcagcacagcaatgttcttgagatttcttcttgcacacacatgatgcgctcttgaacgaagagcctgcaagttaacaaattcactctcggttcactggccaaagaaacataattggtggaactcatctgggctgtcttccgcgcactgctgcactcctcagaaaggacatcatcagtttgtcactgatcagcgaaagtcgtggcggcgacacgcctttcactcctcgtcactgaaacagcagcaaatctctcacacggtggcggatggagacttttgatatggcatctgaaatttt

SEQ ID NO: 36187 - DNA, 1031 bp, Zea Mays
aaaagagtaaacaacccccctcgaacctttcagttttccctgtctgtcttcacttcatgtatctttgtttagagaccttgccttgttggggcaggggacttgggacgacagagaggggagggcggagttggtgagcgtgctcgggatcagcgggtgacctcagaggttgttgcctcggggggcggggcaattctttagcacccaatcttccagatgtctttcgactcgctgctgctcttttggttggtatccttggatctctgactctagactgttccacgaaatctccagtcctttcttcctcttggaggaggagggctgcggcctgagcaggagacggagacatgggtagcttcgttaaactggcgaggagggcggtggagacggacgcgccggtcatggtcaagatacaagaactgcttcgaggggccaaggatgtcatgtcgcttgcgcagggagttgtttactggcaacctcctgagtcagcaatggctaaggtcgaaaaaataattagggaaccaacgctcagtaaatatggctctgatgatggtcttcccgagcttcgagaagcactttttgaaaagttacgcagagagaataagcttactaagtcatcagttatggtcactgctggtgcaaatcaagcttttgtgaacttggtcctcactctttgtgatgccggtgattctgttgtcatgtttgcaccatattatttcaatgcctacatgtcattccagatgacaggtgttactgacatattagttggtggttctgatcccaagacacttcatcctgatgttgattggttggagaaggttctgaaagaaaatgaccctatccctaaacttgttaccgttgtgaatccgggtaacccctctggagcttttattcccaggcctatgcttgagaggatttcagatctgtgcaaaaacgctggtgcatggcttgtggttgacaatacctatgagtcgaagttgtcgatggaagaccaaaaggtcgcgacgacgatatgaagacaacatatggcactg

SEQ ID NO: 36188 - DNA, 1459 bp, Zea Mays
cctttgatctgcaagagggtctagcactgctaatctcctctatccaggctctgctagaactggtggaagcagtttgtacgggctaaccaagaagatgtggctgaggataacgctatgcttcttcctaggtcctatggtgattgtcatgtacccagatagtcattggtaatcggagctccgaccgagggactgcaaccgtgctctgtgaccatgtccaggtcgaggggttcagctcgggagccttctctgacctcgtcatgagggttcaattcgatttgcatgtcattgcaccaaacaagtttatgcttcgtctgcagccacctgacttcaagacaaggaaggtgatgagttgcataggaactccgatgtgctagaaatcctcatgaataccaggtttctaatggtctatgtgcagtatgagcgttcactagaaacaatcataggacacgatcaaatcatctggctcgggggcctaaattaccgaatcatgctttcccatcagttagtgaaggcccttgtcgagatgcgcaattctagagaaagattaggtgagagcttggtaaccctcaggtttcttttggttacccagtagtccagctaccaacacttgaaacaagctcttcagatgagaagcagcagaagcaacttttctttagaatctacttggtttctaaggattgtcagcatcataagttttccgccacatcctttcttataggccttgaaaagtcaggaacggccctgacactgacattctctcgtctgcgcggcgtacattctcctagccgccatcctcaccatgccgctgcggatcccgcccgcggtatgactccctcctcacctacgtggccacgcgcgacgcagccgcaacgacctaacccccatgtcgtcgctgacctcgcgtcccgtctcgctgctacgatgccttcgtggaagcttgaagggtgatggtttttgcattatcggttctttagcgtgtcgactgtatattttgttgaaccatggctttcattcaagatttttgaagatctatctagaacttccaccaatagtccaaccattacaaatggaagaggatctagagcaactgaaagtttttgaaaacagctatcggatgaaggtgatcaaagtggagcaaaatgcccgtggtgtggatgcacctgaggtgcattgagaaaatcgaagcgctgacgtgagcgagaaatatccagtagaaaatgatggcagagcgagtgctttgcattgctatcagtgtaggcttgataggagacttttggttgtgatatcttattttctaaatagtatgataccagataggggggccgtaagggcgccttttgctctagtattaggctgtctccagcaacgtctcctaaatttcgtcctttaaagtaatattctttatcatttacagcatcctctaaaaaattcgtcctctatattttcttcatctccaaca

SEQ ID NO: 36189 - DNA, 935 bp, Zea Mays
ttggaacagaagatttgataatttctataaactcaactctgcattcatcactttaatcctaaagaaagatggaggcatggagctgatcaggctggttcaatgcattgggttgttgacaaagtccctgatcaatctctactgaacacagctaattggaaatttatcattcctcgtttatactggaattacccaaatgacgatatactgctaaatatctcaatggcctcatccccggtgataagggttacatcagaaaaaattgaagctaccattaatggagacatgataattgatgttgtagataacaaggagatagttccagttgcatgcatctcagtgattgtcagtgcttcaggtgttgtggatgcatcaggcaataaagtatatggtagagttggattagataatttctcccttgcgttgaagtggagtaaaattggcaacttccatatgtctttgattcagggagtgattcgggttctcctgaacacagtatgcatgccgtatttgaactcacggcttgggaatggattgatcttgcccgtggtccatggtttcacacttcaagacgtctacgttttaacctctgctgagcagctgacgctttgttcggatgtcaccttcaacgcaagcagcatggcgagtttattatgatacagggaagtgcgtgtctggcgtatttcatttagcgttgaagtacaacactcgcacatatgtgtacattatattgtacatactacacaacatctcgttataaatattgtttacattcaattctaccaatccatgaattcaaacatctgtgtacaatatcttaggtaatcaaagttatccacagcacaaaatcctgtacagctctggaatgggggctggataagataaacagcttatattaatccttatgaaactaggagtaaaggaatcgtaaaaaaaag

SEQ ID NO: 36190 - DNA, 1371 bp, Zea Mays
ctggggcccaaattaggagaacctcagtaccccacgtgatccacggtccgcccgccgcgcaagctgggccacgggctcgcgggcgggcatgcgccggttccgcgagcgaccaccccgccatccgcggagcctgccctgcgctgcccaccgctcctccgcctactccggcctcagctaataacgatgggtggtgggagccgagccctttccctctcctccctctgcgccaccaccctcgccgccgccaagcccccacagcaccccgtccccttcgccccggctcaccgcgcgctcccccaccgcctcgccgccgccatgtcctcctcttcctccccgacccccgccgcatcggtggacgccggtgccccggccccttcggcgtccaacgccatcgacttcctcacgctctgctaccgcctcaagacgaccaagagggcggggtgggtgaagcgcggggtgcaggcgcccgagtcggtggccgaccacatgtaccggatgggcgtcatggcgctcgtcgcggccgatctacccggcgtcaaccgcgacaggtgtgtcaagatggcgattgtgcacgacattgcagaagcaattgttggtgacatcaccccttctgataatgtacccaaggaagagaagaaccgcagggagaaagaagcattggaccatatgtgcgagctgcttggtggtggttcaagagcacaagaaattcgtgaactttggatggagtatgaggagaatgcgtctttggaagcgaaggttgtcaaagattttgacaaggttgagatgatacttcaagctctggagtatgaaaaggagcaaggacgggaccttgaagaattcttccaatcaacagcagacagacttgggaaaagcatgggcagcggagattgcatcgagaagaaaaacaaagtgatcaaacgatgctcattttaccacgtcggttccaagacaacttgctggcacagcatttctgttgaactttgcttttactagatgatacttcgaggtggcattgagacgtagggttgccttgggaatgtgaacttcaccacatttcttggtcctgccctgaccctgaggcatattgggcttgcgataccagggctctagataagtaagataacccactttgggtattggttgtagatgctcctgccaagggcagttagctggatccaacgggaaggttcagcaccagctggtggtgatgtaaaatccttcacttcatgaattactgtaccattaccgtttctcttgttaatccagcctcacggtttcggccttttttaatgtaattctattgttttcaagtataatgagcctgaatatttgctatatccattttggttgttgatgatgacctgaagtgca

SEQ ID NO: 36191 - DNA, 310 bp, Zea Mays
ttctgatcagcttggtgttgcgtctgaagttctgtcacctgatgctttagtccaataacctgttctgcttgaacctttgtttccttcagtcgttcttgtgcctgggtacaagccctattcttggccgtttccatcatcttaaatgctgcataactcccagtgtacaactgctgccacttttgacgactgtgccctcgagtaagttgcaactctagcacggccatcaaaactcgagcagatgccgattcagcagaatcctgcccaataggaatgctttccaataatcgggcctggtgatgatacaccaatg

SEQ ID NO: 36192 - DNA, 3188 bp, Zea Mays
gggcaccgggcgcaccagtgcaccaccgcatacggccgtgcgcttcctttccttcccccgccgccgcagatcttccccgcagtcccggttcccgttcaccacctccgaaccagaggaggaatggccatctactccttcctttctgttcgcaagcgcccagttgttgtcgtcgccgccgtcaccctcttcattgtcgtatcctctctcttcctcctcttcagccccgcaccgacagcgctcccgtttttctcctcctcctcttcccacctctcctctcaagcttcaattgctgccgtctcctctaacgcatttccacctgagaccccaacctctgttgtctccaactgggtcagcagcaacacttctgctgatcgcgtctctgctgacgcatctccgcccgtagtcggaaccgccatcgcgtctgatgcggtcagcaacagcacggctgacccgcctaggccagataccaccgccgctgctggcgacgcgaaggctgatgtgtcccaaccagatcacggcatgccccctgccgccactgaagcgagtggatcggcaggcaacggtgagacagccgcgggagtctcgagcgagagggatgaggaggggcaaggcggcggcggcgccgtggaggagctaccatcgtgggagctgtgcaaggtggggaagggggtggcggccgcggactacatcccctgcctcgacaacgtgaaggcggtcaaggcactcaagtcgctgcggcacatggagcaccgggagaggcactgcccgacagatccgaggccgaggtgcctcgtgccgctgcccgagaggtaccggcgtccggtgccgtggccacgcagccgtgacatgatttggtataataatgttcctcatccaaagttagtggaatacaagaaggaccagaactgggtcaggaagtctggtaactattttgttttccctggaggtgggactcaattcaaaaatggcgtggcttcatacattaaattcattgaacagattttaccaaacattcaatggggaatccatacaagaactgtccttgatgttggatgtggtgtggccagctttggtggatatttgcttgataggaatgtcattaccatgtctgttgcacccaaagatgagcatgaagctcagatacagtttgcactggagcgtgggattccagcatttttggcagtgattggaacacaaaagcttcctttccctgataattcatttgatgtcatccactgtgcaaggtgtagggtccactggtggaaaaccattgttggagctcaatagagtactcaggcctggagggtattacatttggtctgcaacacctgtctatcgcaaaaacccaagagatatagatgattggaatgcggtggtagctctgaccaaatcgatctgctggaggacagtggtaaggtctcgagatatcaataagatcggagttgttatataccaaaagccgacatcaaattcatgctcccttgagagaaaaaataatgaaccacctctgtgctctgagagtgatggatcacgtttcccttggtataaacctctcgatagttgcctctttcctgcagttccgagttcaggtgaagggaatagttgggccgtctcgtggcctgaaagacttaatattaagcactcggctacatctaacaattcttccattcagtttcctcaagaaaaaattgattctgatacaagttattggaaggaccttgtttcagaaatatatctcaacgaatttgcagttaattggtctagtgttcgcaatgttatggacatgaatgcgggttttggagggtaagcaaaaactggtttgagatctttatgcaaaattaatttagactagttgattgtatcagctgttacaacaacataccttttgaaatgtctaactttcacttcttctgcctggatcttgtttgacacttaattcagatgtgtcagacagtcactcaatcagaatcactaatttgtaaatatactgacactatggttttcacttttttctggcatagtttttttttctggttgaagggattaatatgcagattttttcaacagttgactttgcaatccttggcttcaacttatctattgttaaacggggtacactgtacatagttgttgtttagaagctgtcagtcagctttacatagtcctggattgtgagctgaggtacccatacctcattaaaatcaagtatttaactttattcagaggacatatgatgtgcttgcatgattcttagggtttatatttgatactacacttagtttcagcttttatttacacagattcttcttttcctaaattagtcataatttatgtcctccatctgtggtactccctctgccccaaattaaaatttgttttagattattaatggattcatacaacacttgatgtatgtgctttatatatgtgtctaaattcatcatcacctatttgaatatagacattgaaacctagagctaaaacgaatagtattttgggactcagggagtaactggtaagacattgatcatgactgtttccttaaatcagatttgcagcatcaattatcaatcgaccgttgtgggttatgaatgttgtacctgttgatcagccagatacattgcacatcattttcaacagaggtctgattggggtatatcatgactggtgtgaatcttttaacacatacccacgaacttatgatcttattcacatgagttatctcttagggccccttacgaaaaggtgccacatcattgaagttgcagctgaaattgacagaatacttagacctggtagatggtttgtgctgcaagacactatagacatgataagaaagatggaccctgttctcaggtctttgcattacaagactacaattgtcaaacatcaatttcttcttgccaccaagggtttctggcgccctggcagtataggttcttagtcatgatgattccggcttccacccaaaatggttggcaatgtgaataggctggaggaatgtgtgtagctatattggtgccaacaggtgaggagagggcatcaattaccattttaccagaactcacttgtttcccaagctcatctatctctttcccactgctatttgttgttcttcctcgaatgtattctggctatgaacattgtggagatttctgaactctgattacagctaccccgtttcccaa

SEQ ID NO: 36193 - DNA, 3374 bp, Zea Mays
ctcgtctctcacagtcacagcatccttccttgcttctcgtctcgtcgcctctcggagatcagaaagagaacaccggacacctagcctgcgcccttgccttccctccgcgcgcgcgtgctatctatggcgatggaagacgtcgcgggtgcctcctcctcctcggtggcggccgccgcctccgaccccacgcacggctggcagacggtgtcgtaccccaagcgccaccgcaagcaggcgcatcagccaccccgcgccatggctcccgatctggcgctgcaggccaacggcaaaggctccggtgtcttcgacgccgtcgagaagcgctcccaggagcgccaccgcgcgctgcagcagcagctcgcatccagggcggccgacctcgacgacgcgcggatcgccccggtcacaggcggcgcttactccgacgactccgactccgacgaggccaccgccccgcgccaggtgggggaggtgaagaagcctaagaagcctaaaaagcctaaggtgacggtcgccgaggctgccgccctgatcgacgccgagaacctcgcagcgcacctcgtcgagatctcgtcatcatacgagaatcaacaggacattcaactcatgaggtttgctgattactttggccgggcatttgtagctgtaagcgcatcccaatttgcatgggcaaagatgttcaaggaatcaacagtgtctaagatggttgacgaggtttatgttttcatgttacattactgtgctgtagtcgcacgtagtgatgtactcgagattcatgcttggtgccaaaatttggaaaatccatgcattaatgtcttcggtttgagaaaccgttatgacacttttgtcgtatcttaacgaactgagagaaccaaccgaggtaagtgtttgaggacaccctattattatagtcaattgtgttgcagtgtactgctggatcaagttatttaattaccatatatttttaagaaacattctctatattaggatgaagttatagtccttcatgggtcacattgatttgttattatgtaattctacaatgctaaaatcttatctgcttgtaattaatgtttctgtatactgatagtagttggcactgttgttctggcttcatgagcatgattgttttttacattacactacgagattttacataataatgcctctgatttctttttcttggtcaatttttttgtgtgcgtttaactagttactgtgtcgagcagatcccactgtgccatattcctgaggctgtcatcaagactgcgagtgattggatcagtcaaagatcttatgatgccctgggagactttgttttgtggtgtatagatagcatcatgtctgaattgtcaggcccatcagcaggacctaagggttcaaagaaggttgcccaacagtctccaagggcccaggttgcaatctttgttgttcttgccatgactttaagaagaaagcctgatgtacttgtaaatgttatgccaaagataatgggaaacaataaatatcttggacaggaaaagcttcccatcattgtctggtttattgctcaggcatctcaaggtgacctagtgactggcatgttttgctgggctcattttctatttcccacgttatgtgcgaagccaagtgggaatccccttgcaagagatttggttttgcagttgcttgaaagaattttatctgtcaccaaagctcgttctatcttattgaatggtgctgttagaaagggggaacgcctagttccccctgtttcatttgacttgttcatgagagccacatttccggtttctggtgctcgggtgaaggtttatttctcatccctgagatcctcttagtaaacattcgtgagtcatgctctgatgacctaaagcaattctgtaggctacagaaaggtttgaagtagcttatcgaacaatcaaggagttggctcttgccggttctcctggctctaaaactgtgaaacaagcatcacagcaacttttacctttgtgtgcaaaagcaatgcaagaaaacaatgcagagctcaccagggaggctgttgatgtgttcatttggtgcttgacacaaaatgcagagtcctacaagcagtgggaaagaatttatcctgaaaatactgaagccagtgttgctgtcctgagcaaaattgtgattgattggaaggatgtgtctcctaagctcagttctgaagctctcaaggcaacagtgaagaacttgaaggctaagaatgaggcagcgctggagtcagcaacagatgctggaaagcaggcatctatcaagaagcagacaagcactgcaagacttgagcaggggtcagagcagctgctcggaggccggcctggccctgccctgggtgtgctcgccactgtcgcagagtgctcagtggaacccgcggcacaaactacaaagggacctgactcgaatggcagctcgtcacctctcccacctgtcctccccagcgtctgcttccctcctcggccccgagccatggcgccctgcgcgtccccgtccgccctcgcgctctccgccagcacgcgggtcagcagcttcccactgacgctgcgcccgcggccgcggccggaggcgcgtgtgccgcgcgcgcccggcggcgcccagctccgcccggcgaccgcgtgctcttggccgcgccccttgctgcccgagctcgcgccggcgttccctcgtgccggcgcccgcagcgccggcagaccgcagccgctgttccggccccgcgcaatgatgacgacgtctcagatcgccagctgcgccttcaccgtgggcacggtcgccgtcctccccttctacacgctcatggtcgtcgcccccaacgccgacatcaccaaacgcacggtggagagcagcgccccctacgtcgccctaggcctcctctacgcctacctgctctacctgtcttggacccccgacacccttcgcgccatgttcgcgagcaagtactggctccccgaggaatgggatgcactttgcagctgccgggcatcgtcaggatgttcgcgagcgagatgaccgtcgcctccgcatggatccacctcctagcagtcgatctcttcgcggcgaggcaggtctaccacgacggtctcaagaacaacatcgagaccaggcattcggtctcgctgtgcctgctcttctgcccggtcgggatcctggctcatgtggtaaccaaggtattggcaggggcagctggccgctcacattgatgattggaattgggtggttgtatctaggattcccgttttgtttagctggtggagtttatgagatctggatatgaataaagcttgttcaaggcactgattctttcaatgtggggtcaccttaaaggaaagaaattagttagacaaaaaaatagtttaaat

SEQ ID NO: 36194 - DNA, 906 bp, Zea Mays
agggggacagggggtgagtttttttgctttgcgtcggcggcagcagggcaaaggcaaaggcaggatcttgttccattcaccggtcgccacgctcgtgctcacctcaaccagcactgcagataactttttactactaggccgggatcacgatgatctaccgctgcgctgcgcgatcggtactagtatttgccatcttggcaatgcatgcgacgacgttttaggcgctgacgtggagagtgtatgtatatcactgacctagcgtggcggagcggaaggtggtggagttgtcgaccacgttccggctggccttgatcaccgtcctccacatgccgtcgccgacgaacatcaggtccggccccgggaccacctgctgctgctgcagccgcctccggtccgcccccgacacccacgacgggaacccgcgccgcacgcgcccgtacccctccagctccagtgcccctctgccctggcgccgccgccggcgctgcgggagacgccgcagcatcgccagggagttggacacgaggtgggccacgtggtacatgcggccctggatgtagggacggacgcggccgtcctccgatgccgacggccccgcgaagccgtccaggcacgtgtactggttggtcagggcggccgacagcacggtctggaccgccgccaaggactcggactccacctccgcctccgccgcggtgaagttccccgccgacagctccgcctccgccgtgcccagctgcgccagcgtgtgccccagcagctccacgcagtcggccagcgccaggcggtcgcgcacccgcagcgcccccgcgggccgccggaggtacgcggagcagttggacgccgacgcgcgcaccgccgacgccgcgcgcgccaccacggccgagatcacctcgcgggccggct

SEQ ID NO: 36195 - DNA, 1528 bp, Zea Mays
ccccgcaccgcatggagctccattcgcctccaccatggtgccactgcgagcagctccgccccctgcccccccggtcggcggatcccccaccccgccaggtgctctgctaaggcccaccacagtgccagcaactccaccacccccttcctccgctgttggcggttcccccaccccgctaggagcaccgcccaggcggacggcttcaccttcaaagcccatgccacgcagccagcgtcgggatcacccccacctacacccctcgccagaggaccgcccccttgatgccagacagccaacggattcacccccacgccctccacgagcctgataaaggatgctaaaggtcgcggcaagtggctctactgccactccactccgcggcggtgccagcgttgatgaccacctctcggcctactgctacttcttctccagcatgggtctaatccatgtcgcgatacggggtttggacattttgggctaggttgttcagcatgggtctggtgaatgaaggcatcgacatgaaggagggaaacctagagatcggcatagcaattcttttgcatgacgattagtttttttttattaatctgtgttagatcttcaaatacacgcaatccaatcttgaagatctggttaaataagtatgctgcttgtaccataaaccgtgtgcgacgcaaatttcagtaagtgcattttgctgatgtattgtgatagtagaccgaccttccttctgcagagtggaaccaaaggtatttgatgagttctttggcatgccacatagcagatttgaccgggaagcttgcaggtctactatctgtcctgatttttgtatctgtgtgtcttccttcatgttcaaaatggtgattcagtttatatgagagtattgtcttagtgtttgtgtggataacatcaatatggtgtacgacgatgagtttcctgaacttagtactttcaagtgtgtgacaagaaaggaaagtagcaagctggaaagcaagaaccaagataaattgtttgatgcatatatcatgtatggttctgcaatacaatctacaacacaccagattatatgtgaaggtcagattttatcatctcagatttgttgatttcaatattttatggagtccctatggtttgccaacttcactaacgatggaattgattgaaatcctttttgagaaatgaatagccaataaatttctcatgggaagagggtaagcaatggccaatgttcagggattggatacatagttgcatttacatgtcaatgtcatcttcacatagtagatagaattgtacacaattttcagtaatattggcactgtagatatggtctgtatttaacagtgttgttgacttcttagtgatttgctgaaataatgacgcataactacgcttatatcgagaaggggagaaaggatcaactgtcaccgtctccgtcggcaacatcagccatgttgacagcccgcgctctgtgtgccctcctccccacgcatgtgatggcctatgtttttttcttctccctcacgct

SEQ ID NO: 36196 - DNA, 3319 bp, Zea Mays
tctctatctgtggcgagccaccgtctgcttccttgtgcacttcactctgcactgcagtctgcgcacacccaaaccaccccgccacacaaagagcaaaaccctctttctctgcccctcagtcaccgccgcgaacttgcgtcttgcgatcgagggaggaacccaccaaatggctcgcgtggagaggcagccgcggaaccctagtaggctcgcccccacctcccacccggcgccggcgcttccgacgacgccggctgctcgccgccccggcacgccacggaacgctgcccagggcacagtttgtgcaacatgtgtttgcggttcaggaaataatgcccgctgtcactgcaagcaagacgcaagatccagacataaccaaacacaccacggtaatgatggaacagccacagccgggggaattgcaaaaccagactctcaagataagctcaagatggctagattttctggtggtacatattcaaaacctgatgcaagagtgaagctgattcctgcagaagatattacctatttacagcgtcggaaaccatgtggtagaactgttgggtcagttgggtcacagaaaagacattgcagaagaagtgtcacaccacctccaagttcacgaagagtgtctctcctaggatctagatcgcttgctgaaaatcctatcccatcagtgtcatcccatgactcgtgtttaccccataagaggcttgagacagctgaaaatagggacccatgtgctggggggcacataagtagctctgtgactccctgcacttctttgaaaaaccttgcatcaccgagttgcaaatcctcacaacctttgagtactaatttgaatactgatgctactccaagaaatttagacagaatggtaggcatacaaacacaagcactcgccaggagctccagttcgagtattttgcattctcaaggccagaacagtgaaaaagtgtctgctagtttgccaaaagaggcagtgacaaatcctgcgtctcctagtcccaagcaaattggtgctcaacatccaagtgacaatcctcttgttacgaaggcaggaccttctaagagtgtgtgcacacatgagagtgaaaagttgtgcagcagagacatcaatttaactgcaacaagtactacagttcctgtcttgcaagctcctgttgtggagcctgcattgctaagctcaacatctgtgttcactgaaaggccctttgaggtttatcctgacacaagaactgctgctcctggcatgcaggaacttagtgtgaagcatgtgttgctgaccccaatacctgtgcgtcatgaaccttctacggagtgcctaaaggttcctccaaaacacagcctgcattccattgcatctgcgcaacatggtgcattgtcgcaagaaagaaactcaggggcatcaattagccatggcagatcttcagcttcaggtgcactatcaatcttacatatgaagctggccaagaagcattatcaatcacaagcctgctggaagggcaactttcatgttactggaggactgatacatacttgtgatggacttgaagcccatttccctttagaaatttctgtaagagtttatgaagcttcaaaccaaatgcctgaaattttaaatctagaggctgtacctatttcccagctgtggccaaaaaaattcaagatggtacctcccgacattgaggatattggactatggtttctgagcagtcgccaaaggccacactggagttttgatcaccttcttgaaaaagtttgttcacatactggtctgttcacaaaaattggtgatattgagttggcagtgttttcatcgaagttgcttacaccacaagatcagaggaaagatggcaaattatatttctggggtgtttttgggaagcatatgaggaagaagtcatgccaaccaaacagtcatataaaaaatgtggagataagcaatcccagtcaaccaaatggcaaatctgaggaagtaggcatgaaattggatatgagaaaaggcaaagaaaaagagagtgctaaatctgacgaggtattggattcaacaggaggcaatgataccgatagggtcaatggctgcgtggcagtgcttgaggctcctgattcagaccctgcatccagttgctcggttccggctgcctcttctcttggcggatattgccatcatgactctgcaaaaaatagctcttctatcttagattcttcatgccagcctgctgacggatcttctgttagcccagacctcatgctggacataccccctggaatttctgcgcatatacctcctggcttcacaaaagcccactgtcagcttcagatgggaactgctgctctgtcttttgctgataggcatcgcagtctgatttcggacattcctccaggctttactgaagttcatcgtggactccctcctgcaattccacctgctggaccagcttgtgtgtcgacccctgggactgaaaagaagcccttcgttaggttctcgcttaatgtcccaaggcctgttggaatgggagctccacctggatttactccactgcatgcagtgaagaaagagcctgggctgcctgatgtccatgagaccgcagataagcacacactacattctttggcagctgcggcagctgcagtggttaagcctgggaaaggaggtgaaatgaaaatcgcagacaatgaggtaaagactgaacaagatgaaaactcagaggaacgagattttccaaagatcaggaggctttcagacctgtactgtaggccttcggaggacagcactgaattttcccagcgtatgcctgcacgcttgcccgacaagtttcaggagcagagacccgagaaacgtcttgtgcatccacgggaggaggtcgggcggcgatgatgcctgcaaaggggccgatggcagcatcgccaggtggtcgtctggatagcgagtgcgttgtatgtggtgaagagttccccgcagagtgatttctaggattacctcgacaaagggtactagactgctttgtgttagtgattatcctgttcagcggcaatgatgtacatgcctggacaattagcatgctgagcttgtgcgtacaggccagcacttatcgtgaagtccgtgctacatcatcgaaacggttaacgatattgggtagttttggtgaaacccatgcatcaaatgtgatggtcgagcagcattactgtttttatagtgggaccaacctatcaaatgtgacgaaaagggtgaaattctattctagatccccaaatattgactattgaagagcatataaactaccagaaaatggaacttacatgtcaccgtgtaatcatc

SEQ ID NO: 36197 - DNA, 5183 bp, Zea Mays
cccaaatctcgcgtgctgcctccgtcctgcccccagcgcgtgcgctccgatccgccgggtttcagcgctgcggctgtcgatttacgcgatttgtctggcagaatacagttcagagcctcgagcgctgcagatcgaggacctggtcgtcggattcgggcgccgcgggtgagacctaggcgccggagtttttgtgacggagttttggcgtggttggtggagggggggaggaaggagcggtctcatatgcgcgtgacggtcacgcccaaggacgaggaaaggctggttgacttgatggcgcgcgagcagccgcggtcggcggtggttgcggcgggcggagatttggtcactgctgccgggggcgggggcgaggggtcggatagggactcttcggggtccatagaggagattacggctgacgacttcaagaaggactcgtcgtcggcgttgggcggcgcggcggcggcggcggggccgagatctaggtcttgggtggccccgcccgccgtgggttacatggcccggaactttcgctatgccttcaatagctttgcgtggtcgcaggccgtgcggaataagccgctggggctacaaccgcctgccccagacgacgacgaggtggagcacgccgtggacgtctccgacggagagaaggaagagggcgagattgaggagggggaggctgtggaggccttggcctcgcctgctcctgcgcagcctgagaccatcgatttggactccgacgccccggagaagtcagagtcggtggctatcgatggaagtgccagtgttgtgcctgtcccagctgctgaggaagaggaggtgaaccttgatcagcgtgtggggagtatactggaggagctcgagatggtctccattgaggaagctgagaagtatatgggcatatgcttcatgtttttccttgaacaaaggctttgtttcaggtgtctgagaaaaccagttgtaaccgctgccatgttgcaggtcgttcgagggtgcatgcgcacgactgcatacctgcttcgagaacctgaagcctctgttccaggaactggagaacgggagcccgatggctatccttgaacccctcatgcagcaggcgtttattggaattgacacactcaccactgtggcgaatttgtataacttgccgaggagggagcagaataagacaacacttttgaagttgttgttccacataaaaaacagatattcggacatgctgacgcctgagcagcgagaagagatggacagccgcgtgaggaagttagtttttggagagaaagacaatgtcagtgacccaagtaccagttgtggcaccagtgcgataaatgtttcagctccatctgggcaggtttcaaacacaggaggactgccatttgaatcaggtgcagcaaatctatttagtagcttgccaaggttggaagtacctgccaaaaggaatagtcccttgttgaatcttcatgcagattatgatgagaacagcttaccctcgccaacccgggacaatgcaccgccttttcctgcgctaaagcctattggttttggagcatttccaatggtacctgagaaactatctttcctagacagagttgagcctacaaagaattcgttatatccacccttaaatgatcctctgaaggctgtctcttcctatcagcagaagtatgggcagaaatctgtatatccaagtgatgatctaccaagtccaactccatctggtgatgagggtaaacctgcagataaaggtggtgatatatttagtgatgtttccagcttccctgttccaaagagtattgtattaccaagtacaagtcagatgcctgcttctcaacctagcacagtcagcagcagcagtattagttatgcttcaagtacaagtcagatggctgcttctcaacctatcacagtcagcagtagcggtattagttatgcgtctggtccacctggttttgctaaacaaattgagcagtcgactgcaggtccgaatcatgcaataaaggcagcatccaaaagtagagatccgaggctcagatttttgaaccgtgattctgctggtgctacagatgtaaattggcgtgcaaatttttcagaactgaaggatgggaacttgggtggagtttcagttggtaaccgtaaacagaaagcagttgatgatcctcaggtggatgacaatgcgttaaaaagatttaggggcggaattgcgaatcagagagacatgcagcctacggggaaccccaatcagcttatgaacatcagggctcctacacatagtagcagtatcaatatgaaaactttgcaacctcctcaaactactgctccacatgtcagtgcggctcctgctgtcccattgcctcctatgttgttaaaggacattgctgtgaacccagcattgcttatgcatttgatccaaatggaacatcaaaagaagtcagcatcagaaagtcagggtggcatgtctagtgggatgaccaacaatggaattgcaggcatggttttcacacctggcaatgctccgaagatcacagaagctgcacaagtcccatctgttaggccacaggttccagtgcagacacctcctttgaactcacaaaatgatggtggaatcgttcgcatgaagccccgtgatccacggcgcatcctacacaataacatagcacagaaatctgatgcaatgagcttggagcaagtgaaaaataatggaactacacagccagactctcagggcaccaaggaccagactactccagtgccttctcaaccagccttgccgtctagcattgcaaggccattcagcagcgcaaaacatgttgatcctgtctctaattcacagttagctgctacagctattatggctccgacacaagctttgagtagcgtaaataaggtggatccaagactagcagttgaacagaatggacaaaatgctgatgcaacaacaaatggtgcttctgcaacaacacttgaagctacacagcctgttagtccatggggtgatgttgatcatctccttgatggatatgatgaccagcaaaaggctctgatacagaaggaaagggcaagacgaataacagaacaacacaaaatgttctcagcacggaagctatgcttggtgcttgatttggatcacacccttcttaattctgcaaagtttatagaagtggaaccaattcatgaagagatgttacggaagaaagaggagcaagacaggactttgcctgaacgtcatctctaccgttttcatcatatgaatatgtggacgaagctgaggccaggaatatggaactttcttcagaaggctagtaacctgtttgagttgcatttatacactatgggaaacaaactgtatgctactgagatggccaaggttcttgatcctactgggaccttgttcgctggacgagtcatatcaagaggtgatgatggtgatccttttgacagtgatgaacgagtgccaaaaagtaaagatctggatggggtactgggtatggaatctgcagttgtgatcatagatgattctgtaagagtctggcctcataacaggcacaatttgatagttgtagagagatacacctatttcccctgcagcaggcgtcaatttggccttcctggaccatcacttctagagattgacagagatgagaggcctgaggatggtacccttgcttcttcacttgcggtcattgagagaatccaccacaattttttttcacatcctaacctcaatgaggctgacgtgcggagcatactagcatctgagcagcgaaggatacttactggttgccgtattgtctttagccgggttttcccggttggagacgccagccctcacttgcatcctctgtggcagactgcagaacagtttggtgcagtctgcacaaacctggttgatgatcgggtcactcatattgttgcaaactcccctgggacagacaaggtgaattgggcattatccaaaggcaaattcgtagtgcatccaggatgaagcttcagctctgttgtaccggcgcgccaacgaacatgactttgcagtcaaataacaccctccctgagcccgaattcatcatataggcttcggggaagaattcttctcagggatggaatgtgttcatggtaacctaacatgattaaaaaaaaaccataacaacatatctaaaatgggaccatggtaagaaggaaaaccaccacccaaagaatttcaggccttaaaatgaatggtaacgaagaaaacgctttatgatagcctggaagaggagactgggtctgttgtggatgtcattacctaggtggtgggtggtcaagattcctttttagaaagccagcaaagatgcgcgaaaaaagtgatgatgagcagatgctcaccgcctcatcctttgtaacatgtagtagtaaaagtggtgcagttttggtaagggtcctaggttcagaaatgttgcttctggccaagggaacttgggggattttgccgttttggtagctgccgctggtcgcctgtcgaaagtgtggcctcagctgaacggcgtcatgaatcattggtgcagcgcatttaataggatgggtttgctatgtcagtgtttgtgttaggagtagcttgagtataaagctggttcaaaggcacgggacacctggtgctttgcctgctgctgctcgaaacgtactcgtcccccttccgaaactttaaggcagaaaaacgttttgttcagttgggtcaggtaaaggggttgagttgatggcatcagagtcagagaagaaccagctgattcaggttaacgggttgaagatttcatgccgtcagtgaacgcgttggttgctatatggaaggttggtattccaaaaaagaaacgcgtgacatgtcttctaactgaaaaggaaaaaaaccgttataatttaactgttttcgcgagaattggttcttttgggatgatgcggccggtttttttagtgtttgttttccgaacaagcttttgtttgcggccttactgacaaggatgttttggccattttggttgtttcaactttcgatgggatttggagaatgatgatccgtggtcaaactttccttgcagcttgcaacttccaagttaatacgtcaaaaataccatgtatcttatgaacgacataaagacgtttttcttgttgagtacaataaaaatgctattttcagaaaaaaaatcattgactctagg

SEQ ID NO: 36198 - DNA, 2466 bp, Zea Mays
cgcgcgtgtagggtcgcaagccgagccaaaagcagctgcactgcagaccgaccaccacgcgacgctcctgctggctgctgccgcggaacccgggacaagcgacctcctccacctccccagctagctatagcttcctgcttgcagctgcaggtgccagccgagccgcctaccgggtacagccgcacaggcaggcggcggcatgcgctccagcctccagcagtgagggagggagctgtcccgctcccgccccttctacttctacccctccccccccgcgggccgagagggagtccgcccgccggcgccgcgcgactcaccgatgcccagccatgaggcctgctgcggcaccatgttctgggtgtacctcatgtcctgcgtcggcctcgtcgtcttcgccggcctcatgtcgggcctcaccctcggcctcatgtccctcagcctcgtcgacctcgaggtgctcgccaaggccggcacgcccaaggacaagctcaacgccgccaggatcctccccgtcatgaagaaccagcacctgctcctctgcacgctcctcatcggaaactcgctcgccatggaggcgctgcccatattcctcgacacgctcgtgccgccctacgtcgccatcctcatctccgtcacgctcatcctcgcgttcggggagatcatgccgcaagccatctgcacgcgctacgggcttagcgtgggggccaaggcggcgcccgtcgtccgcctactgctcatcctcttcttccccgtcgcctacccgatcagtaagttgttggaccgcctactgggaaagggacattttgcactaatgagaagagctgagctgaagacgttagttgatatgcacggcaatgaggctggaaaaggtggagagctcactcgtgatgaaacaactatcattacaggagctttggagctgactcaaaagattgcaaaagatgccatgactcctatatctgaaaccttctcacttgacataaatgctaagctggacttacacacaatgggtatgataatgactagagggcatagtcgtgttcctatatactctgggattccaagcaatattattggccttatattggtaaaaaacttgattacttgccgagctgaggatgaagtgcccattcgtaatgttactatcagaaaaattccaaggctcatccccttcttatgctaacaacactgctggaagtcgtagatttaacatagagaagcatggagacgggcgctcatgtaataagaaatcagaaaagaagcgggaaaatattcttgattttaacacagatccacttccaagctattcaatggatgaggcggcagtcggaataatcacgatggaagatgtaatggaagaacttctacaggttgcacatatttgtaatcaagttcccatggtttggaacaagtatttacattgctcacagcataaaatgtctaccatgctttcaaaatatgcactaagatcaccagctaatgatgctgtatgagtgttctccatatcccattaaaacatcagttgtttgcaacattttagccatcataagtactagtattcaattaggagagaaactaggggggaaaatcagttgcacttgaattgtggtaatttgtttgtcttctcaagtttggcttctctcagatattgtaaactgacacggctctgttcgcaggaagaaatctatgatgaaacagatgagtatgttgatgtacataacaagatcaggataaacatgttacctccaggcaaagcactgtcacctaccatatctcctggtggtggacccttacctcaggggctccgaaagactcctatgacatctccgttctcaccatactaccattgtaattcagtgttacgttccccagcttccaaccattgtcagtcacctgggactctaccgacaatactttcccctggaagatcacctactgcacaaacacctgggcaaagttcaccaaatggaagtcaggtttcaataaattccaacggtcaacataaaaaggacggtgagaactaacataccagaagattgttttccagacggtctcgtctcaagacgggatgcatgattaaaaatcatgaaattgctagcgtaggattaagctgcgaatataagtagcacagctctcttgaatggttagtggcccatgtatttattgattgtttgcttgtacatatatgcttcggcatccggaccttagtatggcctaatcctcactatgtatcatacataggaagtgaatggaagccaatataattttgctctagacaattttagcttgctttctggacccttatgtaagccttcaagatagtgaaaatgttaagtgagtagctcacgagctaaataatggctagatattctcggtaatgaccaaaatcgatcaagtacaacaccaaaagcaaataaaataaaaaacaacgctctcaattccaatcaagatgaaataagagcgaaa

SEQ ID NO: 36199 - DNA, 324 bp, Zea Mays
gactctgcacgtacaactggagagtttaccaaatatagacgcagagaatcctgaaacagaacaaacttcattctaatcactaattccaacagtatttgtatgtatcttccagtaacagccattgacttattcaaaagcaagcagccagacaccacataccgctccaaactcgtcaatgagatcttttggtgaaggatagttctttttactcttactcattttcttaccatcctcagccaagacaaggccattgcatataagattcttaaatgcaggcttcccaaacagtgccgtcgagagaaccatcagagtataaaacctgca

SEQ ID NO: 36200 - DNA, 2703 bp, Zea Mays
gctcctccccggaccgccccactcgtgtggaaggccaaaccggcaagtgaaggcgaacttgcgaaagccagaagtaggacgaaacggaggcgcaccgcaccgcagctagcccacgccaccacctcctccagacctccacctcattctctcccaccaccacctccaccacaaagttcgcgttgcgccgcgcccggccccgcccagccgcgcggctcgtctcgtctcgtccctcttcgaaatcctcccacgcaatcgcctccccgcacccctgcccgtgtgacgcggcctcgcactgccaccgccccccaccccggtcccccggggcgccgatctcgtgtcgcgtcgcccgggcgaggaggaggtgggaggatgggggcgtgcgtgtcgcggcccagcgcgtgcgtgggcaagccccactcgccgcggtccggcgatgccagcggccgctcgggcggcgggggtgggacgcggcggaggcgcagccgccgcgtagggaaggggcggaggacggcgccgtcgcgcgccgcgtcgatggaaaccattcaggaggccgaggtgcccggctcgccgtccgccgccgccgccgccgccgatcaccggacgtacagcaaccccgcgttccaagtgtccgggagcattgaggaggactggtacgattccttggcgatgagcgagtcggatgccgaagacgatttccacagcgtgcaagatgatgctttctcattgaatggcttcgagaatgaagctgcattgagcatgaaagatggcaacggtgggagcttcaatggagctgcgcaatcaggcgagcagcaccataaaaagccaaagtccagcgaactgtcgaaggggagctcggagaatggtgtaaggacgtccattagccatgaagatgcggtgagtgtttctggtgcggataccacgcacggtggaggtaggatactggacaattgcgggcttctgccgaataattgtctgccatgcattgcctctgctgttggggtgaacgagaagaagagaactccctcgagccctactcattcaatgaagatgccttctttgaagctttccttcaagaagaagtcaggggaagctcatccatcttccacactactatcaacgaaggatttcctggaaaggcctctagcaggttctcaagtacagttatgcttgctggaaacaaatacgctcaacagttggtctcgtattgatcctggtacattccgggtccgtggagcaaactattttagggataagaagaaagagcttgctccaaattatgctgcatattatccatttggagtcgatgtgtacttatcaccacagaaactcaatcatatatctcgatttgtccaacttcctgacattcaactctccagcaagctcccacctcttttggtggtcaatgtacagacgcttgtctaaatggatgttagtggtgaaaatgaactgtatgtcaacttgcttcaaacatattcagatatgtaccaaccatagccgatgcctatttttagtaccaaaccagttcaacatagttaactagtacaaagggctggactgaagcaaccggtgaactctgtgtaacatgttatttatgtttgcctgcctgaagtcccattatatccggcttcattatttcagaatgaaacagatggggaagggatgagctttgttttgtactttaggctttctgatggttactcgaaagagcttccacattcattcattgaaagtatcagaaggctggttgatgatcatgtagagaagataaaagcattcccaatggaaacaactataccattccgagagcggctgaagatacttggccgggtggctaatctggaggatcttcctttgagtgcagcggagaggaagctaatgcatgcctataatgagaagcctgtcctttctagaccacagcatgagttttacctgagtgataactacttcgagatcgacattgacatgcacagatttagctacatctcaaggaaaggttttgaaacatttttggacaggctaaaagcatgcgttttagatgttgggctgacaattcagggaaataaagctgaagagctgcccgagcagatcttatgctgtgttaggttaaatgggatagattacaccaaatatcagcctcttttgactcacggtgcctgaaatcaaggcttacaggaatcacctaacctttaatttggatgctgtgaggtaaccataactggaccagactcctggaaatttcagaccagagccgctgtcgactatcacagcttctgccgaaacgccatcgtccgagcttagttcacacaagtaacattaacagagggtcaatcactcagtgaccattggctaatatagttgaatccgtggtgctgtgctagtatagccgtttctttctgcaaacgtggagaaaaaaaggtgggagactgcggtacatgtaaatgtgtaaatcattgctggatagcttcggttgcctccggcggcagattcagggaaaaaattaggagctgaacaaaaacagtacagcgtgattgatcgctttgctcggctgcgatgtggagccaggacacattgatttggtacaagcatatgtgattgactgattggtttggccgtatgcaatgagccagactgacagggaacgatgtgatgtttggttgactggattaataagatgaaaaaaataaaaaaatgttatatagcaag

SEQ ID NO: 36201 - DNA, 3624 bp, Zea Mays
gtccgcccccgccacttcgagttcggttggaggcttggaggcttgggcaaaaccctcctcgtcgtcgcgcgctccgcctgcaccacccgccgccgaagagctctctttcaaaaactagcaaagatggtacaatgtactcaacctcctccccagttaaagctcccagagagtaagatcacagaaccgacagatgatgagaaccaagatttgccaccaaaacctgagaaaaggactaggatgcaccacattgagaggcacagatcttgtgttgtgaccttatctgacatagaacttaatggtctgcaacctcgtcatctgcaccaacccattgagatcagcccaggaggatcacagtgttcgctccatgaagaaacacctacagatactaatgcatcacacaggcatgcaattgcagatgctgcttgggaagccctcaaaaggtcaatggtttacttcagaggccaaccaattggaactgttgccgcaatagacaagtctcagggggcagcactgaactatgaccaggttttcatgagggatttcattcctagcgcattggcttttcttatgaaaggagagcacttgattgtgaagaactttctggtagaaactgcacgccttcagtcaagggagaagatggttgaccttttcaagcttggtcagggtgtgatgcctgcaagctttaaggtgcatcatcgcaaccctactcagaagacagaaagcttactggctgattttggtgaaactgccattgggagggttgctcctgtagattctggcttatggtggattattctccttcgtgcttacaccaaatggacaggggacaattctctggctgaaagtactaactgccaaagggccatgcaccttattctcaggttgtgtctctcagaggggtgtgatacttctccagccttgctttgtgctgatggatgctccatgatagaccgaagaatgggcatatatggctacccaattgaaatccaggctctctttttcatggctatgagatgcgccctgagtctgttgaaacaagagtccgatgctgacttcgtgaaccacatcacaaaaagaatccaagctctgagctaccacttgcacagttactactggttggacttccagagacttaatgacatataccgctacaagaccgaagagtactcacagacagctctgaacaagttcaacgtgatgcccgaatcgatacctgactggatatttgacttcatgcctagccgtggtgggtacttcattggcaacgttagtcccgcgaggatggatttccgctggttctgcctaggcaacttcatcgcgattctgtcgtcgttggctaccggagagcaggctgaagcgatactggatcttgtggaggagcgctggcaagaactcatcggtgagatgccgctcaagatctgttaccctgcgatggaaaatcaggaatggcagatagtcactggatgcgacccgaagaacaccaggtggagctatcacaacggaggctcgtggccagtgctgctgtggctgctggtggcggtgagcgtgaagctggggcggccgcacctggcgcggagagccgtggagctgatggagcagcggctggccaaggacgacttccccgagtactacgacggcaaggccgggcggtacgtggggaagcaggcgcgcaagttccagacgtggtccgtggccggctacctggtggccaagatgctcctggacgacccctctcacctgcgaatcgtggcgctggagggcgacagccactccagggcccccttcctcaagcgctccaactcgtgcccatgacccccaggccccagcacagcacaggccgcatgcattacctttccacgcaccagtttgcccacaccgagactacgagagtaaaaagtttcgtttcgatgcagtgcattcttcttactacataagtatgtataatcaagcggtagtagtgtgatgtgctaccaagaggaggatgacagggacaggataccgagtatgtatgtactgtctccatttgccagatcagatgccactaaactggttaacattttggaatgtcaggggctcacggctagcaatgcgtctggtagctgaggaaatgtaaaaactccatgtgctgatatactgtttcttagacctgacggcatgcggtcctggtgctgataaaaagctattgatattcaccatcttcatgttagcttctgtagctgctggagaagtacacgctggacaggaccggccctgccgccctggtggctacttctccagctggaccccggcctggccctgctggccacacgctatcggctatcctctcccctctatccttttcttcactccccccacacactgtcactgccagcctccccttcgcttcgcttagctcgccgtcaccatggcgacctccaccttctctccgcgccccgccaccctcaagcccctgcgggcacgcgccaagcccgccggcctccagctccacctcctccccttcccgcgcctccgcgtcgcctgcgccaccgccgccggggaggcgccgcccgttgagcagcgggacgaggtggagccggcctctgccgcggcatccaacgggactgccgttaaggtcgaggcgtccgccgcgaagcccgagtccccgcccgcgcccgcgccggtcccggccttccgcgacgccaggtgggtcaacggcacctgggacctcaccaagttcgacaagggcggcggcgtcgactgggacgccgtcatcgacgccgaggccaggagaaggaaatggctcgaagactacccggaggcgacgagcacagacgatgccgtcgtcttcgacacctccattatcccgtggtgggcatggatgaagcggttccaccttcctgaagccgagaagctaaacggtcgggccgccatggttggcttcttcatggcctacttcgtggacagcttgacgggcgtgggcctcgtcgaccagatgggcaacttcttctgcaagacgctgctgttcgtcgccgtcgccggcgtgctgctggtcaggaagaacgaggacgtggagtcgctcaagaagctcatcgacgagactacgttctacgacaggcagtggcaggctacctggcaagatgacccaaccgaggggccaaagaattagttcggcgttgggggtgcaaacgcagaatgctcgcttcttgtggtgtgtctttgcctctttcttcggcccctttttgtttcaccgtttagtcaggcttggaggaactttttgatgaacgtcataatctatctacgtgatcttgtgcaaaaacaaaaggtatgggagtactttctgtgctagagataataatcatgttgcagtttcactggtttatgctttctgtcaacacgcgtcaaggtgctcgtcgaagaagactttgagcaaatcgcaaataatttgatgtcagacatggaattcgctcacatatcgatcaaataaatgccatgtcaaggtactcgtcgaagaagattagtctgaaaccaacctgtgagacacaaagcgaaaaggcatgcctgttgatggttaacttttcacgtactactacttgctttgatctggcatggaattcaagtcaggcatgacacgactgaataaattac

SEQ ID NO: 36202 - DNA, 1331 bp, Zea Mays
cgacgccgcagtttcggtctcccgtctccgctcgcaaatttcagtctgctccggcaccggccctgccgtgccagtgccacctccataaaattcgctatcttggcaggcgcatccactcttctgagtcctgatctagtccttcagagacaacgagcttcctcttccaagtcccaattcccgataaccaatgtcaaagcgcaagcacactgaaggcacgaccgcacgagctagcaaggtcctcagtgactgaccggcgataaagcagcggccagcagcagtgtcgcacagcacaccagctgcttgctcactcagggaagcttccataccaccagcccaccaccatgccgaccgtgctgagcacaaggcgggccgcatcgccggagacgatctccctcccctcctctcgttcctcccactctcgcacggcgagcccgctccaccccgtctcccgcggcaaccgagcgctccgtcttctcgccgcgcttcgctccccgtccgcgccgcggccgcggctgaggcgtaggcccggcctccctcccgcccgcgcggggctcgccgccgccgcggcaatgccggcgccggagaccaaggcgcgcatcctggtggccggcggcggcatcggcggcctggtcttcgcgctcgccgccaggcggaaggggttcgaggtgctggtgctggagcgggacgtgagcgccgtccgcggggaagggaggtaccgcggcccgatccagctgcagagcaacgcgctcgccgcgctcgaggccgtcgacgccgccgcggccgacgaggtcatggacgccggctgcgtcacgggggaccgcgtcaacggcatcgttgacggcgtttctggctcctgatccttgctcgagcagttggcgatgacgctatattgaatggaagccatgtagtcgattttacagatgatggcagtaaggttactgccatattggaggacggtaggatatttgaaggtgaccttttggttggtgccgatggaatatggtcaaaggtgaggaagacactattcgggcactcagatgccacctattcaggttacacctgctacactggaattgcagattttgtgccgcctgatatcgatacggttgggtaccgggtatttctgggccacaaacagtacttcgtctcttcggatgtcggtgccggtaaaatgcaatggtatgcttttcacaaggaagaggctggtggcactgaccctgagaacggtgagtgcttagagaagttttcaagcttaactagtgaaataggcactgcctcattgtaagttgtgatgaaaaatgagaacaaaacttctcaccccacaagttcac

SEQ ID NO: 36203 - DNA, 2443 bp, Zea Mays
ttttttactgcaaacgttactcatagggaatcattgacagtccgccgctgcgtatagcgtgaccacgttatttgacgacgtaggataataatggtaatgttataaaagtggagatgtttagatctcgagtttaattagacagaaatataaaaccctttttaagggacgatggccgaaaccaaactggtgctttttaccgtttcctttgttgcaaacgctaaatttctcacgaattcttccgtcgtcggcggcgcagattgaatgccaaaaccctagctcgccctccccaattccccatttcggccacaccctccttgcctccacggctccacccctgcttcaggttacctgtgccagcgacgccggtagaagccatggacagctctctcgcgagcgcggcggcgatagccgatcagcgccagaagatcgagcagtaccgccacatcctcgcctccgtcctctcgtcttccccaccggacatctctcaggccaagcgcttcctcgaccacatggtttcggacgaagttccgctcgtggtgtcgcgtcaattgctccagacgttcgcgcaggacctagggaagctggagtcggacgcgcagaaggaggttgcccactacgcgctcacgcagatccagccgcgtgtggtctccttcgaggagcaggtggtagtgattagagagaagcttgcagagctatatgagtctgaacaacaatggtcaaaagcagcacaaatgcttagtgggattgacttggattcaggaatcaggatgcttgatgacaccaacaaattatccaagtgtgttcaaattgcacgactctatttagaggatgatgatgcagtgaatgctgaggcttttataaacaaggcttcatttttggtcaccaacagccatcaggaggttctaaacttacagtacaaggtctgttatgcaaggattttggatctgaaaagaagatttctggaagctgcacttcgatattatgacatttctcaaattgaacaacgcaagattggagacgaagagattgatgaaaatgcactagaacaagctcttagtgctgctgtgacatgcacaatattggctggtgctggtccacaacgctcccgtgttcttgctactctgtacaaggtaagattgttgtagttttatctcaatgtccttggattacgtgctggtagtacccattctcagctgtgttgctactctgtacaaggtaagatttttgtagttttatctcaatgtccttggattacgtgctggtagtacccattctcagctgtgttttgcaattgtgagcatcggaatacaactatctagatgcattacgtgttaaatgccttggatttgttcatgtcatctatataaaaacatgtttcatgtttagcttatcatagtttatagttgagactgtaatactcatctctcacttgttttctgtcaaggtggtgcaacaaataccaattaatctggatgtttatggcttttctggtaaatatgggttgacagaaattatagcttctggcttgagctgggtggtttcagatcttgtccagtgccaaccagtgtgtatatatacatttttaaggatgaaagatgctcgaagttgaaaatatacccaatactgcagaaggtttaccttgaaagaattttgaggaaaccagaaattgatgcatttgcagaggagctgaggccgcatcaaaaagctttattaccagataagtcgactgtgcttgaccgagcaatgatcgagcataatctccttagtgccagtaaactttacacaaatatcagctttgatgagcttgggacattactggggattgatccaaggaaggctgagaagatagcatctcggatgatttatgaggatagaatgcggggctcaattgatcaggttgaggctgtgatacattttgatgatgacacggaagagctgcagcaatgggatcagcagattgctggactgtgccaagccctgaacgacatccttgacagcatgtcaagcaagggaataactattccggtgtgaataaatatctcatgctgtcggtcgatggtgcatggcagaactgcttccatgccccggaatccagaatcaacattttgtatagtttgcagctgcaaatgtgtatcttgtgattttggggggaggatgcttgtttaagtaacgctcactggataccttgtagcactactgtttcaagagcgctcgaatgattcagtaagggctttcggtttcatcagaatccatatgtggattggctgagtttcaatccatagcaagtcaaaattctttataatttttccaaactttttcaatccctgaggcataggaattaccgaacatagaattaagggaacaaggcctaaaccggcgggatactatgccagcaagtactagtagtataactgaaaactgctcaaggcaagagcagcataga

SEQ ID NO: 36204 - DNA, 4196 bp, Zea Mays
agcccggagcacccagcagcgacctgttccgttggcgttggctcaccacccgaccaccgtgcgcgcgagcaaagagagcccctgcccccctgctgctctccgcgcccactgttccctcttcatccaggcacaggtgacacgggcacctgttcacctttgcagggccctgagcccctgcggccggcctgtagccctgaactgatgaacctgcagttgcagctcattttgcaagacacggacagctctctccttttcgtgctccctttgctcccttttctttcagtcgcttcacactccacggactcgagctttggctttgtggcgcctgtgaatctgccaacaaagaaaggactgaagggggagggaggagagggctgatccaagtgctttcacccatctgcttgtttctccatttgttggcctgcaatggcggggagcttcgacctgaggacgccaaccagaggcgtcgagcaggctatcgttgctctgaagaaaggcgcacatctcctgaaatgtggcaagagggggaagcctaaattctgcgccttcagaatatcatctgatgagacaacattaatatggtactcaaaagggagggaaaaacacttgagcttaagctccgtgtcagctgtggttcttggccagaagacgataaaatttctgcgacagcgttgtccagagaaggaaccccattccttttcacttatatacaaaaacggagagcgctcacttgacttgatctgcagcgatagagatcaagctgaaaactggtatctgggcttgagggccctattaccaactccttgtaatccatgttcatcaattgaatcaaggagcagtaggcagatcgacagttgtacaaatactcccagcagctatattcagcttaagagtatgttcatcgcaaaggaagcccaagaaggcacacggaacattttttggtggtagcgctgattgttcagaatcattattttacacaaggcagcgaacattctctgacataggtacctacttggaaaatcttacacgcaagatgtcaaatccagaaatacatgatttgaaggatgttatggttggtaaccaagaaaaggagcagaaaattacccaaacacctaaactgaaaacctttgaaggaccccgtgcagcatgtaggttagattctctgaaggatgtttttttctggggtgatgcttttggaagtattttagagtgtggtgatacctcaaaaccccttccaatgttagtggactcaacgaacatgcttgatgtacaaagcattgcttgcggagagactcatgcggccataatcactaagcaaggagaggtctactcctggggaaatgagagcagtggcagaattggaaatcaagtaaatatcaaagtctcccggcccaaggtcgttcaatctcttgcctctttacatgtgaaggatgtggcctatggatcaaagcacacttgtgcagtaactgtttctggtgaacttattgaatggggagaaggaccctatatgggccagttggacagctatgcgaggaatcaatggtttccgcataaattgtttagtccactggacggcatatctgttgtgaagattgcttgtggtccttggcacacagcaataataacgtcttctggtcagttatacacatatggggatggaacatttggtgttcttggtcatggagatacacaaggaactacccggcctaaagaagtagagtctttgaaaggctcaagagtgaaatgtgtggcatgtgggccatggcacacagctgccattgtggaagtgatcagtgatttcaagagcaattcaccaagaagcaagctgttcacatggggcgatgcagatcgggggaagctgggtcatgctgacaaaaagatgaagcttataccaacatgtgttgattcactcacagactatgattttattcaggtgtcctgcgggacggcactcactgttgctctctctgttactggtgtggtctttactagtggcagttcgatgcatgggcaattagggaacccccatgcagatggtaaaactgtttctgctgttgaaggactacttaagagcgagtttgtcagacatatatcatcaggttcttcccatgtagcagtggtgactacaaatgggaaagtgtttacatggggtaaaggcaaggaagggcagcttggtttaggtgacttccttaataggagcactccaactttagtagatgcattggaaggtaggcatgtggaaagcctatcttgtggttacaactacactgcagcagtatgtctgcataaagtaatctcaaggaaggacctctctgtatgtagtggttgcaagatggcttttggtttcactagaaagaagcacaactgttaccattgtggatccatgttctgtaattcctgtagtagtaacaaggttgccaaggcagcacttgcaccagataagagcagaaggtatcgtgtgtgtgatgggtgtttcagtcagctactgaaagttgtggattctggtaaggtaaagtctgaactaaataccagcaaaggagctgaaattataaggtcatacacaccaaagttgtctcgtatattcagggatgtaaacttacctgtggaaaaggaaaaggtggctttagtacaacgctccaatcagagaaatgaggtcctgtacactccagtccaagcgaaatctcagagatgggggcaagttgagtgcccagctcaatttctatctgcagaagacagttctcattatcaatctatatcgaagaatcacatgtatagtgcctctgtttccgagagaatgcatgaccccacagtgctgaagtctggcagatctttgcaacagcctaatgatgaccagaggaaagatcttaacagcatagaagaaaccttgctcactgaagaagtaaagcagcttcgttcacagatgacacttctcatggagcaataccatcagaaagctcttcaggttgaactgtataaacaaaaactcgatgagacatggctaattgttaggaatgaggctgcaaaatgcaaagctgccaaagatatcataaaggttctaactgatcagtgtaaggccttgtcagagaaacttttggtcggtcagcaatatgagaaccttgagacaaaatctaatatcagccaaggacaaacattttcagcagatttgcaacatcatcccagtgaaaaatttgccacaggcaaattcggacaactcgacaacaccaaaaatcaccagaccagcagccaaggagacgaagaatatacaccttcttcaagttctgatgtgcaggtagaaggattgtgtggtcatttgaatggttcaagaacatttgacagtaatggccgtattacagaagggaattccattgttgctcgcgtcacctccaatggtgtgatcgagcaaatcgagcgtggggtgtatgtcacatttgctgtatcaccttgtggcaagaaagacataaaacgtgtacgattcagtcggaagcattttggcgagaaggaagctcaacactggtgggaagagaataagggcagcgtctatgcaaagtacagcactgaaaaagcgcaacatcagctagaggttacaatcaagagtgtacaagagtaaccacaagttggattgggttacctactgctgagcaagatgaaaaaatgacatggagcaaataagatgatattaacggaacagataactgaccgtcctttttcaatgaaaataggcagtttaacttattgtagatacgaatgtacagataagaatgagtgaatgacggctggatgcctcctttcttttctccatttcctcctgattcagttggcatgatctagtctgatgaacaatgcagtgctgaattgaaccagtatcagtcgtaattttctggcagaaagtagaatttgttcagtattagttgtttcccttgattcttcagagcaactaaacctgcaacaatggaagtttcagacacaaagctaatagttgtcagcgttcatattctgacggagaaagcatccaactgaaaacagttctaacactcggcgccaataggaaggcaaggcttatcctttcgagtctccaccataccaccaccaacaatggcgagcattcacgccggctttgcctccaccatcgttgcttgcagaagctttagcttcactatcgtggcatgcccctccccctcgcccgcgcattgtacggc

SEQ ID NO: 36205 - DNA, 1824 bp, Zea Mays
  misc_feature (1824)..(1824): n is a, c, g, or t
gtacgttggtcgcgtggttttcactcgagttcctgcggattggtgcgcgcgctacccgtgtggccgtgtccccgactccacatgagcgagctttcccatgcgcgcgccaccaaaagctcggtgctggatttctgaatcttcaagcttgggctagctgcctagcttcaaaacggggcctctatttccgttggttggttgaattgcctgacgtgattcgtctcagcatcatcaaattgttgtaccgagtgacaaggtttagggtggtgactgcaagtcaccgagatgacgtccttgtcacgcacgctgtctcggggcgggccgatgcagtcgccaggggctcgccgcatccaaaggacgcagactgctgtgaattttggtgagcccatgtttgacagcgaggtggtgccgtcgtcgcttgttgagattgcgcccatcctccgtgttgccaatgaggttgagatggccaaccctcgtgtcgcttatctctgccggttctatgcattcgaaaaggctcacaggttagatccgacttcaagtggtcgtggtgtccgacagttcaagacagctcttctgcagcggcttgaaagggagaacgagcccaccttgatgggaaggggacaaaagagtgatgcacgggaaatacagaccttctatcatagctattacaagaaatatattcaagcactccagaatgcttctgaccaactggatcgtgctcaactaaccaaagcctaccagactgctgctattctgtttgaagttttaaaagcagttacacaacaacatgctgttgaagttgatcatgagatattggaagctgctgataaggttaaagagaaaacgaagatctatctcccttttaatattctccctcttgatccagacagtggcaatcaggcaatcatgaaatttcctgagacagatagtgtttcaaatcagagggaacatttgattttacttcttgctaacatacatatacgaagaaatccgaagactgatcaacaatccaagttggatgacaatgcactgaatgatgtgatgaaaagattgtttaagaattacaagaaatggtgcaaatatcttggtcgcaagagcagcctttggttgccaacaattcagcaggagatgcaacaacgaaaattactgtatatgggcttgtaccttctcatttggggtgaagctgcaaacttgcgttttatgccagagtgcatttgctacatatatcatcatatggcatttgaaatgtatggtatgttagctggaaatgtcagtgccttgacgggtgaatatgtgaagccggcctatggtggtgagaaagaagcctttctgaagaaagttgttacaccgatttaccataccatagcaaaggaagctgaaaggagcaaaagagagaaagggaatcattctgagtggagaaactatgatgatcttaatgagtacttctggtctgctgactgctttcggcttggttggcctatgcgagctgatgctgacttcttttgtcagcctgatgaaagaaatgaaagcacaaggatcagcaaacagaagggaaaggtcaacttcgttgagctacgctcattttggcacatattcagaagttttgacagactctggagcttctttattttagctcttcaggttatgataattctcgcttgggacggaggttcactagccagtatttttgattatgctgttttcaagaaggttttgagtatctttatcacttctgctatactaaatcttggacaagctacacttgatattatctttaattggaaggccagacgaacgatggaatttgcagttaagctgagatatgtn

SEQ ID NO: 36206 - DNA, 225 bp, Zea Mays
atcgtcaagtggtcgtcgtctaacaacactaacttagtgttacccaggatacgagtcgcttggattgtgattggtattaagcgtcgttgggcatggccttcttataagtctaagtaactcttctatacttcttattgaggatggtcaattgagctagcatatatattccaaacttatagataatttataatatttcatagtttatttctttgaatcacttttgta

SEQ ID NO: 36207 - DNA, 2351 bp, Zea Mays
gtcgctttcagttcgtgctccagccttttcgtatagtttaatggttttctagtcgtccgtcctcctcggttctggctgccaaccccaagaactgccttgcctagtgcctactgcctagggaaggaccgaaggagaggtgcgcggctggtggcgtgcgagtggcagcggcgccgcgggactcttctcctcgccgctcgcctgctgggtgcgccatccctcgacgccttgcaggcgtatttggaagatctgggcgccgttggagacttggagtgcaagttctttctctggatggcggcacacgagcggtgctggacgtcaggccgcgtggctcaccatggactgcctgtctgcccccaccctccacgctgccctttatgtgaccaggagacgggcgggccccattcaattcaagggtgacaccgtgatattgctgtgaagttttgtggcacttcctgcatcccttatatggtattaacaaaaattttaattgtctgggtgatccatttgagcaaatggaaggcaacgatgtaccccttggaaacatgttgcaaggggttccctatgaaagtttagacttacgtggcagctctatgcaaaattatgctccaaactcaggaaaacatatcttcagcagctcccagatgccaggtactttcacaatgtctatgaccagggctacagagcctgatgactttcctgggtttcagttcaaagaacagggaaagagtgatgaccaccaccaccaacaccatagtcatcactcaaagaactgcaagagtgatggtgaggaacatgttgtggctgaagatgctactgataccccaagtggcaaaggcaagaagggctctgcatggcatcggatgaagtggacagattcaatggtaaaacttttgataacagcagtgtcttacactggagatgatcatggtgctgattccggcggtggcaggaggaacttcacaataatgcagaagaagggcaaatggaaggcgatatcgaaagttatgggagagagaggctgccatgtgtcaccgcaacagtgcgaggacaagttcaatgaccttaacaagagatacaaaaggctgacagacatccttggtaggggcactgcatgcaatgttgtggctaatccagcacttcttgatagcatgactcatctttcagataagatgaaagacgatgcaaaaaagatacttagctcaaagcacctattttatgaggagatgtgttcctaccacaacaacaaccgtgtaaatttgcctgaagatcatgcacttcagcattcactactgcttgcccttagatgtaaagaggagcatgatcctcagagggatccaagtggagatgctgatgaatacgatcaaagtgctgattctgattatgaggagaatgacgacgatcaacatcctgtgcatataaacatgagggagccctcaatgcacaaaaggaagcgccacagtgatgtggctttggtcacatcaagttctcatgaaggcagtgagaggtctgatccccatgctgtcacagtggacatcaacaaggctttcacagatgcaaccaacatggttttgttgcaacaagacttggcttcacaagccatagagattcagaaacgtcgcttgcagattgaagcaaaggaactggaactcacaaagcaacgtcttaagtgggagcggttcaggaagaagaaggacagagagatagaaaggattgcattggagaatgaacatatgatgattgagaacaaacgcttggagcttgagctgagacataaggagttagagctagagctgaagctgaaagacaaggggaaccatccgtaacttttgcttgaccaacactacagtatgtaagatggtaaacaagttgcggttgagcttctggaagagagctggtagattagagtagactctgacaaccattcctcatgtatgtcatggtgatgtggctatggccaactctgaagctctcatggaggatttggtttcacaagcactagagattcaggaaccttaacatgcagtgaagcgacctaactggaactccggaaagcgacgtctcaagtggaagccagaatggacatatcaatatttattgagtgaggaatgagaacaaacgatttgacttgagctgagagcctgagacgtgcaagcagctagagtggcaaaaaggccaagcgaaccactgcataagggtaggtatggtaatggattacaattcaaatgtttcttcataactaattaggagtcttcaataattttagtttaaaaataaatagaaatagagctatattcgattcttaaaatttatagtatattaccatccctatccgaggttgatcaacccttcca

SEQ ID NO: 36208 - DNA, 2118 bp, Zea Mays
agaaactaccggatgcaacaaccacctggagataggcagctcagggaaacctgcaaggctacaattacctgtactttggctggcatgcactgggagactctacttctaaggacctccatggattcacccccccccccccccccccctatataaccaacaacctctctctccatcgctcatcaaccacaatctcactcataaatcttgccaaccattgccagatctttaatcttcaccatgatctcccggggcaattctagtacgagctcagacaacggctcctccatgcagttgtaggacttcctgccaatgatggtgaggaaggtaggggtggaggggctgattcaggagctatgcaaagggttccagctgctcatggagcctaggacaggcaagatcacctgccagagcctgaagcagaatgcggccaggttcgggcttggagaactccatggtgatgagctcccggagatgatcagggaaggggatcttgacggggatggggcgctggatcagatggagttctgcattctcatggtcagattgagccctaagctgatggaagaagaggcacacatgatgtttcaatattgatgtaacttgatccttgttgcttagtacaacagaacagtgattttaatgtcaatttggtccagctccaatgtgatattgaattcagaaacactaatgtagtctgacaaacttactcatattatgatactaacaaaaggtgaaaattatacaacaaagtaccatgagcacttgactacttgaggtctctagggcatctcaaagcaaaggatatatgtctgatgtttactttgtcctgttatcagcgaatgaaattatttatcccaaacagtgtgcaaatgtccagaagaaaatcttgtgaataaccatattacaggagggttgtctcatactctcattcatactgtacctcaagtgcactgctctccatccaacctagttgtgtggcatttcctgtactattatgaaagttgtactggagtaccacagagctcaccaatctccttctcaagaagttgcacaagattcgatccagttcgcttgtatatccaaccattagttgctgcatcccagtcaaacctagaaggcccaaggtgaagaaagccagatttgtctgtttggtgattgcttgttcacaacatatgtccccaaatccccaagcctcaatgtcaaaacctggttctagaatgtcaaggaaaagagaaggatgcatcaataattgaatacacgaaaacaaaaacacataatagtaagaatcacatgattctccatggcatgttgcaactaaccccatagtctatgtcgaaaccatccatctgaatggagtcaccatattcctaaaatagagacatgaagaattgtatcggtcaaaggtacaatggcttaacatcttcgacgagagcttttgctcaagtgctgagatttgaaggccatatcaccacctcaagtgtttcaagcaaatcatgaattgtctcatctgctaatttgtgaaattcatcctcttgcattatcgacctattcaatgtacataatcatataatcaacagctaacccatgcgaaaaaaagctatgtagcaaatctcacgtaaccaaactagagcaattataaagtaaaaacagttaacatactcacgatcagattttattttaaattactgtgataaacttatatcagtaagcccagctttccacatttcagactgttgattcgattcaagcaactcttacctctcctgaacaaccttttgtccattgtcactatattggaaaattacatagcattttgagtgtctggtttagggctaccgattgacacaggtggaggcaaaaaaaattccaacaaaaattgctctatcaagcatccaacgatcttacatgtatgatgtatccagtttcgccattggacccattcgcacttgaaagctttccaaactacccagagtgcataaataaatggaataacgtgctgagactgcgaggtcgagaaacaaacttgtggtccaccacagatgggccgggcgcgtcactgaaggcggacagtttcgagaggcgcgttgacgagatggtcctcaaagagaacagaagagc

SEQ ID NO: 36209 - DNA, 383 bp, Zea Mays
atggatcttgatcaggacgtcgaggcggcggagcgtgagcttgaggatcacaacgagcgtttggatgagttggccttgtttgggattggcactgccactagcagcaatgttgatcccgtagatgttgatgcggcgcctgtgactgcctcctcgagccccactgccactggtggtagcattgcccgtgacaaccggccgaggaagaggctagcgacatctagggtttgggctgacttcgaggaagtaactgggatcgacgacaaagggtgcttgaggagcgacgacgacgacttacaacagatatggttgaggtcttatcttgtattaaggattgggagctggcagataagcatatgcagaatactgtggagaaggagaccaag

SEQ ID NO: 36210 - DNA, 2283 bp, Zea Mays
atcttcatctgcctgctggtgccggactgacggttagagatggcccacccctccgccgccgccgccgccgtatcctccacggcgcccgctgcaaaccctagttctggcgcccgcgaggaaggaggcgcccgctctccgccgtcgccgtctccgtctcagagggggcgggccaaggtggtgatcgttatgggcgccacgggcgccggcaagtcgcggctggccgtcgacctcgcggcccacttcgccggcgtcgaagtggtcagcgccgactccatgcagctctaccgcggcctcgacgtcctcaccaacaaggctcccctccacgagcagaacggtgttcctcatcatctacttagcgtgattgatccctctgtcgagttcacttgccgtgatttccgcgaccgtgccgtgccgattatacaggaaatagtggaccgcggtggcctccctgtggttgtcggcggcacaaacttctacatccaggctctcgttagcccattcctcttggatgatatggcagaagaaatgcagggctgtactctgagagatcacatagatgatggtcttactgatgaagatgaaggcaatgggtttgaacgcttgaaggagatcgatcctgtggctgcgcagaggatccatccaaacgaccatagaaaaatcaaacgctacctcgagttgtatgcaaccacgggtgccctacccagcgatctgttccaaggagaggccgctaaggtgaggaatttttcgctgcacttgtctgctctgcttgtataatatcctccctttgtcatgaacatgagccgacaattgcctcacaaggctcttctttttttggttttgtttccctaattgagtataaacttgctgggaattcctgctcatcatgtcagaacagaaatggggtcggcctagtaactccagactcgactgctgtttcctgtgggtagatgctgatcttcaagtcctggacagttatgtcaacaaaagggtcgattgcatgatggatggtggcctgctggacgaagtatgcagcatatatgatgcggatgctgtctatacccaggggctgcggcaggctattggggttcgtgagtttgacgagtttttcagagcatatttacccagaaaagaatctggtgagggttcctgtgcaagcctgttaggtatgcatgacgatcagcttaagagcttgttggacgaagctgtttcccagctgaaggcaaacactcgtagactagttcgacgtcaaacttcttagcgtttctttttttttctccattaaataaaagagacggagattgcatcggctgagtaaagattttgggtggaacttgcatcgtgttgacgcaaccgaagcattcttctgtgccactgacgactcatggcaaaagaaagttgtcaaaccatgtgtggatgtcgtaagaaggtttttgtcggacaattccactgttttgccaagcacaagcgcaagtgacccctcttcaagagagctgtggacgcaatatgtgtgcgaggcctgcggcaaccgggtgctgcgaggtgcgcacgagtgggagcagcacaggcaagggcgaggccaccggaagcgagtgcagcgcctgaagcagaagagcctgaggccatggccatcgctgctgccccaagaccgcagctgatggtaactttttcacagcagaaccggcgagaagtgggacggggacgttgacgtggacatggtcgtctcgtcccacccaaaaaagcgtgccagcctgacagcgacatgctttcccaatcccgaattcctggcacgtcgacggggggactacctccatgccttttagcagcggaagaagcaggcaccaaagaactgcttatcaaaagtattgtaccacacgtacgacgggtctagaagccacagaaacgtagtgtggaagtggatagatacttgaacaatggtccatctttctatactgctaaagtttagcatatgctaaggaggtgtttaagattgctaaaatctctattttcaaaaccgaagtattgcaaatactgtagttattttaagctattctaaacttaggtctggaccttagtttgcaaaactgtattgaccacagtttgtaaaactgtattatttcaaactgtggtattgtaattactaaagtaaaaactgtattatttcaaactgtggtattgtaatgactaaagtatattatagtattttaaaaactgtggtttctaaaatgggcttaaactttggttaaactttagaacttgagacatgtttgatgcaagtgtttaaca

SEQ ID NO: 36211 - DNA, 2924 bp, Zea Mays
cgctgttccgttgctgtctgcctccagcctcctgccgttacgagcgcgtcagggtttttccttggccagccggcggcggccgttgcacctcctccatccacccctagtcgaaggtcgccagttcattcatccaggctgctgcgcccgagtccctggccaccgtcgctgggcacctgccgtcctcggaagtcgcaaccggaggtgggatttattaaatttctgagatggcagaatgtcggatacaagactggaagcgcgcttcaactccagagtcagtttctagacatgaaacatcaataccaagaacaaagcaaagaaacatttttagtctattagctcagcgggagctctcacctcgaacaaaaaaccaagcaaaaaatctttggaccaaacctccaagacttgatgcttgtcctattgaatcgaaattttggggcacctatgctcagcatgatctcctttcttgggctgaagcagagttcttgcattggtggattcccaaatattgccctctcacgccttcttcgaaggcaactattgcagctgcatttagtacagatgggagagtacttgcatctacacatggtgaccatactgtcaaaataattgattggcaaactgggaaatgcttgaatgtactgcttggacatcaccgcactccatgggtggttagattccatcctcagcgttctgatattcttgctagtggaagtttggattgtgaagttcgtctctgggatgctaaaacatctcgctgcacagcagaactggtcttctataggccagttgcatcaattgcatttcatgcaactggggagcttctggcagttgcatcaggtcacaaattgtttttatgggactgcaataaacgatgggaaactttggaacttccaatcatactagaaacccgccgttcactgagagctgtgcagtttcacccccatggtgccccatatctacttacaggagaggttcacaaccttgattctgaagattcaacgatgacccctgcacttctgagcaattattccttcagagacacacctctccttggtggttctggggtagataacttgattagtgaactacaatacatgcagaattttgagcagtgttgggaggccccttctgggtactcatgctgctgaagctcctgccatctcattaagtgtcgggtcagaacaaactacgtctctgcttggtggtggcaccgaattaccttgtacggtgaagctaagaatatggcgccacgaaatgaagaatccatttatcacattagggcctgaggcatgcctcttgacaattcctcatgctgtactttgcaggtgcccaatgttccttctttcccctaagtgttcctgtgtgtcaccaccactaactagatcttgtgctgccgcttcttaatgtatttaatgcacgacatgcaaaagtcttgttctttactctttttcatgctaattctgaactgctacaaaactgttggcaatcaacttctatatgtttggttacagcagaaaaacagtaacatctacaatttgtaccatctggatgtattggtaatattgagtagcacttatatcatctttgctagatttctatcgcacctgaagtttgagactcatttacttgaagtttctgttaaattttctgcagcgaaatgggtacccatgtttcaccctgtgggcgatttttggttgcttgtgttgcatgtgtgctgccacacagttatggtggccatggaagtcagttgcatgaacattatgactctactggggctggaacatcaccaactcgccaagcatttccgtctcgccaaattatatatgagcttcgggtttattctcttgaggacgcaacatttggaacagttcttgcaactagagcaataaaggctgctcactgtttaacttccatccagttttcacccacatcagaacacatactattggcatatggtcggcaacatagttcactgttgaggaccattttgatcaatggggagaccagagttcctgtgtacacagtcttggaggtgtatcgagtttcagacatggagcttgtaagagttcttcctagtgtaggagaggaagtcaatgttgcatgttttcatccttcccctggatcaggtcttgtttatgggactaagcaagggaaggttaggtttcttcggcaccatggtgcatcattcacttgctggggagaacgttcatgagatttagaggcatgtgctacaaatgcagttctggacataataactgaatttgagcatcgcattcttgtgctgctgaatcttatcttgattatggcttcggcaacatcctggaagaggaatttatggtcaactgagatcatctccaagaccgagagggctaacagaaaacatcagatttcagcatccaattactcttgactaacgttccactctttgcaaaaccattgtgccggcaaggagggctactattttaggtccggttaacgtgtgtaagtagccccgtctatgagaaaatggacaaggaatcgcagcctcattcagcatgaattaccaacgatggttgactactactagtacaaggagacctcaagggatacggtcgcctgtacgaatatggatgcgagccatatactgacggccggcctcccaaagatgcgatgtgttccttagttcgatgattttttttttgaaactgtatagaagcctgcgaagaaatgtagtggttggctgagtgaagtgagggaagggataggcattatttcccttgggtgacattgaccctgtttggatcagattctagccgcgagaatctgattttcgtaataaaaaaatcgaaatcgaagtggtttacggtctatttgttttggccgaataattctttccatttggcattaaatcgccaaaaaccaagaaaaaaagcatggtcctaaat

SEQ ID NO: 36212 - DNA, 1984 bp, Zea Mays
ctcccctcctcgcccgcccccgtacgtgtccatctctccactcctttcctttccttgttggtaagagcaaggcgagacgtaacgtaatccggccatggcgttcttccggggcctcaccgcggtctcgagactgcgatcccgcatggaccgcttaaagaagcttaaatcagagcatgggaaggttcagcttggaaacataactgtggatatggtccttggtggaatgagagggatcattggaatgctttgggagacatccctagtcgacccagaggagggtattcgttttaggggcctctcaattccagagtgccgaaaagtgctgccaacagcagttgagggtggtgaacctttgcctgagggtctcctctggcttcttttgacagggaaggtcccaaccaaagatcaagttgatgctctatcaaaagaattgcttgcgcgctcaactgtcccaggtattttgatcacaccgctggctacttgtgttattgttttgaccaattaaatctacaaatcatctgaatgaactgatgctgatgtctccctgttctaaagttcaaaggtagtcacagattgatagagaggtctatatgattctgtcagtatgattgtgttaatgtttatatgctttatcttgctactctctagcggctcataattaatatccttgcagctcatgtctataaggtaatagatgctctcccagtaactgcacatcctatgacacaatttaccgcaggaataatggctcttcaggttgagagcgaatttcaaaaagcttacggcaatggattgcccaaaatcaaagctttgggagcctacttatgaagactgcttaaatttgattgctcggcttccaccagtggcttcttatgtttaccggagaattttcaaggatgggaaatcaatagaagctgatgattctctggattatgcggcaaatttatcacatatgcttggttttgacgaccccaggatgctggagctgatgcggctccattgatcatgaaggcgggaatatcagttctcatactggtcatctggttggaagtgctctgtcagatccttatctttctttcgcatcatctgtgaatgggttagctgggccactacatggccttgcaaatcaggaagcgcttctatggctcaagtctataattcaggaaacagggagcgacgttacgacagaccaactcaaagactatgtctggaagacactgaagagtggaaaggttgttcatggatttggtcatggagttctgcgtaggacggacccacggtatctatgccaaagggagtttgccctgaagtatttgccagaggatccgcttttccaactgctgtccaagttatatgaggtcgtgcctccgatcctcactgagctgggaaaggtcaagaacccatggcccaatgttgacgctcacagtggactcttgctgaaccactttggactatctgaaacacggtatcacactgtcttgttcggtgtttcgagaagcatgggggtaggatcccagctcatctgggaccgtgcccttggcctgccactcgagaggcccaagagcgttaccatggagtggctggagaactactgcaagaacaaggctgcctgaagcttttcacaaatgctgctgctttttttccccccagccttggctgttaatgattaaacatgagttgtagaactattctttttccccccattggccgttgaataacgcaatagcagcgtgctctcgggcgctagaattctgtatctctccgtcacttggtggacgtccagatagacagttcatctgcggcaacactgtgcagaagagattaggacatttcacttggtgtatgccgacacttgagtttttgtttaacgttatgtttggcagagttaatcggtaattacagatttgggctatggcatgttatgttatcatgtatgccagttatctcgttgtggcggttgatccacgacatggctggattgctg

SEQ ID NO: 36213 - DNA, 505 bp, Zea Mays
atccaagccttcatccgaggactcctccatccaaggaaacgaactcccagattcaccatcggactcaaaatactcagacatagaaccaaacaaattatcatcggcaagcactatggttgaggccgccacaaaatcagtatagtcagcagcggttgcttgcgcaggtccaaacgtcggaacctacacagcaaccgaggttcagtatcacacagacaacagtttacacttaaaatctccaaaccctattctgacacctatgaaggcctggccgccgccgcggggtcttcggcagctggttcgcccgtcgccttcgaagcgtccccacccgttagcacaggggctggcgtggggtcttcgccagctctagtcagcgtggtcggtgcgggggccgtcgaggggccctcgccggcattggatggcggcgccacctccacccccgatgtcacgggcagtgtgctgtcgagattaccaaggtcctcgacctcttcggcatgcgccatctgca

SEQ ID NO: 36214 - DNA, 1408 bp, Zea Mays
ccagggcccaacctgcctggggacgtgcccgggcttggcttcgttggtggtcgtgtggatccctgcgttagctgcgcaggttgccccatgtccgcaccctccgacctaaatctcgctcatgtcgtccggtgccatgcgactcgctgttgtgcgctcaggtgcccaacgcggcgtgatgagaccggcaacgtggctggaccggcgacgcggctgcgtggcagatacatgtgagcatgggcactgtcgccacctactcgaccaggggctgctcctccccatctcacgtggaactcctcccttggttgcttctcaaccgcatcagcgagggtaataaaagtgcataggtggttagctgctgccagattgagtctagatttgaaggatcctgatctctaatctttctgacataaaaggaaccacaaatctgcaaccaccttactatatcactcaattagtatactgcattatacaggtgtctgtaggagttatgatctaattttgtgagattaaaagtgttcactttttaatgatgcacgtgatttttttctaatattttagtaaatcacaaaatgtctaatagttggcttggcattcatgcataccatgtgtgttcagtgttcttaaggcggaattttagtaccctacttttgtgggatttgtgattgagtttgggcatttgatactctgcaatgggtaggtaggagcaatggataaacttttattttctttgaacataaagagagccgcagaccatgtgcaattgccttcttctgcgctaagctgatattgctctgtatgatggagaaaagctaccatgtaggtgtttagctgctgctgcattaagtctagttttttcaatagttagcttgacattcatgcataccctgtgtattcagtgttctgaaggcagaatttcaataccctacttttctggaatttgtaattgagtttgggcatttggatattctgcaatgggtaggtaggagcaagggataaaactttattttctttggacataaagaaagccgcagaccgtgtgcaattgccttcttctgcgctaagctgatacctgatagtgccctatatgatggagaaaagctattgcataggtgtttagctgctgctgcattaagtccagattttaaggatcctaatctctaatcattccgacagaaggaatcgcaagtcctcaaacatcttactatgccgcttagttagtatactgtaatatatatgtgtcggtaggaattaggatataatcttgtgagatttctgataatatgttgagttgccgatatgcaatttgatagctttattgacaataagtggtatatgttatgctatgtttctttcatgatgggtgattccaattgataggaatacacattctattaaagtattccttctt

SEQ ID NO: 36215 - DNA, 2505 bp, Zea Mays
gtcaaactcgctgccacgtcggtccgaaccaaatccagcaccctgcaccctcttcctccatcgcaccctatcctcctcctccccggtccggcggtccccaccggtccaccacggcaccaccgtctccccgccccccgcgtccgatcaccgcaccggcgaactcggcgagccgctcgtcgctgcacgctaagctgggaatggccgctgcgctcgccagctcaccgcttgttcacctatccacctcccgcctccgcctccccaggccccgggcctcctccagttccgctccaggctgctcgatcggcgtgtgcttgggatggaggctgaaggtcgggtggagggctctgaggcggtgcgaccggcttcgatgcttctccaccgacggcgacggcgtggaggagggggagaagcgtggcgaggaggaggcctcggcgacggcggccccggccccggacccagccccagcggagacacaggtgggcgctgcggaggagctggcgtctgagcggagccgatcagggagcttttcgtcctcatcctcgtccgggaatcctggtgtatcaagcgagccaccactgttgagttttagtgttgataatatcgatacagttaaactattggaacttctaggcccggaaaaggttgacccagttgatgtcatggcaattaaggaaaaactctttggttatacgacattctggttgacaaaagaagagccttttggtgatctcggtgaaggagtccttttcattgggaatctccgtgggaagagggaggaaatctttgcaaaacttcaaaggcaactacgcgaacttgctggtgaaaaatacaatctttttatggtggaggaacccaattcagaaggggatgacccacgtgggggaccacgtgttagttttggtttgcttaggaaggaagtttctgagcctggacctactaccctatggcagtatgtcatttctctgtcacttttccttctcactatgttctcctgtgttgagctaggaattgcatcaaagattagcagtcttccaccagaaattgtttcatatttcactgatccaaattctactggaccccctcctgatatgcaacttctgctcccatttgtggaatcggctttgccagtggcttacggtgtcttggctatccaattatttcatgaaattggacactttttggcagcatttccaaaaaatgtgaaactaggcattcctttctttattccgaacttcacccttggaacttttggtgcaattactcagttcaagtccattcttccggatcgaaagacaatgtttgacatatcaatggctggtcctgtggctggagctgcactttccttttcaatgttctttgtaggcttattactctcttcaaatcctgttggggcaagtgatttagtagaagtacctagccagctgttccagggttcattattgcttggactcattagtagagcaacacttggatacagagctatgcatgctgctacagtttcgatccaccctctagtgattgcaggctggtgtggtttaactactactgcatttaatatgcttcctgttggatgtcttgatggtggaagagcattacagaaaacagggttgtactcagcttcgcatgatgacggggctaccaccttctgcttttgagactgccaggttatgatgttgctgctgaggaagaacaggacactagagtggtttctcaatgaatctgcttatgtaccccattgagaacgccaaatctggccttgaattcaccaaatagcacagagaaccaacaatgaacctataccgaggagcgtcaacagcagggacaaagcttgacttagcttcaacctgggctccattggggtgttgcttggattgcagcctgacaaaccctagatcactcatctggcttacagtgatccccatctcagattgtgccacctccaggccaagggtgcttttggcaaggatgctttgtttggatttggcctcacaacatactcgttgcttggactaggagtgcttggaggaccactgtctcttccttggggtttgtacgtgctaatttgccagagaacaccggagaaaccatgcttgaacgacgtaagcgatattggaggttggaggaggacggccttgatagcttcagtgtttcttgttgttttgactctcatcccgttgtgggatgaactcgcggaggaactaggtgtagggcttgttacttcgttctgagatacggtccttaccgatagaattaggccgtgatgtagctcaattttgtattgaaatgtagcgtcccatagcgggactgctgtaaaggcatgtgcagtttcctgattaggtgagcaatgatatcacctatgcgagtgtcatgaaattgtgccaagacgctgacgattattatcaattacatacatgtacgcacattttgaccatacgagtacagatacacacaacctacccttctatgagcatcttcaaacgattgggcgtgaagccatgaagtcag

SEQ ID NO: 36216 - DNA, 2311 bp, Zea Mays
ttttttgttattattgattttttttttccgcgcagccgatttcttttcgtctctctcgctctcgccttctcggcgcagcgcagtactacgagctagcagcaccaggctctgaaccccctccggtccggtgcgcggcagattagactccgatggggaagtctccggcgaagtggatcaagtccgtgctcttcgggaagaagtcgtcgtccaggtccggctccaccaaggccaaagatttatcgaaaggtgcgagtaacaaaggagctgctgctgcggggaaggagcccgtgttctctgagagctccccagtgatctcggagcctgtgcttgttagcgcccacaacaatgagaccgtgcgggaggtggcgaagggtgagaattccagcgtgcaagaagtgccagtgaccgatgtcagtcaagacttggagaagcagggcagtgtggggtctgatacgtccaatgatgctgagagggtgaaggaagagcgagcggccgtgaaggcacaagctgccttccgtggttatctggcacgccgagcattccgtgccctgaaagggatcataagactacaggcattgattcggggtcatcttgtaaggaggcaagctgtttcaactcttcgtgcaacatggttgattgtgaagtttcaagccctggtccgtgggaggaatcttagactttctgaagcttccattcaagcaaccatggaactttcccaacagaaccttgcgggtgctaaacctggttcctggaaggagaagttgtcgtcaaatgcatttgctcgcaagcttctatcttcatcaattgtggttgaggctcttcacttccagtatgatgagatggaccctaattcagccttcaattggttagagaggtggacgataagtcatgtctggaagcccgcttcccaaccaaggagagttagtgctgatgctaagccacatacaaggaaggccagctatgcaatggaaacagagtcagtgaaattaaagcgtaatgcacggaggagctctgcagggccatttgaaccttctcaaacaaacactgccattgaaattgagaagacaagacggaatccaaggaaattaagtagcactcctgctgagtcagttcctgatggccagttaacagaacttgagaaggttaaacgtagccttaggaaggttactaattccgtggctgaaacctcgaaggcatctagtccaaaaactgagattcctaaccatcaagaggtccaatgtgagagaccactaagaagagcaaaacaagttccaattcatcttgagaatcaagagcctgataatgttaatctgtcggacaatgcaaagatggatattctggtacctgatatccagcctgatgtggaagttgcttcagatccagtcaccatcactaatgaagaaaatgttgatgaaccaccatctgttgttgctccagtggccgaaattatgcctctgcaagacatcaacaacgatgaaaatgctttggtgaatgatgtggaagagagatccaaagaagaacatccttctactgagagcctgaaaggcagcaagaggaggtcttcattctcagctaagcctgaatatccagaaaatggctccaaaaattctccagctctgccaagctacatggctgctacacaatcagcaaaggcgaaactgcggggaaatagctcaccaaaacttagctctgattcagcagagaaaaacggcttcactcgtcgtcactcccttccatcctctaacaacggtaagatggtttcacattctccacgtacacaaaggccagctaatgctggtggcaaggatggagcgaaaggtgacaaggctatgctgtcatcaagagatgcaagcgagagaccactgaaagctgagtggagacgttgaggcggcgaatcaaatccaaatccttcatttgattagcgcgaccgtttgggtggatggatcgcccttgcagtttgctcggatttgttttgtttgtgatgtaaaaaaatgatgtccttatcgtcggcgagatgaatgaaccggctttgttgtgatgaatccgctgggagtcaacttatttattatagggttttccgtcatgccttttgtgatgtatagctgaagtattttcccggtttgttttggtttccagaccccccagacttcctcccttctccttgttgagagctgctgatgttagagagaatgagaacatgcatggattgaattgaacaatcttacccatttggtgaaatgtgggctgcgttttgactgatggttgtttgccattcatggttattgtccttgaagccgcagtatacttgtcc

SEQ ID NO: 36217 - DNA, 5072 bp, Zea Mays
ctgaacagccccccggtcgctcctcctccctctaccctccagctccagccgccagccgccagccgcccacgcccggagcaccgccgcaacccgcagcgccgctcgcccggaggccggagcaccgccgctctccccgcacggagcaccgccgcgaccacgccgctgtccatccgccgctccgcgctccctccttcgaccttcgccttggttccgacgcggtgaccgtgcgctaaacccttcgaccttcgcccggaggcgggagcgcggcggaccggagtccggagcaaccgtgagacgagcaggggcggccggcgggcgcggatatttgggcgcaacaactttctgcccttccatttctccaactaagaaggaataggatgccaagagagtttctgcaaccccaatgaagatggcaccagctccgcctccggaggggactgcaattctgctaattcgtggagctcaggaataggacgctccgggcgaactgcgaagcagaagcagcgaaggtgaagttgtgatttgtgaagcagacaagcagtgaaggcttaacctagcttcttggtttttaagaaattattaatcatatttctaaaatttgaagcataaactagtatgtttggaaccaccttagttttcataaaccagttttaaaaaaaaactgggtggtttcaaacaagcctttagagcaactccaagagaataggtatatggtttttgtaaagataaatttagctaatatttaaaaagtgtatccaatagaatatgtaaacgactattcaaatttagtggctctctatccctccacattcgctctccatttttttgatagcctgcttcaccctctattcagtccgtaggtttatcgagtctgttggattagcctacactttttctctaaaatctattttagagagtagctaaatcaataaatttagctagtctttttagctaatctcttggagttggctgtctcctaactttatactttcttatagtgcaatgacgggtctaggaccatcttaaagtttggctcaacaaactaataccccttacttgactaaattcattttttatcaggatctgtattaattactcatatttttatagtatatctatccgatgttataattttttataattttaactaaatttaatatgtgttttaaccctacaagtaactgaggatcttttatagtttgtgatggagagagtactgcttgtcatttctaagcctacatgatgaaattcccaacaaaggcctgcatcacaccatccggactctcacccgaaatctgccatcaccaagccttgcctcgcccctcggtcccgtcgttgtcgggagttctaggaacgtctctgccaggagcccagaccgtctctggcctcccggctccctcggccctctgcttgcggctttcctagtggttcctcgccggagtccggccggcggctcgtagtattgggcagcggcctaggacggttggcgggcggcagccggcaaatctaagcggcgcgccggcactggccgttgtgcgggtgtcgcgtgcgcctgtgcgtccaccggctgcctgtacggagctggactccagtcaccattaccctccctggttccctgcttgtgaccggtgagcatctctggaggctcgagtcttgactgagttctatcttaacggtgctgctagttatgcttgggtgttagtgctatggctactcattaccaagctgctaccttgattgcctctccgtcttacccaaatgccattgcttggtcaagtgacaatctcgtggctgtcgcatctggtcatattgtaactattctgaacccagctgcgcttgatggaccccgtggattggttggacttcgtcacagtgacccttttcctataggagtggttaagagagaagatctcttggagccatgtttattgcccacttccttagcgcgtgaaactgaaccatgtgcccgatcgatttcatggtctcaacaaggatttgcacctaactatgggtatacatacctttgacattctaaatgatcttctctaggtgtgtttgctggctgtttgcactgtgaatgatcatgtgaagctttaccgatcaccaatttgggagttatgtgatgaatgggtagaggtcgcagatatatcacagttgctgtttaactattataaaattataaacttcggagaggataatggttctcatttgacttcttcgaagaatacaaattctggggaggcagaagttttaggatctacttgtcgatcggaagaatctctttatttcaggggtcctggacagagaaaaataaagccagcaagagttggtggttttatttatgacggcaatgaagttgatttagatgcttcaaaggatgcagacttctcgatggaaccatgctcaaaatcaaagaagaaatctttgaaaaagactgtaaaacccagggatgaagtggttgctgtaaatggacgaaacagcacagggaatgttaaagcatcattgtcctccaatgaacaaaacaaatctcttcctcttatcacggcaaaacagtatgcctgtcgtgctgcacatttgtcttcccttgtagtttcatggtctccagttgtgtcattaagtgatagaacttcttgtttattgaggcattggtgcattcttgctgttggctctaaatctggaaatatttctttttggaaactatataagccagaatattacacaatagatgctggtgtggttaccagtgatccgatgctcatcggggttttgcatgctcatgaatcatgggtcaatgccataacttggcaagttctttctgcgggctcttcaaaatcctcgttgcttttagctactggatgctcagatggaagtgttaagatatggttagggaatattgaagggttaaatcaatgtgcaattggagaagaagtgccatttgtgttagttgctgaggttgccgctaatttatcagctccagtgtcgtcaatctcattgggcatacctgcccggtctcaacatgaggttagtttggcaattggaagagtatccgggttactagaaatatggatatggaatgcatctaccaacaaaattgagagttccagtgcatggcatgcacatgatcaagtggtgacaggtttacgatgggctatcgatggcaattgtttattcagctgcagtcaggccaccagggtaatgggtgtattgagcccttcttcagacaattgttcttgacattaacgttgtttccaatacaccttccaatgctctgtacattgtgagaatgaaaatgaaaaacgtagtgttaaaaatttggtatgatgctatgtgaagcaagcagtattctaggtgcgccaagagggtgaacgcttcaatggcagcatgaggcagcaggaacgtgtggtgagcgtgccttggttataatatatatcaggacaattctacacgttgttggatatctcacgaaaaccaccttgaagaattttttttgcattcagaattttcagagctaagggagtcagaagatgtaagagtagtagacacttaaatgttagttattcttgatgtccaattattttcctccatatggttgggttttcaatatgcatgcagctatcaaaagtttctgatcgatgctatggtcttacgctatcacctggagaagagataattgctgtggtccgcagtttggatctgaaccttttgaaccagatgtatcaagtcaggacacaaaaggcggtggtcgagttcatttggatcggtggccaatttgttggtattccactggacgggagtatcgatatttgcagtccgcagtctgcggacttatcctcaagtaaccttatgtggtggggatccaacatcttgtggtcgctgaagaaatacgaaaatgtcgaaaagaggcttgtgttgtgggacgttgtagctgcgctgcaagagctgaagaaaaccgcgcccgcctttctggagactctagtgcacagttgggcctcagctttatttgcgggcgactcacagtgtgtttctatcactgcccagtcatcacgctcgatgcatgacatgatgccccatgtcagctcgcggaagctgcacttactgaacataatctgcagaaaagtgatgctcggcaatcatgcgcggcatggtcctggtgctggaaacaacagtaatgatggaacaactgatttctggagcactcttttggtagcgagtgaaacggagctgcgagagaggctggtgggtttcacctttgccgcggtcgtgaaacggacagcgtgtctgttcaacggcacctccaccgcaaattgctggttccctgtcggcgtcgcccagatggattcttgggtatccatgaactacgaaaaggtgcacggtcagctgcagtcgatcagatcgaagatcaaagagctaggaagcaggatcgacggatactccgacgtagaaagctgcccctactgctcttcgccggtccgtttcgagtcgcctgacgtggccatctgcggagaaaggcacacgctgtcgcggtgcaggacatccatgaccctgtgctccgtcgcgcagccagtgtggcactgctcgtgctgcgggggcacggtcgacaagctgctgccggagtcgttcttcaccatgcctttggacgccgtccgtgacgacaaaggatcgctcgatctgtcggcagcctccgccccgctttgccccttctgcggcgtcctgctgcagaggtcgatgccggcgttcctgctctccacctcgccggtatagtcttcggatgcccccaggtgttacatgcagtagcaatgcaatgggaatatcgtagtggagccaactaccaagtttgttgtagctgatgctgtatggctgcagagtggcagtgccgtcattggggctcgaaatgtttgtgataggttttgtgacttctttctgcttagcccctctaatatatctcgagatacctattttttatttaccgtaccctgcctctggaccaaagcctatgtggcggtggccgccaggctgagtgcggggcgaggggcttgggccagctcctgcactcagcctgatgaccatgtccg

SEQ ID NO: 36218 - DNA, 1335 bp, Zea Mays
cctgcgtttcctccgacgtctgctctcccggcgaaggaagggaaggagccacgcgaaagaaagctgacgcccacgcgcccaggagcaccaccggtgacgcgtgatcatattcgagcaccaatcccctcatcctccccagcccccggcgctaaaatctacacaaagcctcgctaaaccggcctgattcgcgctcccgatctcgcgttcgatcccagcccaccgtgaggtcctccagcctcccgcctcccgccagatctcggtgtcgttcgttcggtttcgatttggtggtggaagggaagggatgagcgggatgagcgcacggataaaggagatggtgcgtgtggccacggcgcggctgggcggtgagcaggcggggggtggcggggcttcctcctcaggcttcgcgcgccgggagtccacggcgcggctcggcggcgggggcaccagcctccggaggcagccgcagccgatggcaccctccgtgcgcaccgtctgttgcaacgaccgcgaggccaacgcccctgtcgggtacaagggaaattctgtgtcgactacgaagtacaacatcctaactttcttacctaaaggattattcgagcagttcaggcgggttgcaaatctttactttctcatgatctcaatcatgtcaactacacctatcagtccagttcatcctgtcactaatgttgttcccctaagtcttgtgcttctggtgtctctcatcaaggaagcttttgaggattggaagcgttttcagaatgatatgtcaattaacaatgcacatgtcgatgtattgcaaggtcaatgttgggaaagtactccatggaaacgactgcaggttggagatattgtgaggatcaagcaagatggttatttccctgctgacttgctcttcctatcaagtacaaaccctgatggtgtttgctacatcgagacagcaaatcttgatggggaaacaaatctgaaaataaggaaggctttggagaagacttgggactatgtaattcctgaaaaggcttctgagttcaaaggtgaagtgcagtgtgaacaaccaaacaattccctttatacgtttactggcaatcttatcatggacaagcagactatacctctctcaccgaaccagttactcctaagaggatgcagccttcgtaatacagaatacattgttggtgttgtcatattcaccgggcacgagacaaaagttatgatgaattccatgaatgttccctccaaaagaagtacattggagaaaaagctagacaagcttatccttgccctttttgcaaccctcttcacaatgtgtgttattggtgccattggaagatgatcaaa

SEQ ID NO: 36219 - DNA, 2911 bp, Zea Mays
caggcctccacaacaaagctagggtttgcctcccccaccctcctggcctcctcccgctttccctcatcctcgtgcgaacctcgcgagccaaggaccgctcgtcgtctcttgtctcgccgtcgccatgggtacggagcggaagcggaaggtgagtcttttcgacgtggtcgacgagacctccgtctccggcaagctgggccgcgccgcctccaacggcgccgccgccactgcggcggggaccaatccgtctgtcaaccggtggaacggccggccctacacggcacggtacttcgagatcctcgagaagcgccgcacactgcccgtgtggcagcagaaggaggagttcctccgccgcctccgcgacaaccagaccctcatcctcgtcggcgaaacgggaagcggaaagacaactcagattccacaatttgttcttgagactgaaggcttgggtaaccgttccatggttgcctgcactcagcctcggagggtcgcggcaatgtcagtctccaggcgtgtggcagaggagatggatgttactattggggaagaagtgggttacagtattcggtttgaagattgcagcagccacaaaactgttctcaagtattctgatctaatcctgttgtgttgaacactattgcttcctatcagatatttgacagatggtatgcttctgagagaagcaatggcagacccacttttagagaagtacaaggtgattgttcttgatgaggctcatgagaggactttggcaacagatgttttgtttgggcttctgaaggaggttctaaaaaatagaccggatttgaagcttgttgttatgagtgctactctcgaagcagagaaattccagggttactttagtgatgcaccgttgatgaaggtgcctgggagacttcatccagttgagatattttacacccaagaaccagagagggactatctagaggctgctatcaggacagttgtgcaaatacatatgtgtgaacctgctggtgatatccttgtattccttactggagaagaggagattgaggacgcatgtcggaaaatcaataaggaaatcaataatatgggagatcaggttggcccagttaaagtcgtgcctttatactctacactgcccccagccatgcagcagaagatttttgaacctgctcctgccccattgaaggaacgaggtcctcctggaaggaaaattgttgtgtccaccaacattgctgaaacatccttaactatagatggcatagtttatgtgatagacccggggttttctaaacagaaagtttacaacccaagaataagggtggaatccctcctggtgtcaccaatttctaaggcaagtgctcatcagagagctggtcgtgctggacgaacgcaacctgggaagtgctttaggctatacacagagaagagctttaatgaggatttgcaaccacagacatacccagaaattcttcggtcgaacctggcaaatacagttcttaccttgaagaaacttggaattgatgatttagtgcattttgactttatggatcctccagcaccagaaactctaatgagggccttagaagttttgaactatttggctgcactagatgatgaaggtaatctaacacagttaggtgagatgatgagtgagtttcccctggatccacaaatgtcaaagatgcttgtcatcagtccaaagtacaactgttcgaatgagatcttatcaatatctgccatgctgtcagcacccaattgcttcctccggcctagggaagctcaaaaggctgctgatgaggccaaggctcgatttggccatattgatggggaccatctgacgcttctgaatgtataccatgcatacaagcaaaacaatgaagatccccagtggtgttatgagaactttatcaattccagagcactcaagtctgcagacaatgtcagacaacagcttgttcgcatcatgactagattcaacctcaagatgtgcagcacggatttcaatagccgtgagtactacgtcaatatcaggaaaaccctgcttgcagggtatttcatgcaggtcgctcacctggaacgaactggacattacctgactgtaaaagataaccaggtcgtccatcttcatccctccaattgcatggaccataagccagagtgggtcatctacaatgaatacgtcttgactaccaggaatttcatccgcacagtcaccgatatccgtggggaatggctaattgatattgcgccgcattactatgacctgagcaatttcccgtcatgtgaggccaagcgtgttcttgagaggctgtataacaagcgggagagggaaagagctgcaaatagaggctgaagttgatacttccacaaacctggtgcttcataattccacagcaggttatcacagatggcggacccgtttgtcatatgcatgatgtcttccacagcctgttgcctagtgtttcatcagcatgatcattatgcagacagcctcgagaaatcccttggcagctcaattagttatgatgcagattaattttgtgccattctccttatttttgtatgcgtaagatatttatattttgcgtttctatgtgattaactggttatccttcggttggaatgaaattccactgattttggtttattagcttagctggggttatgtatgcctataatatgcttacttccggttgcaggaggaagggttgaacgaggttggcaccgaagaaaatttggtgtccctttttatttatagatagatagtttctgtgtggtacgccaaggataaggcgatctgaaattggattgcgtctatctaatgtgtaacaaaatggaaacttttttggtgggtgcaatgtagcacttgcctatctgacacttgtgcacgttcgatctccagctaaacagctatgtgagccgg

SEQ ID NO: 36220 - DNA, 1405 bp, Zea Mays
tgctgccccccattccttccctcccagccagccctgctcgctcccgcgcgcgggctaatacacaatatctggcgccgctcctcctcggcttcggctgcccctcgcgcactcgcttcccgtgggccgcgcgggtgaaggagcgtacgtgcgggtggttgatttgtggctagctggtgcgcgcgggatggcgtcgctcgccgtgtccggcgcgaggctcggggtggtcgtgcgggccggcggctcggcgggatcgggcggggagcgcaggagtggggtggccttgccgtcggtgctcttcaggaggaaggacgccttctctcgtgtcgttctgggctgtgatggtgctcctggaaaagagctgctgatggccggatgtggcagtgatcacttgctttcatccacagagcctgtcgtggatgctctgcagcggtctgaaggattacagcagcgaaaatcgaagtcgtccggggtaacggagaccggaccagacccagcgcggcggcggcggcggacggaggtgtggcgtggcggtcgagcacggcgcaaggatggggagaggcgccgtccaaagtccaggcgagatggaagcggaagggccgaaggggtggggactggggactactctctgcatcgagttggacggcgtggatcaagccactctagaatcgaacggtgtgtattgttctccagtaatgtagggtaggcagagtccggagcatcaccgttcactggataattcgctcgctccgctcgatgcccgcttgtttgcggtgaagcctccggcgaacagccgtagcggaaacgccgcccgagatgtctgctccctccgccccaccccgcacggtgatctgtgtgggcgacgtccacggctacatcacgaagctggagagcctctggtccaacctccaggccgcactccccgccgacgccttcgccaccgcgctggtcatcttcctcggcgactacaacgaccgcggcccgcacacccgcagggtcctcgacttcctcctcgcgctcccgacgcgctaccccgcgcagcgccacgtcttcctctgcggcaaccacgacctcgccttcgcggcgttcgtcggggcgctgccgccgccgcccgacggctccccgttctcggccacctgggacgagtacatccacaacgaggagcacgaggggtggttccgcgggccgggattcgagggcatgcacgtgcaggggaggcggtggggcggggtcatcaaggagaggtggaaccccaagaagggcctcccgtacaagggctccatctacgacgcgcagcccaccttcgaatcctatggcgtcgcccatggttcctctggaggcattcgcgttgtcgtcgctcatcgatgatgagaagaagcttggagactgtcagttcgacctctaaaag

SEQ ID NO: 36221 - DNA, 3696 bp, Zea Mays
atgagctcagatagagtcaatgcatatggtggttcaagacgagacgtatatggtttcattccaatgcagaagctgaggcgcaataacagtacctggagatttggtaacatacttatagtcttagctatgaatatggattccacagctcttcaatatgaaaaccaaaaattggtgcaacaactggaggtacagaagtccgaaatgcatgcattggagcgcaagttcaaggagcttagtgatgatcaatgttcttatgacaagactctgatttctttgaataaactgtggaatcagctgattgatgatttggttctgcttggagtacgggctggtggggatttggataatttgcaagcacttgaccatgaagagttatcagaagaatctttggagtcgtgtccttccgaggagatatttctcttaaggctcttgaagacaaacaacatcagagataatagtgacactagcttgttgaaatttgttgaagaagctcttgcttttcggtcttcagcaactgttactttgatgaagtccctgcaagagactatttcttcgcagcaagctagaagtgagtctttgtctttagctttgaatggacaaaagtcaaatgaagatgttattgttgcccttcgaaatcataatgattgcttgaaagaggtggcagagaatgcgagtcaagccatctctattatcaacgagaagcacaaaaggtatcttgatgagattgaggcttttaaaagcaaccattcaagggagctacaggaaatcaagcgtatttcaggtgagctagaggaaagcattgcagagcttgaggaaagtcaaaggaagttggttgtgctccagttgcagaggcatggttctgtaatggatgcatctggggcaaatgctgtgaatggtggtatttctactcataaatcttcagataaaagtatgagctggcaagacctcaaagatgctgttgacgcagctaagaccctcgcaggaaaccgtctattagaactccatcagactcaagaggataatctgatactatccaaggagctgggagatcttgaggggcaattgaaagatgagaagtatgtcttggtatccaaaccgtacatgattcttaatgataaactacaacatttgaatgctgagatagagcgttatagagggttggttgaagttttacagaatgacaaggaccagctcatgcaaagggagaaagaaatttctgcaaaagcagaatcgctcgacagtgttaaacaaaccattatcacatatgagaaaaaaattgaagaactggaaactcaaattcagatactcttttctgaaaagaatgatctcgaaaccaaggttgaggagactttgcaagattcaggtaagaaagacttcaagaatgagattcatgttatggctgcagcactctccaatgaactgggtatgatggagaatcagttgagtcgatcaaaggatgcagcttctgaagcacttgcattgcgtgagcaagctgaatcattaagatcattggtagctaaaaagattgaggaacacaagaagatttcggataaatacaactcacaagtaattgagatcaagtccctcaaggcattggaaaagcaggagctggagtttattgcagatatgtacgtgaaagaaagttctgagtctaggacaattgctgatattgaagaatcagaaacccgagctcgcaatcaggctgaatatttgaggagcaatctagaggagcatagtcttgagcttcgggttaaagcagcaaatgaagctgaagctgcatgccagcaaaggctttcctttgctgaagtggaactagaagagttaaggaccaaagtagatgcatctgaaagagatgttgtggaacttaaggaggcaataagaattaaagaggctgaaggagacgcctatatttctgatatcgagacagttggtcaagcatatgaagacatgcaaacgcaaaatcagcatcttcttcaacagcttactgatagagatgactttaacataaaggtatttatttgttctctccttttccactttcacgtcaaagctgcaaactcataacatacagattggaattggagatacatgcccggggtttttatgccaatctcggcaatgacactacctactttatgaaaagtcatgaaaagccgtaaaatttcagacaaccttattgtttctgccttgttagcgagcataatgggtatgcaagtgatcaaccatattttgatgtgcaatgaagtgtgaacctctggcaaacaaggataacaaggaacataatgtaccagtattgtgagttctatggcatatttttgcagatattgtagtgactgagataaaagcttcacttacatctgattggccacctcataatgtctattagctagttattgttggaaattatgcacactaatcaagttcacagaactctttctacagttttgcaatggcaaaagcaatataagctttgattttctttttagttgctgtcagtaacttaaatcttatataacagctagtatcagatagtgtgaagatgaaacaagcttgtagttcccttctctctgacaagcttatgctagagaagcaactccagcaagttaacacttcactggagtcatctaaactgaaaattgcccgtggcgaagagcagatgaagacttgtgtagcgcaagctataaaaacttcagctgaaaacagacatcttactattagcctggaaaggattgcgctggagttatccaacacagataaggaactcaagtggcttcggtcctccgttggatcctctgagaaagaatacgagcaaactcagcaaaagatatctgagctgagagcgttactggagcacgagaggttaggcttctgttgcaagttaatcttgcaatgccgctgtctctcgaaatttgcttgttacctttacttttttcaggagtgagaggcggcggcttgaagaacaatatgaagaggtgaaaaatgaagttatggagctgacctctgagactgaagagactactgtccggaaacttgaggatgaaataaaagaatgcaagggtattctcaagtgtggtgtatgctttgaccggcctaaagaggttgtgatcaccaaatgtttccacctattctgctcgctatgcatccagagaaacctcgagattcgccaccgaaaatgtcctggctgtggaaccccattcggacaaaacgacgttagggaggtgaagatatgaacctcaccaaagtgacagtgacaaaaccgacttgcgtgtgaacagcagcaacaaactcccttgtgaatatcgtctgttatgttggcgaacatctagatctaacttgctttattactgggattaaaattaggataagaactggaagaagtgaagttcctaatttatttgctatcgtgtgtgctatgtatgattacccttggcagcgagtggtgtatctgctgggtgtcaatatgctcgaattctagctcctccctgctagcgggtgcatgccagttttattaaggctattccatgtacatggtgtcacactctttaatacataccacataggatgaaaatctgatgtgacatgtgattgaaacatagggagacaccactcatgcaccagattatagacattgaaatctgaaccatctaaatgaactgtaactcatactcttatatatatctaacattttgtcttgtg

SEQ ID NO: 36222 - DNA, 3209 bp, Zea Mays
gcaccaccaccaccgtgccgcgagcgaagtgacgtcgcgttcacttccctcataaaatctcgccccccactctctctctacccgagcccagcagtaatttttttttggggaaggtgaagcgagaggagcaggaggagagaaaggggaacgaggccggccgcgaatcggaggggaattcggggggcggggctcggtccggccggaaattcgcgcgattcgggcgcgggcgccgcggatgtgaagatctggtgctcggcgggatgacttcttcggcggcggccgcggctgctgccgcccaggtggcgggaggaggtggaggcggcgagggagatgccgccgctgcggcgcgaggcggaggcggaacggaggacggcatgtacacggagctgtggaacctctgcgccggcccgctggtcacggtgcccagggtcggggacaaggtgtactacttcccgcagggccatatcgagcaggtggaggcgtcgaccaaccaggtggctgagcagcacatgcaattttacgatctcccgtggaagatcctgtgtgaggtcatgaacgttgaattgaaggctgagccagacaatgatgaggtttatgcccagctcactctgctacctgaatcaaagccagaggagaatggctctagtgaggagatgcctgcttcacctcctgctgcacttgcaaggccacgcgtgcactccttctgcaagacattgacagcctctgataccagcactcatggtggattctcggtgctgcggcgccatgcagatgagtgtcttccgccactggatatgacccgtcaacctccaacacaagagcttgtagccaaggacctgcatggtgtggaatggcgctttcgccacatattcagaggtcaaccacgaaggcatcttttgcagagtggctggagtgtttttgttagtgccaaacgtcttgttgctggcgatgccttcatctttctaagaggtgatagtggggagcttcgtgtaggagtcaggcgtgccatgaggcagcaagcaaatgttccgtcttcagtaatatcaagccacagcatgcatcttggtgttcttgctacagcatggcatgctgttaacactgggaccatgtttactgtctactacaagcctaggacaagtccagctgagtttgttgttccctgtgatcgctatatggaatcactgaaacgaaattaccctatagggatgagatttaaaatgaggtttgaaggtgaagaggctccagaacaaaggttcactgggaccattgttggaaatgtggatcctgatcaagctggatgggctgaatctaaatggcgttacctcaaggtgaggtgggatgaagcttcctccattccacgtcctgaaagggtttctccctggcaaatagaacctgcagtcagccctccccctatcaacccacttccagtgcacagacccaagagacctcgctctaatgctgtagcttctctgcccgagtcttcagctccaacaaaagaagctgctccaaaggtcacattagagactcaacaacatgccctgcaaaggcccttgcagacccaggataatgtggccccgaaaagtgtttttggtgataacagtgaattggactctgctcataagtcctccctgcgaccgtcaggttttgatctggacaagagcaccattggcatgcagaggaagctgggttcagatatttggatgcgaatgaacagacctgatggttacagtgaaatgttatcgggatatcaaccacctaatgaaggtgcacggaattcgcagggtttctgttctttacctgatcagattgccgctggacgtcctaatttctggcacactgtaaacgctcattaccaagaccagcaaggcaatcacaatctgttccctggttcatggtccatgatgccttcaagtactggctttgggatgaacagacagagctatccaatgatccaggaagtcggtgggatgtctcagagttgtacaaacaccaagtttgggaatggagtttatgctgcactacctggccgaggcattgatcgatacccatctggatggtttgggcacacgacacccggtggtcgcgtggacgatgcccagccacgcgtgattaagcctcaacctttggtccttgctcacggcgaagctctgaaaatgaagggcaactcgtgcaagctttttggaatccatctcgacagcccagccaaatctgaacctttgaagtctccgccaagcgttgccacaccggcagctgagaagtggatggcagacggaatcgacgcagacaaaagccctgagccgcacaagacgccaaagcaactcggtgctacacaggtggatcctgtcccagagagatgcccacaagcttcaaggggcacacagtgcaaatcacaaggcgggtcgactaggagctgcaagaaggtccacaagcaaggaatggcgctgggcaggtccgtggaccttaccaagttcaacggctacacggagctggtggcggagctggacgagatgttcgacttcaacggcgagctgaaaggctgtagcaaggagtggatggtcgtgtacaccgactacgaaggcgacatgatgctggtcggggacgacccctggaacatggtgcacaagatcttcgtgtacacgagggaggaggtccagcgcatgaacccgggcgccctgaactcgaggccggaggacagcggcctcgccaattcgacggagaggggctccgcatctactgctgctgctagagaggcacccggctaccagtccgcctcgtcgcttaactccgacaactgctgatgccttggcagctagctggtcgtcccaagtagtagagaacaaggcaaatgtatccatagatctccttgtagcggagcttaatgcctttttttcccctttctaatatgcattggatgagcccgtagcgcaccgtagtagtatctaaagctggtgttctgagttggttggaccttcctgcagttttggtttctccttctgatgtggcaagttttagctggtcgcacctacctaatgtatgcttagcaaacgaagtcccactaagcgctgtacataactgcccctccctgcatcaactctaatatatcatctgcttaatcgtcacccctgggcccccgtgctggttgctcaagatcccagctgcttgttgtggcgcttggtttggttcgttgtcggccgtggctcatgtttgtt

SEQ ID NO: 36223 - DNA, 2010 bp, Zea Mays
gaatgcctgtccaggatggtcctactgtttcaatccaagctaccccttgggatgcggagatgctaagtaggaattcttctcggacctccaccaagcacctgttatctgtgtatgcggagaagttagattattaagtgcagttgggcctgacttgttttatggctcgaaataatgagggccatctcgagctgccagagatggatcaaattcaacccaagaacatcccacacaatgaatcactgcctctaggccagaagcttctcctgcatcatggaagtgatgcgccccttagaattggtcattcaagtcatggaaatatgggacttagaataaatgatcttccatcttcaagtcgcactgtgcagactctaggttatagagttgggaacccaggaacctcgcatgctccctttgttcattttcatgctggaagttctggtagccatttaccagaccctgctgtgaattatccacataggtctgaggaaggcttcgctccagtgggttcccatatggacaacagaagggctgcaatgaagcgaaaaggtcccagtgtacaccctgcagggatcagtgctactggttattatgttggaagttcttccagtactcagccatctaactctgtgcagccaaatgcagctccacttgctgagccctttctccgtcaaatacctttaagcattgaccaaagtggttgggatatccaacacttgattcaccaagaagggtttcagaggaatgtgagagcacgccacagtagtattccattagtacccagatcagcttcaacatacccattaaacataaacagtgttcatgtgccgtcattcggttcaaccgcaagtgcttcctcaagtgcaccagtggaaatgaaccaagtgcctgtttctttgccaacaagaactctaccatcaggtgcaccaggtatgactagcagggtcccaacagggagggcttactatcctgtggttggaagcagcagcagcagctcaagtgttggtgctgtcccaactatccacggatcatctggcgctgcaatgtttgctaacgagccatgccccaccagatggtcattcagagtcatccagctgctacttccgcagcaacatctacatccatgcggaccgcccaaccatcattacctgccagaaccgcagcggcttccagacatgcaaggcatgtgtcagcagggcttgccaacaacggaaggtacagaagggccaggagctcttactacaggcttcatccattgatggtagaggcagagcggttcatgatggaccacttggtcttctacgaatcgagagcagcagctgctgacccccacagggacatgagactggacattgacaacatgagctacgaggacctgttggctctgggagaagctatgggcaatgtcaacacaggcctggccgatgaaaaagtttccgagtgcgtgaaagaagtggtctgctgcagttctgaccacacgcagatggaccaagacgacggaagctgcgccatttgcctggaggactacagagacaaggaggcgctgggaatactcaagtgcaggcacgacttccacgccggctgcatcaagaagtggctgcagacgaagaactcgtgcccggtgtgcaaagcggccgcggcctagtagggagggacacgccagatgaggaggaggaggagcaagcgactgttgcgctcgatccgattcatttttaggctcaggtcaagatgtatgccgtctcattcttttttttcccatcctcctagccagggcagccgtgtaaatagatgctcttatgggattaactattttctcttgggttacattggcccagattcttttgttgtatttaacaataacaacccagttgtggaagactggaaggtattgatcgtcaagtggttatacattagtctcatgtcggggttttcggatccgccgacacttgaaattagttgcgaggtatacctcttttggacggtgaagtttggtacacggaatcttagttgtgg

SEQ ID NO: 36224 - DNA, 4290 bp, Zea Mays
cctagctcgagccaaggagtccggcggaaggccgccggtgtgcgaaacagcgtcagcgtcgagaggagaaaaagtcaccgcgagtccaggatccatgctgaggcacttggtccggacgggccagctcgccgacgcgaggagcctattcgacgcgatgccgcgccgcgacgaggtcgcctacgcgactcttctctcgggctatgccgcggcagctgacttcccgggcgctatggcgctcttctcccgcttccgcgcctcctcctcccagccacacgacgccgcggatccgttcatcctcagccccgtcctcaaggcgtgcgcttccgctgccgccagcgcagggctcctccccctccctcacgccgccgcggcggccgctctgcacgcgttcgccgtccgctcctcctccctgccgtccgtgttcgtctccacggcgctcgcggacgcctacgccaaggccggccgcctcgacctggcgctgcaggtgctcgacgaaatgcccagcaggaacgtggtctcgtggaccacgctcgtcgcctcgctggcgcgtgctggccggcggcacgacgcgctccgccgcttcgccgagatgcgggcctccggcgtggcctgcgactcccacgcctgctcggcggctctcacggcgtgcgccgacgcggggctgctgccacgcggccgcgaggtgcacgcgctctgcgccaagctcggcctcgacgccgtgcccttcgtcgccaacgcgctcgcggcgctgtacgcgcggtgcggcgatgtcgaccgcgcgctggccgcggtcggccgcatgggctcgcacgacgttgccgtgtgcacaacgctgatcgcatcctacgtccagaccggccgcacggaggaagccatcgaggcgtttgtgagaatgcttcgcgatgagtcgtcaaattctgcttcaccaaatgagtatacgttctctgccgtaattgccgcgtgtccaaatatggatcgtgcatatcttggagagcagttacatgcacaagctgcacggagagggctatctcatgcccgctctgtggccaattcccttgtcaaactctattcccgccgtggccatctttcagctgctgatgctatcttccgggagagtgtcgtcaaggatgttgtctcctggagcacaattatatcaggatacacacaagaaggcctcgccgaggagtcttttgccttgttctcagaaatgcggcatcacagtagctgccctcggccgaatgagtttactcttgccagtctcttcagtgtgtgtgcaagtgctgcgtcgctggatactggacgccagctgcatgcactcgctgttgctgctgggcttgaacaccatgcaatggtcaggagtgcgcttgttaacatgtatggaaagggtggtagcatgtcagatgctaatgtcgtattttccaatcgcactaaagatgatgtgatttcatggactgcgatgatcgttgggcatgctgagcatggtcacagcaaagaggcttttgaactgtttgaggaaatgtgccgtatcgggctaaagccagaccatgttacgttcattggtgtactcactgcttgctctcacgcgggggaacttgagctcggattgagatacctcaatgcaatgaacaaaagctatgggctggagcctgaaaaggagcactacggttgtgttgttgatttgttagccagagctggtagaatacatgaggctgaggagttgattggaagaattgctgctgaggaaagagatggtgtggtttggacatccttgcttagggcatgtgctgctcgaggggcagaggaaactggaaagatagctgcagagaggatgatggaggcagagccatggggttcaggagcacatgtggtgatggccaacctctatgcaagcaaggggctgtggtgtgaggcagcacaggaacgccatttgatgaagcagaaaggtgttctaaaaggtgcagggtggtcatcagtcgaagttggaggggacgacaggggggttggagtgtttgtttcaggagatcggacaaatccccaagacagtgccatctacatgatgcttgagctgatgtactatggagccggaatggttcgacaaatccctgatcagttggatttaggatctgaaggggagctaacagtttactaagtcatcctgaaagaagcactgactaaatagagaaatttacatggtaccttgtcaatgatggaacatccatcggaggacaacataaggatacacattgtatcctgctcttcagttgcttcaacttcaagctataatacctgtccatttattgtatctattgttttttgtgggtggctttgccctattctaaatgcaccaactgttttttatttagctatttgatattttccctgctggacataaatcactacatttatggctgatgtatttctactaaatggaacatagtgtagcagctctagaacatggaaaaccttaaatgcttgtttatgattaatctaactctttttttattcatggctgttcagatacttcatgaagtgagaataaagcgggatagcaaaagggagggcaggcttcgtgcttggtgcgagttgtctcactgggtcaccaggtcgcatgttcgaagcagtctcttcgcatttgtggggggaaggcttgcctcggtttacccccttccccagaccccactcatgtgggagactccggccctgggtctgccccttttcgctgcgatctgtattgtgccattcttgccagccatgggcgattcagtcatttccagtacaccaaatcttatagtcaaggaatgcaacaaaactgttttcatatcagaaatggtgttgaaaaagacgcaaaatttggaagagggcaatgcagaaagtttggcaatttttgaacatttttctgattctggtaatgatatgcaatctgaatatactgaagttgtcgctcattaggatgatgcctcgttagaaaaaaacagatgactttcatcataaggccttattctgagcatagccaacataaatcaaaatgggcataatttttcttacatgtatttctgcatgtggttgttcaacttatatggttcttaagaccctaacactgagtaaataagtcggaagtgcttatttgttcaacttatgtaagtgtttgttcagtttgaggatacgggcagtgtctggctattggctaaagccagaccatgttacattcattagtgtactcaccgcgtactcacacacgcaggggaagttgagatcaaactaagatacctcaatgcaacgaacaaaagctgcaggttggagcctaaaaatgagtactacagttgtgttgttgatttgttgggcagaaatgttaagttttccggtgcttctaggcccatcagtcactaaaccaatagaatctaagcagaccttccttcttgcaactggtatttgctgagctgaaatggtccgccatatccatgatcagttggatttagaatctgaagtggagctaaacagctaactgagtaatctcggaaggagcacttactgcaagggagaaatttacatgaggccttgccatcggaggacaatataaggtcttcataagatatctgcaaatcattcagaaatctagggtgcgctgatgacttccagtccaatcaagtattctaaaaaagaattatgtcccaaacaaactacaatacctgtggccagtacaggctaaatcgtgctcaagttagtatctgcatcagatttgtattttagtctaccaaactgatataaccttggtagttggtacattgctcaagtgacttggagcagagcagaatgtgaatatctgcctgatgatcccttttacagcaaaagcatgccagagtgtgtgtgtcgtattcattcgttttccagaagggagcccggccaccatatggaaggaaattcactcttcatagtcacaacagcatcagtgtattccgtgttgcacgtactgctctttaaatctgtacactgctagtaaaatatttcttgactgacttgctggatattcttgtgcagcctggtgatgttttctaatgttacagtaatagagttaattttcatcccttatgccaactgatcacatgttactttacagcattgacgatagagtgatgtaaaggttaatggtgtcgattctttgtacagccttttttttacttttttttgtctctgttgagatgccaagttttggtgtaaatttttaatgcctggttttcatgagctagactgccaccagaagtctgtttttttatcattttgtgtgaagtgttg

SEQ ID NO: 36225 - DNA, 242 bp, Zea Mays
ccatacctttcatgaagaacatcgatggatctgtatgatgatgcaatattgcctctaacaactatgcatcttcctcatgcataacatttggcagaacatgagttctatcacgttcatttcctctagcactggcactacatgttcactctgtggaagaggttggtgtgtctcgtgaatgaactgaatctgtcatcgatgttctcatggtttccagttgtataaagcgaagtgctactctctcc

SEQ ID NO: 36226 - DNA, 1276 bp, Zea Mays
ccgtcgtcagggttttcatccgccgcaacgcccaagccacctcacacctgtacaaagaggctgcaccaccaattgtctgctggtccagcaaaaaaaacatcgtatactttagtggggtcagggatatcaggcacaccgcaggtgaagccatgagcatggaggtagcaggtgcagaggcacctgtcaaggggaaattccttggtatacttgtctgctggcttttgggaaatggaagccttttcgcgtggaacagtattctaaccattgaagattactactcccatctcttcccggattatcatccaacaagagtactcacactagtttaccagccttttgcctttggaataaccctcatcatgacatattatgaagcaaagatgaacacaagattgagaaatcttgcaggattttcccttttcttcctcggttcttttgcattgataattctggatgttgcaactaaaggacatggtgggcttggtgttttcgttggtgtatgcataattagcgccatatttgggacagctgatgctaattgtcaaggcgcactggttggcgacctttctttaatgtgcccagagttcattcagtccttcatggcgggactagctgcatcaggggtcctaacatcagctttgagattagttaccaaggcagcttttgagagctcaaaagatggtcttcgcattggagctatactgttcttttcaatcacatgcctgttcgagctggtgtgcctcctgctatacacattcgtcttcggcaaactacccatcgtgaagtactaccgtgcaaaggcagccgctgaaggcagcaagactgttgccagcgacctcgccgctgcagggatcatctctgaacaacagggacagatggaggaggatccagagaaatacaagcgtctgaccactaaagagctgctgatgcagaacatcgactacgcgctcgatatctacctgatatacgtcctaacgctgtcgatcttcccaggatttttgtctgaagacaccggagcacacaacctgggaacatggtacgcgcttgtgctgatcgcgatgtacaacgtgtgggacctgatcgggaggtacgtgccgctgatcccgtgcttgaaactgacctcccggaagggcacgctggcggctgtcttggcgcggttcctgttcatcccggccttctacttcacggccaaatacggcgaccagggataagaagaatggcagccctaagattatggtgggttccacttccacctctccccgaccctccactaatg

SEQ ID NO: 36227 - DNA, 1927 bp, Zea Mays
aaaggatgttgcatttgaaaaggacaagccttgtagtgcatgttaagctggaaagcaagttgctaacacacatcctacaaaagcttttatgtcaacatcaaggccactagagttgcttcatatgtatctatttggaccaacaacttatgctagtgctggtggcaacctctattgtctggttattgttgatgacttttcaagatacacttgggtgttctttcttcatgataagtctgagattgcatcaatattcaagaagtttgccaagaaggcacaaaatgaatttgactgcaagatcaagaagataagaagtgacaatggtaagaaatttgataacaccaacattcatgagtactgtgatgaaattgggatcaagcatgaagtttctgcaacataccaacctcaacagaatggagttgttgaaagaaagaacatgaccttgatcactcttgcaagaacaatgattgatgagtataacacaccatagaggttttgggatgaagctgtcaacactgcatgctacacataaaacaggttatttcctcaccggctacttgagaggactccctatgaactgctaaatgggaaaaagccagacgtctccttctttcgggtgtttggatgcaaatgttacatctacaagaaacgccatcacctagggaagttccaaagacgttgtgatattggtttcttacttggttattcatcaaaatccaaagcatatcgagtattcaatcatgccactggcgtggtagaagaaacatatgatgtggagtttgatgagactaatggctcctaaggagcacctgaaaatcttgatgatgtaggtgatgagccacttagggaagctatgaagaacatgccaattggagccatcaaaccaaaagaagatgaagaagaggtgcaaaatatcgacatgccttattcatcaaatgtaccgcatgatgatgaaaaagatgagaggcatgcaaatgaagatacatttgtctcatgaacaagcaagggtacaagttgaagatgttgatgctccaagatcttcttcccaagtggttgacaagaggaactcatcgctactccaagcacatccataagatctaatcattgggagtccatcacaaggggttatcactcgttctcaaagacatgcttcatttattgaacatcactcttttgtttcttgtgttgagcctgcatgtatagatgaggcgctacaggatccggactgggtgaatgtcatgcatgaagaattaaacaacttcactcgaaattaagtttggaccctagagaagcctccacaagatgcaagggtcattggaataaaatgtgtgttctgaaacaaacaagatgatcaaggtgtgattgtgcggaacaaggttgtccaaggcgctatatgggctaaagcaatctccaagggcttggtatgagcgtcttcgcgacttcctcatcaagaagggcttcaagatcgggaccgtcgacacaactctattcacaaagaaacataacagtgatattttcatttgtcaagtttatgttgatgatataatctttggctcgacaaatgattatcattgtaaggaatttggtgagttgatgtcgaagaagttcgagatgtcaatgattggtgagctaacatacttcctcgactttcaagtcaagcaaatgaaagatgggaacttcctctcacaagagaagtacaccaaagacttgctgaaaagattcaatatggagaagtgcaaaccaatcaagacgcccatgcctactaatggacatatcgacctagatgaggaaggtaacccgtttgatcaaactatctaccgttccatgattggtagtttattgtatcttaccgcatctaggcccgatatcatgtttagtgtttgtatgtgtgctcgatttcaagtaaatcataagaaagctcatcttcgtg

SEQ ID NO: 36228 - DNA, 241 bp, Zea Mays
atggggagggcgccgtgctgcgacaaggcgagcgtgaagaaagggccgtggtcgcccgaggaggatgccaagctcaaggcctacatcgaggagcatggcaccggcggcaactggatcgcgctgccgcagaagattgttgggctgaagagatgtggcaaaagctgcaggctgagatggctcaattatctgcgccgaaacattaagcacggtgacttcacagaagaagaggagcatatcattt

SEQ ID NO: 36229 - DNA, 2057 bp, Zea Mays
aactcctcatcctcactaccaaccaaggcactttctcgcctcccccgtcttcgcccccttcttttctctctctctctctctctctctctctctctctctctctctctctgtaagttgccaaatcgcagctgcagcaacaaccgatccaatacatactaggttccattgcatcacacatcagtcactccaaaccatcaaatcacacacccatcagatcacaaaggcaaagaggagagagagagaaagagggatgatgaggacgacgatgagagagagatactactaaactatctatccatcaatcaatcaggtagcccggcagcaatcgcgtgccgcctttccactcacgtacaccaccacctcccaggctcagctcggttcgttcgttgccgcgtcaaatcgggacaagaagccagccggacctgttgcagtgttgcttcgcctgccctgctgctgttgcttgcgccacgcacgcacgtacctgaagaaagcagcgacggattgatcgaccggtggttcgctgtcgccacggccggcatgtcgtcctcgtcctcgtcctcgtcgtcctccgccgccacggtgttcccgcggtccccgcagctgccgcctccggtcctggtggagaacggcctcacgccgctgcatcagcttacgccggtagccgcggccgcgccggccgccgagcagctctgctacgtgcactgctacttctgcgacaccgtcctcgtcgtccgtgatcgaatccctgctgctctcgatatctctctctatacatacatgcagcgctcagctgtttaaatctcaaagattttcacaagcttgaaggtgtgcctgggacctgggtgcaggtgagcgtgcctacgagcagcttgttcaagacggtgacggtacgatgcggccactgcagcagcttgctcaccgtcgacatgaggggcctcctcttcccgggcacgccgacggacacggtcgcgggggccgcaccaccaccagctgctgacactagtacgactaccaccaccatcaccacggcgccgccgccggccaactcggtcaacaacgggcagttccacctcccccactcgctcaaccaccctcaccaccaatccctcctggtggacgagatatccagcgccgcgaacccgagcctgcagttgcagctggagcagcacggcggcctcggcggcctgatactcggcggcagcaggaacacggccgcgccgcctccgccgcagccgcctgcagcgggtaaaggggccaaagagccgtcgccgcgcgctaatcccgccgtcaacagacctccggagaagaggcagcgcgtgccgtcggcctacaaccgcttcatcaagtgggtgccatgcatgccagcagtatcatgctactacatttttcatgctgtgcgttacagtgtacaagtcgtatggctggccggtggttctctcatcggccacggcaatgcatgccggccgcctcgttggcagcaggaagagggaagagggagacgaccctgatggtttttgttctcgttcagtcgtcgttcgctgaggaagagagagagagagaggcagatcatgctatagtgacgtgtcgctgagctagctaggtagcttctgatcatatgcatcgatctgacgtctcccttttgcttttcttttttctgctggctctctccctcggggaatacgattgcagggacgaaatccaacgcatcaaggctggcaatcccaacatctcgcacagggaggccttcagcgcggcggccaagaactgggcgcactttccacatatccactttggactcatgccggatcaccaggggctcaagacgacaagcctgctacctcaggatcaccagagaaaggacgggcttcttaaggaagggctctacgcggcggcggcggcggccgcagctcatgcggcagccaacatggggattgctccatactaattaatttacaattactcctcctcaagcttgctactgatggtaccttgcttccgagaatctcccttctttacattagcttgttaaacgttccaaatcacgtatgttccttcga

SEQ ID NO: 36230 - DNA, 1728 bp, Zea Mays
aaaagccttgatgtgtccgtctccgtcatgaagacaaacattcaccgagccgaccgttgccttccccccaactcccagccccagcgtcaactgactacactcgctgactcgctcccccggttccccttctctgctcgccatcttttgctctccgcttggctcgtcaatcacctcctacgctccacacgccgccggcgactacaactgcttctgccgtggagaagaagggtttggggagaagacaacctaaatcaattggatctgggagtatcagatctaaaaagtcaggttttcatcaaggtagaaaaagaaacttttctgtccggtcatggctttcccaactgcagcagctgttttgcttaatgagaacatgcagattcataaaggaaacagggttgatgcaccaagtgccaaaccactgaaatcatcagccaaacctgagagaaaggctcttcaggatgtgtctaacattcctaaaggcactgctttaaagaacagatccacagtcaaagaggggtccgccttgaaagaaaggcctgcactccacaatgtgtctaacaacctcaaagagaggtccatcctgaaagagaggcctcctcttcaggatgtgtctaacacccgcaatgagaggtccatcctgaaagagaaatctgccctgtgtagccatgaagctattaagaacccagtgaatatttttgctgatgacgaagagaccaaagggtgccatgaatgggctaaggatgggatggagggcactcacttcactggaaatgattctcagaagttggataaagatgtgcaacacaaacgtatcaagaagaaagtggcaaaagttacgtcagcattgtatggctggtcacatgaggtatatggtcatgtgatgtttatggctatggttcccaagttttctgaagaatcgaaagagctggagctggaaccagagattcttccagacatcactaggtgtatgtctacctcaggcaagagggatgatgcaccaagcgccaaacggctgaagcctaagcttcaagaaccgaaggctcttcaggttcaggatttgtctaacactgtcaaagggagcccttctctgtgcagccatgaagctgtgaagaacccagtgaaaatattcactgttgaagagaccaaaaagtgtcatgaatcggctaatgatgtgtcggagggcactcacttcacaggaaatgatcgtcagaagctggataaggatgtgcaaggtgacaaaacacagctggttgaagattctcctactgatgatgagcttgacgactacccatttttggacaacagtcctgttaagtttgagctgaaagatgagtcagtgattccagatattggagcaatctgaagtgatagtgtttgtgcgattgttctgtagcaatctatgtagtacgatgtttagtacatgttgtttgttctgtagcaaactatgtagtttgagctgaaagatgagtcagtgcctcatcgggtacttttgagtaccgtagcggttgtcaagtttcatgctctcctgaaacatccttcgcaactcgcaagtgaaactctggtttatgccctgaatcagctgctgaataagctaatgattgcatgagtatccgttgatgcatagtagtgaaaggaatggctaagagggagtgaattagtttttttttaattttgctcaaatctatgttttcagttttcagctaatgattgcatgagtatccgttgtac

SEQ ID NO: 36231 - DNA, 1793 bp, Zea Mays
caagctcaagcttgtccaccacttcctttctttagacagaaatcttcctcggcatctcccattctcactcactcacctactcatgccccccaataccactttgacccaccccatcgatcaattgatcaccaccacaacccacaccccgcacggtcgatctatcttgttatatgcgtgcatggaggggagcagcagccagctgctggagacctgccttcctgctagcctctacgcggttactcctcctccatgcgcccatcctcatccccttcttgccccgctgccgaaccagcagcacatgcttctgcagatgccgtttgtcaaggagcaggctgcgaataatcatggcctgatgctctcttcggaccaccaccaccacagcggcctcctgtacccgctgcttcttcccggcatccctttctgcccctccgtcgccgccgcctgcgagaagactaccaccaccggctccggggcgctcgatgccggcgaggcgggcaccagctcggcggcggcgaaagccaccggcgagatcgctagtaccgccgccaccgcatgcaacagcccaagttcctgcaattggtacgtacgtatgacgattatggcctcacaccataactcacttgttgcttcttgcgcgcttgggagttgctgggagcaatagtggagtacgtagtgtggttgaccgattgttagggtttctagtgcgcggcgcggggctcgttcgttcgcgctgatgatctgattgggaacacatctacatctgttgatatgatgagctgagcacgcaggtggaagggcccggcggcggcagcagcgggggagaaaggaggacggatgaaggtgaggaggaagatgagggaaccgaggttctgcttccagacaaggagcgacgtggatgtgctggacgacggctacaagtggagaaagtacggccagaaggttgtcaagaacagcctccatccaaggagctactaccggtgcacccacagcaactgccgcgtgaagaagcgagtggagaggctatcggaggactgccgcatggtgatgaccacctatgagggtcgccacacgcactccccctgcagcgacgacgccgacgccggcggcggcgatcacactggcagctgcgctttcacgtcgctctagagaccgatgcatagctttgtgcatctgaacgaacctgctagcacctagcagcgcagtgctttagagacgatcgatcgatgcaccaatatatccatgcatgcaagtttgtagaaagtaaatcaatcaaatggatcagcacggtacgcgtgcctgcttaaagcctgacatctgccatgcatgaaggcacagaaagcgaggccaggccaccatgctggcttgctgctgtagctgtagcctgtaggcagtacacacattggtaatcacctggttaattgtacaaagaaggcagctcgttgttcatcgtgcgtgcagctgctaatgattgcgaaactgcaccatagcagtttctgcgagcctgcaggcaaacgaacctgagcttgcagacaaactaagcagtgtttggttgaaaagacaggtagaacggagtcgttctgtcttagttttgttgttgtttggttataaagtaactagaacggagtgactccaattagataatattcttttcagatccggaaccatccaactccaaaaaaatcaacgggacggagccgctccgttcccagcccgctcgcatgttgtgataaacttgtgtgtcatgctaatttctacttcagttactcttcaaccaaataaaggatggagccgct

SEQ ID NO: 36232 - DNA, 2613 bp, Zea Mays
aaacggtacagagaaaatcggatcggaggagaaagtatgcagccgcaccgcatgcacatggccaatcgggtttcaaccacatcaaatggagccacacgcgaggtgacgagcacacacacccggcggagcgaggcgaggcgacgcgcaggcgagaccaccgctacacaaggagcgaatcaggactgctcttccgacggcggtcactgtgcgcgtgacagccaccatcgaccgagatggcggacgctcaccacttcaacaacatctccctcggcggccgtggcggcggtcaccctgggcagttcaaactttactcaggaggcttggcgtggaagaagcaaggaggaggaaagatcattgaggttgataaaggtgatatcactaatgtggcttggatgaggattcctaaatcctaccagctcagcgttgggaccaaggagggcctctgttacagattttttggcttccgcgaacaggatgttagtaacttgactaatttcatagagaagagcactggaatcacgccggaagagaagcagctttctgttagtggccaaaactggggcgggatacaaataaacgggaatatgctttgctttaacgttggttcaaaggaagcttttgaagtctctctagcagatgtggcacagactcagatgcaagggaaaacagatgttgtcctagagttccatgtagatgatactactggagctaacgagaaagattcattgatggatttaagttttcatgttccgacttcgaatactcaattcattggagatgagcatcgtacttcagcacagatgttatggcaggctatctcggttgaaattgatggtggtggctcctcagagatggcagttgtcacatttgacggaattgcaattcttacaccgaggggtcggtacagtgtggagcttcatcagtcattcttgcgactccaaggacaagctaatgatttcaaaatccagtatagtagtattctccgcctatttgttttaccaaagtcacacaatccacatacctttgtggttatcacacttgatccaccaattcgcaaaggacaaactttgtatcctcacattgttattcagtttgagacagaggcagttgttgaaagggaactgacattaagtggggagattttggctgagaagtacaaggataggcttgagagctcttataggggtctaatacatgaggtattctccaaggtccttcgtggcctgtctagtgctaaagtgacacggccaagtacattccgcagttgcctagatggatatgcagtcaaatcatcacttaaagctgaagatggtttgctttatccactcgaaaagggcttcttctttctgccaaagcccccaacactaattcctcatgaagagattgagtatgttgagttcgagcgtcatggtgctggaggtgcaagtatatcatctcattactttgaccttttggtcaagctgacaaatgatcaagaacttctcttcagaaacatccaaaggaatgaataccataacctcttcaacttcatcagcggtaagcatttgaaaattctgaatcttggagatggacaaggtagaactagtggtgttactgctgttcttcagagcactgatgatgattctgttgatccacatctggagcggataaaaaatcaggccggtaatgaggaaagtgatgaagaggatgaagattttgtggcagacaaggatgatagtggatctccaaccgatgattctgatgcagaaggctctgatgctagtatgagtggaggagaaaaggagaaaccttccaagaaggaagctagtagctcaaagccgcctgtgaagaagaagcagaagagtgggccagatgaaggttctcaaaaaaagaagccaaagaagaagaaagatcccaatgcccctaagagagctatagctccattcatgtacttctcaaaggctgagcgagctaatatcaagagcagcaatcctgaactggcgaccacagagattgcaaagaagctcggagaaaggtggcaaaagatgacagcggaggagaggcagccatatgtggagcagtctcaggtcgacaagcaacgctatgcagaagagtctgcagcctaccgtggtgcagccgctcagcagggctctggtgctggatcggaatgaaggtttaatcgtctcgacagttaacttgcaaggctggatgattgagtcgtcagaataaagctggaatacccaaaaacctaagctgaatgtcatcgtttgacctgttgggttgttccggaattcaaccaggattcattctagttcatcaatgcttatattaattaggcaagcaatctggtctggaatcgatcgaggccgttccctggaaccgaacatacccctaagcaaatcctgccaggtaggacaaaatgtagcagcaggtttaaacaaatttcagagaagtacaagtattttttgcataagaagtacacaattacaactgttttgacatgtatcatagaactacaattaattcccttttggcgccatgaaaatacagcacctttgatacttgactaatactatgagaatagctttagttacgtggtatccagtgtcaatagttgtagttatctgatacatg

SEQ ID NO: 36233 - DNA, 1903 bp, Zea Mays
gtaggatcccaatgctatatgctactcgactacatactgctgagtacatcagtactcagatagcccaagtcggaccacactgcttgcacagtagaagatgataggcgatgaactggattccgatgtggttgtacgctacttcagaggcaagagcatcctgatcactggatcaaccggtttcctggggaaagtgctcgtggagaagatactgagggttcagccggacgtgaagaagctcttcctcctcgttcgagccgccgatgacgagtctgccaagcagagggtcgagaccgaggtgacaggaaaggagatctttcaggttctgaaagaaaagcacggtaacgggttcgaaggtttcgtccaagaaaaaatctgccctctgccaggagacgtcatgcacgagaacttgggcctaggcgctgccaaactgagacaagtgtgcaaggaaatagacatcgttgtaaacggagctgcaactacgaatttctacgaaagttctatgcatgcacatgcagatacgatgtggctttcgacacaaatgtcatgggagccaagcacatatgcgagttcgcgaagaggtgcagcaaactcaagatgctgctgcatgtttcaacagcttatgtagctggtgaacaggaaggggtggtgctggagaagccattccgtttgggcgaaaccctgagggaaggcacgcacctggacatcgagtccgaactaaacctgataaaagagacgaggagagaactgaaggccagccgttgttcagaaaaggctgagaggagaagcatgaaggagcttggcctcaagagggcaagggagttcgggtggcccaacacctatgtgttcaccaaggcaatgggggagatgctgctgggcgcccacctccggggagacgtgccggtcgtcatcgtccggcctagtatcataaccagcatcctcaaggagccattgcctggatggatggaagggatcaggacgattgactcgttcatcatcggctacgccaagcaggctctgtccatcttcttagttgacctcgacctgataatggacgtgattcccggggacatggtggtgaacgccatgatggtggccatggcggcgcactcggaggagcgggggcagcagactagcatctaccacctgacgtcgtcggtgcggcacccggcgccctacgccgtcctcgcggagtgcggccgccgctacttcctccacaacccactcaggtccgggggcaagaacagcgagcccgtgcggcctagcaggatgcgcttcttccgcaccctccccgggttccgcgcctacatggccatcaagttcaggcttccccttgagatccttcgcctgctcaacattgtcctgtgcggtgctctctcccggcgccacgacgagctcagccgcaagtacagatacgtcatgcatatcgcagagctgtacgcgccttactccttgttcaaaggatgcttcgatgactccaacacggagaggctgagggcggcgatggcgaacaggagcagcggatatgacttcggtttcgatcccttgtgcgtagactgggacgactatttctacagggttcacatccccggtgttgtcaagtacctgtgtggttactaggttaatacatatttaagatccggagagagccaaatgtatctcgcatgttttaatacacaaatatgtcgctgtagtttgcagattattaatttccctagcattcttgttcagtggtacaggtttctaagaatggtacttgttttcctttaatcttctgccactgaaaggtgtcttactctttacatatgtcaggagcttgcatttggatgcatatatgcaatgcgaccatatggggtcaacacaaaaaaaaaaccctctaagcatggcctcgtacttgtacttgtac

SEQ ID NO: 36234 - DNA, 2454 bp, Zea Mays
gccgagaaatgagaatctcgttcgccagcagaagcagtcaagctgaaagagagggaggaaaaaaaagagataacgcacggccgcccgcagtgcttgaaaccagcccgctcctccattccaacgtctccacccactgctcccaatggcgacgccgttcccgctggaggccgacgagggggaggcgcgggagctcctctacgaggcgtacaacgagctgcacgcgctggcgtccgagctgggcggcgcggcggcggcgccggcggtcgtggtcgtcggccaccagacggacggcaagagcgcgctggtcgaggcgctcatggggttccagttcaaccacgtcggcggtggcaccaagacgcggcgccccgtcgcgctccacctccgcttcaacccgcgctgcgacgagccccagtgccgcctcctctctgcaaccggcgatgccgaagagcatgacgaagccggggttgccgcccgccccatgccgctcgccgacatccaggcatatattgaagctgaaaacttgaggttggagaatgacccttgccaattttcagagaaggaaatcataattaaggtagaatacaagcattcccccaatctcaccattattgacactccaggcctcatccttccagctcctggccgtaaaaacagagttttgcagagccaggcttctgctgttgagagccttgttcgtgctaaaatccagcataaagagaccattatactgtgccttgaagattgtagtgattggagtaatgcaactacacggagagtagtgatgcaggccatcttatcaagagagttggaagatattgcatctattgaagacaagttaggaaggtcacttacaaccatggagaaagatagaattggagtgggtaacttaagattatatttggaagagttgctgcagaagaggtacattaagagtgttccattaatcattccacttcttgagaagcaacatcgaaatacaacaagtaaattgcgtgaaatcagtcatgaactcagtgatctggatgaaaccaaactgaaggagaaagctcagctattccatgacacatttttgaccaagttatctttgctattgaaaggcatggtggtggcacctcctgataaatttggagaaactttagtcaacgagaggattaatggaggaacatttactggaagtgagaatttccagctcccgaacaagatgatgccaaatggtggcatgcgtctttatggtggtgcacaataccatcgggcaatggctgaatttcgtctggtagttggtagtaccaggtgccctccaataactagggatgaaattgtcaatgcttgtggtgttgaggatattcatgatggtacaaactactccaggactgcttgtgtaattgccgtggcaaaagcacgtgacacgtttgagccattccttgatcagttgggttttaggcttttgtacatactgaagaggctgatcccaatctctgtttatctgttggagaaagatggtgagcactttagtagccatgaagtgctcataaggcgtgtccaggaagcattcaagaggtttgttgaatccactgagcaatcatgtcgtcaaaggtgtatggaagatttggagagtaccactcgttatgtcacttggtcccttcacaacaagaaccgtgctggattgagacatttcctcgattcatttgttgcaccggagcaactatcagtaaatacattgaacgagcggttttctgggttgaatgataacaaacaggataaggcaaagggtgactcgaagtcaaaccattctccagacacaaattcgtccactgctatgccagagacaaggctggttgacctattggatagcacactctggaacagacgcctggttccctcatctgaaaggcttgtttatgcgctggttcaccagatttttcatggaatcaaagagcattttcttgtcaccactgaactgaagttcaattgctttctcctcatgccgattgttgacaaactaccagcacttctaagacaagaccttgagtcagctttcgaagaggaacttgatagcatctttgatgtcactcagctgcgccagtcacttgggcagaagaagcgcgagctggagatcgaactgaagcggatcaagcgcttaaaggaaaagtttggagagataaataagaagctcaattctcttcaggttaggcagtaggccaggctcaaaatttagcagtagcttggtagtctaggactccaggtagagtgtttcaatgctgtaataaaataattggtcatctagagtgacttcttgttgtatcctatcagttgtaaatatgaagtattcctatgtcttaacgtatgttgttgctacacgggttttcggagtcttttttcccttgcatgattcgttacactgcgattccttcaggttgaagtcagccaaataggtccaaagtaacagcaagctct

SEQ ID NO: 36235 - DNA, 1133 bp, Zea Mays
ccgggttttatttgaatttttcgggcaatgctacgtgaagcgtaactctatttcttgatcaacatcaacatgtcgcgggaggataatgtttacatggccaagctggctgagcaagcagaacggtacgaggaaatggttgagtacatggagaaggtggctaagaccgtagatgtggaagagctcaccgttgaggagcggaacctcttatctgttgcctacaagaacgtaattggggcccgccgtgcctcatggcgcattatctcctccatcgagcataaggaggagtcccagtcgaaggtgttttacctcaagatgaagggagattatcacaggtaccttgctgagtttaagactggtgctgagaggaaggaagctgcagagagtacaatgatagcttataaggcagctcaggatattgcgttggcggaactggcatctactcatcccataagacttggacttgcacttaacttctcagttttctattacgagattctgaactctccagacaaagcttgcaaccttgccaggcaggcgtttgatgaggctatttctcagttggatacgcttggcgaggattcatacaaagatagcaccttgatcatgcagctcctgagggacaacctaaccctatggaccgctgacagcacaacggaggacggcatcgaggagggcaatgaggcctcgaagggtgatgctggtgagggtcagtagtctggtaaaacctcgattgatggttcggcatgtttttgaagtctactgtgttggaaaccatgttctaatagaaggcgtctcccgctccatgcattccaagattctgtcctccccctccctccccccatgttgtaggctggtagtggtcaaattagttggccctgggtccatttggactgatgtattgtttactgctattgaagtcattcgttctcgttttgctcttgcagtggatcgctatagccttgtgttttcaatcttttagggcctgtttgggaatgcagtttcaaaatactgtaattttgagataccatagtttataattgtacatgacataaatactacggtattgctttaccacaataaaactatagtattgctcaaaaccgagatctgtttggttctattggaaaaacaaa

SEQ ID NO: 36236 - DNA, 2615 bp, Zea Mays
gactctcacttcctgtgtgctctcgtcgcctccgatcgaatcgtgtcgggcgggctcgtgcccgatcttgtctggtcctgtcttggctccccgccaggaatagcgcaccgagatcccttgcgcgcacggaccagcagatcgcgcgcgggagtgagagggcgacagggcgtggccgcgaggtgggcatgggatcggagggacgggtctggaatggcgcgggcgtggccgccggcagcggctatggcggcagcgtcgaggcgaaagcgaccaccgcggcgcccgcggacgttcccacgtcggcggcctccgtcgacatctcgctgccgctcccggagatgtcgcctcacatcataggtctctgcaaggagttggtcaaagggtggtcgtcgattgacagctcgcgcttctccatcgagaccgtgtctgggggcatcaccaatctattgctcaaggtttctgtcaaaggaaacaatggcaatgattcttctgttactgttcggttgtatggaccaaatacagacttggtgattgatcggaaaagggaattgcaggcgataccgtatctctcagctgcagggttcggggctcggctgcttggaatgtttgaaaatggagtagttcagtcattcatctatgctcgaacactgtcacctgcagacatgaaagaacctaaaatagcagctgaaattgccaaggagctacgcaaatttcatcaagtagatataccagggtctaaagaaccacaattgtggaatgatatattcaagtttttgaagaaagctgcagcattgaagtttgaggataacgagcagcaaaagagatatgtaaagatctcatttacagaaatacaagatgaagttaaagaacttaaggatctcttggacattctgcatgcacctgtggtttatgcacacaatgacttgctttcaggaaatctgatgctcaatgatttggaaggtaaaatattttcctttgtatcagtttccccttttttattattactcatttgcaaaactaaccatagtggcggtgtgcccgttgtttcttctgtcagggaagctatattttattgattttgagtatgggtcatacagctaccgtgggtatgacattgcaaatcatttcaatgagtatgcaggatttgactgtgactttaatttgtaagttctctccatgtcattgaaatactccaaagcaatatatatcgttgtcatgtttttagtcagcagtattcatttgattgtgtctttaggtacccagataaagatgcccagtatcacttcttcaggaattatctgcatcctgatagacctagtgaggtatgtgaaacaaaaccaatagaaatctattcttggaattcaagttctttctggagtaaatgaagttttctgttagtacctactctatgtaatatatatttgacgttatgaagttagtaatggcaacgactgctatgcaaacagtgcttctgtgcaagcgtgcaagcaaaccatctgatttattagattacgatccaaccacaccaaccacagatacaaccatggtttgttaggggtttttttttataaagattattgagctggtggtggaaggatttaagtgttaaatgtgacttgcggttggatcacgatctaatggatcagatggtttgcttgtacgtttgcacagaaagactgcttgcatagcagtcgttgccgttagtaatacctccatatatgccgcacgtgtttgacattttgagcgttgtgaagctttttttttctgaacaaacacagctgcgtgccatggggaaacagcaaaagcctcccgcctaacatacggccagccaaggccaaaaacaaaaacctatgagatgcaaatttttgggttgtacgtgccctaagttttaggttgtacatgtcttccaaaccagagtctttaggttgtatatgccctaatatggacagatggtggtggtacaagagttctttttctttaccaagggcatagcatttggatttttctgttctgatgcaattcatgattctctctcttttctttcttccttttctttttgcaactgaaaggtgcaggcacaagatatggaagtgctttatgtggaaacaaacactttcagactagcatcgcacatttactgggcattatgggctcttattcaggcaaaggtatccccaattgactttgactatcttggatacttcttcttacggtatggtgagtacaagaaacaaagggactcctgcttcgccttggcacaaagtttcctctccgggctaagaaatggctagagcctgagaatctggtcaagggtttgcactgttgtacgcatactcggggcgggtacgcgttgtgatcatcgtctgctactcagaaactctattatagtggtggtagcagcctcattttgttgtatctgatggtagtttcgtcatcgcctgataggaaagtctcatgatcgccctcgggaacgcagggtggcgagatctgtacttatatttgtaataaacacaatccggatgggttctgtcctgtgcaatttgttgtgcgcataagcattccgtgtttttatacattattgtgaggaattgcataagtttttttgtttttcgattaaa

SEQ ID NO: 36237 - DNA, 315 bp, Zea Mays
gttcgccgcggcagtcgcgcactccggggcgcccatgcgatgctatgcgcttcgtctgctgaagacggcgcggcgttcgccatggtcgggcggcctcgatactcgcgctcgacgtctctgacctccttacccatgccatccagcttcccctgcgacgactccgcctgctccgaccgtatcctcttccgggttacccgcggcatcgacgtctacgcctatctcctcggcgtcgttcacgcagaagcgtcatcctgggtcaagcagatgggggaggatgaagatgacacattgaccgttggttaggaaatgcgtggc

SEQ ID NO: 36238 - DNA, 3701 bp, Zea Mays
gagttgtctgttgcctcaccacccctctgtccctgcttccttctgctcccgcaacgggtggcctccgttccccgaccccgcccgactctcccacacatctccggcgctctcttcgagtcctcctgcagtcccgccgccttctcatcgctaccaaaattgcaaagccggactggaactcgcgtcgcgcgcaggggcatggacccggacgacgaaccagcggcgcagcggaaagccgtcgacttgcacctgccgcgcgacacggagcctgcctcctcgcccgcgtgcacccgccgcgccgcgccgcgcgtgctcagctactgtgacgtccctttcgcctccgcctcggcgcagcgctgcgcatcattcccgcagcgccacggagagctggcgcacgcccgctcggcctccttcgcagcctggatcgaaggcggctcggcgtcggcgccggcggcggcactcgagcgggccatgtcgcagtacggcggtgcggacggcgcgctgccagagttcgtcggcgccggcggtggcgagggcatcttccgcgtgccgctccgcgcggcgatgcacccggcgcgcccgccgccgctcgaggtgcggccccacccgctgcgggagacacaggcgggcgcctttctgaggacgctggcctgcgacccgcggcgacggcagctgtgggcgggcgccgagtccggggttcgagtgtggggcctccacgaggtgttccgtgggtggtggccgggcgccgggccgcggcgccgcggtgacgaggaggccgcgccgttcagagagtccgtgccggtcccgcccgcgctctgcgccgctgtcgacggcgctaacgggatggtgtggacggggcacagggacggcaggatcagggcgtggcgcatggaccacgccgcgcccgccggaggatactccgccggcagtgcgcccatgttcaaggaggccctctcgtggcaggcgtacagtcgcacgccggtgctcgccatcgtcgtcacgttgtacgggatgctaagactagggaacttttaaaagtatttggcatcgatggacaagtcgacttagctcgtcctgaggccccagtaatgcccgaacaattcatagaggaagagattaaagtaaaacccacaaaaagggagaggccgcaaggttctttcacattttttcagaaatctaggaatgccttgatgggcgcagctgatgctgtacgcagagttgcaacaaaagggacatttgtcgaagataatcggcgaactgaagcagtggctcaagcaatgaatgggacaatttggtctggttgcacagatggttcaattattgtttgggatggaaatgggaatagactgcgagaatttcattaccatagttcttctgttcgatgcataaagacactcggagacaaggtttgggtgggctatgcaagtggcactattcaagttgtcgatgtcgaaggtaaccttcaggcaggatggattggtcatagctgcccagtcatagacatggcaattagtgattcttacattttttctttggcacatcatggtggtattcgaggatggcctctaagttcccctagctccctagatgatattctatgctatgagttggctagcagggaactgttatacacaaggctagagaaccttaaaatactggttgggacttggaatgttgcacaagagaaagcttctcctgaagcactaaggtcatggttgggtggtgcattttttgatgttgggctggtggtggttggtttgcaagaggtcgagatgggtgctggagttcttgccatggcagctgccaaagaaagtgtagggcttgaaggcagtgccaatgggcagtggtggatagacagtattggcaaaacacttgatgagggaatatccttccacagagttggttcaaggcagttggcaggactacttattgctgcatgggcaacgaatgaccttaggccacatgttggtgatgttgatactgctgcagtgccatgtggctttgggcgtgctattggcaacaagggtggcgtcggattaagaataagagtctttggtcgcaggatatgttttgtaaacaatcattttgctgcacatcaagagaatgttagccgccgcaatgctgattttgaccgcatttatcggacaatgactttcaccaaacctcagggatctgcagcttctgctacagctgtccaattgcataaagcagctaatgaaaatcaagcagatgaaggtaggcctgatctggcagaagctgatatggttatcttccttggtgatttgaactaccgacttgatggcatcacctatgatgaagcaagggacatggtctcccagaggagctttgactggcttagagaaagggatcaacttcgagcggaaatgaaggcgggaaatgtgtttcagggaatgcgtgaaggcccaatcagatttcctccaacctacaagttccagagacaccagtcgggtctctcagggtatgattcaggcgagaagaagagaatacctgcttggtgcgacaggatactgtatcgagatagccgtcctgtaccaatagctgaatgctcattagagtgccctgtcgtcgctgcaatcacagcgtacgaatcttgcatggatgtcacagacagtgaccataaacccgtgagatgtacattcagcgtcgatattgcaagagtagacgagctgataaggaggcaagagtttggaaaaataatcgaatctaacaaaaaggttcgctctttgcttcgagagctccgttctgttccggacaccgtcgtcaacgcgaacaacattacattggaaaatcaccaagaagatgtcatcctccggataactaataactgtgaaaccagcaaggccgcttttgaaatcctgtgtgaaggccagacagtcagaaagcagggcggaacccaatctgaggagctgctcccaagggcgtcctttggcttcccactttggcttgaggtccaaccatcgatgggtctcatcggcccaggagaaacagcggaagtcgtcgtgcgccacgacgacttcctgacgcaggaagagtacgtcgacggagcacagcggaaccggtggcgcgaggccacccgagacctggaggtcgtgctctcggtgacagtcacgggcagctccagctcctcggccgaggccgtcgcgcacagggtcaccgtccggcactgctgcccggcgcctccggctcccctgcccgccaaccggcgctctgccgctgcctcgcctcgtgacgacgttgccgcgtcggataaccagtcgaaccacctgcaccgttccgatctcgccagcttcggtagctcggaggtgcgtgacctgtgcgggggcttgtgaaagcgagtttcgctgcctttgcttcatcgtcctgcattcctgctccttacatgtgcgtcgtcctgccgttctttgcgtgtcgaatcaaaaagcgagagagaaagaaagagagaggaaaaaaaaggaagaaagaagagagtgcaattgttgtaattacctgtagtaggtaaaattttcaagctaaccttttttttttgaccttcttaagttaagtagtagatgtggcattgaaattgtgttggtgcaaagtggagtgagtgtatggttgtatgtatagtaatggaggttgtatgcttgtatagtctattgattggacgatgctttgctcctactgcaatacagcgcaacgagaac

SEQ ID NO: 36239 - DNA, 132 bp, Zea Mays
acttgcagagggtgcaaaaggtttcagcagtacctgatgagtttgcgaccggaaccaggagcagcagctcgactgcggcagctgcagccgtccgtctccagcctccttggcctgcagtgcagcctgcctgga

SEQ ID NO: 36240 - DNA, 4495 bp, Zea Mays
gtccactccactccactccactcccgttcccctcccaattcccaaaggccaaagccctcctctgctccgctctgttccgctctgctccgaccaaatgcgcgattagagccgcccgcgagatcgatccccgcgcggccaaggatcatcggccgccatggcgtcctcgcaaggggagtcggtacccccgtggctcaagtctctccctctggcgcccgagttccgccccaccgtggccgagttcgccgaccccatcgcctacctcctcaagatcgagcctgccgcggcgccattcggcatctgcaagatcgtgccaccgctcccgccgccgcccaagcggaccacgctcggtaacctctcccgctccttcgccgcgctccacccggacgatcccaccccgacattccccacccggcaccagcagctgggcatctgcccgcgccgcccccgccccgcgctcaagcccgtgtggctctctccccaccgctacacgctccccaagttcgaggccaaggccggcgcctcccggaaggcgctgctcgcgcgcctcaatgtccccgcctccaagcagctctcgccgctcgacgtcgaggcgctcttctggcgctcatcggccgaccgccccgtcgtcgtggagtacgccagcgacatgcctggctccgggttcgcgccctgcgccgcacgcctgacgcagctgcccccggcgaacgtgggcgagacggcgtggaacatgcgccgtgtggccaggagccccgcgtctctgctgcgcttcgtgcgggaggaggtgcccggggtcacgtcgccgatgctctacgtcggcatgatgttcagttggttcgcctggcacgtcgaggaccatgacctgcacagcctcaactacatgcattacggggctcccaagacgtggtacggggtgccgcgcgacgctgcactcgccttcgtggaggtggttcgcgtccatggaaaccttcgcgatgctgggtgataagacgacagtgatgtcccctgaagtgctcgtggattcagggattccctgctgcagattagttcagagtgcaggggagttcgtggttactttccccggagcatatcacagcgggttcagtcatgggttcaattgtggggaagcgtcaaatatagccactcctgaatggttgatagttgcgaaagaggcagcagtccggagagcttccatcaatcgtcctcccatggtttcacactgtcagttgctctatgaacttgcgttgtcattgtgcttgagggatccatcaaatgacgttatggaaccacgaagctgtagattgaaggagaagaagaaaagtgaaggggaccaattgatcaaaaagatttttgtgcaaaatgttattgaagacaataaactgcttggtcattttctgagtgatgggtctccttgcattattcttccagtcaattacaatgatggctctccactatcaactttgctctcaaaatttcagtcaacaactgattcaaggatatcgcatggccagtgcagtaaggcagaagctccaaaagactccagacgcttaccaatggatggggctgacaagaaccgggaattgtcatcatccaacaaaaattcattgtcagccttctcaggaaagacagtcccactcccacctagaatctgcatacatgaatgtgcaaatgtgactggggcatcacacgcacataatgcagaaaatgacaaggtggatatgaacagtgctgctgggcttttagaccagggtttattatcctgtgtcacctgtgggattttgagtttttcatgtgtggcagtgatcaaaccaagggagtgtgcagcaaaatggttgatggctgctgattctagtttgatcaacgatcggcttgctagttctggagaacatgatatagatgcattacaaggtgggaggacaactggtggaattttacgatcagattctgaaatgaatggcaatagtatagtttctgatgctgatgctgcacctctcaatgggcattctgctcttgatcttttggcattagcttatggagatccatcagattctgatgaagatgttatgaacataaaaaatcaggtccctaatgtctccaatgaattaataaatcacacgattgaatcacaaccatatacttcatgtaatggtgattatgatggaacaaaagtgtcctcaagtagtaaagaacgcgaacaaggaccaacttcccatagctcaaagtgtattggtaactcaaacaccttgaatggaccaaaaggtgttcgcactagaaataaggatctacttaagatggtgctttccgaaggttttcaaccaaaaggtatatgttcagaaacgcataagaaggttcagtgtgagccatcaagctcaaaaaagacttcaatggagatcccttgtggcacagattatcatgttagccataacagtggtacaatctgtatggacagcagcagaggctctacaactacaactatggtgaacaacttagttacatcagttgtgaaacctgataaggattcatcaagaatgcatgtattttgtcttgaacatgctattgaggttgagaagcaacttcaagctattggtggtgctgatatttttcttttatgccgtccggaatatcccagaatagaagtagaagcaaaattgctggctggagaaatggatttcgagtatgattggaaggatattctttttaaagaggtcactatcaaggatagggagaagatacaggaagttgtgcgggatgaggaagcaataccaacaaatagtgattgggctgtaaaactgggcattaatctgtactatagtgctaatcttgctaagtctcctttatacagtaagcaagttccatacaatagagttatctatgaggcatttggctgcggttctcccaatgactcaccagtgaagctgaagacttattccagaaggcaatgcagggcgaagaaaatagtcttggctggcaggtggtgtggaaaagtatggatgtcaaaccaggttcatccatacctggctgacagaatcaaaaatcatgagccgaaagaaatcgatgaaacatttccttctgatcagaaatcccatgctgaacctgttgaaaattcaagtagagaggcagcctccacaagaaagagtagcagcagaacaattgaaggaaaaacaagcaagagggagaaagaacagttggagaaagctaatgccaagaagccaaaatttactgaagaggacaactccaaatcattggagggtactgctgaagcctccacacagaagataaagggcagatcagttctagaaaaaacaagcaagaaggagaaagcgtataccaagaagctaaagcatactgaaaaggtctcggaagcactaaaaggtccttcagaagcctccttccctgcaccagctgggatggtagtccgcagcagctctaggatcgccaataggaaaatcatgttgaaatcaaagatggaagaagaggataatggctcagctgaccgtccaaagtcaaaggtcgaagacgacaaagataatcctgctggccgttcaagagcaaaaccactaaggcaaaagactaaagtagacgcgaagaagaaaacgaaggaaactagagtagaaaagcgaaaggctcccagtccagcttctcagaaggacgaagaggagcaatcagatgatgtcgagggacgttctaccactaaacaacggctgtctttacgtaagaagggggctaaaacagaaggaaaacagcgaatggagaaacccagattcgggggaagtgctcctcccccaagctctccgaagcgcaaggaagagtacgtgtgcgacatcgaaggctgctccatgagtttcggcacagagcaggcgctgtccctgcacaagaacgacatctgcccggagaagggctgctgcaggaagttcttctcgcacaagtacctgcagcagcaccgcaaggtccacgccgacgaccggccgctgaagtgcccgtgggagggctgcggcatggcgttcaagtggccgtgggccaggacggagcacgtgagggtccacacgggggacaggccctacgtctgcctcgagcccgggtgcggccagacgttcaggttcgtctccgatttcagccgccacaagcgcaggacgggccatggcgcgtccaagaaggcgaaagcgaagaagcaaggcaaagcagcagtaacttagtactagtagtttagcacccaaaaccaatggcgcccttctgaaatgagtagccttggaagggacaggaggaaaacttgtagattccattagcagtttagcacccaaaaccaatggtggtctctgctcacagttccattaattgctagttgaacgggttcgttggagcccacaattaggttggttccctgtgagtaatttgggtaatcattaagacattctcgtacagtttgccttttgcctatcgttcgtttatcttttgctggatgatgtcttgcttatggtaagcacctgtctagctccttttg

SEQ ID NO: 36241 - DNA, 1587 bp, Zea Mays
acggaacagcctcggcctcaggacgcagaaattcgtgtgcggtgccgctttgcctcttatccctcccaactccagcgccgctaggggtcaaatcgaaaaatggcgttgctgagcccgcgcgtgccgcggctgccgccctccaccttcacctccgctgccggtgcccggtgctttggccccgccgcgaggtgccaggcgacggcggcgggcggcgtggcggccgcggggcccccgtcgtcggagctggaggccatccggtggggcagcgccaagctgcagggcgctcgcgacgagatggaggatgaggtcttgctccgcccgggctccctcctcgatggcttctccttcgccgccgtcttggatggacacgccggcttctccgccgtccagttcctcagggatgagctgtacaaggagtgcgcagctgcgttggacggcggcgcggtgctcagcactaagaatctcgacgctatcacggcctccatccagcgtgccttcgccgctgtcgacgccaagctctccacctggctcgagcaaacggacaaggacgactctggtgctacggccactgtcatgtttctcaggagcgatgtgcttgttgtctcgcacattggggactcttgcttggtgatatcacgtggtggaagatctgaagctttgactggctctcatcgaccatatgggaacaacaaaacgtcccttgaagaggtcaagaggatcagagcagcagattgttgatgggcgcatatgtggagacatatctgtatctcgtgcttttggggacataagatttaagacacaaaagaatgaaatgctggtgaaaggagttaaacaaggaaggtggactgataagttcatctcacgaatacaatttaaagatgatatagtaatctcgtcacctgatgtatctctggtagagcttggaccagacgtggaatttgttctgttggcaactgatggtctttgggactacataaaaagctctgaagctgtagcttttgtcagagatcaactccgtcagcatggtgatgtccagttggcctgcgaggcacttggtcagaaagctctggatcaacggtcccaagacaatattagcatagtcatagctgacttggggaggacaaactggaaggcgttgcccgatgaaaggccgaacttgttcttggaactaagtcaagcagtcgcgactgtaggggttgtctcaataggaatttgggtctcgtcgttccttgggttacagtagaactagctactccgtccggatgtgtatattacctactgagtttacatctttctgctagcagtagcagctgcaaaatatatgtatattcgtatatagtgtgtgaattgatagggtaatctgtttgggtaatactgagtgaacgtgtgaagtactgatgaagatcgtgtagttgagctcctggtgagtcatgagtcatgacagctgagtggcttttgagtaatcctcatgtcaaaaaaaaccaagcaaaagaagaagaagaaaaagatcttctcatcagttgctaattgctacaaagccataaacaaatgaaggagtattgaataatggaatcgaataagtgcatg

SEQ ID NO: 36242 - DNA, 2186 bp, Zea Mays
gactcctctttcccctccccgagcgtgcacgtctcgtcatcgccctactcgctcgccccatcccggagtctccccggctcccaaaccctagcgcctcccggacctcgtgagggaggcggcgatgttcttctccggtgacccatcggcgcggcggcgggtcgacctcggcgggcggagcagcaaggagcgggaccgcaaggtgctgctcgagcagacgcgcgaggagcggcgccggcgccagggcctccgcctccagaacacctccgccacgaagatccagaaattcttcagagggaagaaggctttggaattggcccgctcagaggttcggaagaatttttgctcaacttttggggagcattgcgagaggatagagtggaacatctttggcactaattctgactttcttcggcaattactgttcttcttcaatgcaaatgaagacaatgacatagctatactttgtcatgtctgcaatttgctgctgcaatatgttaaacaaggcggagatgttgtaactctcttcactggtgtgaatggctcctcgctgcaacctcttgttgctcaccgagtaaaaaaatttgccctcatctgtgtgcaagcagtctatcaaaagaggcatgattggggcagccaacttttaacaacacctggaaccacatcagtgccttctgtgtcattactggaaactgtaggttgcttgataaatccaaaatttctttggaactgcaaagtagttggttatcttcagcagagaaagatctattgcttatttcgtggcattatcgtatctgtaccgcaaaatgtcagaaattctggtcattttgatagtgcatctgtgctggagcaagtgcttatgcttgttgcttcgcatgttggccatcatccctgttgttgtctgaaagtggatccaagatggagtttctcgtctcagcttctgtccatcccttttctatggcatcgtttaccacaactcaagaaggttttctccgttaacgggctcaacaaatattatatccatcaaatagcttgccttttgcccagtcttgttgatgtccttccaaacgatatatcagctaatcatccaggatatgcgtgcgtccttgcaaatgttcttgaagctgcaacctggattttgtctgatgcaaagttagcttctgattcagcggctgacatcattgctgtttgtacctcgttgttggatacgttgccagcagtcacaacacctactgaaagggcagatgacgatgatgagatgcccatggatgtcaatattaaaattaatcttgatgttgatttggaaagacagataactgcagcaattgattcaaagctacttcaacatttggtgaatgccctcttcagaggtacattaagcacaaatgattctgatctgtctggaccatcagatgctgaagttgatgctgtaggatctatttgtgcttttcttcatgttacgttcaatacatttcctctagagcgaattatgactgtcctggcataccggactgaaattgttcctgcactatggaagttcataaaacgttgccatgcaagccgaagatggccattttttttgaagtttgcatcttcattacctgctgattctcctggttggctccttcccatgtctgtattctgtcccatatacaagcacatgttgaagatcattgataccggggagttctatgaacaggagaaacccctttcccttaaagatttgaagtccttggttctcattttaaaacaggcattatggcaacttctgtgggttattccatcctcttctactcagaaagtgtcacccaacccttcaggccttaaaaagttgtcagtggagaatgtcaagactagagctagggttgggttatctgaacttctcacacagttgcaagactggaacagccgactaccattcactgctgcaagtgatttctattctcaagaagctacgagcgaaaattttgtgtctcaagcaatacttggtaatactcgagcatcagagatcataaagcttgctccttttttggctccatttaccagtcgagtcaaaatattcacttcccaattaacgtgttctagacaatcaacatcacattctgcattgacaagacagcggttcaaaataagaagaagtcgacttttggaagatgcttttgatcagctaagtttgctttctgaagaag

SEQ ID NO: 36243 - DNA, 293 bp, Zea Mays
ccccgatgctggctcctacgtgacgtctctaacttgtgttcacgccaaaaatccgagaagattacgcgcaaaaggaagcaaatcagtacgcggccgaagaattctcgatgtggatgaagaagaagtgtgattcgatgcggcactcaccatgtgttcggtgaaatgctagagctgaaaggcgtcgtcgatttcgtggtttcaagtcgaatttaattatggtaagctaatttcccacttccaatatttggtttaatggatggattgatagatatgtatgtcgtgacgattatccc

SEQ ID NO: 36244 - DNA, 2339 bp, Zea Mays
aactagtctcacgtggtcatcactcaccgcgccgccgccgccgccaccgccagcaatggcgcgccgcctcttctgtgccacgagaacgctcctccttcctgccccagctcccgtgccggcgcccacctctgcgtcttctgcagcggccgcggaagcgtcggcctcgctcctgccactgctcccctgcaagcggagaaagaagctcctgaggaagctcaacagcccacgggtcgcgcctatcgagccggaggccgcgcgtcgcgttccggccctcgacgccgtgctcgaccgcgatacggccttccgcttcctccaccgggcgcgctcgttcctggcttccctcccgcctccgcaccggatcccccttgccgaggctggaaagctgtaccgcgagctcggcttcccccgcggccgcaaagtgtcgcgctccgctacgcgccacccgctgctgttccacctcccagtcgtggactccgttccgcacctcgcgctcacgccgttcatgtgctcgctcctcgaggaagagcgccgcatccacgacgacctcctcccttcgcgggtgctcgcagtcaggaagctcctcatgctcacagcccaccgtcgcgtgccgctcgcgaagctccaccactgccgcgctgtgctcggcctccccgacgacttccgcgaccgcgtccaggacttccccgacgacttccgcgtcgtagtcgatcccagggacggccgccacttcctcgagctcgcgcgctgggaccctgcgctcgccgtcagtgcgttggagcgcgacttcgtcgtggacgagcgccgcgtccggcgcacgttccgcttcgcggtcccacaccgccggttgatgccgcttgacgccgaggacgccgaccgcctcgacatggcgaccacgttcccgttggtctcgccgtacaccaacggcgcgctgctcaagccatggacgcccgaggcggaaaagtaccgcgtcggtgtggtgcacgagttcctgaacctgacgctggagaagcgagcgatgatccaccacatcgtcgagttcaaggaggagttcgggctcacgcggcacatgtacgagtcgttacagaagcagaaccgcgctttctacctcgccggcacagagatgaactgggccttattcctcagggacgcgtatgacgaaaatggcgtgctcaaggagaaggatcccctcgtgctgttcaatgagaagcttcagcactatgcgtgtatgagcaagatagattccagagagaccatgattgatactgcaggcttgactgaataaggtcagctttcagttggttctgccgccagaattcaattgtgcttatttgcagccagggagcctctacaaatagtggagataatgacttctgtactagtatacagcactgaatggtctcaccaggctgatgagcaccttatcgccagcgaggagccgccctcattgagccatggctgcatctgttgctgcccgtgaatcatagactggatcagcgcatcagatcgtacaccgccacgtggcccattggaacgaactgtgactggactcggccaccggttgtcaggtacagtcacccaagacaatgctggctcaacctcgcgaccattcacatcttctttggtcggtgcaagcggcaattactgatcgtctcacacgcgaaggatgtccaacgtcgccgcctggctactaagtgggtgaaccaatggttgaactcattggcctttagatttgtgcaatggagttctgcaacatcaagattgatactggcaactctattgataagactgcaggcacaataaaggttggatcatgaagtgagatcaagctcttatggacaggtagcgaacttcttatccaatcttagcttattcccatctaatcacacgtgaagaaaaatattttgtttgactactgtaaatgtttaaggccatgaaaatttacaaatatgaaatagtcgtggtatatgtatgctattcaaaggagacttcgtctgctgttaactatttccttccgttgcacacatgtgagcttgcaagtgccacacttatggttttgaccacactgagatgcaatgcgaaaattaatattgtgtctatggtctgaaatgttcccccaacactactgaacaggctttgcagaaacatattctagcaatactacatgtttctcaagttcagttataatttcttcttaatggtaaagcatcaggtcattccgtgttctgtcattcccattcccgcactgtctttctcattcttccatccccgtaaagctcattcccattcccggctgtcattccgtgttctgcgtgcatccaacgcctagctaaaattaaatt

SEQ ID NO: 36245 - DNA, 1286 bp, Zea Mays
gccgtactggactggaccggaccggacacacgcccagaaagccctgcagcagaactgcagaagacacggccgcggcagaagagcccaaatcacggccgcaaaagccacgcacgcggcgcttgtcctgcgcggcgcacggaaacccacctccacggcggcaccccgtgcgtcggctgcttgctgccccagtgccgccccgcgttcccttcgctcccgccgacaccgacgccgccactgccaccgccggcatggcgaccccgctccgcgccaccgcggtcctcgcgtggggttccggggaggacgggcagctgggcatgggcgggaacgaggagaaggactggccccacttcgttgaggcgctggggccctacgccgtcaccgccgtcgtcgccggcagccgcaactccctcgccatctgcgacgacggccgcctgttcacatggggatggaaccaacgcggcacgctcgggcacccgccggagaccaagacggagagctccccgggccccgtcgacgctctcgcgggtttcaagatcgtccaggcggcgattggcgggtggcattgcctcgcagttgacgacaaggggcgcgcctacgcctggggtggaaacgagtacgggcagtgtggtgaggagcctgagaggaaggaggacgggacgagggcgctcaggagggacatcccgatcccgcagcggtgcgcgctcaagctcaaagtccggcaagtagccgctggagggacacattcagtagttttgactcaagaaggtcacgtctggacatggggacagccatggcctccgggtgatatcaagcaaatatctacacctgtacgtgtgcaaggccttgagaaagtgagggtcattgctgtaggtgcattccataatttggcactaacggaggatgtaattttgtgggcatggggtaataatgagtatggtcagctggggactggagatacccaaccaagatcacaaccgatacgtgtcgaagggctatctgatctctcactggttgacattgctgctggaggctggcattcaactgcactaactatagatggagaggtgtatgcttgggggagaggagagcacgggaggcttggatttggagatgataagagtagtcacatggtgcccctaaaggttgagcttctagctggagaggatattgttcaggtatcatgtggaggaacacattcagttgcgctagctcgagatggccgaatgttttctagctcgacgtataaaatgaagatcctggccacttgaccattttacggcctttgc

SEQ ID NO: 36246 - DNA, 973 bp, Zea Mays
aagcaatgagttccatttagcagcaccggcggcacggcaccccgcagtcccgggctcccggcgtcccgcacccacgccctacaggcagaccaagcaaatggcgatctcgatctcgcaggaggccttcgactccatggtccgggagaacatggaggacctcggcatggaccccgatgaggccctcgctgacgccgttgaggcgctcaccctccagggcgccgatctctcaggtatcgttaagcgcgtgccgggagaggccaccgcggcggaggtgagcccggtggtgcgggttctggacgaactgaaggcctctctcagcgccagcggcgggtcggagcaggatctcgacggacttgtctctctgctcgatgagttgcgcaatctgtgctgctccggcgagggttcggagaatgcagcgatcgcggtacggaatggcgtcgtggaggcgctcgtcgccctgtgcgcgtccgctcgggtcgagcaggagaggctgcttgcttcggccttgaagagtctgagctccgtactccgtgatgtggcaagcactgaaaagttcagacgaagtgagggacccagaattgtcatggatctcttgcaaggaggctcagaaaattcagatttattggatgctggatttagtgttgtggcagcaggttctgctggcaatgaagttgtgaaagagtcctttatggacctgaaggtcgatgaactcattctgcgggttatgaaggataaatcaaaatctaatgtgcaaagtttgtatgatgccattcgtgttctgttgaaacctgatgacaaccgagtggtagcttctcaggtatatggatactcccggagatttgctgaaatcggggttgcagaagttcttgtcaatgcacttcgtgagcaagtcgctccttccagtttgccatctgcttgtgctgctttaaagtcgattgcagtcaatgagagctttaccatgttctgttgtgtg

SEQ ID NO: 36247 - DNA, 3238 bp, Zea Mays
atgtggggacgttctacccgaatcagtataaatatcgcgctcactgagctcaacatccggaccccagaacgtgcacaaacaaatttacttgtcggagtaggttcgaaacaccgacatagtgtttatttaagcgagcatctggagaagtatggaattcctgtgcccagttatgctcttgtcaatagagaatatccggaccaagagctagactacttcatcgagcaagaagattttgttgaggtccatgggaagcggtttttgaagccttttgtggagaaacctgtcaatggggatgatcaccgaataatgatatattatcctagttctgctggtggtggaatgaaggaattattcagaaaggtgggtaaccgatctagtgaatttcatcctgatgttaggagagtgagacgtgaaggatcctacatatacgaggaattcatgcctactggtggcactgatgttaaagtttacactgttggcccaggatatgcacatgctgaggcacgtaaatcgcctgttgttgatggtgttgttatgaggaaccctgacggcaaggaagtacgataccctgtacttttgacccctactgagaaacaaatggcaagagatgtctgcaatgcttttagacagatggtttgtggttttgatctcttaagatgtgatgggagatcatatgtctgtgacgttaatggatggagctttgtgaagaactcatataagtattatgatgatgctgcttgcatcttgagaaaaatatttcttgatgcaaaagctcctcatctttcatcaaccatccctccaactcttccttggaagtctgaaccagttcagcccactgaaggtcttacacgacagggaagtggaattattggtacatttgggcagtcagaagaactgcgctgtgtaattgttgtaatacgccaaaggtgaaattgaaagtgacagaagaaaagcttctgaatttgatgttgaagtacaatggtggaaaaccaagagttgagacgaaactaaaaagtgctgtacagttacaagacttgctggatgctacaagacaacttgtaccaccaactaggtctggtcgggagagtgatagtgatgctgatgatattgagcatatcgagaaacttcgtcaagtcaaagcagtcctagaggagggtggacatttctctggcatttataggaaagtgcagctaaagccattgaaatggataaaagttccaaagcgtaatggtgatggtgaagaggaacgaccgattgaagccctgatgattctgaaatatggtggtgtgctcacccatgctgggagaaaacaggcagaggagctgggaagatttttcagaaataacatatatccaggtgaaggaactggtttgcttcgtctgcatagcacttatagacatgatttaaaaatatacagctcggacgaaggtcgtgtacagatgtctgcagcagcatttgcaaaaggccttcttgatttggaagggcagttgactccgatactggtatctttagtaagtaaagactcatctatgctagatggactagaagatgcaagcaccgagatggatgaagctaaggctagattgcatgagattattatttcaagtgagaaagcaaagaacacagaagggccagtggaatttccatggatggttgatggtgcaggattgcctgcaaatgcttcccagctcctgcctaagatggccaagttgacgaaagaagtgacttcacaagtaaagctgcttgctgaaggtgaagatgaaagacttgcgttgacgagcacattttcaaaatatgaccaggcaaaagctcttggaaagacaactattgatgtggctcgtattgctgccgggttgccatgtggtagtgaaagcttcctcttgatgtttgccagatggagaaaacttgagagggatttatacaatgaaagaaaggaccgttttgacattacacagatcccagatgtatatgattcctgcaagtatgaccttttgcataatgctcatctcaatcttaagggtttggaagagctattcaaagttgctcaaatactcgctgatggtgttattccaaatgagtatgggatcaacccaaagcaaaaactgaaaatcggctcaaagatagcgcgccgtttattgggaaaaatcctaatcgatctacgcaacactcgtgaagaagctatcagtgttgccgaaccaaaatttattgaagacgaagctctattcctaccaacaaaagaagcagagcaccagcagaaggttcatgttagaaatgaggatggaagaagatctagctctacgagtgagaagtcattggaccaagaagatgaagatgatagagaaactaaataccgattagatcccaagtatgccaatgtaaggacacctgagcgccatgtccgcactaggctttacttcacatcggaatctcatatacactcattgatgaatgtccttcgttactgcaatttggacgaaagtctacaaggagaggaaagccttgtctgccagagtgctttggaccgtctacatagaactagggagcttgattacatgagtaatattgtgcttagaatgtttgaaaacatagaggttcctttggaagatgagaagaggttcaggattgaaatgacgttcagtcgtggcgccgatctcagtcccctagaggacaaaaccagtgaaagttcttccttgctccaggagcacaccttgcccataatggggcccgagagactgcaggaagttgggtcctgcctgaccatggacaagttcgagaaaatggtgcggccattcgccatgccgccggaggacttccctcctgccgctccgccacaagccttgggctacttctccaaaggggcaggggtgcttgaaaggttggctagcctctggcctttccacaagagcgctaacgggaagtagctggaagctaacaaatccctgaaaccagttcatgtggttattcttgttctgtaacactttctgcacgccagcccaattttgacgatctgaatcatagtgaaaattttgctggttctttttcatgagcgcgagacataattgtgctatcatgttgcttgcatggatctgagatttaagggtgcgtttggttgctggatagccaaaacaggaatgtcccctggtatcctctcttgtccctccaattttaaggaacaactggggacaatactagaataattctgtctcaatccttgatcctgaactaaacaaacttattt

SEQ ID NO: 36248 - DNA, 1902 bp, Zea Mays
cagcctacagcctaaacgcaccgcaccagacaagaaacaaggggagggagaaccgagagcggcggcgaccggcgagagagagggagggagggacgagatagattcataggtactagcggaggaagcgagtcaagggaaagatgcggactcccgcgatgcgcgttgcctaaaagttccatttcattccttccggcggaggccgggcaatacgctatctctggcgagagagatgccggcgacaggagaaatccacggcctttattagagagaagagatcctattcctacggttctcctcgcatcctgttgcttctgcgtgcggccagacgcgggcacgatatgcaggccgccgccgccgccgccccgtggacgacgaagaccctgccggtgtttgggaaccacctcggcaaccccacgcgcttcacaggcgcctcctcgtccttccacagtacgcccgcctccttcgccaagtggaggaacaaatgggactgccacaagagcgaaaaaggagcacgaaaggcatccagggaaaggcagccttgccagccgaggcgagccggattggctctcttggccaagcaagaacaaaccttgaaagcccagaataacgaggcaatcaataaaggaatcaaacactcagaagtttgctcagccaggcaaaaattatgagaggtatgtggttcggcaaaaacgagcagaaggaaagaaggccctaaaggattatcttctctatggaaagtcattgcctcatttacaggatggaagcacaggtagctttgctaactcacatgcaattccgaggttcaaaacgtttaggaaaggacctcaaactcactggtcatcgaattcatggcaaggcgtacacaatcacagaaagaataaaaaggacaaggaaaggttctgcaacttcttccatgatgaccatcatgtgcaccctgatgacatctttgaagctgtcttcggggcacattatggttttacttggtctcaaatatcgtgggaagggtttcacttcagggacaaatcgttcagatttagatggagcggccgtgaatcacgcagagagaaaattccatgtgacagcgaagatgaagaaagcgcggatgagagcagagaaacagccagcgttggttcacatgctcacagggtcatccttggattacaaccatgtggtccactaactctagaagatgttaaaactgctttccgggcatctgcgctgcggtggcaccctgacaggcacccggggtcatcacaggccatggctgaggagaagtttaagctgtgcgtgaatgcgtacaattcactctgcagtgtcctcaaggctgcttaggttgtgtttgctgtcactggaggatgttagcttgttatggtatatcagttttgaagggctcaggggctgaacaatttggcggggaaaccactggcgaccatggatgcagtgcagtgggttgttttgtttcactttttatttcgattgagatagtaaggggaaacttaaatccccggacccctgcctttaaaggctagtttgggagccacaaaaccagagggggttggagggactaaaatctacttcttattcaaaattgaataagaaagtgattttatcccctccaatcccctccgggttttgaactcccaaactagccctaaaccctttgggatctctgccttttctcggggtgaggaagcagtccatcggggtaccatttgaattagacatttatttccttatgtgaggttttcctccctgtatttggcctcccttgctttcaaactagtcccaaaagggataggagcgccactgtttgttgttgtactaacttgtacactagtgtgaattgtaacatttgattcataaaagtggaacaaataaaaatacaaaggggcatgtgaggca

SEQ ID NO: 36249 - DNA, 1977 bp, Zea Mays
cgtgttgaagtcatagtggccagtgggggtggaccggacgcctggaccgcagatggcgtatcaaaaataaaaattcgatgccgccaaaaagctaatatatgggagggatatgtatttccttctccgatatgttaggacggcagttcccacaacatcttccccaacctcgtacgagccggctgcgagatccaacgacctccgcacggcagttccattagagatgcctctagggaagagatccacacgactatcctagaaatccgaagcggcctcctcgctcggcaaattctccgccgacgacagggagaaggtgctcactgccgttggagtacacacggcgatatctattgcacaacctacttcccagatacaggaggagggtgataaccacactgggaatcaagaaatcataccaaggtcaaatagaatgggcaggcaacttgaatcgttaagcagaggactgggaatcaagattccaacccaaatcactgaagggaacaaaagccagagccacctattcaagctactaagtttgcattagagggatggtcgccaaggccagggatttactgtcgaggtgtacaagtccatggcagtggctgtttgtgcagattagaagctgatgagggagtctcgtagcagaacttcaatgttgagatgtactgacttaactatgttcatgtagtatatcatgttactttttttattaaactagcaaaaggttgtgttaataattcatggtgtactaaatgtgataccatcttcattttgtctaattggatgattaatgccatgcacattaaagatggaaaagctacctatgtatcaagatatgtgaagactgcccgcctcaaacaagaggaatattttggtggagcgaagtttatgaagacttttgtgtgtgttttgaactgcagggcatggaggtactgctggtaacaagttctgaatgtcattaggtctaccattgatagctactgtgaattgtgctggtaacactggagccaagaacctctacatcatttctgtgaagggaatcaagggcgccttaacaggcgtccttctgcctgtgttggtgaccatggagaatggaaagcctaaccttaggaagaaggtgatgccagctgtcattgtgaggtagcgcaagccatggtgctgaaaggatgacgtctacatgtactttgaagaagcaagacaaatataaggatgctgaacctagtgcaatagatctttttaaggagatgcattgcagcaaaaagaaaggttttagcaaaaatgttcagaaagctattgttgatatggaagaaatggtggtaacatcagttcaagatggacaacaaccaaaatatcctacagaagttgtttatagtgtgcaactgggctccagtgtgttcttatgcaatcttggtctttagtccgtctccaagaaaatctcaacatcaatagtttctataaaggttcaacaacttcaggatcgactggaggccaagaagcaagaaaaagatagactttgggaagaagtgtaaaccttaaatgctcaggcagtcatctcaggagaccattgatagtatgaagaggtcgaccgaagaaaataacaatctccttagtcaactattaagcttcaatagaggccaagtgcctccatctcaagtctacttaaccattataggatctgcagccttatggttgctatagtagctagttacaatagctctggatttgaagagtagctctggatttgaagttataggattattttcaattaagcttaatgtttaattccttgagttgaagttataggattttctttggatcttatgtaaaaggatttgtagatatatgttttgaagttatatgattctttgttggatgaaatatttgtgttaaacaaattcataagatattttggttgtgatgtgtaatattctatgacgatatgaatttatatgacatgttccttctgatgacgattgtatc

SEQ ID NO: 36250 - DNA, 1374 bp, Zea Mays
attaaatcgccgtccctacgcctgcctcaccaagccggagcgaggcccttgcgcctcggcatgcagcaaccggtgacggcggccgcttcgtgcggcttgcgcccgtcagtcatctgcctctgccccggaaacaacgcagtcgtggccgcggcagcttcacgaggcttcagctcgccactgctccgggcctcgccctccctcagctcggcaattttccctaaatctcaggagtaatttgatggagccatactgacctcacgtttccaatcccttgagaaggagaagggatagcatttgacatatctgtacatcttctttccaccaacaagtctccttcgttccccttcaaaatggcgcccgcttttccgacgaccctcctccaccaggcgtcgacctccttccgttttccagccggcgccgcagggtgcatccgccctcactgcttggccccactggcggcccccacaacgctctctttggcggccacgccagcggtacctcgccggctcctcctcccagtggcggccggcatttgggacctgatctccggcggagctggcgccgccgccgctgcgtccctcgccgtccggcgaggtatgcagcttttccggcagggagatgtagctggctcgttggcagaatttgacaaggcgatcgagatggacccgcgacagaagcaatatctttggcaacggggcctctcgctgtactacctagacaggtttgaagaaggtgcagagcagttcaggatagacgttgcagctaacccgaacgacaccgaggagtccatatggtgctttctgtgtgaagcgcagctgtacgggactgaagaagcaaggaagcggttcttggaggttggtttggactcgagacctgtaatgcgtgaagcatatgcactgctcagaagtggtgcagatcctgaaaaggttatttcaccggaagccgatgtctatttagttgcaaagttttcgagtggaactgatggtgaggtcttctattcttcactgtatgctggactatactatgaatctcagaaagatgcagatatggcaaaatctcacattgttgcagcatgcaagtcgccgtatggatcgaggtccggcgattacatggcttcccttgcacttgtccactgccagtgtcgcaactggaaagtagtttgaaagagatcaccaccatattcaagaggacccgacaattctgtttggaaattacttgcaatccttgatatatagactgcaaattacttgcaacaaggacatgggttttcagacaatgacggaccgagttaaggaaaatatgagaggctatcgagtttgggaaaaaaaaacttatcgaagatacctgttctgaagtctttttagtactggattc

SEQ ID NO: 36251 - DNA, 826 bp, Zea Mays
ccgcacgtcattaataggctacatacaatacgtcacccaacctctcgtcctcttcctctcaataatataatccccttcatccatccattccatatccttagcttccattccatccatcatatcgcgcccatggatcatcgtcagccgccgccgaataagacggcggagcttgaccccgtgctgcactccatcggcttccagatcgaggaggtgtcgccgtcgcaggtcaccggccggctccccgtcacacccagccgttccaggtgctccacggcggcgtgtcggcgctggtggcggagggcctggccagcatgggcgcgcacatggcgtcgggcttccgccgggttgccggcgtcagcctcaccatcaaccacttccgcagcgccaaggtgggagacgtcgtcctcgtccgcgccgccccgctccacgtcggccgttcgacgcaggtgtgggacgtgaagctatggaaggaggatcagcaggggaagaaggggagtcagatatccgagtcaagggtgacgctgctatgcaacctgcccgtgccggacatcctcaagcacgctggcgatgcactcaagaagtatgccgacgcccccgccgcccaaaaacccaccgccaccagcagattgtagatatatagttaagttattagtagagtgatatgcagagatttatttattttaatacataacgatataaacactcattactcatacatgtatatctagtatacaattgtacacctacatgaactattacttgtgtgttggtgtgctcttcatctctgcttgcatttttcgtctagcttaattagctttagtatggt

SEQ ID NO: 36252 - DNA, 1983 bp, Zea Mays
ctgaagtcgtctttatcttcctcgcagcctcctagctccctcctctccctcccatggcgcttggacttctccttctcggccatctccagcactgcgcccagcccagccgcgccgagtttcgccctcgccatggccggtgccttctttgctctcctctccagccgcgccgagctcgacctctgcttctcttgcgtcgcgcgccgagctccatccatggcgggagctccctccctgctcggatttcgccaggcccacgcagctccctggcgcccctctcctcgtaactccctcctctcgctccagctcgccgcgcactcctctgctcggcgcctttcctgctccccatgtctggtgccctgctgcccagcgccgcgcccctgctcctgttcattctagcagccgagtttcttcttccccggcacgtcgctctctctcccttgtcttctctcccctgcgcgctagtcgctcgtcttcctgcgagcgcccctgctccctctgccctctccctgacgcgcgccctctctgcttctctccacgccgctgtcaggtctccggctcccatgtgctcgccctgtgcacgagtcgccgcgccctgggagctgctcttgccgtcgtggagctctcatggccagctcccacccttttgccgcgcgcccatttttcctcttctgcgcagcttcccagctccagctcggccttgtcttctctatgctgtggtcggcgtttcccagcgaatctcaacgtcaccactgttgtgaaaatgtttgatccgacttcgtcgtagacctcgccggtcgtgcacactccggcctcctcctgtccatggccgaccagcccgccatggtgtcgcgtgtccctgcgccctacttgtccctggccctcgcgctggctcacctcatcgtcgaattccataaccagcaccgtcgctcagcttgcccaaatcctggccatgattcccatcacgccctgtgtcggcatgttggtccgatgctgtcgtccttcttcatcctcatcttcgcctcgacctcgcgtggtgctcggccgtgcacagctactggtcatcgacgcccctacgagttgtcggtcgtcgctcatgttcacctccatatgatggatggcgtgggtggtaatgtcccgacgtgctattcgtttggggtcgaggatgtgcttgaaccatagaaattcaaagtggatgctggatgttcttgaaccgtggacacgtcgaagatccatagcatactgcggtgctccattccaggagagaaattcataggaaccgggtaatgaagaaagattcgtgcaatgtttgccaagtgttcgatggattgctcgacctcggattcattgtcatccgcgtgtagttgaatcattttagtcatggtacgttaagtgatcacgtaatgcgaaagacgagttgagtcaacccctagatgatgttaagcgtgggcttctccacaaggtgatgctgatggatgaacctgaagatggataaactaaacaagtgccaaggcaaaggatggtcatcaagtgatcgacgtctaacaaccactacaccatgaaacaattttagcgtcaaacatctgacgataaaaatagatgtttggcgacagcgagtatgtcacaaaataataccatcacactatctgtcggtaattattgtgttggcatcaacaaatctgtcggcaataatgtcgagctattgtggcggtttatccatcggtataaatgattatgtgtggcacactgactgtcgggaaaacatagcattagatcatctgtcggtacatgaatgtcttgagtaattaataaatttcaactaatatatttatataagtttatatgttgtcccaattaattaagcttctgtccacgcccctatggccctgcccacgcacgctgctaggattcaaaccgaacaccacttgctccgaagcaacaactcaaaccagctgagctagaggtcatttgtgttatatagtggag

SEQ ID NO: 36253 - DNA, 1688 bp, Zea Mays
aatacatcgtttgtggacaagtacatggtatacaacaactcattgttgcaccattacactatgttcaagataaattgtcaacaatggagtcaacagagataatcaaggaggatgcaagtgagagggaatctgatgaaatcgaagtttctagtgcaacacatgataagaaggctgaagcaataactgacgattcaaggcaaaattacaggacagcaatcgccagccattttctattcagagttcatacagatcctgtacatgaggaggctttctctatattgaagaagcttcagataattgagaaagatgttagctccagtgatttttgtacacggagggaatttgcaagatggtttgttaagttaagctcaaagtttgagagtccaatgtgcctttgatgatgtaaatattgacgacccagatttcctgtatatccaatctttaggagaatctggtatcgtatccagcaagttatcaaactccttggaaatgttgacaagtggctctccttgttccaagggaaataccttgttcctacctgatagttacctatctcgattcgatcttgtcaactggaaagtgcttgttgagcatccacgcgcattgagaatagacgaaaaggaaatactagacgccttcaaccgggcaaacctgtaactaaagcgcaagcagctgctgcactgactagtggccgaatgaaggaagcagttcatgaagaattgaataaacttgaagcagaaaaccaagcccatctttctcttatagctgaaataatggaagagttaattagtaggggagatatacaacaacaatgggagcaaaagatgaaaaaggagcaagaacgggctcttgaagttgacaataatcttcaacatgtattgcatgagcatgcaaatgagaggacagacagagaagaggaactagcagacttgttgaaagaaagagcagctctagaatgccagaatcaggaactcataaatttaaggtcagaaattgacggcatgtatgatagattggcaactgagaacgaagaggtcatggctgatcagcagactttggaaaacctgatgtctgacatgaccagcaagcatcaagctgtcaatgaagctaaatcatatcttgaagctgagaaggaagctcttactatgttaaggacttgggtggaagatgaagcaggacgtgtccatgaacgagctgagacacttgagaaggctttgagaagatggcgaatcccagaagattgatccctccaaactaactgtgctttgcataggaaaagtcttgttcaaagtttttggagctacttggttccagagcatctgccatcagatctgaaaaattctcaatggaatggaatggtcgtgccataatgttctttgagatggttcattatcctttggtgcttcttggcatcttgttgccatcttaggggccgtctgtatcccttcattttggagaaattataatctatttaataaagtaggctatttaactttaaatttaacattccataactttccaaagttcaaatataagcctatcacaaaactatgttactttagagaaattgattttatgtatttctaaacaatgttactctgtaatttataacacactctttgactcacctcctgtagtagaaatatagcaaataaatatctctccatatggtcaacagtggtacacta

SEQ ID NO: 36254 - DNA, 3171 bp, Zea Mays
gttagcatccagcacaagcaaccgccggttcttgccgcagtttctgcgcgctcgctttttgtccgcaagaccgaggagagcgagagcggagaggttcctgtgtggaattcttcagcgatgaggcccggcgcccgtctggactcggtggtcttccagctcactcccacccggaccaggttcgacttggtcctcatagcgaatggccggaaggagaagtttgcatctggtttgttgaaacccttcctggctcacctgaaggccgcccaggatcagattgcgaagggagggtactcgatcacacttgaaccaatctcagagttcgacgtgtcattgttcacgagaggcgccgtggagaggtttgtgcgtttcgtgagtactacggaggtccttgagcgagtcacaacactggagtctgagatcctgcagctcgaggatgccattgctatccagaggaacgatagtcttagattaaaatgtgtcggagaccatggaagaaagttgactgaaagcaatgaaagtagtatgacgctgcaccaacctgattgctttctgagagcatgttgtatagaatagtgcatgcctttgaggattgtctgaatcacattgtttcgttgggctaccaaaaagaaaagcaaggtggaccggcaaattatgatcctaattcagccacggcaattgttgtttacaagcctgggtcaaattcaattccaccaatgcagaatgaaacaacagcacaggaggagaattcaaaagttcaaaactgtgttaagaaaagagcaagctatggctttcactcgtgctgtggctgctgggtttgacattgacaacctgggttactttacttgattgcgtttgcagagcgctttggtgcttcacgtatgatgaaggcatgttcacatttcatcgaactatggaagcagaagcatgaaactggacaatggattgaagttgaacctgaagcaatttctacacgctctgaatttcctccatttaatgcatctggcattgtgttgatgggagacaacatgaagcaaaacctggaatcagggtctattaatggagagccaaatggcgaggatggagctaaagctgatcagaagtccagccagcagatggggtctcatgctgcatatcctccatgggcaatgcatcctgcatctggtgcagttctttacccaccttatcctatgcaaggaatgcctttctatcctggggtgaatccctactaccctccatatcctccagtggatgatcccagttcaggtggaggaaattctcatggtcacaagtcacatagaaaggggaagaggtctggaaagaagcctagtgtagttgttatcaagaatgtgaatgtaacatctaagaagtgtggctcatcagagagtgaatcacaatcaagttctgaagttgagtctgctgacagtgacaactcacactccaaatcaagagaaagaaagcataaaagctcatgttcaaaggagggtaggagaactacttttgatccgggagatgagtataacaaggatgaaacatcgaatggccatggtgttgagcaaggcaactggagtgcattccaaaatttcttgttgagagcagaagaaaaaacaagatctagtgatgcagacctgtttgctggtgagaaagaacccccatcacggagaaaacagaatgtaaacacagcagatcctattattttagttgagagagatggtggcaacgtctgtgagcagaacaaaataggttttgattcagccaatgggaggactagagttatccgggtcatgtccaatgatgaacttgttatgtctggagaagggagaatctatatggattgtgaaatgaaggagattgaagctggtggaggaaggtacaggagagggacaggtgacgactacatggtttatggtcagggatgtcagatagacagacattgtttgttggatcctcttgcagaggcccagtacaagaatcctgttcagcaggacaataataggaatggtgttacggatgagtcctttatgattcctcttaggtccagctcacaggataatatcggagcagagagcagaactactatggacatagatgttgagcttccttctagcattcataaagcatcagataaaaaggctgggcatcagcttttttacgaacctgatgaactgagtactgtgaaggttgaagatgcaaaaccagaggatgtcttgccggtcactgacggtgtacagaaggtagagaaagagaagctaaagaacgcaagggatggttcagataaaagaacgaaggattccctattgaggagactatcggcgccaaggaccccactgaatgatgcacaaaaacgtgcacagaacctgcgtgcatataaagcagaccttcagaaactgaagaaagagcaggaagaagagcaaataaagcgattggagaggcttaaattggataggcaaaagtggatcgccgcaagaggtaatggaaagggtccagggaacgatgctcctagagcgaacggtatgaatggacttagtaaatcagttccaaccttcactgggatgaaaagggttgaaaacggaacgactgaatcactcagcggtcgactgaagaggctttctgaacccaaaagcattgttggggcagagcattcgttgaacccaaagtcagctggtgcaggccgttcacgaagaagtatggcatgagttgatgtgagatggagaactgaatagcttgagtccatcgtgccactcgctagcccggtaacttacttactagaaacgtgaaaggcatctcaaaaggctttttgtacaggaaaaaaggaaatggctggctctgtagcattgtctgcttccaagatttgtgatggaaaatcgagctatctttcaatggcatggcgttggactttcaattttaacataattatttcattcttttgattcagggtggcttgtgatagctgtaaacctggtttttttcccaatgtggagctatattgtgggtgtatttatggaatggattgatctgtgtttgagatatattgtggtatttatatagtgtataaatgtccgactttggattggacgagatgggccaattcaatttgtacggcagtagtatgacacgctgaagttggatgtccaagtattcacaacctctgcatcgaaggcacaaagagcagat

SEQ ID NO: 36255 - DNA, 1314 bp, Zea Mays
ctgctgctgctgaccaccgtacacgcggggaagaatcagactgccaaacggcaggacaacggcatggcacatccgaggccgtggttttcctaagcccattcctcgctcaacagcagctgagcagattaggcatgcatgttcttcgatgccgctcgggttggggcgaattgcgtcatactgcactcaccgctctgggccttccaggtcctccctgccatgcatgtcgggcgcttgcgatgcaataacctcagcaaacaggctgattgggaagcacctgcgtgctggcagggtggatgctgtgcgggaggtgttcgacaaaatgccgcagcgggacatcgtgtcctggaactccctcatggctgtgtatgcccgttctggggtgcatgacagtgcagttactgcgttcctcaagatgagacgtgaggggttctgcgcagaccacacctccttctccactgtgctgtcggcctgcgcaaggatggagactctagctctagggaggtgcatccatgggcttgcgaccaagaccagatcttcgttgaacgtgtttgtggggtcctccttgatcacgatgtatgccaactgtggggtgtatagctgcctggagtggattgtggatgatgtcgacagtccaaacctggccttatggaatgctctcatatcaggtcttgtggtgaaccatagggtagaggatgctcgcagggtattcgatcagatgccagagcacaatgttgtgtcctggactgtgatgatcaaaggatattttactgtgcatgaggtggggcgggcattggagctgtttaaccttatgcctacaaagaattctgtgtcatggtgcgtcatgatcggaggccttgtcaaccacaagcgattcagagaagttaatgaactattcaacactttgatgagctgtagagaaatagtgacaaatgcaatcctcgttaagattgttaatgcctgtgctggtttgaaaagtattggaggaggcaggtgtgtccatgggtttgctgtgaagtctgggtttatccatgaccacatcatcgaggcatcattagttgtgatgtactgtaactccttagatattgatgaggcacagttagaattttgtaaaatggaaagaaagcatgttggctcatgcaagatcgatgaggctagaaagattttttattctatggatggcagagataagatctcgtggaatttgatggtcgatggctatgtaaagcatggaaaaattcatgacgctattgagttgtactcaaagatgcctgaaaagaatttggaagcttctactactttgatgtcttgttttat

SEQ ID NO: 36256 - DNA, 469 bp, Zea Mays
cgacttgccacagatcttgtgggccgttgcaaccgcctccgtgggtgcgcgcactcagatataaagctagctgggcaccgcgaacgccccctcaaccatcccatatctacgccattggggcctatgcgtcgctgtgccgtcgtgcagtctgtgcgatccgaggagagagagaaggtgagccacgaccgctgtaacaacgtcgctaggtctgggtgcctcaccactgttcgtggaggctttccagtgcggcttcatgtggggtcttcgtcgaccatggccgtaatggctcgctgatgtttagcttgccatagatccatctcgggtgtggggcatcgccatcaatctcgtcaaccccgaacacgaagaagaagtggaagccactgaagaggtaccaccacctttggaaacacaggctgagaactgtttctacttcgatatttgtggatctgagcctgactcgcccataaac

SEQ ID NO: 36257 - DNA, 5131 bp, Zea Mays
ggttctttctccaccccgatgcccctccccctcccccgtgtgatcccctctccagatcgatgtctgccccggccgtaacccccgcggctcaccgcacgaaaccgccgcgagatcttggagctcagcctctgacgatggctacgactacctcgccaacctccgcgagctctgtccccctccctctcctccaccggcggcgggggatccttggccatgttcctcccgaggcgccggtccacgcgcttcggcctccgcgtggtcatcaagcctttctgatggctcggaacagaggtcagctatgcgatgtggcgtggcgaggttaccgcgggcgccgcggaggtggagggggaaggggaggacgagggcacgggcaagagagcgcatcgctgtggacggtctcgtgagagggaccttgggtgatccgggtgcttggtttcttggttctacggctttcgctgctgttggatttgccgagccggagccgacggagatgaccgtcgacgagctgaagctgcaggcaagggccagcggcggccacgacctaaggaccagttccccgtcggcatgcgcgtgctcgccgtcgacgacgacccgacctgcctcaaggtcctcgagaacctcttgttccgctgccagtaccatgtgacaacaatgggccaggcagccactgccctgagctgctgagggagaagaaggaccagtttgaccctgtgatcagcaacgtccacatgccggacatggacggcttcaagctcctcgagcttgtgggcctcgagatggaccttccggggattaacagctgaaaacctcgcccgatttgtaaagaagttttcttgttcaatgcggcattgaatttgggaggaatgacaagtctcatgaaaacttctgtatgccctacacgtgaccactaaaagaaagagttagacaggacaaaaggctgcagcggcagaagaagagcttttacatacccttacaatgctgattttgatggagatgaaatgaatttgcatgtccctcggacggaggaagctcgcactgaagcgcttaattctcataggggttcaaaataatttatgtactcctaagaatgtgatgggggatacttcaatgcaataatgagcttcccacaaaattacccaaacagcccaccatcagtcagatttacctctgaaatgtggcatccaaatggtcaactttttattagtgaaaatagtatttatttactccatctacagttatgttttctgacatcatgcataatatttgaggaaacgccagtctaacctgatgggcgggtttgtatctctattcttcatccacccagtgaagatccaaacggttatgagctcgcaagtgagcgatggacacctgtgcacacacttgtaggtactgatcacagcacattcaactccacacagattgtccatgtttctttcagtcaccatgatttatcactaggtcattgtgtttgtggccaacgagtattgttctaacagttatgttcccatagctagctagattcattgttgtgttttgttcagggtactttcaccacttctggtatggttctgtctgtaatgtgccagggattattatattgtttttggtttggatttggaatggtttggggtccacaacgatgatgcgtcagagctgttccaaggattggatgatttccattcccctgctgccaattcgactaggctcgccgtctccgctctgcccaactggcaccaagcagccaatggaacttgagcagccaatggatgatttccattcccctgctgccaattctccgaactgctttgacccttcaactcaatccgcatgtacccagtaaatgttcaatctgaatttggatcattgctagcaggattctttgcttgctcttctacttctgaaaattcgcaaaatggatagataattccagttaattttaatccattacagcctattgtggcagcaaacagcgactgggtgcggaagccggaagggagaggcgcttggttgacccagaacggacgacaagacaccgccgggggttcgctgcaaccgcacgcgtggtggccggtgtgggaaggagcccactgctcaagcagcgacgacttccgtaacttctcaggccaagggagggagggcagcaaagaaagcaagcaagaaagaagccgattccactggtggttaaggttttggattaaaggagagaggtgcagagaaaaaaaggcaatcttactcttaatctctgtgtccacatcacttccgatcatgccgtgatcgacagaagtacgggtgccatgtataagtgccccctccaactcaccaaagtaataaggagcagctgctgcaggttgcaactccctgggccaagcagtagcccagcaagttcagcaccaatggcagccatatgaaatataaggcaaagcagataaaaagcttaatttttttcaataaggtaaaggcaatgacagaaaagtgaggagggtcagaggtgtacagataaggatgagggctgaaaagaggagcaggaaggcatgctccatctgtgctacaagggtcagaatggacttgataggacatttgactatacaacatggaagttatttcaagatatccttttttaactatgctgtcgttgctgatcatttgcatttttacatttttcacattatactatagttgaagatacattcctgaggacgaatgggtgcagttatgggcttcctgcttgctgccagcagtcttttggtgcttttatattgctattaatttgtttgaaatttattatggtgatgactgggaaggtctttttgaggctattactggttatggccttggtggctctttggccgtgttggtggtggtatttataccaaggctgctgatgttggtgccgaccttgtggggaaggtagaaagaaacattcctgaggacgatccaagaaacccagctgtcattgctgacaatgttggtgataatgttggagatattgttggaatgggatcatatctctttggctcatatgctgaatcgtcatgtgctgctcttgttgtggcctcgatctcgtcttttggaatcaaccatcaatttactccaatggtgtatccccttcttgtcagctctgttggtattatagcatgtctcataacaacgctgtttgcaactgatttcttcgagataaaggctgtgagtgaaatagagcctgctctcaagaaacaacttataatatccactgttgtgatgaccattggcattgcgctcatgttggcttggtcttccatacaccttcaccatttataactttggagcccagaagacagtgcaaagctggcaattgttcttgtgtgtggcggttggtctctgggctggcttagtcattggttttattactgagtactacacaagcaatgcctacagccctgtataagatgttgctgattcctgcagaactggagctgccactaatgtcatttttgggcttgctctgggttacaaatcagtcattatcccaatttttgctattgcgtttagtatcttccttagcttcagccttgctgccatgtatggtgttgttgtggctgctcttggaatgctgagtaccattgccacagaccttgctattgatgcctatggccctatcagtgataatgctggaagcttaagtctctccaccgccaccaccataggcggcgctccaaacacggtggcgccatgcgcgccggcgtggtgcggggacttggccatctcctacccgttctggctcgcaggcacgcatctgcccaagtgtggctacgaccaagggttcaaggttacctgtgacaaagccaaggacgatggcacttgcaacatcgacaagttcgtcaatgcctccttcgtccccagcccgccgttcgaaatcgagccccaacaaaaccaggagctgttcttcgtctacgactgcaacctgcgagcgccgcagctgcctcggtcttggacacccttgcgctgtggcaataatggctcgttcacctggctttctggggagtacaggcccgaagacagctccatggcgatgccggggaactgcaacgttgcgatgataccggtggtggcgtacgagggggcgaccgcggcagattatcagtggttcgtggagggaggtttttttcttagttactacctcacggacactgaggacgacgactactacgaccagtgccaagcttgctcgtaccgcgctggccacggccaatgccggacaattgtcagtgacaatgggttccagtgctactgctctgacggcgtctactcgacgacggcctgcggaaccaagagggctaactggaagacaacaattgtagaaagatatggcaacaaatgtggcaaacacgatctatctaattctaagaccatttttgtagttgaatcgaagcgggaactgaatcaagaatgttctatttatatcggtctcaggatgaacgagcaccaggagagagtccgggaggaggcatatactgttgggacgtgtccaagccagtggagatgcagtggagatggaggagatcgacattggcatggagaagctgcgaaacccaccgcagcagaaccccacctagaggaagaagtagaaaacttgtgccggtatgagcttcctaatgagagctgggaagtaaatttgcctcctgaaaaggtgtctcctgagctcccagtaccaacattaggcataaactttgcaagagatggaatccagaaaaaagagtggttgtccatggttgctgcacacagtgatgcatggttactttctgttgcattttatcttggtgctcaatttggtttcaataaaaattacagtaattctgaaaatatgaggcaaactgacctcaacagggttgagatgattccatcatacttatacgaagattttcctagcaaggcaagggataatgggtacttgctctgtgatgactcaaaaagaatgagattgatcgattgtgtagctgttgtagctccaattgagaaatattatcagtattaagctgctttgatggttgcccggtctattgcttgcatgtagcatgcatctccgcggagatccaagttgttatgctttgagctattgcatcaagagtttaagatagtctttatatattttact

SEQ ID NO: 36258 - DNA, 4152 bp, Zea Mays
cttgactgctcagcctggtcgacgttagaggatttgatacccctcgccaccgccaccgccaccgccggtgtcgtctatcctgaccccgacacctcgccgcccggtgccacctcaccgccggattcacatcgcccagtcgccccaccagccagaacctcgtcgcctcgcccgccttgctccgcaggttaggcagccagtacccccaaaccctagcatcctcggcgctgtcggtcgtagaagagcactgggggcgtgagagagggagtcaccagccctcgagacctcctcccgcttctaccactcagccgacgctcccaaaaggggcatctcaaatcccacctcactcccttctcagtacaaaatggaaccctctatctggttttttaaggccccgggaggagaagcaaggctgaaatgccagtggtctcttctccatttcacctgatccggtaatgtttaatgccagcgatctcttctccatttccttcagagtttcgtttgatttgtttgtgcatagatgaatattgtaaggcctgcataatatcatgcaacggatgcacaaaaagaactgctagacttgtcgtttctgtgtgttacttctattagctcgaattttgttcacatgttccacttgctgagttgacagtaaatgatgtaagtatcatcagagcagatttgatttttttgatgacaagttttgaagcgcttgctgtgttatgtttaacacatggaaaatgaattattgctctggaagcagttattggtctgtgcaccatatagtcttacaacctttatcgaaatgccatatgagctttaaattggcatggcttaatattgcttgcagagattgaatcatcagcttgttcctgggccaaatttcaacaactaattgtggagttgatatagctgtttgggatcctttttaggataaaagaatcgtagccacactgcctgatgctcagatttgtgatgttcattattttaaaaacaacttaattagaccctttatttgtatggttgatgtttgctatatgcaactgaacttccttgtccacttagtttttgtgttatgaatgctagcgtcactgttactaatgatccattttatcatttctccaacttctagaatactgaactgtgttttttgcttgagataaattcattcattatcttatacaggacctctgagatgtcgatatgaatggagacctgtaacttgtatatatattagggcttagttttcttgtttcagtatctgtttggagttagaagcaagggttctcatggcatctccacaagaatccaattctctgtgcttgaagcgaaagcttgttgatgactgcctgtcaaaagactgcaaatctcgccgtgtcaaatctgagaatgagccctcatctgattcatttgctaaacgctgcaactgttgctgcactcgacctaatcttgccaatgattgtgtgaatttcctgaagagtggagcgccaaaccgtgtcatgtattacaaaaaaggttcgtggcacaattttccagagcaaataatgaattccctcatcgatgaatttaaaggaaataaatcaagtgttgtctctgtgatggatgatgaaccaatccttgttgatttcttatcaatgaccctggtcaacctgaaaaccagaaagcagcggtctgttgcctggtttgatgacactggcaagcgtttctttccttctctgttctttgatgaggaaagtgatgaaatgcccaaacaggattctggcaatgttaataacactgcacaaggaataatgttagataaggtcacgagttctccacctgaagtggtcaagcaagttgttcttgaatctagtccaccagtccctcaaaaaccttcaactgtggatgtcttgcgcaagaagatcacatctgtggaaagaggtagcgaagggtttctatttgtccaggacctttttctctctggtatgaacccgtttgcaacaccaaataacatacttcatgtccaccgctactctccaaacgatatcaccgcacaatgtagatttgaagcttttgaaagacagatgaagtcaactaaagaagcacgtggtgatgcaaatgttaagtatggctggctaggatctaggaagagtgacatagttaggattctcattaatggtttgggtactactgcaaatcctgttgagaaagctggtttgagtgctggtgtatatctttcacctgaaaatcgagcctttaccagtgtcggtctttgtgatgttgacgaaaaaggagtgcagtatatgttgctgtgccgtatgatattgggcaatgtagaagctgttgaacctggatcccaagagtcttttccaagcagtgagatatatgattctggtgttgatgattgttcaaaccccaagtgttatgtgatgtggccatcacatctaagcactcacatccgtttagaatatcttgttagtttcaagcttgccccaaaagttcgaaattatttgcttgacctgaaaggtttatggtttaatccatcactaaaagaacttggcacggacatttgtacacttcaacctgtaatgtgtgaaacaggtgaaggaccaacttccccatggatatcattcagagttctgtttgcagttattcaagacaatatatcatctgtggcaagggagttaatcttccatcattatgaagagctgaaggaaagcataattacccgtgaagaaatggtgaagaaaatgataattgtagttggagagaaagtacttttggaggccttgaagaagcttcattactgtgcatgatatgtacactacattttttttcttactggcatctagcgtcactttgttattggcttctgttgcagccatcattatggtacaggccttctgttgaagcagtgtctagtgattctgtaatggcagcaccaggaaaattatccttggataaggcagcggatatggtgcccaatggtcaagattgtccggcaccaagtggtgtgccagaaacatctagttctgctgttgccatgcgtggggcttctacaagtgtggaacccaagcgcagagatcctcctgtacagattgtgccacctggaagctctgcaaccccatgtgccaaaaatcaagattcttttgtaggaagagtgacacctatagctcgtgatgggcttttgaggacaatttgtggaagctcttcatctcctggcggttatgcttctctagcgcaagctaatacctcccaaaccaatggagtttctgccccaggtgtcactcctaggggctatgaatctgctgtaccaagcttgtcacttggaaattccgaaagtacaggcgtgaaacaagtaaattctgcaccaagaatgacacctgaaggccagaagttcctttcgctgggtattgcgccacgaagcccagcactgcgtgatttagtaaaatgccaggccagttcgacactcgttgccatgcctccagcgggcctgggaaaatcacggtccatgaagatcgagggccatgattctctggcaccgagtgtgaaggagccaaaaggcaatggtggtctagcaccaagtaaaacgccaaagctgcatgaacctgtgatagctgatatgagcatcaagagctgtgattctctagcactgggtatcgcaccaaatggccatacccatgatggtccagcatcagtggggaggccaagaaagagcaggcagcactagtaactggctcgcagagtaaatcatctgtaccaagtcttgacgctagcagccatgttaccggggcagcgagcgcccttgtcgcactatcaactctgcgggagaagggcgggcgttagaggagcagcagcagcagcagtgtagttcccgttggatcagatcctttttctctactgtacatgtttctatgtacaggaatcatccccgtcgactctgatccccagtgcgtacggttgctgttggtggccagtcccctatatgttgcttggcagcaaatgttttggttaataattagtttttataaaaggaatattcacccttgttatgttctctacatgtaaattatctgaggtatacttgcattattatgagtgctataatcttttcttttactacatgctctaaactgtatcgtgtattcaataataaaatgttaatttactccctccatt

SEQ ID NO: 36259 - DNA, 3663 bp, Zea Mays
ctcacccttgctaatattttgatcagagggtgatgttggagactttgatggagaatttatcgacgaagaattctaagtctaacgatgcgccggtcaacttcctgtggaagattgcccagttgtttatttccgctctactttgatgtgatacttgtttaagacactatgtctcagatgatgtaataaagttttatactctttttacgcctttattgcattgtcttttgatatattacacttgtgacgtcaacatatgtgtggaaatggatcctggcacacatatggtatgcgctcgattctaccccctggaatcgggtgtgacacccgcatactgagagatgtgattaatctttatcattggtttcacatgcattacacctgcatttattgttttatggtacaaagcacacatatttcagcacgggcatgcatcttttgttgagctagatagattgctactaaaatgatgaaaggaatgtgaaatgtttttcctctgaaaattctgaaatctggtttcaaacagactaagaccatgtaacaagatttcacttgatctataccactcagaggcaccactaatattttctcttaaagtgagaaaatgaattttgtgtttgctgaacttctctctggttgcttgtttatgtttttacttttcttgaggcagtcactaactgctcctttcttttatgattagagctaggataaaactgttgattgttacagccctgggcaaggattgatgcttgctagcttcaagattaggaccctaccacttgatgagaacagatagtgctatactgctatgtacatctacatttctccagttatacataatcagatcttgcttctagccaactgttgcaaatacattgatcccttaggggttgagatggaaactgccacaagggagggaggacgtgagtcagctgcacgtgccgacatacacatcacttcctgcctcgctgtccttgatcgagacaaaatcagaagagctgtatctatatgtactccataccttgacgtatgcaggggctagatccataccccggcctatctgccctgtgaggaatgtatacttctgcaagtttgaatactttgacaccttgtgaggagcactctttgaaggtggagaaggtgttgttccaagggaagccagactaccaaaatgttatggttttttagcttctcaatagccggcgacagtgcatacgacctgccccgcgctggggctgtgtctgccttctcctccttcgatgccatgacactgtaaagtgaagccttcgagctaggcgcggaggccagggagatgctatgcgcccacatctaccacgccgccttcatattgctcaagctcgcgctccgcaactcctgccccatctgccgccatgagatgcccaccgatgctgccctgcgggctgccgccagcgtcggcgttgccgaacgcgccgccggggaggaacaagcgtgggatgcgccccacgcgcgcgactttcacctgcctcccaatttgatccgtgagttcaccaggaccagaacttcttcgatgatttgttggaccatccctgctgatacaaacacaatcattttgtggcaggaaatcaccatattagagcttacaaccttcgcatcaactgaagagtttgacactcatgatccaaaggagaacactttgctactcccttacttgaggaaaaggtcaaaaatcattgagatagttgcagcgcgtgatatagtctttgctctatcacagttaggagtatgtgctgcttttagtagcggtacgttcgccgaggacaagacaaaaccggatgctggtttccctctttttgactcaccatgtcaacatggcaatttcaggacccaacgtctctgcgagagaccttgggttcccttatccgaaggcaggcaccgctaagcctacagacgtggtggtgaagttctacgtcctctacgagaagtggcggaggggcgagctcctgggttcttcgtcagttgcgcggtacttgaaaagcatcactcattcgaacggtacgattattcatccttctggatcggagcgttctcttcatgcgtctgttgacgctctaagttcttgctacgtggacaaacagggcaacaagaatttccgggtgtgggtggacagactggtcacatcgccgatcggtacaagcaactggttggtgaggtttgataactgggagatggaaggtggcgttcggtactgctgccgcactactcttctgctgaataacaaggttccaaaagaactagaagtacagattggttgaacttcaaacaaatacaaagagctatgcatacaagtggtggaggcctggtggtaaattgtttatcaagatcgctagagcagttaaatttactcctattatcttctgggatagatttggcaggatcaaggtcgttgtcgtctccaggtccatcaaatgcgacaaggtcgagcgcacgcaattcagctccgaagtcatctcctttcaacagatccatttagtacctttttctgagttaaactacttcaaacattgctgaagactacaaccagcctacagttgttgtaattgaagcgggtcaagacatagcatttgcaaagatttagttcattctcatcactctgcaatattcggttcatggcctgtcttattttttcccctacaagtcatctacgacagtttgccagtagcactaaatcttttaactgtggttctctactatgtgtaatctcatatcaagattaatgagtatcgtgatcgtataattttgaatcctatcaacccatatggcaaggcaaagaaaaatgacagtggacatcattctagattttacaaaatcaaaggagcaaccagacatggctgtcatgatctaagatacttcaacgtgattggatcgaacccaaacatatgactaggagaagctccaaggccactttgtcaagggtctctgcaatgcacctactggtgcatgatttactggaggttgtgcgcatgaatgtgccacacattggtatgggggttggagttgaagcaggtgattttcaccaacattggtttgcgaactggagttgaagcaggagacatgattgttattcctatcatgtgcacactgcctcctcgctgtcatttgtcgtcactctcgtagtcctgataccggagcatggttgccaggggagagcagtccaaggcaaatttgccatgttggagcagtcacaggagccaaggggctgcagtcacaggtcctgctagccaggatggagcaatcataggacctcctagcagtccaaggaaaatttgcgaggtggagtagttgcaacttttgaaacccacgtgataacatgctcaagcgttcgtatgataaaaaagatggcacataatcaaaagaagatctcatgttctgcgtttgtgaacctgtttgtattttttgaacttgttttgtgaacctctatttgtaaacctgtaaaatctgaggttgtgaatagatttgggtaacttcatacaagtggtggaggcctggtggtaatcctggatgcatataaagcgaggcatgcaatatccatagcactcgtttgacagaaggcaacaccatcaaccttgtcctccacctttaaactagcatgagcaccatccttcttcacatttatattcatgtccc

SEQ ID NO: 36260 - DNA, 276 bp, Zea Mays
ggacgttctgcccgaaccagtataaatcttgtgcccaccacgcacaccctctagagcccggaacgcgcacaataatttacttgtcaggccgaggttcgaaacaccgacaaggtttgtcagctcggtccccctagacgcgttctgcttaaggcatggtagttcagttgttgtaaggttatttgtttttatgttgcctatttcataataaaattggggtcacccttttaaataagtgtgttgcaacgacacacaaacatatttgatatccataaaaat

SEQ ID NO: 36261 - DNA, 1327 bp, Zea Mays
caccaataacccccgtcgtcgactcgtcctcttccctcgccgcgagctccgggttcccctgcgcatagctaggccaagccaggtataccccaaccatcgcatgggagccgcgactgccccgacgaagcggagacgcggccccagcaagacgcaggaggaggccatggcgcgcgcgagcccggaggcgcggcggcggccgcggccgcgcctggtgggctatgaggagctgccggagtacctcaaggacaacgagtacatccgcgggcactaccgcgccgagtggcccgtccgcgacgcgctcctcagcgccttcgcctggcacaacgagacgctcaacgtctggacgcatctgggagggttcctgttcttcctagcgctcgcggtcgccggaggacggaaggaggccgccgacggtgccgctccgggtatcatgagggccagccgaggcacgacgacgccggggcatcgctgcccagtgtgccgcggtggccgcggacggtgttcctggtgggggccatgtcgtgcctcgccatcagcgcggcggcgcacctgctggcgtgccactcgcggcgcgccagcgcggtgttctggcagctggactacgcgggcatctccgtgatgatcgtcgcctccttcgtgccgccggtgtactacgccttcctctgccacccgccggcgcgggcggcctacctgtgcgccatcgcggcgctgggcgcgctggtggtggccgcgctgctctccccgtcctgctcgtccccgcgctaccgccgcctccgcgcggcgctgttcctggccatgggcctgtcgggcgtcgtcccggcgctgcacgcgctctggctcaactggggccacgccgcctgctacctggcgctgggcatcgaggtcgtcatgggcctcacctacgccacgggcgcctggttctacgtcagccgcgtgccggagaagtggcgacccggggtgttcgacgtcgtcggccacagccaccagatcttccacgtcctcgtgctcgtcggcgccgtcacgcactacgtcgccgtcgccgtgctcatccactggcgggagaaggtggccgtcgcctgtggcgccgcgtcggcgtaggctcacctgtttggttggctcactcaacaaccattcgaatggcaaaccaagtagtcgcaacatagatcagctctagagtttgagtgtgaccttcgacgatttataatttaattgatggggtgattgagtatggtggttcattagttcatgagatttatctgtcgagtgagtgcgtgcctcagatttccagaccttttgtttccagcctactcaactttttgtcccgtca

SEQ ID NO: 36262 - DNA, 7042 bp, Zea Mays
cttcggtcatccacctagacggcaatggaggccgccgctgccgacctcatcgccgccctctcgtccccatcctcattcgctggcctctactctcgcttcgccgcctacctacagcccttcaccccctacctgcacagctcaaaccctaacaccaagccaccgcagaagagggcgacgaagcagaacaagcagccgccgcctcccgacgcggccaccctccgcccccttgcgaagcgattcctgccgtttctcggtcgcgcgctccacctcctcccgccgctcgtccgcgcttgtcctgtttcgggcgataagggcggcgaagccgccgacgaactgcttgagatctacggcctcctcttggactgcctagaggccatatcaccctgccttgcggggaaaccctactccgtgttgctccaacgcggccgcttcatctgttgcctcgagtcgcgcggtcacttcgcacgcgccagtgcggaggctgccgctaccctcgacgccctccgctccgcgctctctccacccaccacgagcaccaagtcgcgacgtggtgctgcaggcgttgatcccgtcctccttccggaccccggcagcgctggggaggctggcacggatcctgaagtcaccctccttgcggttgagctcactgtttgccttgctaattgttccagcaagggcaaggtgaaggaacctaccccttatgaacgactcatcagccttttcaaacagctaaaaccatggcttcgtattcttactaatgaagtcagcaggaagtatctcccgttgcttatgaatgccatgagccggtgtaccctttttctggtttctgagtcttcccttttcaatactgatctagtgcatggattctgtcgttacacgatgcaagagtgtgtgggggaggggatgattgagcttttgccagcaattgctcgcaagatttgctcttctgtagatttgacttggggagggagcacacagcttttgctccatgtgctaaaaactgtcactgattctgttgtacgtttaaaggatgatttaccaaaatctgtaaatgagcttctggtttcctctcctactgcctcaatgcttcttctttatgcgactgggttatacttgagtgcccagcaagcagaaagtgaaataccaccctatttatcggtgggtattcccaaggatcaaaagtatctacatgccttagagaagggtcttggcacattagcacgatgcccacatgataatacatctttggtcacatacttggactctttggagtttattagcaagatattatcacagcaagtgaatacactttggaaggacttctctgaaggaaaaccaacccattattctggtaacatggactatgtcttgacagcactgcatcagttcattgattcgagcttcacgtcttttagctgtaggcaaatgtctcaaggggacaacgagagacagcatgaacaacatggaaccttactgacagtccttgtttccgcgatcaagttttcctttcttaccaagaaagatatccagtccagaagagcttgggtttcatcgtctgtgccatttcaagtaaatggtttacacttgaggagctcaaattcttgataccttcacttggcaacatcggagtgacacttcataacactggacatgttaaagaggcaccaaaggctttagaactgtgctgccaaacaatatgggcacacatcagccttttttactatagactatcttcaagaacaaaaggaaacgacattatgacagatctgtcgatggatacactgaaggatatggatatcattttggatgcattttcaagaattgcaaagatggttgatgctctctgtagatgtggcacagagatagaaacaccacttgtgattgttgcgaagagtttgtctataatgttgcctgatggcgacaattctgaatataacaaatgttcttttatactgatcaaggcatgggttaaggcagtacacaaggattttagggatactaaggtggatgatgctccacttctctatccctttcttctgaaatatcggtctccatggccaattaagctgataggcttaatagtagagcaggagttattagcatatggattaactgaagcccgaagcatagaattctgctctaaaatgcagataaggatcatagatgttctgcttcataaaatttactgtacgaaagaacattttttggagagatcaagggttcttattagaaaggcaggtgcacttcgtgcatctggagtggaaaacataaaaaactgccttgagtctctacgtgatgccatatctttactgcaaaagatctcacatgattcaactcgtaccaacactactgcaaacaatcagttggccattgcgtactgtttgtatgcgcagtgtgctcaggaagacaaacttggtggggaggtaatatttgatagcgctgagaaagcacttaacttgtggttggacatggaggcttttgaccattcttcttctgatatggtcttgcaacagccatcaaaaactattgtaccacttatttgtttcctggttgatttgttgtctatgaagggctgttttgagcttcagtttaagttgtgcaaggttatgataatgatatggaagcaagaaaaattacccattgagaagttgttgtccttgctgttcaccagtgggcgccttagtcatgcatgctgttatctcccactggatgagcgatttctttctattgccaaagagcatcttggtgtatgttgccatgatattgaattttggataaactgtttcaaaggagaccatccttctctctgtatgtttcttcagagaacgctgcctagtgccttatttattcctcaatcatgtaagcatccctttggaaggcagttcagtttcgtcacgagtgttgatgaagtcagcaaagttgcctcatctctggtatctggagatacttcaaatgagcaatctacctttctagctggatgtttatactatgacttgtcagaaaaagttttttcacgcggacaacttttccaggccttttcatatggaaacaaagccctccatttgcgcaaaaagctcctaaaaaagaagttcaaaatcaattcgggcatatctggaaatatggaaagacaacactgtgggcaggacatctctcttgaagtgtgtggccctacaatagttgagatttggccaaattccagcagttcagtcaacactaaagattttttccttaccccatggaatgtccttaggtgctatcttgagagcactttacaggttgctatgatgcacgaattgattggcaatggtgctgaagctgaagttctcttacagacaggaaaagagatatcaaatttccatggtttatcagttttctgtattgtatttacatcatttctaggtcaactatattgtaagcggcagctatgggatgaagcggagagtgagcttaattatgcccgagatcttgtgaaaaatgatgcaacaatttcatgtaagctctgcagtctgactttggggatatctgttgacatgcaagttggtgatctgtcttggagtctgtttgaaaaaaaaattcataaacagattacagctggtttgtctaacactttaggcatgtaccaatctgcaatagacaaattgaatagcactaacttggaatattgtaacgggtcctttgatagacatacaactggttatcttgtgtgcagcaaagactgtataccgagcaagtatgaagcttgtaatttgggggcagaacccctaacttcaaatgatggattgttatctccatgtagtgtttgcatggtaatacaagttcgaaggaaaaactcagggaatgctgaagctggtccacctttagatgcaaaagcaaggaggtcatcaagaaattcatcacgtttagctaagggacagaatgtagagactcttgcaaagactagaactcgctctagtaaacgaaatgcatgtatgaaaagtgagaaggttttaactgagctaaatagtaaaaataacgtaactgggagtaaggaattggctgcagatgcttctgtttgtggtgaagcagagtgttttcctgatggcattgatcacagcaaagacgacctatgcaatatgtttggttgctggagctgccttttcattaaatccctcaattcggggtgcattcagaatattttgcagctgagattggactatgttcaccgacactaccttgtgtcacttcttttaaaaaaagctagagccttgggatctcatagcaatggggactgtgaagttcatagtgtctattggaagtgcatatcactgctgttcttcaggtcccttccacaagattgctgtaggacttatgggccttatttaattggactaatcatggataggagcattggtgattttcttcctttagagtgtgcagaaatactattcaatatgagcttcttcttgctaaaaagccccctttctgaacagtcaagggacatctgctgtatcttctctagtgtaacaatggcagacgttgtcccctggttgctcaaagcttttgttctatccagagagagcccctcacttgttcaggaggtttgcaagttacttgcatgcatattcttgctatcaactacagattcctcaattcaactgcctttgggttctcataaagaatctctttctttgaatcactgggccacatacttccatcaagtttctgtgggaactaatctcaattgtcattactttgctagcttacaagcatcgtccgaggaaaaggttccaaaggacacctataaagatttcagaaatgagacagatgacaatgtctcgaaatttctcaggttgtcatcaagggacatcaaatatattgagaaacatatgacagaattcttccaaaaacttcctgatgtaccagttctgtgcattagtatgcttggaggtgattatgttaatgcccttctgaaattccattgccatcctccgttttttcctgcttggatgttgctttcaaggtttgattcaacaaatgaacccacaacattgcttcttccagtggattctatttcagcagaaatgcaatttgaagattcctgcaccaaagatttgggcaatccaacgagagttttagataagtggcaatgcccttggggctatggaattactgactatgtagccccagtttttagaaatatactcgaggagaattttatgtccctctccagcgcaacccttactattgatgatgtaaatgcagatcgtgtcaggtggtggtcccatagaatgaagctcaacaattaccttgctaacacattgaaagacattgaagattcttggtttggaccctggaaatgccttctgttgggccatcaattatctgatgaacacattgagactgcctcatcaatgattatcactggtctggatacagaattcgaatttgaagtcaatccaatgctcatcaaggctatccttggtggtgctgtgtcagtggatgaagtacaagaatgttttctccaactcattttgtataaaggttactttggaaggggaggatgctgtgggaaagatagacttaaagctttctcttcctgccaaatggatgatggatctatggagacactcaaacgtataataacggatgcatcatatgagttgcctcagccagctgatagagatccagttattttagttcttgatgtcaatgttcagatgcttccttgggagaacctgcctgtactaaggaatcaagaaatttatcgcatgccgtcaatgggtagcatctttttagcattatctcgaaccaataatgattacaaagatcacagttctccttttcctgtcatcgatcctttcaatacatattatctgttgaatcctagcggtgatctgagtagcacacaagaagaatttgttcagttattcagaaactatgagtggaagggagtggctgggaattctccgaaggctgacgagctggttttggccttgacaaatcatgacctattcctgtactttgggcatggaagtggaacccagtatatttctagtaaggaagtcgaaaagatagataactgtgcagctgctcttcttatgggatgtagcagtggaacacttcattgcaaaggaagttatgctcctcgaggggccccattatcatatttatttgctggttcccctgctatcattgcgaatctctgggatgtttcagacaaggacattgacaggtttagtaaggctttgctcaattcatggttgcatgacaaatctctagatggcaacaattgttcaaaatgttgccagctaacaatggagcttgagtccatgagtattgcttccaaggaaaatggtaaagcaagacgacaaggcacacgaggaaagaagcaacaacatataaatgatagtaccaagtgctgcagctgcaagcagaggcgaatagcttcatatataagtgaagctaggagggcttgcaggcttccacttttgataggcgcatctcctgtgtgttacggcgtgcctacaatcattaggaagaaagtaatgacggattctaccacgagagagatgacctaaaagtgtggtagtatcggcatggtattggtgactattgatagtgtgatctatggcgttgatggagttggcacgaaagtgtgccagctcaaatgcactgactaatttatgctttatacccagtgcttggacgcatggtcttgctggacgacctgcagtgggcgtgcacctattggtattccagagctgtaacgagtgtatattgaagtaaatgttctgtacaatggcgctgtacataactgtaatgtcactggagcatcacttagagaaagtatgttgaggctattgatttcaattgtataacgtgtactatagttttgtccaggaacatagagaatgcatgttgaggcagttaatttcaattgtataaaatgtgtactacagttttgacccttgtaagttacttataagaagctgttgtctatactgtactgaattctacatgaagttacgtaggcagtatgacggaagttttgaaagcatgtagg

SEQ ID NO: 36263 - DNA, 3113 bp, Zea Mays
attagctgagctcgtacacggccggccctctctcggtgcgtgcgtttgcgtggctgtggcaatatacggtgcgtgtggggcggcggcgacgagggttttgctgctccgtacaccgcgtgcagcggcgacgcgaccgcagctggtcgccgccccggatcgaggagggggaggagccggcggaggcccctgtggtggctgcgggggcgggagcgggagcgccatgaggggcggtggccgtggcggcggcgggaggcagccttcctacgcggcgccggacggggcggatgcggcggcgatcccggtcgcctcaaggaagatggtgcagagcctcaaggggatcctggccgaccgctcggagggcgagatctacgccacgctctgcgactgcggaatggaccccgacatagccgtcgagaggctcatctcccaggatacttttcatgaagtcagaagaaagcgggataggaaaaaggagactaaagttaatcacgaaacaaggcctcgacctttccagaaatatacataccgaggatataaggctgtttcagatcgaagtgggcgagcagaccctacaggcggtttcaaaggccctgtaaaaaaggaaccagagatgcaagctccactaaactcatcagccttggatgtcaagacaagtgacactacagaaatattttctgctactatcaatgttgcccagactgatgctaagaacaccacttctcagcctttatctaaagtgcagcatggttggggtggtattccaggtcgcccttccatggctgaaatagtgaagatgggcaggcctcaagctaaagttgggagcagatctgttgcaagtagcactgcgttgccaaccgttggtgattcagtcatttccaatacaccaaatcttgtgcctgaggaatataacagaactgtttttgcatcagaagcaggccatgtcgcagcagataaattgccaaacggtgctgttgaggtgcactctctacctaaagatgcttccgcatttgatatgttaccttcagctgagggaacagatgttgaagccccttccatgagtgctaatgcacaagggtcatcaacgccagatgccaatgaagatgacattgaaaaatatgcaaatttggaagagggcaatacagaaagcttgatatctcctggacaagtttctgcttctggtaaagatatacaatcagaatatactgaagttgtcagccatgtggatgaaggctcgatagagaaaacaaatgactttcagctcaatggccttccatttgagcacaaccaaaatctgaatggagacgtgtctacagcgacaacacaatttgatcatttgactctgcatgagggaccaaaattgtccgatgataatccggctgtaataattcctgatcatcttcaggtttcgaatgctgattgtgcgcatttgacgtttggtagttttgtgtctggaacacttgattcatccttgacaacaaaacctcttgaaagtcatggggatgctgcggcagttcctgatgatgattcaattgaccaatcagatggcaggatccatgacgatgaaggcaaggtgactttagctactgatgttaatgaatatgttacttctgcggcaaacagcaacgaggagaatcttgatattacatcagtacagcaatctgaagtcactagagctgatttcttggatgtcacaagcaatactgaatacaacctaacatcaactccagattatgcaacttcaagtgcaccgttgcaagattctgcttcacagagtttacaggaaaaccgacaattccagaacatctctcctttctcaagcttcatgcaaatgcaaaatggtctcctgccaccagcaattccaccattgcgtgaatttgatccagcattttcactattgctcacccatcctcctatgatgcatggtacaatgtcatcatccatgagcaatacaactgtttctacgcagccccaagagaatgccaatccagttggtttacccaaccctcaattgactcaatctcagcaaagcaccagcattgcttcagggcctccactccctcagcatcttcttcatccctatgctcaaccaacccttcctcttggctacgcaagcatgattggctatccatctcttccaccaagctatgcatatctcccgcctgccgcttttcagcaaccatacatgaacagtggcttgttccaccaggcagcagcggcagttcccacctcaagtgtgaaataccctctaccgcagtacaaaagcaacattgcccttgctagcttaccacagccaggctctttgctctcaagctacgttgggggctttggaactgcaagcaacatgcctggaaatttccctctgaatcaaagcacagcagcagcaacaacaactcttgggtttgatgggacggtcccttcacatttcaaagatggaaatcaatttatttctcttcagcagaatgagaaccctgcaatgtggatgcatggtgctagttcacgagggatgcccccacttgcagccagtaccatgtatggctatcaagggcagagtcatcaggccggccttcggcagggccaactaccttcacaatttggctctgcgcttgggcagtcacagccaggcctgggccctgaacaccgaaaccctagcgatagtaacctaagtggcgctgctcaggctaaccaaatgtggccaaatacctactgatccatcccccttgtcgacttctgtggaaggcggtcctgttgtgtgtgcaacgccggtgaggccatgcagtgcttgtgttctgatccaggcacgcggataccagctgtgcctgtgcgcatgagtcgctgtcgtgacattttgaggcacaagagacatatgttcgagcatgctctacctgtagggtttctaggatatggcaaaagaaaatgtagctcgatctatttattcaaattctgatagagaaaggacttcctcttttctattttattctcttttgtcattcacatatcatgtgacaaataaaaccgaaatatctaacagcagcgccattagttcccgaggaagtgaaactttacatcacaggtattgcgtgcctcttggcttcaattttatgattgaggtgatt

SEQ ID NO: 36264 - DNA, 2740 bp, Zea Mays
ggtgcgccacaatgagcttgccgtagaacctgcctagtcgctgcgtgtgctagtgtccgagccacccggccacaacctcgctttgctcctcgcgtcgctactcgccgaattcttccccagtccgcgccataaagctcgcccagccgtgaccttgccttgctcctcgtgtcactattagtcgagctcatccaacacttgctttatcctagccacaactcgtgcatcctcgaattccctccctggcctgtcgtcgtgtgtgctcgcgctcagctgcgcttgcttgcatccgcgtcgttcattgactcagtgctagactacatctacttggctctagctcgctagctatctgcgctcgctgttggtcccggttttgagctcgtcgtctggtacctagccactgtctagcgctcgcgtcggccacgcaaaacctcgacgtcgaacgtgctgttctacgcaaaacaggcccgcgtcatcatcattcttgtcgtggattgtcgacgtcattcgcctcaacaacaaccacatccatgactccgccgttccaataattttaccgcactgcccttcaaattcgagtcctcgtccgtaggatcatcgttggcctcgcaatttcagctcgagttagttatggtaagttgatctgttatttccgtcaactaaatagatggtgggattaaatagatgtatcatttggaacgattctcttgtctattacttgatgtggagggtaaagttagatttcaggtttatgtgataagtatattggtaaaaatgtatgttgtgtgatgattctctacttaatagattaagtgtagtgtgatgttttattagtcgagataatttaaggattaattcagaagagtgtttaaatagttagttaagttgtttcgatccatacttcgattttggtgtcccaaaattatgattctaagtaattagtctttcggtgttcgctttagtcaaagagaaatgtggaactcatatgatctattcttttcctaatgactgagctaggtccttttaaacagaaagcaagtgatgtatgagctacctccgaataggctggaaaggtgtaattattataattaattatatatcgctagttagtatttgcttaatgctttattataagtgtttcatccactttggtgtagattatctatcttatactatttatactcgtgctcatacatgtgcatcatgcatctcatgaggtacgctagttgatcacgtgaggtgaagggcaagagctggagtaatctcaaggtgatgctgatggacgatcctgaagatggataatctgaacaagtgccaagacaatggatggtcgtcaagtgttcgtcacctaacaacactaacctcgtgttatccaggcaagctccggtgcatttgccacctccttgatgttttaaaatctttatcaccttgtttaatgcattaggtgataggagttgtgtgctaaacaattgatgcattttcttccttgaaaaactgattacccttccttgataccctttttgaaaagaattttatgatgcttagccttgctttagcaaacaaaaatgttttgttttaaaacaaaagtgatgcttcagcgggtgggaatgttttcaaaaagaaaaacttgtgatggtggatccatcagggccttgatgggttcaacatcggaaaagatgtacctctgccaggtaccaaactttgggtttaaataataaagctgagaccgggcgggtggcttgcacgagaagagagtctcagtgtagtgcctccgtctgagtcgattaaggactgtctcaatgtaggcttgctgatcgaggaccttttaactggtcacatgcctcatcatgggtaagctttgcctcgggcagactaatactagaaaggccaacacgcaatgggagtggagagatggcgagagtagtgtgtaccctccatggcaagaggctggacggtggtgtatctgtgctctcggttggcgtgaacctggtctggtcttaagaaacccgttggcgagttgacatatgcaagggttaagtgcaacatatgtcgtatgattggagatccccagctgggtatttatcgattcggatcgccgttacttctcagacatgaagacttggtcactgccctacacatagcaatccagtgaactgaagggatgataaaaagacggctagtataggccatgttcttgaactaggatagaaagaactctagatgcaggtaactttacttaacctgactgttgggggccttcggcttccgaaggtcctcaaaaacgtaatttgactatgttttccaaaagaaatatgtgaacaggtaccttcgaagtcagattgcgagtatacaagaacatggttaagacgaagcttgattgggacggcgatcacgacgaaggataagacgatcacgaagctacgtgcagaagagcttcggcataacggcagaaagaggaaaccgacttaaagatgaaaggccaaattagacctcgaagaattactatagagttattgataaatataaagggcattaatgtaattttgcatgggctgcgacccgtgcctataaataggtgaacagtattcccgtactgttcacgctgactgggcatttacttttgtgtcacacctgtattctcattccttcaaaccgaaggtacatttgtaatttattattatttacacaagtaatataaatggaaataaattatgttactccttgtactttgcatgaatattct

SEQ ID NO: 36265 - DNA, 2069 bp, Zea Mays
ccccccgtggtcccgtcgcccggccgtgagacccaacggcgtttggacgagtgcaacagccgcacgccacgagcgtgggcgtgagtcgtgaccacgtgcggcctgggccagtaccggatccgggcgcgggcggacaccggacggacacaccgcaccgccatcgcccatcggcatcgcctcccaaccgtggttgacgagctcctggagcagatcacccaaacgcgaaagccaaaagccaaagcgagcggagcacaatttatcgtgcgcagcatcggcgcagcccctttccccgcccgcccacaccgcgcaccgcccgaccagctacgggagcacgccgcccctcccccctccccctccccgccccgtgccgtcgctcaccagccccagcgtcgccgttccctgctaactctatcccctccgcctctcgtcgtgctgaggagggcggagacaactgcggtgcggtggtgcctcctcaaatccccgccgacactttctgccgcccccaggtggatcctgtccgcggatccaggaggtgctatctagctccctgatccaagctgaaattaggatctgaaccttccggggcgagctgatgtacggctcgccggtgtccaaggacctcaacgtcccggtgcagccgcccatgatctcgtccgggctgctgaggtacagatcggcgcccagcacggtgcttggcgacctctgcgaggacttcctcccttccgcgtccggcgccgccagccccgacaacgtcttctccaggttcctcgccgagcaccacacccgggacgacaagccgtcgccgccaccgcctgccgcggtccacttcccgagcgaagcggacatggcttcccagcagcagcagcaaatgatgttccactcccaccaccaccagcagcagcagcagatggtgggtgccaagtccggcctttaccgcaccgtgagctcagacatagaaaccgcggccgctgttggcaccggtggcgccagcaacctgattcggcagagcagctcccccgccggattcctcgatcatctgaacatggacaacggatacggggccatgctgagggcgggcatggccacggcggactccctcgcaggtagcggtagcaggctaaagggccagctgagcttctcgtcacggcaggggtcattgatgtcccagatctcagagatggacagcgaggaggtcggagggagcagcccagaggctgccggcggaggcagggggtacatccctgggtacccaatgggttctggttctgggtgggaggactcatcggcgctcatgtcagacaatttgtctggcctgaaacgcccccgggactcgtcggagcctggccagttccaggacgcggtgccttgtaagatccgtgccaagcggggatgcgccacccatccgcgcagcatcgccgagagggtgaggagaacaaagatcagtgagcgaatccgaaagctgcaagaactcgttccgaacatggacaagcaaaccaacacatctgacatgctagatttggctgtcgactacatcaaggaactccagaagcaggttaaggtgttaaaggagacccaagctaattgcacctgcccagcaagcaagagccagcagcactcttgctgaagccctgatgcacactatacatgacctgcagaactcgaaagcatcttcacttgggatagaaaaagatgtaagacagctctcattttttttttgtgggtttgaactgtagcatttgaggcttatctaccagacagtgtgtagctttatatgagcacaggggaatggaacaatggcatcatcctcaagcattcaagtgatagggagaagggtaaaattggggagatatataggagaaacaactgtatagtttcgttgtagctttgctatatgtatactacactttcggtataaagtggttaatttacccctattgctagtcgtagcagctgtaaatgtgccgcagataagttgtagaaaaacttggatgcgttcaatgcgagcgatagtgtttcgactctgaacatatattatcattgaattaatgggcatcctctactgaggtctg

SEQ ID NO: 36266 - DNA, 2494 bp, Zea Mays
atggtgctgccggcattgcccaacgcccatacagtcctcctcctcttcgcctccatggcgtggtcccaggaggaggcgtctagccgcatagccgagccccacgcatcctcgtacatgacggctcgaacgagtgtggatcgaagagaccgggtgggagcagagcagctggtgagagccacaggagatgatggagcgttctgtgtcaccttctgcatcgtggatgaactaggaatccagggtggattcatttactggagatcacactgccccaagggctatcctgaaagtgctccttcaatctctgcggacataccatatctcccaaaaatacagtggtcaaaaagctcaagatcaaaacatgttctttggcgactccaagcggtgacggttgctgcatcctgttgcatattgacgcatgccagcccgactccttaccagagtgcgagaacaccccagctgcagcggagccttccattccgtgtgcctcagagactggctgcgcttcgtcaccacgaccaggcagccgttcgatgcccctgttcgggaactctgccccttaccgcagcgttcccgtggccgtcaagatcaccggccactaacaccaaacttccaagttttggtcggcgtttacaaggtcaggcaggcgatcgtaaccacccattttaaggtcaccttcgattttgttccatgtcacagagaagggaaaaagaaagaggagactagcagccagctaggatgtgccgtgcccgtgcgtgaaaatgcagcaggcatggaaagccagcaggcggatgactctgactcacatggatctagggcgcctagcatacatactttactgcaggaccgcagagcgctgaatagaagcacctgctgcgcaagcgcaagtccaaaagactcccttgcaagtcttggtctggaccgtggacggcttccagaatccagactccctgcacggcgtgcacgcgcctacataagaaaaaagatccgtggccccagcacccgcggccgagtcagagccccagtcccagagggagggggaaatggcgagcggggacgggaagaagcagagcagacggcagcggcggcggcggcagctgtgggcggcgtgcctcccgcggccggggtgcttcacggtgtccgccgccgacgagggcccgtcggctcacggtgccggcgagggggagagcaagcccaagcccacgcatctggtcgtcacggtcaatgggatcgtcggaagtgcagaaaattggcgttttgcggcaaagcacttcatcaagaaacaccctgaagacgtggttgttcactgcagtgggtgcaactcagcagctcgaacctttgatggagttgatgtgatggggagaagattggcagacgaggtggcttctattgttgacagtagaccggagctttgcaagatttcctttgttgcgcattcattgggtggactaattgcaagatatgctattgcattattatatgagagcgagacacaaaaagattctcatgaaaagtttgagaaccatgctgttgactattctagtaaccagcacagcaaagggaaaattgttggtttggagcctattaacttcatcacttttgcaacaccacacctcggtacaatatcacacaaacagataccacttcttcgtggttccaacaaattagaaaagatggcgtatcgtttgtcttggattgctgggagaagtggaaaacatctcttcctgaaagatatggaagatgagaaaccaccacttcttctacagatggttactgattatggtggtctccatttcatgtcagctctccgctctttcaagcggcgtgttgcttactccaatgtttgtaatgactttatcgttggctggaggacatcatcaattcgtcgtcaacacgagcttcctgagccccgaagttttataaacaacaatagatatccacacattgtatatgtggaagggccaaaagttgaggatgttgattttttggatgcgatgatttacgaggcaaaaacgactagtgaaatggaagaggtgatgctcaaaggtctgaatagagtttcatgggaaagggtagatgttagcttcaaaaaaagtagacaaaggattttcgctcatagcactattcaggtcaagacctatttcttgaactccgatggagctgacgtgatcaaccacatgatcgaccattttgtttattaagatgggtgtactaagttggtaccaagttctctttgtcgatcgattctcggccaaagaggaacatgtgggaaatgttcttgttttgaagacaggattagagttatactgaaggagtagaacccactgtaaagtgtaaaggggtatcttatctctacccttcttgataattttgggccgtttaggttcttttcttcccttttcagaattcagaatctcagttgttttgtacccatatactggaccagaatttgttctccaaatacaaagatatttgctgcgtatttgcttctccgaac

SEQ ID NO: 36267 - DNA, 248 bp, Zea Mays
ttggggattcttttgtccgcacgatcacaattcggagatgtcacgtagggactagcatcgagacgacggaacaacgatgaactagcgagctgaaccacggctagtgatgtcttgacgtggatgagcaatggcaactggcggactcggaacagcggagtgaggtgcatggccagctagcaaggatgagtgcgtgcgacacgaagatgtttggcgccaactaagacgtgcgcacagatgcctaggactcg

SEQ ID NO: 36268 - DNA, 2077 bp, Zea Mays
gagccaagaagcggtaggtggcgccaacgactcgtcgtcgtcgtatccgcggtccggttcctctcctcctgctgcgaatgcgatccctgccctgctccccgttctagattaattgcctttagttattcccttcccctcggctcgcgtgttaatccacggattaaactcgcacctgccctcctcgtccttgacacactgaacgagtgcccgcctgcccggagcagaaccattctcgccctctccctctggcctctgcctccgcctccgcggacgaaaccgccggctgggtccaagtttagcgcgtcggaccctcgctccccaatctcagagcaatggaggtggaggcggcggggccggataagctggcgcctccctcgccggtggagggccccggcgagaatggcgcggccaccaaggtgcagaaggtgtaccgcagctaccggacccgccggaagctcgccgactccgccgtcgtcgtcgaggagctctggtggcaggcgctggactacgcgcgcctggagcacagcaccgtctccttcttcgacgagcccaaaccggagaccgccgcctcgcgctggaaccgcgtcagcctcaacgcatccaagatcgacccgcggcataggtatgggcacaacctgcacttctactacgatgaatggtgcaaaagccaagcaggccagccattcttctactggcttgatatcggcgagggaaaggatctggaccttcctgaatgtccaagagctttgctgaagcagcaatgcattaggtatcttggtccgcaagagcgtgagcactacgaatacatcattagcgagggaaaggttatccacaaacagtctggggaaccacttgatacaaggcgtcctaaggggactaaatggatatttgttatgagtacagcaaaaaagctttatgctggcaagaaacagagaggcgtgttccagcactccagctttctggcaggaggtgcaactatagctgctgggagattcactgcagaaagtggagtgatcaagtccatctgggcgtacagcggccactacaaacctagcgcagagaacctccacaacttcatgaacttcctcgaagagaacggagtggacctcaaagaagtcgaggtacgctcatctaccaaagaagactacaacgaggacccagtgccagtgccggtacttaacgacacacggagttccacttcagctaccatggaagaggcagaccttccacaggcggcggttcccgtccccgctctaaacagcacagagggcgacgaaggagacagccctccggaagacgaaggacgaggcagggcgaggtaccagaggaccttgtcaggcgggctgcagagccccagagccacccaagtgccccagagggcgatcctcgagaggatgaagtccaagggcgagttgtccaagtcgtaccagctcgggcacaggctgtccctcaaatggagcaccggggctggcccgaggatcgggtgcgtcaaggactacccgatggagctccggatgcaggcgctggagatggtggacctttcgcccagagggttgtcgtcgactccgtcgccgtcgaggagactgcctcctccgtgcttttcccccactaaagtcgcctcgccgacgtctccgctcgcgccagttcaggcgtccctgccgcagccaagctaggagctcgagagtagcagcattatgcatggccacgcgcaaatagcacaagaccggttccattcgagagtagcagcacaactcaatgttgtccaagtgaaacagggtgtgggcagaatctgtcacgtttcagacaccggtagctttgaagcagatatgtgctagtgtagtgtttttttttactaccatggttgaggaacctgctttgtactgtatcatctgcaaacggaataatgggcaaagcattacatgtgtgtgtgtgtgtgtgagagagagagagagagagagtactcagagcccttgcatacaggattacaggttgtgatttgtgaagatgttgtattttttgcctgcttcgcattgaccatcgagagttcttcagggggtcctgctgcctgcacagtgag

SEQ ID NO: 36269 - DNA, 1229 bp, Zea Mays
caccatcaaaaacagctttgtttctagtcagccataggcaccaagaccccaaaataatgagactgttgaagcctttctttctgattttgggcaccttcttaagcgccttcctccaccaatcagcaaatgagatttcatcaatagcaggaatgagatccccaagacacaagggaacaagaatagcatgccaaaattgcctggcaaaactgcaagtacacagaagatgttgcactgtttcctgctcttggtcacaaagaacacaaacaaccgggtgttgcagccctattacgcaacgaacttctatattctactacgtgctgttgatcgattggctgccaattatagcagattgcctggaatcttcgacaggctgaagactgttgcggcttcagtggcaagtgagatgggtttgaatggagcatccttatccgaagacctgataaccgagatgtgccggttcgggggtgcggagattcatccagtggctgcttttgtcggtggagttgcttcccaagaagtgattaagctggtcaccaagcagtttgtgccgttgccgggaacattcatatttaatggaatcgacctcaaatctcaagttttgatgctataacatggatgtggaacgttgtctgtgtggactggatttgagttggcccagattttgtgccagggcacaacgctgcaaatggaatctgtttgcccaacgcgtagccaaatatgtgttgcatgatattttagagcctgtttgtttcctcgcaggattatataatccagcttagtttatatagattatataatccaatttatataattttattagagatggctgtttatacaaattattagtgggtacaaagctaaacaataatataaaataagcacctaatgatatgcttatgaattatcataatctaggtacctagattgtacttcctccgacttttttatttgtcgttgtttagttaaaaataaactagcgaacaacagatattccactttagttttgtttatttgcttcttaacttatgtaagttagattatataatctacacattaaacaaacagccaaacagggcttgcgtcgtatgattgtcattctcgccaagcaccttcccgccacccccacccacccacacgaatcagagaaaagtggttcattgagagttgtcactctgctgtaatttatcaatacttgtcgtatgatttatgcaagcgcttcctagctcacg

SEQ ID NO: 36270 - DNA, 3412 bp, Zea Mays
cgccaccgccgcctcccgtttgttctcaagattctctcccgccaccgctccgagtcccaacctccatcgacggggaggcgtcctccatccgggccggttagattcatcgctttgtagctggtcctcgtcgtttccctctgctgtggtgggagaagcgactcgcgcgcgcgatcggccaacaaattaagcacggggcagggccgtacgcaggaggcgagctctagggctctccggggagaaggttgccaggcacgccaggtgaacgccgtactgagtttgcagtccgggacgtagcgcgttctctggtcgggaggtggggaagcggagagcgatggctgcgccgaggaaggggacggcgacgccactgggcgccgtattctcgccagaggagacgaagagggccgtggcgagggtggccgagtccatcgctggccgccgcgccgagctcgggcacctactgggcttcgtcgccgacaacgcggccctcgtctccctcgtcaacaggctcccagtcgaactctcccacgaaatcatggtcccctttggtggtgctgcatttttcccagggcgtttaatacacacaaatgaactcttggtgcttctgggtgaggggtactatgccgagaggtctgctaagcagacgactgatatattgcacaggagggggcaggaattggaagctcaggtcgaagcaatgaaggcaactatcactgatcttgaagctgaggcgaatttttttgagtccactgccaccgaggcttcagagggtcttgttgaaatcagggaagagtatgatgaggatacagagacaaagacaacaagatcagaggcttcaattgctactggggttatgtttgataatgatagggaacatgctcaaatcatggcaaggttagttgaactcgaaagggaagaaaaggaagctggaaatacttgtgaagatgatgatgatgatggcgacgatgatggagatgctggtacaagtgaggatggtgaggaaaataaggaacccggaaatgctttaagtgatggcaatgaggaccacagttctggttctggtgctttattttttggaaatggtggcaatgataggagtaatgggaatatcaagctgaagagtgcactgaagaagcctggaggagatgaaatgctgaaagacatttctcatacaccatcagccgatacatctcatccagtatttggtggccaaacttctataacaaatcctgatgtccgagttcacactaaagatggaactgaacctgaattttgtttttcacttggtgcttcatctgctttctctgtttcttttgaagacgacaaatttgtggttagttcgtcaaagtctcctaccttgctagtgggttcaatacagtctgatcctgggctcaagagttcttcagaccccactccatcatgtgaccgaaagataatatcgagtgggcgaaaggccttcacaggatctatcgtcgagcacgacgatgacgatctttcaaccattcaaccttctgcgggcaattcgttggcaaaacctggtacttctgcgtcttcaaggcccatgtcaaaattcaagatgcagaaaggagggcgtgcaccttcaccagtgagactgtttggcggggatacatgggatgttcagttagattcagtttaattagtggctggtggtgcagtatctctttcagaaacctatatatatatgccgccatgccgtttgtaaatctttcggcaacaaaagaaagaaagaaagtgtcgaaagattatattctctggatttaattggaaaaccatgctgcttaagactgatgacaacacaatctacggagactaaatagtgacgagggaacccatgggaaatggagcaaagaaggaaatcgtgagggtgatttggttggttggtccaacgtccaagcatcgcatcatcggttagccagccatcagtgatcggagttggtaaaacccccccaaagaacatgtcggccaataagtggagttaattacagatctagtggtgctagctagcttgcaatgctgttcctacttgtgctgtaacacagtgtcatgacatggtcagtagcagctgacgagcgccgccgcgcagtcaggtggtcgtcggctggtgtctcttcttctactccttccctaggcgccgccgccgccgccgtggagcaccagattgtctcccacacgtctctcaccagcagaaagggaggaaggacctgccctctgcatgtcagctccactctgctctacggctggcggctggccgacgtcgccttggcggtggccggtgggcattgacgcactgggcacgacgggttgacggtgcgctcccgctcccgcagtctctctggcctccggccttggccgcgcgctctcggttcttgcagtcccgccggctattgtggaactggaaattagaatgacgccgaggtggaaggtgataaactgatgacctagaaaattagaagctgctgaatgtctaccttgatgttttagattaacttgggggcccttcaactttgggggccctgtgcggtcgcccagcctgcacaggcccatggacgcccctgcatgctggccccttcgcttggcttttttttaatccgaaccggcttctttagtgtaaacaaccggttcttggaggcatatatcgtcttcggacaaatattaactaatgcattcataatatgtaataatcaagctggcctatagcctcctgatatggtttgaagacacctgatgagcagctatagcctagcctctttcatgattcaacggttacctttgctgatctgaacatatatatacatactcggtccatttccaatcccttttcaactctcttaattacaagtctccatcgtatatggaattaaacgcacgagacgtttccggtgttagttttcgactacctcacctgaacggctactttggaaactaaaatgctggagtagattaaggagctaaaattaccttcttatttaaaattgaataaggagattttagccccttcagtccccctccgcgtactgtgatttggaaagcaaaaacaaaaaagggaaaaaagaaaaagaaagaaacaacaagcctatagggccctacgtatgcttaggtataatgtttctttcatgacgattatataaataaataaataaatatacgcagttcaagttgtgctgcagatcgatttcagcaagagtgcatgcttattaattaccactgtttagttcgctattgactattagtcgaatacgtaaaaccacgacgacgcgtgtttattatgctttgcaaattagagcactccgaataataacgtaatggtgcaggagttgatgcatacctgatgagaccgagaccgagaccgagaccgcgcgacccctagcttctcggccaagtacttcatcaccac

SEQ ID NO: 36271 - DNA, 174 bp, Zea Mays
cgaatgtcacatctttactaaataataagagttctgtacaaaataaataattacatcgaaaggagacaacgaaccagcaaccccaaagttgactgggagacgacggcctagatctctcacgaacacatcacagcatgctccatgcgcctcatcatgtggtacctattcttgacc

SEQ ID NO: 36272 - DNA, 1181 bp, Zea Mays
ataataaaaataaaaataaataaaaagtgagagagggaggaaggcgcacacttcctccttccttctttccctcttcgtcttcgcttggccggtgggtggtgcggtggggatgcggcggctatggcggtggtaccagcagtgcctggccgcgcacccggtgcgcacgcaggtcgtcagctccggcatcctctggggcctcggcgacatcggcgcccagaccgtcacctactactccgctagccccgaccgtcgcggccacgacagcagccctcccgaccccgaggataaagataataaagacaataaagagtttaaagttgattggaagagggtgggcatcacaagctccttcggatttgcttttgttggtccagttgggcattactgatgttgatcccacaatctcatcacttactgctgcaatttgttcatttgcaaaaggtatgaatacctggatcgcatcatccggcggaggtttcagcctaacacgttcaaattcgtcgcctcaaaagttgccgcggatggattcctcttcggaccactagacctcctcctgttcttctcatatgttggtctgggtcaaggaaggagcatagagcaggtgaaggaggacgtgaagagggacttcattccggctctggtgttaggcggaaccatctggcctgctgtgcagatcgcgaacttccgcttcgttcccgtgcggtaccagctcctgtatgtgaacttgttctgcctcctggacagctgcttcctgtcgtggattgagcagcagggtgacgcctcctggaagcggtggttcacttcgttccagaaaatcgaagaccagaagggtaaggtttgatttgagtcatgcatggttcgttgtctggatcagtacctgtaaactccggttgatcaaggaagataattgcgatgccagcaaggctgaacattggcgtcgctatagagaattctttttagtctttgacgggatgaaacggttgccgagttgctctgttaactgaagtgcctgtgttttgccgatgtgttaaactttctttttagtctttgatccaagatgcttaagtcatgtctgggaatgggtggaattgacgattgcaacgcgagcaaaagctgaatatatatcctgttgcagcagttccagtccaggaatagctagcgagggatgggtggggatcatg

SEQ ID NO: 36273 - DNA, 1574 bp, Zea Mays
actcgcagtcgcaccacttgcacacgggcggccaccgcacatcagcacttttacgagccctcctatctctcgatttctcgcgcagcggccctccccttctctcgccgccgccgccgcgtgttccgtcgtctcctctcaccgatggcttttgctaaggtcggtgctgcgacgcaattggagaacagaggcgcgctgtcgaaaaggttacgcaacgacgtgtctgtaagggagggggactggaattgtcctcagtgtggtaatgtcaacttcagttttagaaatgtttgcaaccgtggagcctgtggtgcaccccgtccatcaccgagtccaagtccaccacatgaaagggagacttttgcgattatgaaacgccgcggatgtggcttcgacgaaacggaggcgttggcgagggtttcgacgatatgaaaaaccaggggacagactccactctgaaatagactgacaatcgatattagccgttgagagaacgaataaccatcctccgtccgtgcgccgttgtcttctcctgtctccttcattctccattctacggatcttctcccgtctccttcttctcccgtctcctacggatcttgcctcctgcctgggagatctccttgcctgaacctcagcgtcggacgcaagcttcgtaccaacgccctgctggtaccgcaacgggccattgggcggggcgccgcaacgcccttgttcgtctgtcccatctccacggcaccacgcccttgcacgtcttcgccttctccatggatgcatcagctgcggccaccgacgtcgaggtcgacgagcagtcccccctagtggaaggcataggcttgtcttcgggtgtgaatgtagaagacgaatctgtgtttgattgggcttctatggttctcagtggtttgtgggaggaggaagggagacatgatgttcctagtgagacgcaaatgtattcgcaacttggactaattgaagagaacgaggcagaggaaaatagaagggatgaagccttacgaggtggtacaactaattttgatgaatcggaccatgttgattcaggagaccaaaatacaaaccaaccatgtgaggactacctaccggacgagaagagagctaagtatgataaaattaatccctcaatgcagccagtttgtttccgaacatgaaggaatttagaattgctatgagacaatatgccataaagcatgagtttgagcttggaatcgatgtgacttcgactactcgatatgttggctattgcaaagctggtgattgtccttggaggatctatgcacgggaggaaaagaaaggattacctaccatcgtggttgctgtcttgcatgacgttcatacttgcacatctagtggcaagaggaagacgacaacaccaagtagtggatgggtagcatttcacgctattccactaccaatgaagaaaccccaaatgggtgctaaggagttgcaagatatactacaaggatttcataatatctgaattttctgggaaccgaaggagacaaatggttcccagttttgttcccagaatacagtttcaatagagaaaatatagcctgaagaac

SEQ ID NO: 36274 - DNA, 2992 bp, Zea Mays
cctaaacttgcggctactctgctgccaccacccacctcctctctcttcacctcccattctctctctccgccccctgcttgcctgctctacccacctcataaacttccccactccttcctccatttccatccattcttctccccaggctgccgccgctggcagccgcatatgctgctgctggtgctctgctactccttcgtcaatctctgctgccgtttggcattagacggattccagtcaactccatccattttgatggttaaactatcaaagatactgccggtgctgtgaatggctgctcaagttcctcagattctttaaattctgagttcatcctcaattcggggctcttggtttaagccgttggacgattcattgtaccgcggaggattttttatggctcatgttgcctcgtgacattgtggtctgaccaaaagctgcttttacatctccttcatgggctgttcagcttccaagtgttgttcacaattgaagtgctctttgtgctcaaatgggtgcctggggcaggcacctgactccccgagggaatccaggggaaagtcaagtcgggggagagggagggtagattctagtggttcagatgattcttctggtgatgatctcggggaagatgacgatgcttttaaccatatgaatgctacaagggaatcaactgctggcatcagccgactgtcaagggtgtcgtcacagtttcttcctcccgatgcttcacgcaaggttcaggtccctttgggtaactatgacctgagatactccttcctgtctcaaagaggttactacccagaatcactggacaaggcaaatcaagatagctactgcgtacataccccatttggacctagtcctgatgaccacttattcggtgtgtttgatggccatggggaatatggagctcaatgctcgcaatttgtgaagcgaagattatgcgagaacctgctcagagataacaggtttcgtaccgatgctgtgctggctcttcattctgcttttgtggcaacgaacacacagctgcatgccgacaacttggatgactccatgagtggtactactgcagtcactatcttggtcaggggtaaaactatttacgttgcaaataccggtgattcgcgtgctgttatcgccgaaaaacaaggggatgacattgtcgctgttgacctttccatagatcaaaccccttaccggtttgatgagcttgaaagggtcaaggaatgtggtgctagggttctaacgttggaccaaatagagggcctaaagaacccagatgtgcagtgttggggtactgaagaaagtgacgatggcgatcctccaaggttatgggtgcaaaatggcatgtacccaggaactgcttttacccgtagcattggagattctgttgctgagtcaattggtgtcattgcagatcccgagatttttgtcctggatctcaattccaacaatccatttttcgttcttgctagcgatggcgtttttgagttcctttccagtcaaacagttgtcgacatggtttctaaatacaaggatcctcgagatgcatgtgcagaaattgtcgctgagtcctatcgtctttggctacagtatgaaactcgtacagatgacattacaatcatactcgtgcatattaatgggttaactgataaggaatctacccagactgttacgaaggtgactttacaaccttcacaacaagtagtaggactggcaggccctgaatcgccactaatagtaagttccaacaccaataatcagcgctccaagcatgatttatcacgggcacgattgagggctcttgaaagttctctagagaatggtcaattatgggtccctccatctccatcgcatcggaagacatgggaagagcaagcgcatattgagcgggtactacatgatcatttcctatttaggaagcttactgactcacaatgtcatgttctacttgattgtatgcaacgagttgaggtgaaacctagggatatagtagtacaacagggcggtgaaggtgactgcttctatgtagttggtagtggtgagtatgaagttctggctattcaggaagaaaatggaaaggaaataaccaaggttctgcatcggtatacagctgacaagttatcttcttttggggagctagcactaatgcacaataagccgcttcaggcttcagttcgtgctgtgaccagtggaacattatgggctctaaagagggaggacttccggggtattttgatgtcagaattttcaaacataccatcattgaagttgctccgatctgtacaactgtttacaagatttacagtgcttcaactaagtcaacttgccgagtcacttgttgaagtatcttttgcagatgggcaaataatagtagataagaatgataaattctcttctctgtatatcattcaaagaggtcgtgtgagacttatattggctactgatcaaatgacttcagatacttgggatctcattagtgctgaaacaaagcaggcacaaagtagtcgggaaaatggtaattatgtgcttgatatagatgagggagggcacttcggagagtggtctctcattggtgagactattgctttcactgctattgctgttggtgatgttacttgttctactatcatgaaggagaaatttgactcaattgttgggccttttcctaaactttcgcaagctgattccaagattaaagaatctctggtaactctggagaatgttgcagatggtgatttcccttttaggagggtgaagctctcagatttggtacggggaatggaaaatgtgcatatatgctgctgattgcagtgagattggtcttgtccaagtcaggggctatgaagagaatttttacaatggtttgaaaaaatgtggaccatccatcaatataaattgaatggtgcaaacacgagaggtaccaatagaaaagtactcggaagtactaaaacagtagggatgataccaaaatgtgtgggagcagtac

SEQ ID NO: 36275 - DNA, 305 bp, Zea Mays
cgcgcctcagtgatcgggccagtcgcagaagtagttgccgtcgtgaagcagtgagcgcaccgaaaggacaaatcgtgccgccgtggttgattcgtgcagatggcaacgtcgggtcctcggtaggcggtattggaggaccactagtattatccgcacgttgtcaagacctttctaggcgaggagatccaccattgatgcaccaattgctcgccgggttttgaactccgccgccaagccattgtctatcgtggtcagctccgtcgtagcttcaaccccgggtaagaaccccaccaaacgactcatgt

SEQ ID NO: 36276 - DNA, 2012 bp, Zea Mays
gtgacctacactgccgcatcgcattatttctgcgcggaccctagaggagttggtggcttggaccggaccttgtgtgtccccaacccaacagctacggaaaccgaaggcagacagccctgagctgagagcgctgtgactcggtcgctaggaaggatggattcccctttctccctatgactcgtcagggggctgtgcgatccagctcggatgatggggccttgcgtttggaggatcatgcgagcgggcgtggtccgtgaggcatccatccatgcgactgactccctcctttgtgatttttcttctttctggcactctagatcgcgccgaacaacgctttgttttcatgtgcactggaatttatggaggaatggaggcgtcgcagcagggaagccaccctgctggaccctgtggtggtggaagcggcgccggactccatggacgcgctcttggcggagatggccaccatgctggcgtcctacgaccgggttgacgtggaagccgtggcgatcaagatgatggccatgctgtcgaagatggaccggaaggtaaagtcgtcacggacgcgggcgctgctgaaccggcacctggcctcgctgggcgtccccaagagcgcgcactgcctcgcgctgcggctggccgaggagttcgcggtgaacgcggcggcgcgctcgcccgtgccgccgccggagcacgcaccgcgcctcaccgacgcctcgcgcctccacgtggcgctcgtgaccgacaacgtgctcgcggcggccgtcgcggtggcgtccgccgcgcggagcgccgccgacccggccaggctggtgctccacgtgctcacggacaggaagagctacgtgcccatgcactcgtggttcgcgctgcaccccgtggagcccgcggtcgtcgaggtcaggggcctgcaccagctcgcctggcgcgacgccggcgccgtcgcctccgtcatgcggacggtcgaggaggtccggaggagctcgctggattggtatcgacgacagtgcggtggtgggtcgtcggcggaggagaccaggcccagcgcgttctcgctcctcaactacctcaagatccatctcccggagctcttccctgagcttggcagggtggtgcttctggacgacgacgtcgtggtgcgcgaggacttggcagggctgtgggagcaggacctcgacgggaacgtcatcggcgcggtcggcgctcacgaaggcggcggcgtttgcgtcgacaagaccctcggcgaccacctgaatttctccgaccctgacgtgtccggctccggcccactacacagctcgcgatgcgcgtggtcgtggggcgtcaacgtcgtcgacctcgacgcgtggcgacggacgaacgtcaccgagacgtaccagttctggctacagaagaaccgggagtcgggcttcaggctgtggcagatggcctcgctgccgccggccctgctcgcgttcgacgggcgcgtccaggcgatcgacccgcggtggaacctgccgggcctgggctggcgcgtgccgcaccccgacctcgtgcggctctccgccgtcctgcacttcagcgggccacggaagccgtggctggaggtcgcgttcccggagctgcggcagctgtggctcgcccacttgaacgcgtcggacagtttcttacagggatgcggtgtggtcgaatggcagtagatggggtacggacgggaacagcagagcatcagagttgggaggagacgtacagtgatttggtccaggtccaggtccaggtcttcaggatcacggattttaactggggccgccgggagagggaagtaggtgttgcctgcagtctctcctggccttcgggttctacacgcagtccacatatccacattaatctgtacaactgctcgtggtttttcttaagccaatataacattaccacgtccaacgttcacaaacgaatgggtatagagcatttccaatatttatgtaaataactccctaaatatgaatttaataatttttcaagaaaaactcttctct

SEQ ID NO: 36277 - DNA, 1765 bp, Zea Mays
aaaaaaaatggatgctttcatggggtcagtgctgggtgccctcctggccgtgctcgcctccacgctgctgatcggagcgctgttctttctggtgtggaagccctacgtcgtcacccggtggtttcggggccagggcatcgggggcccaagctacaggttcctcgtcggctccctgccggagatcaagcggatgaaagccgccggcagcaagatcacactcgacgtcggctcccatgacttcgtccccatcgtgcagccgcagtaccgtagatgggtatccgattacgggaagacatttctgtactggttcggcgcggtgccgaccatctgcgtcgccgaggtgggcctggtgaagcaggtgctcgcggagaggacaggcctgttccccaaggactacatgaacgacagcatggaggtactccttggcaagggtctcgttctcgccaacggcgaagactggaaacgccaccgcgaggtggtgcacccggccttcaagcccgacaagctcaagacgatgtcggtggtcatggccgacctggtgcagcggatgatgcagcaatggcgatctcagatacagcgggccagcaaccatgaggctgaaattgaactcagcagcgagttctcggagctgacttcagatgtcatcgcgcacacggccttcggtaccagctacaaggagggtaaggaggtgttcgtcgcgcagaaggagctccaagaactcacattctcgacatggcttgatatccctgctcctgcttgtctaagcaagagcagccgacgagttgaagagctggacaagaaggtgaggagcatgctcatggcgataatcgaagggcgccttgccgcgaggggcaccagtggatacggcaacgatctgctcggcctgatgctccaagcgcgcgctctggagcaagaagggcaccagatgctcaccacggaggagatcgtggacgagtgcaagaccttcatcttcgctgggcaggacaccacctcgcacctcctcacctggaccatgttcctgcttagcaggtactctgagtggcaacacaggctgagggaggaggtgctgagagagtgtggcgatgcagtgccaaatccggacacagtcaccaagctcaaactggttaacatggttcttctcgagtcattgaggctctacagccccgtggtgttcataagaagggccgtaggctcagacatcctgctccgcagcacgagggtgcccaagggaacaatgctgtcgataccaattgcattgctgcacagggacaaggatgtctggggccaagatgctgacgagttcaaccctgacaggttcgagcatggcgtgtccaatgccgctgccaaacaccccaatgccctgctgtccttctcccaggggcctagggcttgcatcggccagaacttcgcgatgcttgaggcccgtatcgggatcgccatgatccttcagaggttctcgtttgagctctcgccaaactatgtccatgcacccaaggaagcggtcacccttatgcccaggttcgggcttcccatcatcctgaggaaccttcacgattgagatgtgctaccataaatatatatacgcactgccacttccttttgcccgaggtttgtcacactaaacaaacacttgtgggtatttggtatgtcattatgtgatgctgttgtatttttttactttatttacggtttgctttagtttcttacgcagaatgtaatgaataaaaacttgtcagggagattacctgcaataattatagttgtg

SEQ ID NO: 36278 - DNA, 1665 bp, Zea Mays
gatacaaaccctaatccccaccgccgcccgaccccgcagcctcattccaggcgcatcgacagcgacggcacgcgctggtcaatccacggtccaccagtcgacctcgctcacccgcgagccgcgggccttgtcctcgtcgtcgttcataggcagtgcagcctcattcaccggtcgtcctcgtccaccagcgaattgaagttcctcgcccatcagccaacgacgtcgacgcggcctcgttctcgtccagcccagcgtgctgcacgtcgccttgctgttgctgtgctgctgctgtctatgtttcaaatgtcccaactggacctagccctcacggacggaagtgcccaggacctgtcaatatatgccagctatgcggcgagccagagttgagcggcgtacagatttcttgcccaaaagtgtccggccactagctgccaatataataaaataagtcccgccgccactcaccaaattggccgccagggctccgtcctctagcggctccgtccggtggtccggccagctgcctagctccctccgacggtccggccagcaccgcctcctgctcgcggccttgcccagctcctccgccctccggtgagacgtagatcttggtgcggcagggcgctacgggggcggggtggtgctgttgtgcgtgtgctggtggcctggtgctagcaaccgaggagcactgctgtgaggaaggccatccattttgtcaacctgtggacagctggaaggtctagtggaaacctggctatgaactccgtaccaaaacccgcccctgggtccgaaacatctgggagggaggattttgctgtgggggataaggatgctgtggtcattgttgatcatgggtcaagacgccaagaatccaatctcatgctaaatgactttgttgagatgttccgggcgaagactagctataggattgttgagcctgctcatatggagctagcggagcctactataaaggatgcttttggaaaatgtgtgcaacaaggagcatcccgagttattatcagtccatatttcctttcccctggacgacactggaagcaagacattcctgctttagcagcagtggcatcaaaggagcactcaaatataccctatattgtcactgcccctcttgggctgcatgagcttatggtggatatcatgaatgatcgcatcaagtactgcctgcgacatgttgcgggtgatgtcgatgagtgtacagtgtgtgccggaactggaaagtgccgcatgtactcctgatggagcatacctgggaattgtttctggagaatacgagatctgacgagtgtatatctaggtccgctgtgtaccgtgaaaccaaaagcttgtacagttcattctgaacagatcgtcagaattagacaagtgccaaattagttatgctgtgcatgcttgcgaacatcaataacgattcattagctaatcttgagtttatttacgtcacgaacaaactcagtcaagtgctctgatatttccattcacatgttatctatattcctgctaccttgtagttgaattagacttattgccttaacatggatcaaatgagaatataatgtacccttgtttgatttgccagttctttttgtcatatatctgttagggacttgttctcaaatgctatgaattaaaaacaagacaacacaa

SEQ ID NO: 36279 - DNA, 1322 bp, Zea Mays
gaaagacggccagtttcccgcggtttgcccgcgaaggtgccccaacttcccgccagacaccgctcccgctcttccacgctgagtagggagagccgaggcccaacctagacggatagacgcggagatgtcttcctgggacgctgacgactcggcggcggcgtccgcggccgaggcggccaccacggacgtcgagctgctcaagcgggcgtggcgcaacgagaaggccgcgccggagatcctccgcttcgactcgcccctcgtctctcgcgtccgcgagcagacccagctcctcgaggagacgctggacgacttcgccgacagtggcgtcgacgacctggtggtctcgctctaccagatggacctcgaccgcacgctcttcctcctccgctcctacctccgcctccgcctgcagaagatcgagaagtacacgatgcacatctcccgctccgaagacctcctcagccggctgtcccagcaggagcgccggtttgccaagagttgcgcggagatcatggagaagcatctggagcagtcggtgctgtcgaagctcccgtacgggtatgactcggtttccaggcagtcgctgtcgagcactgaggatgacatgggtacctgatctttaccaattaccgcgttccttgttttgatgctatacagctatgctattcttgttgtttgctgattcagccgcgagctgtcgtttcgtgattacatacattgcatgggcttctaaatctgattacgcgagctgtcattcctgattggactgttccacaccaaatcagcatgaaatctgcataaagtgccggagcctcagcttgacaccttcgtcttctgtaagaccaagggcgacgtaggtgcattccagctagatgacattggagaggaggttgtggacctggttgctgatgacttgtatgttcttcggtacaagtccgtcaagggactcatagagggtggccggatcgaccttatctgacaacaatcaccacaagtcagaacctggaactctgcaagagagcgagcatgaattcatggaaaggaattgcaaagataacctcaattgaaagatgctgtcttatgtgccatggcgtgtggcctagaattcctatgcatttttgtacatggttgtgatggtacctccatttattaatgagatcagggttatgtgatccccagtcaatagtcgatggctcatataacttaaggcatttgatttgttgcaaaagtatcttcagagtaacctcacaaaaaataaaaggaaaagggaatggagatgccctctgtatgtacccactaaggccttgttcgattattcccaa

SEQ ID NO: 36280 - DNA, 1909 bp, Zea Mays
ttcgagttgtttttccagtaagttgaattgccaaacttcgatattgcttctgatgctctgaacaccttcaaggatttgctaaccaaacatgaagatcaagtctctgaattcctgagctcaaattatgaacaggtcagccaaataatacctttatgtagaacgaatgaaattcataattttaatgtttattccaaataattaagaggaccaatagttttgctccaccctgtcccttgcattttgtatcttcctccgtgtcatcttttgcataggttggtttggcttttaatgaataattgttcttttgtattgctaaagttttgaagcgccgatccattgtaaacatgcgcagtttttactctacacaaagacaatcggtgaaggttagactatttaaattgcaatttcttgtagggtacaaaaatgcgatgctttaaggcacttcgctgcatgccagtttcgttcagagtttctgttagaggccccaaatgctcaatagtgaagagtttcattttcgaagttcgttacttaaacattatggtgggtcttctgaaggtattagagtataagttccctgcttatatttaaagaatcagcaatgatattgatcacccttctcatttcctctgtttcttgatttttcacttaagtagttatgacattttagtgccattatcttgtgaaaaatggcggttgttattagcacaatagatgagagatcctgctttggcttttggatatcttgccaagcaaaggtcatcctcagagactaagatatacgtgcagaactatactcttgcaattgttctttagtgactgccagagatccggccattcagatctaaatggctttctgtttatagctaaattgcatagcaccattgttcatgttgaatactaccattttatttctctgggctatttatgtattgcttgggtaccccagtcatcttgtatctaacagtgagtattcgagcagttctcatagtttctaatacaaaagtagttcaaatattccttcttaaatgaaatgacacgcaaatctcctgcgttgtttgagagaaaaaaagtagtccaaatatacacacttgccaactagccagtgctacaaattttcttcttttaagacaaatgatgaaaacaacacaggttagtcatagatagtttgttttcatcttcataactagtggccatctttttcatgctatacacattctttttttaatgcctctactaagtactacctccgttctcgaatatttgtcgtccgctagtttatttttgacctaaaacgtgacaaataaaaaagaacggagggagtactagccagtgtcttttgtaggattcaaccaaaaatatcaggatatgttccttgcacattttgaaggtatacgtttaccctttcggttttacgttggatagctgttggtttgaattaatcatagctttgcgtgagcactatgttgttgccattttttggaaggttcattttcactacgcggatgcaggtatttgttgccaatccaaacaaacctcgagagattatctcaggttttggctgacaatcacagagaactgttgaagctactccacaatctccccactagcaaagaaatcgagaagcttgcgcggatgtcagtataaaccctcaggaaattcgaacatagctccttgatgttgatgttcaggaaccctttctcacctcaaagttctgaagacatcctgtgtaatgtgctgccctgtatggagcttgtttttcatatatggaaaaggtttggccacaaactgcattctccgtgtgaaacacttagcattcgtatcggaattcattgatttatgcacttgtagcagaattcgctgcaggaataaactgcactgtggtttggtgttggtaccatcgagaaaattg

SEQ ID NO: 36281 - DNA, 1351 bp, Zea Mays
gccacaccagctatataaacacagctgctctcctgctccctttcccttccccccttccgttccgttccgatttgacgagttggtggctgctatagattcactccacccctctccatttctgataagtatccagctagctaccagtgtatgcaccaggcagcagcagcatggcggagtgcaaggacgacgacagcggccggcggtctccgtcgtcgtccatggacagcagcacccaccccccggcgctctccaccgcgtcctcggcctcccgccgcccgccggagaggagggaccagctcagccccgacctgcagctagggctcagcctgtcgccggcgtcctccgccctcctggtagcggagacaaacaacagcatcgtcccttctacgccaaggaaccaagcactcccggattggcccccgatcaaaccgttccttagaagcgccctgactgcctcggcacgccgacggcgaacgctgttcgtcaaggtgtacatggaaggcgtcccgatcggccggaagctggacatgctcttgctggacgggtacagcagcctcctagcgaaactttgccacatgttcaaggcatctatcacttgtaagtatatatgcaactagccaataagctcatcattaccacagattttttaatcagaggaagcaaaaaaaaaaaaaagatggtaatcattccatgccaacactagtttttcttgggattctagccacaaccactagaccacaaatttgaattattcaaattttggagttcttgcctcacactttatatatattgggtagataaactctcagacacgtaaaaaagtgttgacaagtaaaaaaaaatgaaaggagtattgcaaatgcttgccggtcgctctataataaatatgtgatatgattagatgctgacgctgtggagtaccatcagcgggttcctcacgagaaggccgcgcatgttctcacctatgaagaccatgatggagactggatgatggttggggatgtaccgtgggagctctttctcggaagcgtaaagaagctgaggattgcgagaaccgacaggtgctagatagcaaactttttcatgcggtggatcgactctgtttcttcttctttttttaatatatattaggttcattaggaaagattttgctgaacagagtggagtcgtgatgctgaggctatactaaccgtgtacagtgtactgaagaaacgccagccttgctaccatccctgcaaaattaaattttggtattttatgtttcctttcctgtttctttgactgccttgtaaataccatggttatttgttaaagaacaagcaatttgcatggaaaatattatagttccaag

SEQ ID NO: 36282 - DNA, 1372 bp, Zea Mays
cccacacacacacacacaacagatctgctacagggacaatctgatggtcggcgcatcgcctagaggccggtggtggcgagtcacgcctcctcagccctcatcctcacgtcgtcgccaccgcagatccgcccaacggcccctgacccgacaatgacgattatcttattgctagcaccgatggggtggggacaaagctgaagcttgctttcgaaactggtattcatgatacaatcgacattgacctggtggcaatgagcgtcaatgacattgtaactctaggtgcaaaaccattgttcttcctagattactatgcaacgagcaagcttgatgttgatcttgcagagaaggttatcaaggggattagggatggctgcgaacaatcagattgtgctctcctaggaggggagacagcagaaatgcctggtttctatgcagagggtgaatatgatctaagtggttttgctgtgggtgttgtgaagaaggataaaatcattgatggaaaaacattgttaagggagatgtgcttataggtcttccttccagtggtgttcattctaacgggttctctcttgttagaaggagtactgagaaaagtggactttctttggatgattagctcccaagaaatgatggcataacaactacagttggtgaagctctaatggcaccaaccttcatctatgttaagcaggtgcttgagattattagcaaaggtggtgtgaaaggactagcccacatcactggtggtggctttactagcaatatcccaagagtattcccctctggatgcggggcaaaaaatttactgggtcatgggaaatacctccaatcttcagttggcttcaacaggcaagaacaaatgatcttcaaacttcgcctttgattttcagtagcaactattctgagaaacatcaggcactgcattggcgtactggtcataaaaatgattgcctccagataataagttctgctgcttcaaattcagttctgccagctgtaggaatagggtttgtccgctggtttgctaaggcaagcaacgtacatagactgctcgtcttggatcctttaggaatcataaaagcatatagaggaactatgtataggctacaaagaagcataagaagcatttttatagcagaagccaagtgttctgatgattttgttttttcaattgtgttttctgttattggttcagtatgcacatatattgacatgatttatggcatggcatctgccatctttgttatatttatgacatcgttcttgattgatgtgtgcgacatgaatgatagatctttttaacatcctgagcatcattgtgtcactcattatcgtattttgtatatcatttatgggttcacggatatgaaat

SEQ ID NO: 36283 - DNA, 7050 bp, Zea Mays
atggaggccgccgcgcccgacggggccggcaaggcatccccggcccccgaggagcccgactggccgcccgagctccgcctcctcgcgccgccgccagctgcggggacggacgatccgcagttcctcagctcgatcatcggggacgcggccgcccctcccccgccgatgccgccgctcgcgcagaagcggaaacgggggaggccgcccaagaggaaagacggcgcgggcgcggtggtaccggcccggcccgccaggcggagggaggacgaggaggaggtcgtctgcttcatctgtttcgacgggggcaacctcgtcgtctgcgatcggaggggttgccccaaggtctaccatccggcgtgcatcaagcgtgacgaggcattcttccagtcgcggagcaagtggaactgcggctggcacatatgcagcagctgtgaaaaggcagtgcactacatgtgctacacttgtacatactccctctgcaaagtgtgcatcaagcagggtaaattcttcagtgtcagggggacaaagggcttctgcgacacatgttatgggactatacttctcatagaatccaaagatgaaagtgcaataaaggttgattttgatgacatactcagctgggagtacctgttcaagctatattggttagatctgaaagggaagctttcattaacattggaagaacttactattgccaagactagatggaatgttcctagcacttctgctaggaaagaaaaagatgagtcgtctgatgacctgtatgacgctaataatgatgatgatgctggtactgactgctcctcaggaaaacgaaggcgaactaattcaaggaaaaagggtcaaaaatgccggaaggtaaataaagattgtagtgttcctgcaaaaaaggtcgagcttccaattacaaatactgagagcgttcccacagaagtgacaaatgaacgagtgccattgccagtagacacaaaagtaccaaatggatgggtacccttgccagtagacacaaaagtaccaaatgaatcagtgcccttgccagcaaacacaaaatgggcatcaccagagctactggagtttgtaggacatatgagagatggcgatcaatctttcatttctcagtttgatgttcagactcttctgcttgattatatcaagaagaataaccttcgcgatcctcagaggaaaagccaaattatttgtgacttgagacttcatcgcttgttcaggaaagcacgggttgctcactttgagatgttaaagcttttggaaatgcattttcttatgaatgagacttcaacagtaactgatagtagacaagtgactatcgatctcaattcagcttatgtagataccaatggatacaatgacatggctgcaaaattttctcctgataagaggagaaagatccatagaaagatggaaagagatacccaagttaatcttgaggactatgcagcaattgacatgcataatataaatttgatttttatgaggcgcagcctgatggaggatttagttgatgatgccaaattctcagacaaaattcatggtggttttgtgaggattaaaatttctgatgtgtatcagaaacaagacatataccgtctagtaaaagttactggttccagaaaagtatagcattggaaagaagatgacaaattttgcactcgagatattgaatttaaacaaaaaggagattattacaatggatacaatatctaatcatgattttacagaggaagagtgcaaacgtttaaggcagagcatgaagtgtggcgtgattagcagactaaaagtgggggatatcctagagaaagcaaagatattgcaatctgtaaaagtgaatgattggtttgaaaatgaaaagcagaggcttgggcatcttcgtgaccgtgcaagtgaaactggacgcagaaaggaatatcctattagaccatactatgatgtgcttctcaacgattctgaggaaagaacccgcaggattaatgaagttctggaagtgcatgttgactcacatatggatcctaattatgagtctgctgaagaaacagatgagaaaagaactgttggaaagtcggtagatcggacaagaccagatacaaccatatcacgacgaatatcaagatatcttagcactatgcagaaccatcctcaaaaagtttctgattgtagccaccatccaaaaaacttgtcaacagaaagtacaatatgtggatcaggagcaagaagtttggagaacagcacagcaaacagaactatgtatgaagctggatcattttcatcttctggagtaacaatgtcaaatgacacggagccggagaaagtctggcactacaaggatccttctgggaatgttcagggtccatttactcttttgcaactatcaaagtggacaagttacttcccacgtgatctgagagtatggcttacatttgagagtgaggagagatctttgctgttgactgaagtgctttcaaaacagcagaaagatttcactcaggctgcatcacatacaagcagcaaggcaacgctggttggcactggacatacaaggaacaaccctagtgtggatcagaccaatgctttctcccctgctggtcatagtgtggttagttcttcaggaataactgttcagtataataagtattctgttccagaaagggaaagtgtgtactctccagatgatagcttgtcgctgtcaactagttcggttccgccgaaggatgcttgtactgtgaatagccaaacacactgccagaataagcattctgttttcattcaatctcctggaagtgcatatgggcacacagacttgaaccatgatggaatacagggaggatgctctggtgaatcaaaccaccatcacagcagcggagccctatggagtcctaccgtggtacaggtgagttgtggacatggtaatgtggaatctcatcagagccagcatgtttcctggtcacaaagtcaacatgaatctaaaaatagttcacaacgacctgttaaagatctgaattcaaggcgggatctatcgaaaaacctacctactcaacgtatagggaaagatgtctccagtcctttgtttgcttgtgcttggagtccggccgagtcgaggacagcttcaagtcaacatgacggctcttgcttaagttcaacaactaatccaaactttctcgatgaacttcattattctattgcttccgcaaagcctaagagctgcgctccagcaacccctattgaagacagaggttctagttcaccatcaggcatgctgagtcatgcagaaagagttccaatctgcagtccacaatcaacccctttggcatctgctttcgatatgtgcaagatggaggagatcatgaatcagcaaagaacactggagccggatacatcaaatgcttcaattaaccagtctcccgaatcaaagattttccctgtatcctctcctgataaccatgatattgaccgtgagtttcctagtccagttccaagatctgagaataaggacattgcggttgacagctcaggattaacaccagcatcacctgaaaatattactacgaatttgcctggttcagatacatgcaagatggaggtcatgagtcagcaacaagtaactgaggctgtcgtatcgaattcttcagataatcattcccctcaatctaaggtttcccctgtatcatctcctaataacgaagatatgaaacatcagtaccccagttcaacccgaaggtctgagaataagattcctgctgtggacaatttactttcaacatcagctgctcgtgaaaatctaacgacaacttctgcccatgattctgatacatgcaaaatggtggagttagtgaatcagccaaaaacacctgaagtggatgcatcaaatgctccactttgtcaatctcctcattctcacacttcccaggtaccttctgacaatcaagatattgaacgtgaatgtccaggtccaactccaagatctgacagtaaagaacctcttgtaaacaactcagcgacaacttctgcatcagcctctgatacaatcaaaatggaggagtttgtgaatcagcaaaaaacagttgaagcagatgcatcaaatgctccacttaatcaatctcattctcacatttttccagtaccttctgacagtcaagatattgagcatgaatgtccaggtccaactccaagatctgacactaaggaacctcttctgaacaactcagtgttaacattagcagcgtctgaaattctaacaacaacctctgcggcctctgatacatgcaaaatggaggactcagtgaatcagcaaaaaacgcttgaagcagatgcattgaatgctccacttaatcatcatcctcattctcacgttcttcctgtatcatttgataatcaagacattcagcatgaatatcctagcccaactccaaaatctgacagtaaggaacctcttgtggacaactcagtattaacatcagtagggcctgaaatgctagcgacaacttctgtctctgatacatgcaaaacggaggagtttgtgaatcagcaaaaagcagttgaagcagatgcatcaaacgcttcacttaatcagcctcacatttccgctgtaccttccgataaacaagatattgaatgtgaatgttctagcccaactccaaggtctgactgtaaggaacctcttatggacaactcagtattaacatcagcggtgcctgaaattctagcaacatcttctgcttctgataaatgcaaaatggaggagtttgtgaatcagcaaagaccaattgaagtggatgcatcaaatgcttcacttaatcagtattctcgttgtcacattttcaatgtatcttctgataatcaatatgttgagcgtgaatgttctagcacaactccaagatctgactgtgaggaacctcttatggacaactcaatattaacatcagcggtgcctgaaatactagcaacatcttctgcttctgcttctgataaatgcaaaatggaggagtttgtgaatcagcaaagaccaattgaagcggatgcatcaaatgcttcgcttaatcagcctcatcgttgtcacattttcactgtatcttctgataatcaagatattgagtgtgaatgtcctagcccaacttcaagatctgacagtaaggaatcccttgtggacaacttagtgttaacatcagcagtgcctgaaaatctaccgacaagttttgcagttgcctctgattcatgcaagatggagatcttgaataagaaaagaacacttgaagcagatgcatcaaatgcttcacttgatcagccttctcactctagcgttttcacttcatcttctaatgataatcaaggaaatgcgtgtgaacgtcctagtccaaatccaagacctgagggtgagcagcctctcatggataactcagggttaacatcaccagtgcctcaaaatctaacttctgcttccgacatatgcaagatgggggagatcttgaatgagaacaggacacttgaagcaaacccatcaaatggttcaattactcaatctcatcaatccaaggttttccttgtaccatctattgatatcctagagcgtgaatgttccagtgaaacgcctaggcctcagtttaaggaacctgttgtggacagctctgggttaacatcagcagcacctgaaagtttaacagctaagcaacatgtccactcaccagatgcctttataccaccaaagcatggtgctccaactggggaattaggtgatgcaaaatcagattttaaaggtgaagaaattattcaaaaagaacaatattgtgaaagagaacctattgttgctacaagagagaatttgctaattgatctttcctgtggtgccgagtcgatagatgtgtcagatgtattggaatctttaatggaagaaaggagtgtaacttcgtacgtgccagtatcaatagaggacttcctagccgcttcagcagtggaagaaccacaatactctagccctatagcgttatctccttggggtgaacctagttactaccaaggtgatgctggtgattctgcgctatggggtattcaagattcgatcaatgatatgtggtcattgctttcaccaagacctatgctccaagcttcatctggtattggaactgaggggaaggaaacttttgatatcaacgaggtggctgtgacccatgttaatagtgattttttccaaagaggatcgatgcttggggaggaaaatatgaatcaggcaaacttgagtgttgctgcagataggatgctgctgcctgagcaggtcccatcaataccaaatggtatgtcaacatcatcagtagacgagggcaccagagttataggttctcaagcatcaatcaatcagagcttagactggggtactacatggaggactagtcagaatctcagcgtgtatagcaatgaaatagcagggccctcgagtaaaagctattgggaagaatcaaggaagcaggaagccaccaattcgggcgtttctatttcaggggaagccattagaaacaagcgcttgaaccctcctgataatgctattcggggcagccatcatcaccgtggcaggtactcccaaatcagtgaatcttggctactcagttcaaatcactctaggagtagttctgctaaatttggcagcggtgggtcatcaagatcaacttcaaagggtcaaactaggggctaatgtaaattctcgggtgcaggagaaaggatgcatcttgtagctacctgcatccttgatctctgcagcaggaataggttttaaaattctctgttatatctttgcagtttgtataggctaattaaaattaagtcaacagagcgtaaatgaccatctctgctccactcaactcaactgtagcaaggagcatatgtttagcatagaggtttgactgaatggccctgcccaagaagcagattcagctcttgggcatggtctgtatcatcctgacattctgttggatggaactgcaattgtgcaaccggcatctcttgacaccgaaacgcccctgatgtgttggaatatctgatcgattggtttag

SEQ ID NO: 36284 - DNA, 401 bp, Zea Mays
attcagtaccccatggatgtgtatgggtatacagacatgggaatactgagaagtgtaatatacttcttattgaggatgatcctttgagctagcatatatttcaaacttatacttttgtaatcactccgataaactaatgtaaattttttgtaacctgtaaattttgtaatccctagttccactgcaacaatactggtgtgtgtgatttgtgttacttaatcccgcggttctggttgaaagtggtttatccgatgtccttggggcaatcggacagatcctgttgagttatctggtgcacatgcatggctgtctgaggtctttgggacaaggacaggtgcatgtgggcccaataacttgggaggttctgccacagctggtatcggagctggattaagtatata

SEQ ID NO: 36285 - DNA, 2183 bp, Zea Mays
ggctctcttctccaccggtcctaccccttacctcccaagatcacaatcctctgctccttatatattagccacaccgctcgttccctgctgcaccgggtgacacacaggcacaaagacaccgcccgtacacaggctcgttggcttggctgctgtgtgttgcgctcagccattcagacttgagagctactagctaactgctcgttgggtgtgggtgcgctcccggcctagaccgtggaggaaaggagtccagtccactcactaccccctctgctccgttcgggttccaggccagcacagccgagggttccgcacagcgataagcgcgaagcggaagagatggagcatatcgccaggttcttcttcggagtttctgatctgtctccccagggaatgtcattgcgctcttcctcttcctgtcgcctgttgtcaccttctggagggtcatcaggaagcggtcgacggaggacttctccggcgtgccctacaacatgacgctgctcaactgcctcctatcggcttggtacggcctgccgttcgtgtccccgaacaacatcctggtgtcgacgatcaacgggacggggtcggtgatcgaggccatctacgtggtgatcttcctcatcttcgcggtggaccggcgggccaggctcagcatgctgggcctcctgggcatcgtcgcctccatcttcaccaccgtggtgctcgtctcgctgctggccctccacggcaacgcccgcaaggtcttctgcggcctcgccgccaccatcttctccatctgcatgtacgcctcgccgctctccatcatgaggctggtgatcaagacgaagagcgtggagttcatgccgttcctgctctccctggccgtgttcctgtgcggcacctcctggttcatctacggcctcctcggccgcgaccccttcattattgtacgcacacggttctctctctagtctagatcctgagccgcactcaccgcccggccgtacgcacgtgctatccgcgcatgttgtccgattggcactcggaaaccactgtagcagcactgtatcactagctgttgggactggacgtaactgcatctgatctggccagcacagtacccccgggctgggcgtcggttgccctttcgatgtcccgcccaagcccaaccaggcgcacatgcctgccgctgccgcagccgatgcacgggcatgggcgccggtagcgtctagcagcgtgggcgtggccacccacaggcagcgcacgccggtgctagctgccgatgggccgccgtgcccatgtccatgcagctggattggacccggcacaggcagaagcaacagcgcccgcgctctttcttgtcgcaatgctagttagcaaactgcacggtgcactccacttcagtacacaccaacgcgacagactgcgatgaaatatctaaggccgagttttttttttttgcaaatctcatcatgtcggaatgattcatgcggtccaaacttcagcacacccccactgtcgctaaacccgcgctgtctgtgcatgcgtgcagatcccgaacgggtgcgggagcttcctgggcctgatgcagctcatcctgtacgccatctaccggaaaaacaagggccccgccgcgccggccggcaagggagaggccgccgccgccgccgcggaggtggaggacaccaagaaggtggccgctgccgtggagctggccgatgccacgaccaacaaggcagcggacgccgtcggcggcgacggcaaggtcgccagccaggtgtaggcgggcaaggcttatttgctgtctgggactgggaggaacatcctaaacgaggctgccttagtttgtcggtggagcagattggtgttggtttctgtgggcttttacggttgttgttactctcatctccatctctcccaggaggctaccccaagcatgtagtagcttccattctgattctgggacggtgttgcacgttacagtgctctcaagctgtctctgcaaagtgtgtttttttattccatttccctcctgctcttgttctccaactgcgcttacctgcccccgatttctctaaaaaatgtattaaactatctgagaaattcatccaactgcgagtactgtgctgtgcgtgagcaatgcatcttttgcgtgtacggtgtgtgtgacacgctgaaccctgacttatcacaacaattctagagtg

SEQ ID NO: 36286 - DNA, 580 bp, Zea Mays
ctgcgcgtcctgctccttgttgtcgcgagctccagctcggatttcgccggcagccattctctaacccgtgtgtcggtccgtgtcgtatagttttagtttgatcggctcgtcgtcgacatcgccagttgtcatcattcgtcgtcgcaccgttcgccgtcgagttttgctacccatcgcggagttctctgctcgccacaacgtgtcgagcttccgcgtcaagcttatctcttccgtgccggttgtcgtctccgagccgattcttggccgtcgtagtatttttagttatcccggccgcatctgtagtcatcaagcatgtctattgccgtgaactcgcccctggtgtccactctgtctctggtccgcgtttcctttagttcggccaggcggggcatcgttccatgctgtgttcgcgcagtttccctgctcaccagtgcgtcccctcagctcgcttggccttaattctcatcgcgtcatcgactccgtcgttccaataattttgccgcatcgccctacaaatctgagtcctcgtccgtaggatcgtcgttgacctcgcaacttcagctcgagttaattatggtaa

SEQ ID NO: 36287 - DNA, 237 bp, Zea Mays
gtttgcattccatatcattacataagcatacatgtatttgtaattgacttgtagaacacctagaagaagtggtgtttgaaggagtctactccagtggctgctgatcaagtgaaggagccatctaactgggtattggatagaggaatctaaagcctcttctctgcaacaaaggcaagccccggtgcatttgccacttccttgtgtttttaaaagatttttatacactttaagtctagt

SEQ ID NO: 36288 - DNA, 2929 bp, Zea Mays
ctccccctccgcgtcctacagccatcgtcgctctgccttccgcccccgccgtcgccgcagacgcagccggccacccaccactcgcgcctcccccaccgcgtcgcgtgtgggccacagctacagctgcctcctcgagcaacccacactcctttcttcccctgcctgtcgtctctcttccaccttccaccacaagcgccgtcgcagccggtgcctgctccttcccgatccccgaggcaaagctgcgactccgcaactgccgccatggcgttcgagaagatcaaggtctccaacccaatcatcgagatggacggcgatgagatgaccagggtattctggcagtctatcaaggacaagcttatcttcccatttctggacctggacatcaagtactatgatttggggatactgcacggtgaagcaactgatgacaaggtcacagtggaggctgcagaggctactctcaagtacaatgtggctattaagtgtgcgaccattactccaggtgaaactagaagaacgtatgaagctagacttgttgcaatttatagacatgtaagagaggatggagttgagggacaacctatttctgtttcaacagaacaatttgcagtaagtcaaatcacctcttgtactataatcttgcaattgtttctttctctctcttttctaagaataactattgcattagcatattttactaacttgtataaattgttattttcaagagattttatgtaccgtttctttacaaacaatgctaatgccacatccacaatcttgcagaactttgaatggcaaccagttatctggatctttgcctgatgagattggttaccagatgaactttaacagattagaaataaaatataacaacatatcaggcccatacctaacacttttgccaacttaacaagaattaaacatctgttagtgtcgagtatctttattttctgcccatccctgatgcttctgatttgtaaaattagtaaataattctggttccaattttaccttttagtcacatgaataataactcattacaaatcccatctgagttgtccaacttgccttaactccttcatttgtaagtagacctcaactttttctaatattttctattttgcaagttgcagatgacttgtaagttgacatgtcttgtgctgtgaacttgcagccttgttgataacaataattgatctgggcctcttccaccagaattagtagatacacgtagtcttcttgctatcttgacttcaggctgataataacaacttcagtggaagctccatcctgctgaatacaacaacatacaaacacttctaaagctgatattagttgtcaaatattttagtactaatattgagggggatggcggagggcattgcgctgcggggttacatcgccgtcaccttcgacatgcgcgacataggtgggtccacagggcgggtgtcgctcacgtgctccatcaagaacatcgagtgaggtggtgtgctgctgctctaaagaagggaggagaggaagtagcgacaatgtcgccaagaccacctggcgcgatgtctcctaccagatcaccaagatcaacatgtacaaggtgatccagtccgagccctctccctgcatgcttccattgattttttatttcattccaatcgatttgccgtgatatatgcaatgcaggatggtcggcatgtacaagatatgcttaaggtgaggttgtaattcaggatgtgcatatatttcttgggcttgaatttgtttaatctaaatagattattttttatccaatccaaatttccaatgacttgccatatcattagcatcagaggctccataaagcagctctgctagaattaactgattcactgtcaaggtcaaacatcactatgatattgctgagatggtccaatcagtgacaatgctggtggtattgttgagatggcaggaatgagccacaaaatctgagagaacttatgctcttggtgctgctgacaacacaactgttgctattagaaagggatttgccattggttcaggtgctcttgtgtccctggtgctgtttggtgccttcgttagcagagctggagtgaaggttgtcgatgttctctcctgaaggttttcattggtttgattgttggagacatgtttttgtactggttctctgtcatgaccatgaagagtgttggaagtgtcgccctaaagatggtggaggaggttcgcaggcagttcaacaccattcttgggttgatggagtgaacaagcaagcctgactatgcaacctatgtgaagatttgcactgatgcttcttccatcaaggagatgattccttggggtgctctggtcatgctgactccctcattgatggaacctctttggcatcgagactctctctggcgtttttgctggtgccctggtttttggagtgcagaacaaggccatctcagataaaagtagatgtagctttcataggacttaattccagcaaagcaaaggttggcagtgcaccaaacaatagcgtttatacttcattcttatggattggagaagcctatgcaacatgtcaagccagatgacatgcagatgagaaggttctgcatcaatagaaaccagagaaaaatctgtatgtgtctgtatgacatctcagataaagcctgatgatcagcatgatgaaaggtggggagttctatagctggtttaagctggagctagcttctgaagtccggtcaggtgtctgtatgtgttgcccctttttatttcatttcatgagaaaagattgttatttgttccttgaactgtacttggtcgtacttgtgaataaatattttagcatggttgttcgacttctcataatgtttattcgacatcagttcatgatattagtgttacgtgatattttatcatatgaattttgaatatcatagtgatgtttatc

SEQ ID NO: 36289 - DNA, 260 bp, Zea Mays
gaagactacagagcggatccttaccggggatcaatgacatgggcgagcggactgggacgcggcaccacggcggcatcgggtcgaaggcgagaaattgtgtgagcactggtggtccctacttggtaataaagctacagccaccctcgccgtgccacaggtaagctgtttgacccacatgccaaagtattgacgatagtagaatggtgaatcggtgatggcggattatcatgcattccgtcaccagtggggtctccgtcgat

SEQ ID NO: 36290 - DNA, 777 bp, Zea Mays
ccgcgcgctccctggagcttctctcccagccgccgccaccgcctctatctctcccttccctcttctctctcccctcacatctctcctctctgtcccgaccgagcaacagcggccaagcactcaagtgttccgcgctcggcactttggcttcgggattcctgacctagcgcagccgccaccacagcgctgcccctgtcgcgatagctctgcgtcgccgctcaacggaggccgacgaggtgacgagaagcggaggccgagcagtcgcacttgcaggtccagtcctgctggtccgcagtccacagttcgccctctaccctctgctctgggatctgcagtaccgtctgcttcggcctcagcactgccatccgcttcagcctctgcactaccgtccaagtcaagtcgctgtatcaccttagcccatggacgctccccatgccttgacggcttgacctccgatggagaggaagcaagactacactacgccatgctttgccaatgaaccagccatcatgttctacaaaattggaggatgaactagccatgatactttgccaatgaaccagccgaagagatctcctctaccttggcagcacgatcaagaatgctgttgtcacggtccctgcctacttcaatgactcacagagacaggcaattaaaaaagagaattgatctttttatgggcgaagtgtcttgttagcatcaagtaagtggcgacatcacaacccctacaagcttgtgtcttaaaacaagaggatacaagaagttggagcgcttttc

SEQ ID NO: 36291 - DNA, 2204 bp, Zea Mays
ggatgttctgaaccgctagcaaggattcctctgaacaccggatagggtagacatttgatttgttcacattattatgaaggacggaagcgtctccaaagagatgtaagatatccagggttgatggcatgttgggaaggcgggagaaccctggagaacatgaagccatgcggaagatgaaaaatgagtttatggtgaactgggatggtctgagaacaagggagaaagaacgtgtattagtacttgctgcaactaacaggccatttgatcttgatgaggctgttgttaggcggcttccaaggaggttgatggtgaatttgccagatgcatcaaataggagaaaaattcttagtgtaatactagccaaggaagatttggcagacgacgttgatctagaaactatagctaacctgacagaagggtactcaggcagtgatctcaagaatctgtgtgttactgctgcacaccgtcctattagggagattcttgaaaaggaaaagaaggagagagcttcagcagaagcagaaaatagatcattgcctccgtcacacactagcaatgatgtccgtgcattaagaacaagtgatttcatacatgcgcatgaacaggtgtgtgcaagtgttccctcggattccagtaacatgagcgagcttgtgcaatggaatgatctctatggagaaggcggatcaaggaaaaagacaacgctaagctacttcatgtagcttaggttataaatatattgggagaagtgccctggcacaaagcagcaatagttggaggcggtgcagttggaaaaaaaaagctatgctcatctgccagacatccatatcaaagagaattgatggttcaggtggagcggaatagaatggaatggaatagtatacatacacatggttgctgcctctgctctgggccatgcatcatgcatctggacaggacggctatcctggcttgcagttgccctatgcagttttgagtgcaatggtcaccatctgtgaagcacggataccacagagatcctggccccaaccactcttttcacaaatggagctgaggacctttggagttctaccaaaagtgatcttaaatctttgttctttgactttccgttttgtgaacggaaggccccactctgctagtatggattgttgatcctccgtttctctggtactgactgaactgctcatacaaaactcgttcaacaggcagaaatgctgcctggtggccttctagagtgcttctttgacgccgcagagagcacatcaaaaaaaatgtgtttgtttcgaacgatttgtgctgcattccattcacggcgatatcaggtgccgttgtttgtgtttggttccgcaatcaagggagtgaaagccattagcacatccaatcaaacaaatagcgatatctctttcactgtaccagttagcgctggtctcggatgctattaacattgctgttgtctgtctcggaaccaaacaccgcctaactcgtcggctgttaaatatttctgaactgaattactgcacttggttggggtttcatgcttatcaagttggcttatatagccaacaatactttgtgcagttctgcatcctctgcctgcttatgcgcgatctcattggctgagcggtacgaagataaaacggtagctaatccgaagcgatggcttctctttttctttctacggtattttgtctctatgaattacagttacagcagtcagaacagctgatttaaaaccgcagcgaaaaggctgattgccttgcccatttttgggtgggtggaggttaatacagatttctgtaatttttttactttaatattgtttgacatattgtgcaaggcaaatgatttcctaatgatttgttctacttgatattgtaatccatattgacctatatgctatgctcagttccttagagcatctccagtacttgatattgtaatccatattgacctaggggaaaaaaaggagaatttaacctgatgacactggtggactatgctatgctcagttccttggaacatctctagtagttttgtaaaaaaatctctctaaagacagatgtaaggagttgctacataataatagggagtaaaaatatctgtactctcatgtagtctttatttttagttaccaaatattataaattatgcctgctgaaactcctctccctcacgttatagaaagttttatgtttttccaatcaaac

SEQ ID NO: 36292 - DNA, 958 bp, Zea Mays
acaatttccagaaaaaaatcgttaacttgcaagttagtttcaatatttctagcatattccaatcacagcatcgtccagcccacacccatccaatttaggatcgatttgtgggagggagcaggcgtgtaggaccgatttgtgggagggagcagggccacgtgatcaatttctctcttaaccattgttctttccttttgtctccaataagatctgtgggaggaatacattggtctgatcatgtagtgcatgtgcaatgatacctgtgaaatagaagtcgttttctggggggagctccatcgtcgggaagaggggtcatggctcaccacggacaaaaggtcgaaaagcaaggtcctgtcatcacaaactcctagcaaatttaggatatgtcatgagaacaagacatgacaacattacaacctcagaggttagaggaatgtgtttggggtgagtaatttttttgtgttgtttcctctgtccatggccatggaggagcaaaggaggccacctagctcgaagatagcgccagtgtccatgaaggcgtcctccgcaaatgcgacgcttcaaggcatgaagaacagaagccattttcgaagggacatgaaaactgcactgcaacaagacgtggacaagctgaggaagaagttgtggcacgagaagaacgtccactgagctctaaagcaggcgttcgcgaggccgctctgcctcgcctccctattgtctcaagtcaatgtccttctttgcttttcgatcaatttcacaagcaagaagcaacctaaccaataatttgttgcccttccgaaggactcgatacactttctgatttctgcctcttctgaattgttcctagacattggagcttctggccccgttgcaagtggaaaatccttgtacttaaaggttgcaatgtagtggtcccgttgcaacgcacgggcactcacctagtaaataaaataagcat

SEQ ID NO: 36293 - DNA, 1882 bp, Zea Mays
aacccatgcacatgtcttaacatgtttggcttccgagcaaactttctccagaccccccaagaaaatgtaagatccgatcagatatgtgtcgatgctcatcccagcgtactcccattgcaacgcacgagcacacaactagttaactataaactctataaatgtaagctactttcgcagtagctttacggatcctgtaattacattattttatggactgagggagggaggagaggatcaataagccacgcgggccccaccatatcttcatccacaaagccaccaccaagctttttcatggtcgtcgctttccgctttcctttgctgctgaccatatatctacggtagcaagacaagacaaggaagtcggctgatccatggcggccttcacggtgcacacgagcgccgccacctcgccctactcgccggcgggcacggccatccttctccgaagccggagtcgagcctaccccaccgccaccatccgcgtgtcgtgctcgaagacggtggtgatcggggtggcggcggactcagggtgcgggaagaccacgttcacgcggcgcctggcgagcgtgttgggcggcggggcggagccaccgagggccggccggaacccgggctccaacacgctcgtcagcgacaccaccacggtgatctgcctggacgactaccactcgctggacagggtcgggcggaaggcgaagggcgtcacggcgctggatccgaggttcgtcgacttcgacctcatgtacgagcaggtgagggccatcaaggagggccgcgccgtcgagaaacccgtctacaaccacgtcaccggcctcctcgacccgcccgagctcatcaccccgccgaacatcctcgtcatcaaggggctgcacccaatgttcgacgagcgcgtgagggacctgctagatttcagcatctacctggacatcagcaacgaggtgaagcttgcatggaaaatccagagagacatgggagagcgtggtgggcacagccttgagagcatcaaggcctccatcgagagccgcagaagcagtacgcggacgccgtgatcgaggtcctgccgacgcagctgatcccgggcgacgacgagtgcaaggtggtgcgcgtgaagctgatcatgaaggaaggcgtggagcacttcgcccccgtgcacctcttcgacgaaggatccaccgtctactggatcccctgcggccggaagctctcctgctcctaccctggcatcaggttcgcctacggcttcgacacctacttcggacacgaggtgtcggtggtggagatggacgggcagttcgacaagctggacgagctcatctacgtggagacccacctgagcaacctgtcaaccaagttctacggggaggtgacgcagcagatgctcaggcacgccgacgtccccggcagcaacaacggcacggggctcttccagaccatcgtcgggctcaagatcagggacctctacgagcagatcgtcgcacgtcgctgaccatgacggccaaccctagcaaggtctcgtttttttgtcccatacaaacaatcaaacgcagaccgatacttgatcaatacatgtgcagagcctatttctgctcccacgggcaaccaaacacatcgattgtgttcgtgcgcatcagcacgggtgtagaatggataggcgtgtgtgtagttgtgtacaggctacacgcgtgtccggtccgatctttttgacagattcgtgcaatgtcgcgtgagttggtgtggatgtcggtacgtgggcattcttcttgcaaatgtccaggtcacactagatggagctgtctgtgttcaggaattctctgagagccgatctcttgggagctgagggcatatttgaggatacacatcttgagctgagagtcagctg

SEQ ID NO: 36294 - DNA, 2793 bp, Zea Mays
ctagccagtagttgtccaattctccaagtggttcagaggagctagcagtacctcacgcggagtatatgagcgagtgttggcactggcgctgtctatccgcctatcatccctccccagcccgaaaagctatggccctgagctctcctccctcgccctggcgcaaagtgtagtgtaacgtacgtcaagccatccatccatccatcggcagttcggcacccggccagccggcgggcgcgctgggctgcctgcggctacacgtacgtcgtaatcccgctctcccgcctcgcccgccccggtcgtcccgggctcccggccacaacaactacacatagacacatggcgcatgatgagccaggtttcgcgtacgcggactacttcgcggcggcggccggcgccgtggcgacgttcgtgccggaggtggacgtcggcggcggcggggaggagggtcttcacctctacggcctgcagccgcaccaccagcagcccggggtggagatgtacggggccaggggccacatgccgccggccgcgatgatggcggcgcacggcggcaaggccgcgctcggtctcgacgtcgcttctcccgtcgtcggcgggcacttcggggacgaccacctccggcaggctctccaggcgccgctgtcgctgtcgctccacgacgacgggaccgccgacgccgcgccgctggcgctgcaccaccaccaccaccatctcggcggcgtaccgcaggcgcagcagcaccagccgccgggggcgtggccacagccgcagcagcagggcgcgtggcacctgcgcggctccaggttcctgcgcccgacgcagcagctgctgcaggagttctgcaccctgcccgtggacaccgtcaccagcacgcccgcgaagccagcgagcgtggaggacggcgtcggctcctcgtcctcggcggcggccccgtcgcagcagataatccaggccatggatgcggccgagctgcagaggctcaaagccaagctctacgccatgctccaagaggtggagagaaggtaccggaggtaccgggagcagatgagggccgtggcggggtccttcgaggcggtggccggggagcgggcggcggcggcgtacacgaggctggcgcagcggacgatatccaggcacttccggagcgtgagggacggagtggcggcgcagatgcaggcggtgcgccgggcgctcggcgagaaggacgcggacgacggcggcgtcgtcccggcggcggccgggatgatggccaacaagggggagaccacgcccaggctgcgggtcatcgaccagtgcctgcggcagcaccgggcgtaccagaccggcgtcgtcctcgagagccagccgtggagaccgcagcgcggcctgccggagcgcgccgtctccatcctccgggcgtggatgttcgagcacttcttgcacccgtaatatcatcgttccgaactcttgctccttccatcccgctcagtaaatttgcacgcttttgtgtataggattggcgcccaagttaagataatcttcgcccggccgtgcctaaacacccatccaagacaagtcgtaccgccctaacaaactaaagaggtatccaagcgacgtggacaagcacatcctggcgcgccagaccggcctgtcacgcagccaagtctccaactggttcatcaacgcgagggttaggctgtggaagccgatggtggaggagatgtactcggaggagatgaaggaccccaaggagggcgcctgcagtaacgcgaacagcagcgtgaacactggcgccggctacgcctccgaggagctagggcagccgctggggcacgggggcgcctgtggtggcgtggacgagcagaagccgacgcgggcgcagctggtccacgacgccgggtcgctagcatcagccgtcagcatcggcagcagcagggaccagcagcagatcagcagcatcaacttccgcatgatggaccacctcgacttcgacgcgtacagcggcgaccccgccgcggccggcgggccagcagctgggttcggtggtgctggtgcttccggcggcgtgtcgctcacgctcgggctgcagcagcacgccgacggcgacccccacggcggcgtcaacatcgcgttcgccgcggctccgtcggccgcgcacgagttcctgttcatggcaggcggcggcgagcatcggatggtcgcggctggcgccgtgcacccgtcgtcgtcccacggccacggtcagttcgccgccagcatgcaaggcgacagcgccggtgtggcctcctcgcactaccaccggggcctcggcgccgccactgggttccagctcctccatgacctggccggctgatcgcattagcatggcaagggacggaccctgatgactaggccgatcgagcgctttaattggctttggaggttcacgcgcggccggttgacggggatgtgccaacggcagcagctagccggatggcattggcatgagcgcatggcgctcgcgcagcttgcgcgcttcggatttttgtagggtttagattcctctcgcttcaattcttggcacggtgtctctgtctacatgtgtatctgtatcgcttcggagaatgccattatctgccatggacatggacgtctcttgctccgcgcgaacactagcatctaagaatttttataaaatttactccctaaatcatcatataaaaagtcatatgagtaaaaattattttctatatatttatatccttcaacagtttttttaatattttgtatgtatattctagatatttatcctcaaaaatctgaagtaaagaatca

SEQ ID NO: 36295 - DNA, 1044 bp, Zea Mays
tacgaagccaatcgccccacctcggctatatgtgcggacgtccctaccgcgcctgctgttgacccgcattcaccacgcctagagcccattagaacttgccaccgtgcgccattgcaaagaagggggccgccaccggagaaattccatctgtgtcgacgccctgtcttcggcgcaccgctaggaagaatcacctggacgcgtggaagttgtccgtgccctcggggtgaagccggagcgttccgaggtgcgggaatttctcgtcggaggtggaggaccaccgcgggggacgcacgactccgtgggcgacttcaccgccgccactaccgtcgaagagacagtggctgaggatccgggtgcccagcagatagaagttgctgagcaggagctcattgaaggcaagttgtgccattgaccactttttacccaataatgttctttaatatcacttattcatgcataggtttaattttgatgggacccaataggtcatcctagtctgtttatccatttaccttgtttacccctgaatcatttgagtagttatgttattgctttacatggttttgggttaatatttcattatatttatgttccaattattctgttattttatttatgttcatgtcaagatcattatctttaattggaacatgtagctaaatttgggaaacacgtgccaccacaatggtggaatgggacacccttgactaactaattaggaaaactagtggaagactaccttacccgaaaggggcaagggcagtaggggagttgcatgcagggaggttctcgggttgattttgctgcgatggtggtcagacgagggattcttgcaagtagaactttgtaaaggcctcgtagtgttgccctgcctcacttccttggtagaggtgtatgagagttgtgatcccttggcagatgggtaacatgacttgtgggtacagggtacaacctctgcagagtgtaaaactggtatactagtcgagctcacggtcatgagcagctcgaacactcacatggttaatttatggaattaaattcaat

SEQ ID NO: 36296 - DNA, 5107 bp, Zea Mays
gcatccatgtttgttcttactgagggcgagggagggtacttactgggaggtgaaagggatgatattatggcaacgttccagagcaacaaaagcagcctgtgcgatcttatgatgcggagatattttcttggcatgatcaaaaactcttaaaggcttcagcatttttacctaatatggaatccccatttgttccaaattcgtttactgggaagagaaaatcaccagttggtaattcagccatagttcaacctcatgttggatcacgggctgttcatgagtatcagttccttcctgagcaaccaagtgatacatatgagagggcaacccgatctcactactatgacactccagtggaagtttcaaatgctaggataccttctatcacatcaggatcacaacttctccatggatctgaggaggctgcgcctagttatgcttttcaaggtcacacatctggttctagcctgttgcctccgtccagcaggccccaagtgtttccagcagcaccaacagattatgagatgactcagtctaatagcaaccttagttctgttcctgttgaaggacagtttgatatttctcaggttgctgcatttgaaaacccacctgtatcatctgaaataatagcttatcatgatgaagatacttctcgcgtggaaagaaaacgaaaacatagtgaagaagcaaagattgcaaaggaagttgaagctcacgaaagacgaattaggaaggagcttgagaaacaagatatgttgaataaaaaggtattactgattctatataattgtagatgccttcctctttaaattcgtttgcaatgtgatgtctgtgcagagagaggagcaaaggcgcaaggaaatggagagacttgatcgtgagagaagaaaagaggaggagagattactgcgtgagaggcagcgagaagaagagaggttccaaagagagcaaaggcgcgaacatgagcgtatggagaagtttttgcagaagcaatctagacgagcagagaaacaaaggcaaaaggaggaactccgaaaagaaaaagaagcagcaaggcaaaaggctgccaatgaaagggctactgcacgtaggattgcacgggagtatatggaactggtggaagatgagcgtttggaatcaatggaattagctgctcaaaacaaagggttgccctcaatgctgtatcttgacagcgacacattgcagcagcttgattcctttcgaggcatgctaagtcaatttcctcctacaacggtgagaatgaagttgccattttctataaagccttggactggatccgaggataacgttggaaaccttttgatggtgtggaaattcttaattactttcactgatgttctgggtctttgtccagttacacttgatgagtttgttcagtctcttcatgattatgcatatgcctggggattcaatatacgtagctggcaacgccatcttaatcttcttacatggcctgagatattaagacagtttgctttatctgctggttttggacctcaattaaagaaaaggaccgtagaagattcttactatcgtaatgataatgagggtcatgatggtgagaatgttatattgacgattcgaaatggtacagcagcagtgaatgctgctgctaagatgaaagaaagaggttacaccaatcgccgtagatcccgccaccgtctcactcctggaactgtaaaatttgccgctttccacgtgctttcgcttgaagggagcaatggtctcacaatattggaagtagcagaaaaaattcagaaatctggattgagagacctcacaacaagcaagacacctgaggcatccatagctgctgccttgtctagggatacaaagctttttgagagaactgctccttcaacatattgtgtgaagtcgccttatagaaaagatccggctgattctgaggctgtgttgtcagcagcgcgtgaaagaattagggcttttcagaatgtgctttctgactctgaagctgaaaaggaggtagatgaagctgagagggatgatgattctgactgcgatgatggtgatgatgaccctgatggtgatgatgtgaatactgaggtggaagacgacaaggatcctcttcttgctgtcaagtcacaagatgaagtaccgagtacaactacagttattggcataaaggccaatttagatggtgtgggtaatgcattgaactcatcaagtagttttactaaatcagcaaaaggcgctcctctcccttctttaggcaggtccaatgcagcagatacttctaatgatttgcctcttggagtctcatcagctaatcatgaagtagtacctgatgattctgaaaatacacaaattgatgaaagcaatcaagccgagccttgggtacgtgcactagcagaaggtgactactgtgaccttagtgttgaagaacgccttaacgcactggttgctcttgttggtgttgccactgaagggaactctattcgtgctgtacttgaggagcgtttggagttagcaaatgccttaaagaagcaaatgtgggcagaagcgcaacttgacaagaggcgtttcaaggaagaatttactagcagagtacaatataactctgacatgggtttgaagcctgatatatatcaagaaaacaacgtgacagagattacttcaactccagcgtgtgatgcttatagagagaatgatgaacatgtcgggacaatcaacaattgtgagatgcttgatcagcataatcagggtaatgctggtagtctaccttatgagagaaatggcgtatgccaggaaatcctcgcaaccccagatacttcgtatgttcagcagtatgcttatgctgataaaaggcgatctcagttgaaatcgtacattggtcaccgggcagagcagctttatgtttacagatccttgcccctaggtcaggatcggcggcgaaacaggtattggcagtttacaacttcagcatcaccaaatgaccctggctcaggaagaatcttttttgaatccaaagatggatattggagagttatcgactcagaggaggcctttgattctttattggctgccctcgatacacgtggcacccgggaggcacagctgcattcaatgttgcaagtgatcgagccaaccttcaaggaagctattaaaagaaatgtgagtatagaattatctgctggaaggtatccaaagaatggagctactgacatgataagggcaaattatcacagtgaggttggaagctcaagcagtactcctagtgctacatctgacagtataacagcatattctgattcttttaaagtagagcttgggcgtaatgattttgagaagacagctatctcaaaaagggcagatatatttttaaaatggatgtggagggaattctacaatcaggaattgacatgtgccatgaaatacggcaagaaaagatgctctgaattgttgcattcgtgtaattgctgctatcagatttacctagcagaagaaaggcactgttcttcttgccataagactttcaaatccatttacaatttttctgatcatacaacacaatgcgaagagaaacagagaacagaacctttctggaacatgcaaaacactgattattctgtcccaataggaatggtattactcaagcttcagttagtttcgattgaggcatatataccatcagaagcacttcaaccattttggactgatgtgtatcgaaaatcttggagtgtgaagctgtacactaccaaatctattgctgaaatattccagcttttgactgttctggaaggtgcaataagaccagattgcctctcttctgattttgaaacaagtgagtgtctaaactcacaggttggatctgcttctgtccttccatgggttcccgacactacttcagctgttatgctccgaatgttagaccttgactcagctattttgtatgttcaaaatcaaaagatggatagagatgatggaggtttcatgaaatttccgtcaaggtatacagttgctaagagcaaacaagaaacaacacctgaaacagctggtttggatctgtatgatggaaggtggcttcctggtagtggccgtaggggtcgtggacgtggaagtagaggaggtagcaggggaggcagaggtcgaagtcgaggtggaaggatcccaagaggtgttagcagctcatcaaggatcgagttcaagggtggtattgttgcttctgataaagcgccaaggaagaatgtacgccgagggcgtggtcgtggtcgtggtcgtagacgtggacgtcgaactgtgaggcctcggcagccatctgttggcagagccagatcaattccaaaggaaaatttgttgggaagctttagcatgcttagcagctcaaaggctgctaccattgaggagtctccacgaagctctggcgcagacgagtggggcttggagaccagaacgacatacactgaatgtgatgagaacagctctggatcacagtcagaagataacgaggaaaatggccagcccatggatgatgattatgaagatcaagttccagattactcaataggctattctaccggctcgaggcaccatgtaatgatgtccatgatggaccatgatagtgacgaggaggatgaagatgctgaaggtgatgagaatgtggaagaagatgcagaccttgcagttgacgatgccgatgttgagatggacgaagatgatgaaattggtgatgatggagaggatggtggcgttggaggggagatgaatgcggatgaggatccggatgctacttcatattcatccgattacagcgactaagaaagcagaaataagggaaccttatcccagattcctccctcggcatggaatgcatgtagtaccgagtaggcattcccccccgttgtgagccaaaagggagcttagatgcttaggttcgaaggagcgaggaactgttttttaggcaccgcaggttttaatagaatttctgacgcattcgacgaagtgtttggttgtaccgtggtagttgtgttactggggaattccccgagttattatacaatgtgttaagacaaaatactgtcatatcgcatctggttgccatgcgtctaactggttcacggttttaccgtta

SEQ ID NO: 36297 - DNA, 1733 bp, Zea Mays
cgagtacatggcattagaaaattaaagctgcagctagctgcattatacgtgctcgagggaatcaaaagttgagcctctcccatctcaatcaaatctataggggagtagctcttgctcttggcttcgctcgctaacaatcagtgaactgaacaccttccgcctcccggtctcctccctgcccggtgctgaagaaccctgccatccccggaactggatcgatctgccgccaactctgaaaatccatccgatccatctctgtcgtccaagtctactccccgatggacattatttaccaggacagcagttgtcttgccctagagcaggcgctacatgatgaaggcgtgggaccaatcgacctacctttcatgcttctcagggccatcacaaaagatttctctgatactcaactaattggcaggggtgggttcggagaggtttacaagggagtgcttccaaatgggatggtcgtcgccgtgaagaagcttcttgacaagatcgatgtcctagaggcgaatttccaaagcgaggttgcttgtctcatagaggtcaagcacaggaacatagtccgatgtctagggtactcatccgagacgcaacatgtgagggcaccctacgaaggaagatttgtctgggcagacctgcgccaaaggttgttttgcttcgaatacctaagcaaagggagccttgccgattatctgaccgggggtatttggcacctgaatttctgagcagcaatgcaatcacattcaaggcggacatatacagtctaggtgttataatcactgagattctgacggggcataaggaatgcaccagtgttgacaaggtgcttgaaagctggacggacatgtttcagacattaggaagccatccgctactagaacaagtagaagtatgcgctgagatagcgataaattgcatgaacgatgacccgagcaacaggcctaccatacaggatattatctccagtatcgatgaaacggacgctcgaagtgtcacaagttcttcaccaggagggcaggttattaccatggccggcagcgaaagcagcagcagtaggagcaggtcgccatgcgcgtcgtgcaggatgctgcgccagcagtgcacacaggagtgcgtgttcgcgccctacttccccgccgaggaacctcacaagttcgccatcgtccacaaggttttcggtggcagcaatgtcttcaagttactgcaggagctgcctgcccaccagagaggggatgcggtgagcagtatggtttatgaggccaacgttcgcaccagggaccctgtctatggctgcgtgggcgccatctccgtgctccagcaacagatctcccagctccagatgcagttctccatggcccgtgctgagatcttaacattgcagcaacagatggatgtcaatgatagcctacccagtcaaaatagctttgacagatatggcaatggtgatctgaaacctgactccccgcccgaaattctttcatcggaggatgaggttgaggaagtttcttccccaatgtctccatagagatttggatttttccattataaagaataggcttcacaaaattgccactggtctcgcatttcatagactcagatagtcagatggacccatcgttcataaactaagtgacaattataatcaaagagatgatctttcgagtggcaaaaatcctaatttctcgtgtccctgtggggatccattaaacttacatatgacgatgtttttt

SEQ ID NO: 36298 - DNA, 3531 bp, Zea Mays
cacaaccctggttagtactagtacagtagtaataatcgattaaccagaaaaaacctgaaagtgtaacttgatctggaattcctggatccgtgcgcacactctaggcgttgtgcgtgtttggtcccgtcaatcagtcagtctttacgacgcattcgcattcgcgctcacctccagaaccgagatccaccaccgcgcaccttcacgactcggccggcgctccgtcactcatgatggccggccgcccgcgcccgcagacggagctgcactcgccgtccgcctccacgcggcggcgtgagcggtggctggttgtactcggcgtcgcactccacgccgtgtacatgctcagcatcttcgacatatacttcaagtcccccatcgtgcacggcatggatcccgtgccgcctcgcctctcggcgccccccgccaagcgcctcgtcctcctcgtcgcggacgggctcagggcggacaagttcttcgagcccgacgaacgggggaggtacagagcgccgttcctgcgcggtgtgatcgaggagaagggccggtggggagtcagccacgcgcgcccgcccaccgagtccaggcccggccatgtctccctcatcgctggcttctacgaggaccctagtgctgtcaccaaaggatggaaggccaatccagttgagtttgattctgtattcaatcagagtcggcacactatctcatttggaagtccagatattgttcctatattctgcagtaacctacctcacagtacctgggacacttatccccatgaatatgaagactttgcaacagatgcatcatttctggatcattggtcatttgaccagtttcaagatcttgtcaacaggtcttttgacgatattaaattgaggcagttactcctacaagataagttggttatatttttgcatttactgggttgtgataccaatggccatgcacaccgaccctattcaagcatatacctgaacaatgtcaaggttgttgaccaaatagctgaaagtgtgtacaatcttatggagaactacttcaatgacaatcaaacagcatacgtgtttactgcagatcatggaatgagtgacaaaggaagccatggagacggacacccttcaaacacagatactcctcttgtggcatggggtgctggaattagaagcccaaagttcctggcttatacagagaaacctgatgacggctttcggtttgtagataaccacaaacatgatacacccactccaaaagactgggcccttgaaggatttgaaagagtagatgtcaaccaggctgacatagctcccctaatggctacacttgtgggtttgccatgcccgatgaattctgtggggagcttacctactccttatttgaaactaaggaaggctgatgaagttgaagccgttctggccaatacaaagcaaattcttaaccagtttctccgaaagtcacagctgaaggaatccagttcactctacttcaaaccttttaagccactggcgaacttttctttagtgctcagtcagattgaggatcttatatctggaagggactatgaaactgccatggagcaatctgaggagctccgaaggctggctcttgctgggcttcattatttccaaacatatgattggttcatgttaatgactacaattacccttggatatattggatggatggtgaacctcattatacatgtgctacagtcttatacatcatatcctgtaattcttctcaagagggctcaattgtatcctaacaatacctccatgaaagtttacatttgtggatgcttctttatgggtttgtcatccattttgctacttctagagaaatcaccacttctttaccatgcttatgtattgtgcacaatattcctttggacaagaattgtacaaaaaattgattttttgaagtccgtatggagagaactagctaatatgcccttcaagtatatttttaatctcctgaccagttcagttgttgcactgcttgtattggagtttctggttatgagcttctttgataggaaaatttatacgtggtgcttcttggtccttgggatactcggttcaacatatgtagcattgtttattcaagctagtgctgcacttgcgatatacatatggcttgcttgctggttcctgtctgtatttactttgatgccagctgaaattccagaaaacaacaacttggtaatttttagtggagggctcataatacttattggattagcttcaagatggattaaatcaaatagttccagcttttggctatatctcactcgagcaaataaacgggatcctcaatcttttaaactctattttgttcaggttattttagtcgcaatatcttcgataatggtgtggctatctacctcacaccggtcccagaacagagaattgctctcactacaccagtttatcaattggtctgtagctggtgttgctatggtgctacctcttttctcaccacctagtgttctatcccgtcttacatctatattcttgggttttgctcctccatttctgctgctttccattggctatgaagcagttttctatagcgcttttgcaatggtactcattggatggatatttgtggaatctgccaacctgtattgctcagaagaaagtggttctgcacgtcgcagaagccttgcggataactcagtttttggctatgaagaaagacacctgcgactatctgatttaagaatccctttgttatttgtgatattatttaatgtcgccttctttggtactggtaattttgcaagtattgcaagctttgagatctcgtctgtgtacagattcattacagtttttagtccatttcttatggcaggacttcttatctttaagttgtttattccgtttatgcttgtcatatgtacgtttagtgcgatcaccaaggtcgtccgtatcccacggctgggctgttattttcttgtaatactgctttcagatgtaatgactattcatttctttttcctggtacggaataccggtagttggatggaaatcggcaacagcattagccatttcggaatagtgagcgcccaagtggtcttcgttttgctgctctttgccctcacgaatatatacactagagatattttggtctcgtctcggcaactaaccgcacggaaagttatgtaaatcgttcagtttatttagaaatccaaatacatccatccttttatttattcatttttgggtcgactttcattttgggatcaagtttgtagcttagcttttggctaaagttttgtagcttagcttttttgttttctgtgaatggaccttggtgtcaaatttttgtgctaatttcattcgcttacttacagcctgaacagattttacgtacaccattataactatattagctttcctctcgggctatgataaactgaagttgtcttgatctagttcttctcagagttgaagttgatgaagcaatcactggaggcggagcttaaaattacactgcatgctcagctcaaccaggcatagtaattagtaagcaagcaac

SEQ ID NO: 36299 - DNA, 1950 bp, Zea Mays
tttcaattctccctttctgatggaagggctcgcccctaaaattgtgacgacatatcgagttttggacgtgcaggttcgctgggctgcaactggtgttctccttcacgtcgttgcgcgtgacgagggttggcgaggcgaggaagcgtgctcttgatcccgagtttaaagagggcgggcaacataattggaagcaagttttgtcaaatagcggtattgcaagtatctcggttgtgttgatagcattagtcatcagagggatagataggtgtttagattcaaaagagtcaactcttgttactgctcttattgatggtgttatctgacattatgcttgctataatggagatacatggtcatctgagctcgacattctttgtaaagctaagccacaaattatcacaacattcaagagtgcggaaggctaccattggtggtgtaaccatagatgggcttcttgtagcagcagctggattcttgattgggcttgcatttgtgctgataagatttttcaccactcaatgtgctcctgatgtattctggaaccagctgctagctatacccttggcacagctgccgccctatgtagaagtttgatcgattccttcttgagcgcaacagttcagtatagtgggttctacagtgttcgcaaaaaggtaaagccaacaaagttcaatatttaaaataactcgatgtgtccagggtttgcaagacaagattaagcagctctaagattaagatagttgccatcgatcttgccacaatttttacttgagctgagcagataacaagcggcttgggccagggtctcttggcctacgcgtagacagactccaggaagatgtcgatcttctgcttctccatcaccgtcgttatcatgcagcctgctggaatgccacagcgggacaggagcatggggatgagcaggcgcaagatgactgcaagtggcgccggatcccgacgttcggcgactggaacctgcgggacgacatgcccgtcacccaatacttgcaagcagggacttcttcatcgttgtgccgccggcagagaaggacgacgacgaggatctgttcaaggtgccccagtgttcctgccaagccctacaactacaagaaggctatataaattcaagtaggaatgcaggatggggtgcattcaactcatgcaggtggcaggttaatggaagtggccaattctgtggcgtggctgagatgattggacctgtcgatttcgacagaagtgttgattactggcagcaggataagtggagtggccagttccctgtgaagtggcacataattaaggatgtaccgaacaatcttctgcggcacatcattcttgagaacaatgacaataaacctgtcacaaatagcagggacacacaggaggttcaattaggttggcatgatgctggtacctatgacaagaacattatcgagtggcccaagtgcagtggcgctaatggtagcttgagattcaaagtcgagttgaagcatggggccaatgctgatcttgtgaatgctatgaagctgatcccgccttcaacgacgtccgaaccccatccgcgatccatgtctgccgcgccatcctcgcccttccatctcagcgcccccattcgtgcttgaaggaaggcccattcgtgttggaacgaatcctcgctcaaaatccatgcgcatccgatgaggatccagagctgccctgctgcccttccatcctctttgtccctttccatcgtcggcgatccacttctatcggcggcgcccccttctagccccttccatagttgtgcttaggtacttctctctatttgtgaaatctagggttcttagtgtacgattgtcaatatctctataaaagaatagattagtgtacgattgtcgatatattgtttgttttcatgtaattgttgtgcactcgcgttttattaataatttgtgagtcgtcgcaacgcac

SEQ ID NO: 36300 - DNA, 1830 bp, Zea Mays
atcacatgcgggtttgattatgcgttaagcacgactataatccctaccgagctatcctatccctatcccctcttttgctttccttcccccgcctgctcaattcttctcgtgctgtcacccctttcttcaatcgcctcccgattcccgcggggctcgcagatcccggaaggacaccccgccgcccccgatgagccgccaccgggtcgagacctgcgactcgtggcggcccccgcggaagaaccacgccggtgcgccgccgctcctccgcgcggggcctcggctcctcgccttcgcctcgctctccgtccgcgacggcggggactccgccgcggccgtcgccaaggcggttgaggaggcggttgtcgtacgatccgatgaggtgaaggaggcggtggccggggaggagaggaagaagacgaagtcgacggagcgcaggctgccccccgcggcgcagctggtgagccatccgctcgcgctgctggcgctagtacccaacagcgccgcgatctttgccgcgggggccgccgcgggcactgtagccaagaccgtcaccgcgcccctcgaccgcgtcaagatcctcatgcagacgcatagcgtgcgggtggcgggagagagtgccaagaagggtgttggatttctcgaggctatggcagacattggaaagaaggatgggcttaagggttactggaaaggaaaccttccacaggtaacttacccactggatgttctccggctcaggctagcagttcaatctggacacagcactttatctcaggtaaccagtcttgtaagtgcaaatttctgtactttttttttctggaaactggcgtagcctgatgactttgtaggttgctcttaacatgctgagagaagaagggctggcctccttctatggaggcttgggtccatctcttgtagcaattgcaccttacattgctgtgaacttctgtgtttttgacctgatgaagaaatctgtaccagagaagtacaagaatagaccagaaacatctctggcaaccgctcttctttcagcaacatttgcaactttgatgtgttatccgctggacactgttaggagacagatgcagatgaaaggcacaccatacaatactgtttttgatgctattccaggcattgtggagcgtgacggtctaactggtctttatagaggttttgtgccaaatgcgttaaaaaatctaccaaatagcagcattaaactgaccgtgtttgacacggtgaagacactgatagctactgggcagaaggagatggacaaattaattcaagaaaatgaggagaaaagaagctaggaaaagagccttggtcaatcttgaaggctttggtagaaagcatgcctcgttgcacactccatatcgctatgtttcctcgtttgctggtgacatattttaggatctaggcagcgcatctttctgttccttttcaaatagatctagtttccagtgctttccgtagcatccacattcatagagatagaggttcgcattgagttgatctctttatctagtgtcggtagcattcccctacagatcttacctattctaatagaggatagtgtatcaatgtgaccgccccagattccttaaatgtaattatacataatagccagaacaatcaaatgtcatggagcacaggagcatgttctccttgtcaatgaattagcatctttgatttaaagaacatattgggtgtctcgtacatcacaaaccgaaggccagatttgctttggaatggttccatccactttagacttcggctagcatgaacttttggttgtgaagccagtttgtattggaggatgcaacaaacgaa

SEQ ID NO: 36301 - DNA, 2783 bp, Zea Mays
atccttattacgagtagaaggacaagtctggtgcagtggtgagacctgcctcactgagtcgccaggttgtggttcgaagcagcctcttgcatttgcagggaaagtcttgctttggttgatctcttctgcagaccccactcacgtgggagccttcggcactgggtctgccttttttatttagtgatctgcatatgtacactgcactcagcagaagaaagtacacttctgtcttgtagtaacataacatttgtaggttttggttagtcttcacccacgcatacatgatcaaccagcagcctggtttcttctttaggttgatgtcccaacagctgctgtttctgctttatccttattgagacatgacgattcattcatcagaaggccaacttgggatgtaggctggtcattggctgatgctaatcagaaacaggttgaaaatgacagcagatcttccctcgagtctaacaggaataattcatctttggagtcagtagactcattgatgttggccaagtctgccacaagaattgctattctaggaatttcaacctccaatttaaatgatgcaagacgtatcaatgtttcagtgatgcaacaacgaggggaccctttgcttatagtaggatctccatttggcctcatgtcacccttccatttcttcaacagtgtatcagttggtgctgttgcaaattgccttcctccatgcactgcaaggagctcattactgatggctgacatgcactgtctccctggcatggaaggcgctccagtgtttgaccaaaattcttgcctcgtggggctgctgatgaacccattaacacagaaaggcagcaatatagaagtccagctcgtgattacatgggatgcaatatgcacggaatggaacagcaaaaaactggaggaaattgaacgacccccaagaaaactacctaatgacaaaaatacagatagtaaatctatggaattacggcatgtatataactatgtgagggttttctcttctacggacaacaaaactaatcagcattgcatatcaccccgttcgctcagagaggctatatctgcagttgttcttgtcacggttggtgatacgtcttgggcttcaggtattgttctgaacaaaaggggtttagttctgacaaatgctcatctcttggaaccttggagatttggaagaacttcaccttcagatttacaagcctcgttcgctggagaacatctcaatgctggagaaaacaaatcattgcaaccacaacaaggcaaaatttccaatgaagatgctgtcaagcataaggtttcgtcatttaacttgggtttcaaaagagggaagagaatatctgttcgtttggaccatgaagagagacagatatggtgcaatgctagtgtggttttcatctcaaagggtccacttgatgttgcattgcttcaaatagaaaaggttccagttgaattaaatacaatcagaccagaatttgtttgtccaacagcagggtcgcctgtttatgttgttgggcatggcctttttggaccccgatcaggcctacactcttctctatactcgggggttgtgtcaaaggttgtccaaatcccagcaaatcaactttctcatctggcccgtgctgaggctgacaatatggacataccagtaatgcttcagacaacagcagcagttcatccaggagccagtggcggcgttcttgttaatacacatgggctaatggttgggataataacaagtaatgctaagcatggtggtggaagcacaatacctcatctgaatttcagcatcccctgcaaattactggttgcagtcttcgagtattcagcaaatggaaacctcgtggttttggagcagttggacaaaccaaatgaagtgctctcatcagtttgggcattggcaccatcatcatccccatttgtcaggagctccccagaaaaaggcaaagaggaaaaggtcttggagttctctaagtttcttagtgacaagcaacaagctctgaaatctaacgtagatctgaaggaactatttaggtacaagactcccagcaaaatatagagtgcgtccactagaattcatacaaggaaaatgtttgttcccagaattttgtatgagacgtttgatcccagaaatccccagtacaaaatgagttatcagagcacagtgccttttttttacagatggttaaggcataagcatcttttcttcgagtgtcaggtagcgcgggctatatggcatactgttcaaatcgctacaatttttaccctccctctagtgtcgtgaatatgtttaggtcatagctagggggattggtaaagatttaaaattgttagctcttttaggggcagcagcagtttgttgggccatttgacattgcgtttcaaagaaaatatgtgacaaactctttacaggttcttcgtttggttattcactggctccgttcctaggttgtgctacagaagcctatctttcaggagttggttttggctacctgacaacgtttggagcaaatggtcaggttgttttttacctaggctcgcgggtggcaatctagtcttaggattgatttctactagagttattaggttgttagtcttctttagactgtgtgcatctagcgcgatgtagaagttttgttgtcaagaaagttgtgacttatggttatcttgatgcaataaattttctcttctcgaaaaaaatgatgatgccgctgggaatgtaataaacttatataggaacagtttttacaattgaaaatgtcaattaccaattcttgtactagttg

SEQ ID NO: 36302 - DNA, 1235 bp, Zea Mays
cgttgtcaacaagatagaatattatattccatttcgtataacgttttcatatatcatctgcagatcaagaagtgaagaccgaagaacttcgacgacagagcagagaaagggctagcacttgattaacatggtacatcgactgattaagcaagctacacgcttagcatcggagttggaaaagttcccgagtcctgacgagaagcaacgcattacgtacgcatactcgcgagagcaagaactagagaaatcacggagcaaatggtagacatgctactactagctagcgctagcttgcacaggatgccatcacatcatgcatgcatggcggcgcgtatagaagtgttggctggtggtggtgttcatcagtcgtagagcggcgggcactggaagcccgacggcgcgtgcttgccgcaggtgatgagcaggttgagcgcgatggggaggtagatgttgatgttgagcaggcgcgcgcggatggtggtgcagaggcacagcgccgcgtccaggtccgccaccccctgcaccagcgggcagcacttggacctggcctcctgcccgatcaccaggtggatcagcccgctcagcacgtccacgcacgcgttcagcttcagcgtgtcgatcgggcacgtccgcaccgccggcggcgtcggcggaacgtacggtggcacgtagggtggtgatggccgaggcgtcggggggacgtagggtggcacgtacggtggtggtgatggccgaggcgtcggtgggacgtagggcggcgtcggtggaacgtagggcggagtcggcggccgtggcgtcgggggtacgtacggcggtgacggccgaggcgtcggcgggacatacggtggcacgtacggcggtgacggccgaggcgtcggaggcacgtacggagggttgcacggcgggcacttgggcggcttgccatggtggtgcttgggcggcttgctgtggccgccgccggagccggagccgggtgaaggccacgtcggcgagccactgccgggcgcgcccggtgcacagttgctgctctgccacgccagcgagccggggagcaggaggaggccggcggcggcggcgaggagcaggaggacgggaactgaggtggaggttgccattgcgccttggctcaacgcagcggcgcgcgacgggctgttctgtgcacactgcagcgcacgcgtctccttttatagaggaggagcgtcacgtacggtccctccgcactctgactctctggt

SEQ ID NO: 36303 - DNA, 1259 bp, Zea Mays
atgacttgtcatctcctgacaaaccagctagatgacaccttagacgggtcttaccttcactctccttagcacacccgcaataagcacacttgaatccctgtttcttccacttctcaccatgactccatgagtcatcaatagaaccttgtagttgtttgcgagttcctagtaatataaaaataaatgacgcaaaacaataaacaaagtgctaatctaaaaaatgactttccactagagaattaaaatttatacttccagtttgcatgtgagaactcaatagtgctaatctaatgctagaaagcgttaccatcggtagtaaccactcattcacgggcagatgatgattcaccaatacatggctgttttcccttgtcccgtacactgcctccttccatcacaatcaaaactgcaaacaaggcatttccatcacaaccaaaactcaaacacctgcatatcaatggcgcatcaaagagctcgacctatcattgtagatccagcactgcaggtcccaaataaaactgaggttcatcttgggtgatgcttagtcgatcgttcctggagttttgcttgcgatgggacaaccttcctcgcacactactgatgtatttcaccaacttcctctcatcctcagagggctacttccacacagtgatctgcaactcagagcactaccagaacaccactgtcaacagtgacctgcggttcatggcctgggataagccccctctgacgcaccctgttaacctcacaacagagcattttgatgcgatggcaaacaacggggcgccatttgcacactctttcgccaatgacaattcagtcctggatatgattgacgccaagttgttgggccgggcacctggccgcttcaccccgggtggatggtgtttgggtagctcagtaggcgggaaagatccgtgcaccttcttgggaagatcctttattctcaggccgaccaaaggttcggccaagctagagaagttgttgaaacttttggaacctgataacttcaggcctaaacaatgtaaataggactcattttgcatgtagcattttgtgggtactgttcagaagccaaagtttgacgaaatctttctagttattgcggcagttaggcatacatacaagtgtgttgttgtatacttgcatctggaaagcttatctcaaaagtgatttgagaccatacatgtactactgcggtttcatcgcttccacggatgttaaacaaccgatgataatcagagacttcagcaattttc

SEQ ID NO: 36304 - DNA, 3799 bp, Zea Mays
ggccagcgttacggcgcgcaaacctccgcctctcccctcccctgtcccctccaatcctccattctccggccaccctcgcttctccgtccctcggcaatccgcttgtcccccgttgcccgctccgttcagaagcgcctcgccgctgaccggtcgtgacccgcctcgcacctccgccttctccgtccctcgcggccgcggctgccgccgaatggaagccgcctcatgctgccgcgtcttctccacgcagcggtgccgcttcccgctccgcaggctgtcggcgccgccgtggccgcagccgttctgcaccgagtccagcggcggcctcgtcaccccgtcggcctccaagcggaggtccaggggccccgtcatggccgcgaagaaggccgcggagggcgaaaaacaagaagatggaaaatacaagcacactgtggatctcccgaaaacaacatttgggctgagagcgaattctgtacagcgggagccagagctccaaaaattatgggacgataatcaggttctgaaaagggtttctgaaaggaacactgggactgcttttgttctccacgatggccctccctatgctaatggtgatcttcacatgggccatgcgctcaataaaatcctcaaggattttataaatcgctacaagctgcttcagaatcataaagtgtcctttgttcctggttgggattgccacggccttccaatagaactaaaagttttgaagtcaatggataaggaaactttgagtgctcttacacccataaaattaagacaaaaagctgcaaaatttgctaaagcaacagtcgatgcacaaatgaaatctttcaagcggtatggtgtatgggccgattgggacaacccttacctaactctgtcaccggaatacgaagctgctcagttggaagtgtttgggcaaatggttatgaaaggatatatctatagaggacgaaagcctgtccattggagtccatcatcacgtacggctttggcagaagctgaactggagtattccgaaaatcacatttccagaagcatatatgccgcattcaagattactaatccatctaaatctgggatgctagacgatttttttccaaatgtatctttggtcatatggaccaccactccatggacaattccggctaatgctggtgagctgttgctgtgaacccaaagcttatttatgcagtagctgaggtacagtctgtatttgaaagtgagtcaacatccggtggtaaacaaagaaaagttggaaatatattgagttctgagaaaggaaaactgttcgttattgtggcttctgatcttatcacaactcttgagtccaaatggggtgtgaagcttgtagtacacaaatcatttcccggatctgccttggagcactgcaggtatgcccatcctgtgaatagcaacgaatgttccgtcattctaggaggagattacattacaactgaatcgggcactggccttgttcatactgcccctggccatggccaggaagactacataacaggtttgaagtatgggcttcctatcatttctcctgtggacgatgaagggaacttcacggctgaagctggacagttcggtggtttgtctgtcctgggggctggcaatgctgcagttgtgaagtatctggatgaacagtattcactcattttagaggaaccatacaaacacaagtacccctatgactggagatctaaagaaccaactatattccgagcaactgagcagtggtttgcatctgtggatggttttcgtgatgctgcaatggatgcaatcagacgagtaacttgggttccttctcaggcacaaaacaggattgttgccatgacctctagccgttctgattggtgtatttcacggcagagaacttggggtgtccctattccagttttttaccatgtggactcacaggaacctcttataactgaagaaacgattgaacacatcaaggctattgtgttgaagaaaggtagcgatgcatggtggtatatgacaactgaggaacttcttccagatagatatcgggacaaagcatctgaatatcgcaagggaactgatacaatggatgtttggtttgactctggctcttcatgggcagctgttttagcaaaaagggacggtcttaattttcctgcggatatttatcttgaaggttcagatcaacatcgtggatggttccagagctcattgttgactagcattgctacaacagggaaggctccctactccagtgttattacacatggatttgtactggatgaaaagggtttcaaaatgagtaaatcaattggtaatgtagtggacccagagaaaatcattgttggtggcaaaaaccatagggaagaacctggctatggagcagatgttctccgtctatgggtttctagtgttgattacactacagatgtgttgattggcccacaaatcttgcgccagatgtctgacatgtatagaaaactacgaggcacgatgcgatttcttttgtcgaatctccatgattggaagccggataattctgtgccgtacaatgatctgccaaaaatcgacaagtatgcacttttccatttggagactgtcatgacttccatgaaggatagttatgaaagttatcaattctataaagtataccagatccttcaaagatttgctactgttggtttgtccaatttctatttggatgttgcaaaggatcgcctttatgttggaggccgagtcagcttcacaaggaaaagttgtcagactgtgctcatggcacatctgctctaccttgttagggccatttccccgattatgcctcacctagctgaggatgtctggcagaacctaccctttcaatacaccttgcaggatggatcccttgcaaactttgtttttgatctgaaatggccagaaaagaatgaagaatggctctcggccccgaaggatgatgttgatttcctgggtgttatcctggagttgaggtcagaggtcaacaaaattttggagaatgctcgcactggaaagttgattggttctagcttagatgcaaaggtttatctccataccgaaagttcagatacggtattaaagctaaaggagctatcttctgcatccaatgatgcagacgctctgcatcgcctgtttatcacatctcaggtcgatattcttccaatcctaaatgaagagattacatcatctgtaccatacacaggaaagttcagtaacccacgcactggagtcatatggattggtgtgactcgtgcggatggtgcaaaatgtgagaggtgttggaattacacacaggacgttggatctttccatgaccatcctactctctgcgttcggtgctatggtgtcattgagttgcagacacaacctgcggccgcagctgtcagttgaaaggagtgatgttaacgtatcctatcgaaccatctaattttgaggatcattggtggaattcattcttttggagagctttcacgctaccatgtggcggtagcctgggactccagcttgaatcaagttttgcatgcagcaagctgtactttagattcttcatacataggtcacgagagttgtttggagcttgggtcatcgcttactttcccatactactggggggcttatttggaacagttttttacacaaaactcctgacctgtaaatcaattttggaaaaccgtatccggtggtcgatccatgtattaatagagtaataatgttactatgttcatccaaatctcaaagacgtgatggttgtgttgaaaaaacagcttgaatcacttgcttatgctcaactgttttttct

SEQ ID NO: 36305 - DNA, 1739 bp, Zea Mays
taatatccatctgccttatctactcgatcagctcgagccagctgtgcgcgcgtcccccctggccgcacgttcctctgctcggcgtacgtccctggccctgcgcctcctagtgtagacttgtccccacatgacattgctgattatgccaaccatacaatggggaaggcgcacaagaactgtcttggatgttggatgtggtgttgccagctttggtggatacctgcttgacaggaatgccattactatgtcatttgccccaaaagacgagcatgaggctcagatacagtttgccctagagcgtggaattccagcatttctagcagtaattggaacacaaaagcttccgtttcctgataatgtgttcgatgttgtacactgtgcaaggtgcagggtccattggtatgcaaatggtggaaaaccattgttggagcttaatagagtactgaggcctggaggatatttcatttggtctgcaacccctgtctaccgtcaagagcaaagagaccaagatgactggaatgcaatggttactctgactaaatcaatctgctggagaacagtggtaaagtctcaagatgtcaatggaattggagttgttatatatcaaaagccagcatcgaattcttgctatgctgaaagaaagaccaatgagccccctctatgctccgagagagatggatcacgctttccttggtatgctcctcttgatagttgccttttcacaactgccattaccacttcagatgaaagatataattggcctgttccatggcctgaaagacttgatgttagctatgcaagtgtacctgatgattctgcttctaacaaagagaagtttgaagctgatacaaagtattggaaacagctcatttcagaagtatatttcaatgacttcccacttaattggtcaagcattcgcaatgtaatggacatgaatgctgggtttggagggtttgccgcagcactcattgatcaacctttatgggttatgaatgctgtgccaattggtcaaccagataccttgccacttattttcaacagaggtttgattggggcatatcatgactggtgcgaatctttcagcacctaccctcgtacctatgatcttctccacatgagtaatctcattggaaatcttacaaacaggtgtgacctcatcgacgtggtggttgaaatcgacagaatactgagacctggaagatggtttgtgttgaaagacacgttagagatgataaagaagatacgcccaatcctgaagtctctgcactatgaaattgtcgtcgtgaaacagcaatttcttgtggctacaaagagtttctggcgtcctggcaaaccagcttccacatcagggtgacatatagatcgtactttcaagggagtcttcaacaaccaacgattctattgattctttgagacctgatcaaactaattctttctacaacacagtctatgtagattattacctgtataagtatagaaaatacatatggtaagttgaggtaataccccttttttttgccaaagcataataacaaggatgttatagacttatgcagtagtaggcaagttttgacaaatacatacaaagggaagggatcatgaaacgtgttgtgtatacttgctcgttgataacttttgtaaaaggagtttgaaataaccttgtactcagtactcatcatggttctgcaatgccagtgcattctgacgttcagctcccaggagctatttttatacctctg

SEQ ID NO: 36306 - DNA, 740 bp, Zea Mays
acactttcctttctccctcctgtgactcagtcggtcatggcggctcagatccagactcctccggcgtgggcgggcgtgagatccccgacagcacggccctagcagcggccacccccggtgggcacggcttgtgcgcgaccgtcccggcctgtgcgcgggcgcggcgtggcccttgacggcgcgctggcaagcgccctgctggtgcacaggcgggcagccacgacggcgcgcgagcgaggacccccggcgacgcgtggccccggctccgatccagtctcgtccggcgggcgcgggccctgccccggcggctccccgtgaccctggtgcatgtctacgaacaacgggtaacagtagaatccaaggctacacaagatatgcatgcgtcccgacagcgagggccatgcaggaagatgttccatagtgctggaggtgaagaggtcattgatcgaccatctctctctcgcaacgacattatcattccagttttggtcccgacagaaatgtgcgcgcgctggctgttagcatcagctctgccaccagcaacatgtccgctagtagtccagcaaatgtcatggttgaacaaccccaatgatcagctatgagaagaaatgacacgtatctttcacacgcacataggagccatacgaagaacgtactaatgaaaagatcgatgaattatattgatatgatatgacgtgagtgttttgaaatgtttggtaggttctgtttatatggatttt

SEQ ID NO: 36307 - DNA, 2226 bp, Zea Mays
atcgtcaccgcagaaaagaatttctgtttcccttcaatgagatggagaatccgagaatgggataagaccgcgccgcgcgcgctctcctctccgccactctcaccgtcgcctgccccgccatgacttccttgctgttgccgccgccgcaggcggctgccgcagcgtacggatgctgccactgtctcctgctcgcttctaccaccgtgccggcgaggagtgggtgcgtgggacgcgccagcagaatcacgctcgcgctccgctgcctcccgattaccgggcacaggctgaggagtcgaaaggttgcgtgccaagcgacgactgagaccgagcccgagggcaatggcgacgaggaggataagaaagagtttggagatgatgcttcatcaccttcagtttataatgttgcagaagcaaatgggccgggagaaaatgactcgagtttagacaataagaaagatgaaaccacgaatgcagaagcagcactgctgagctccggcgacacggtccaggacatggatgcagatgctacttctaccaatggcatacaagaaaatgtggaagttattgaagttgctagtggatctccattgccaggaatgaagcaacagcttgatgattctgtcaggatccccaaggctacaatagacattctaaaggatcaggtttttggatttgacacattttttgtaacaagtcaggagccttacgagggtggagtattattcaagggaaatcttcgtggtaaaccagccaaaagttatgagaagatcacaagtcggctacagaacaaatttggtgatgaatataagctttttcttctcatcaacccagaggatgagaagccagttgctgtggttatacccaagcagacattacagcctgaaactacaggtgacaaaaatttatcagtaccttcggtggcgtcggtagtgctcagagtgcggtcccagaatggtttgctgctgctgcatttggattagttaccatcttcactctgctacttcgaaatgtacctgttctacaggagaacttgctatcaacatttgacaaccttgagttgttgaaagacggactatccggtgctctagtaactggccttataataggggtgcacgaaattggacatatccttgctgccagggaaagtggaatcaagctcggcgtgccatattttgttcctagctggcagataggatctttcggcgggattaccagaatcgtcaatatcgtccgcaaccgtgaggacctactgaagctagcggctgctggaccattggccgggttttccttgggattcgttcttctgctgctgggcttcgtcttgcctccaagtgatggccttggccttgtgatagatccaaccgtcttccatgaatcgttcctcgttggtggtctcgcgaaacttcttctcggagatgttttgaaagaagggacgcagttatccataaacccgcttgttctatgggcctgggccggtctcctgatcaacgctatcaacagcatacccgctggggagcttgacggcggccgcatagcgttggccatgtggggaagaaaggtatcgtcccggatcagcagcctcgccatcgggctgctcggggtcgcggctctcttcaacgacgtcgccttctactgggtggtgctgatcttcttcctgcagaggggccccattgctcctctctccgaggaaatcacagaccctgagaacagctacatcggcatcggtgctgccattttgctgtttgggcttctggtctgcctgccctacccgttcccctttgacccgtcgcagttaactgatatggatttcaacttctgagaaaaggaaaccaaaaaaaaagcagttacaactcaccggatgagatgtatttaacctgtcggctctgtattctgctgtgtcatcttttgctccattgctccttgtagtagccaataaaagcagagctttcttgtgtaagcttgcctgttgtattagtaggatgctcgatcagagtagaatatagatgttattttggctgtaactgttacctgtcagttgtggcttatcaacaataggttccttgtcagagtatgatctatcagattcatacgcgatacttagcgttttggataagaataagcagacctaggacattgtgcgattgttgtgccagagccattcaaactgatactgctactaccttatataaaaaaaaatactcctgcttaatttgtttaactacacat

SEQ ID NO: 36308 - DNA, 1282 bp, Zea Mays
aaaacgggcagaaaaataaaacggaaaaggagccaaccaaaccgatcggtcgaccgatcaatctcaatcgaagcaccaggaaaactcgcgcaacacaaatctcaacaattatccggctggtgcgccggcgagcaccgtcctccggcgaccggctgggcagcagcagcaaagggggatcttgtcacgcttcgagatcggtcgccgcgctgggggcgactcactcgcgccactcttccccttccctgcgctggtggcggaaccctaatgccggcccgagtctagccgccatggactttgccagccgccacgccgcagcggaggcggccacatcggcatccgccgctgcccccgcgggcgtcgccgaggagcccgagtacctcgcccggtacctcgtcgtcaagcactcttggaggggaagaaatttaaggtcactcctgtgggtgttgagctccttgaggcttctggtgatatacgctggtgcttggacttcagagatatgaattctccggcaattgtactcttgggggatagctatgggaggaagacttctgaaggtggagggtttgtgctatgccctctttatggtaggaagtcaaaagcttttatggctgcttcaggaactacaaacactgcaattatatcgcatatgacgaaaactgccaaattaaagattggattatcactatctgtggataactcacaatcaatgaaagcggatgacttcatagcaaaaagagctatggaggcagttggagctgctgaaacacggcatggagagtggtcggtaacaagattacgttctgctgcgcgtggcactgctaatattgagagcttaagtttgggtgttggaccaaggggtgggcttggagaacagggtgattctgtctctcgtctgcttgttcttacaagtacttcacttgttgaaagacgtccagagaactatgaggctgccattgtacgaccactctcagcagtaagtgcttttgttcgatttgctgaagagccacagatgtttgcatttgaattcaatgatggctgcccaattcatgtatatgcaagcacttcccgtgataatctacttgcaacagttcttgacattttacaaacccagagacagtgtgcaattccagtgctaccaaggttaacaatgcctggtcatcggatagatccgccttgcggggtatcacatcttcagatgccccatcatagttctgttgatatggagtctgctaccatgcacattaaaacatctggctgcagctgcttaagagctgtagcgtca

SEQ ID NO: 36309 - DNA, 4028 bp, Zea Mays
tggccatgcgcgggcccatgtggcagcgtgatgcgccgcaagaagcttccacgaagcttcatggccgctaccgcctcgagaacaagtccccattcccgaccgcaaaagcgggccgagccgaggaagaagagaacaaaacgaaacccgaagctttttcccccattcttcgctggatatacaggaggattttcagagtcagggaggtgagggagagagggcgaggcaactgtgtgtgtgtgtgtgtgtgtgagcaggcccgccgagaagaaccttcgcgacgccgaggtgcccctggctgctgctgccggggtggtctgatcgggcatggcgcaggggagttcgccgccgccgccggagatccgctcgccggacgagcgggccgcggcggaggaccccgccgaggcggaggcgggggaggtggtcttcgacgacgcgttcgacataccccataagaacgctccgcacgaccggttgcgccggtggaggcaagctgctcttgttcttaatgcttcacgacgttttagatatactcttgaccttaaaaaggaggaagagaaagagattataaggaggaagatccggtcccatgcgcaagttatacgggcagcatttcttttcaaagaagctgggcaaaaagatatcagagaagcttatactggtataaatcttgcaacggcctctcgcagttttccaattgaactggaaaagcttaacacattaaacagggaccatgacagtgttcttcttcaagaaattggaggagttaagggattgtcagatttgttgaagagtaatttagagaagggagttagtccaaatgaggatgaattattacaaaggaagaatgtatatggatcaaatacatatccacgcaagaagagaaaaaacatactgcgttttgtatttgaagcttgccaagatttaactcttgtcattctgatgatagctgctgccatatcactaacattgggtatgactacagagggtgttgatgaaggatggtatgatggcggaagtatctttttagccgtttttcttgtgatacttgttactgcaacaagtgattataggcaatctctacagtttcgacatctgaatgaggagaaacagaacatacaagtggaggttgttagaggtggtaaaagatttggagcttcaatctttgaccttgttgttggtgatgtagttcctctcaaaattggtgatcaagttcctgctgatggtgtcctgatatctggccattctcttgcaatagatgaatcaagtatgactggagagtcaaaagttgtccacaaggatcaaaaggcaccattcttgatgtctggttgcaaggttgcagatggctatggttctatgttggtaacaggggtgggtacaaatactgaatggggtcagttgatggctaacctttcagaagataatggtgaagaaacaccattacaggttcgcttgaatggtgttgcaacttttattggtttggtgggcttgtctgttgctggtgcagtacttgttgtgctttggataaggtattttactggacataccgaaaatcctgatgggacacctcaatttgttgctggaactactggtgtgaagcaaggatttatgggggcaattagaattttgactatcgctgtgaccattgtagttgttgctgtgcctgagggactcccattggcagtaacactgacgcttgcatattccatgaaaaagatgatgcgagacaaagctctggtgaggcggctctcgtcatgtgaaacaatgggatcagctactacaatatgcagtgataagacaggaacccttacattgaataagatgacagtcgtggaagcatattttgctggaacaaagttggatccatgtgatgatgttagccagatgtcagacagtgcagcgtcacttattattgaaggaattgcgcagaacacaacaggaactgtatttctgccagaggatgggggagcagctgaacttactggttcgcctactgaaaaggccattctttcttggggccttaagatagggatggatttcgacgatgtgaggacaaaatcttcagttattcatgtttttccatttaactcggagaagaaacgtggcgctgttgcagtacagttagatgatggtgttcacatccactggaaaggtgcagctgaaatagtgttatcatcttgcaaaagctggctttccgtcgatggctctgttcagtcaatgagtgctgagaagcacgatgaattcaagagatcaatcgaagacatgggagcgaattcattacgctgtgttgcttttgcatactgttcctttgacattgaaaagatcccaatggaagacataacaagctgggagttgcctgaggatgacctgactctgcttggcatcataggaataaaggacccctgtcgcccaggtgtaagggatgctgtacgcctgtgcactactgctggtgttaaggtgcgcatggttacaggagataatattgaaacagctaaagctatagctctggagtgtggaatactagatgcaaatagtgttatttcagagccagttgtaatcgagggaaaagtgttccgtgagatgtctgaaagtgcaagaggagaggccgccgacaagataattgtgatggggagatcctcgccaaatgataaacttttgcttgtccaagctttaaaacgaaaaggccatgttgtagctgttactggtgatggcacaaatgatgcccctgcattgcacgaggccgatataggtctttcaatgggcatttccgggacagaagttgctaaagaaagctctgacattataatcttggatgatgacttcacgtcagttgtcaaggttgttcgttggggacgatctgtctacgctaatatccagaaattcattcagttccagctcaccgtcaatgttgctgcacttgtcattaatgtggttgctgctgtgtcctctggtgatgtgcccctaaatgctgttgagcttctgtgggtgaacctcataatggacacacttggagctcttgcattagcaaccgagcctccaacagacaaccttatgaagagaaatcctgttggtcgaagggaacctcttgttacaaatatcatgtggagaaacttgtttgttcaggccctttaccaagtagcaattcttctgattttcgattttgatggagtaaggattctgcgtctgcagaatgaaagccgatctgatgctgagaagataacaaatactttcatcttcaacacatttgtattttgccagatcttcaatgagttcaatgcacgaaaacccgaggaaaagaatgtcttcaaaggggtcacgaagaatcacctgttcatgggaataatcggtataacgacagtatttcagatactgataattcagttcctggggaagttcttcaaaatagtgaggcttggttggagactatggttggtttcagttgctatcggccttgtgagttggcccctggcttatgtgggtaaatttattcctgtgcccgtaagacctcttccggactatttcaaaccccgctgttgttggaaaccgccgcgccgagacgaggaggaaggtgggcagagctaaagcgcaacgagtgggcagtgtaaataggcacgtgataaaaaaatggagataaattgcactggttgattccatggtagcagcatcctggggatgtacgcataagatggcaggtagtcggcctcgtcgttttcttctaggagaagcagtcggaagaaaagaagtactatacagaagccaaacttgtctacccctatccagctggtgtgtctgctatgcggcagcgaaacttgagtcattagattgtagcctgaatgaaagcagcgctagcttgcgatgtagcagtacctttttttccctggcgatatcatctgactgtaaatttgtaaatgctttcggactacgagttgttcttatttttcatccacctcttctctacggaacgtttttttctatataagaaaataaagtcaacagagcagttctaaaacgactgttttttttttcctgaa

SEQ ID NO: 36310 - DNA, 2186 bp, Zea Mays
aaattatggaccgttctgggccgactcatgtggtcctagtcctgagtcctagtcctgtcatcctgtgcagctgcccgtagccttatctgctttcgttcgaccaggtgtcgttcgctttgccttgccccggcaaagcaatggcgctccgtctctctgctccgttcctcacctcgcgctttacgccgtcgcaagcgttggccccgcgcaggcgcacccgggcccgctctttctctccgtcagccgatgcgcgagccgcgtgcttcaagagaccctacacgtccgttctaattatccccacgggcgtcggcgcggccgtcgggggcttcgccggcgacgcccttccggttgcgcgagccgtcgccggcgtcgctgactgtgtcatatcccacccaaacgtgctgaacgctgcgatgctatactggccgatgcccaatacactttacgtggaagggtacgcccttgacaggttcgcagaaggatcctgggctctccaacctgttcaccagaacaaggtttggtgctggattctggaatcgaggaagacctccggctgcgccacttgcagattgcagatgccactagggcttctcttggcttgcctgtagtggagtacattgttacagatgctcctctggagatcaagacatggtttgatcccaggtgtgggaagtcaacagggagtgttggtaactctgattctcttctgagagcagttgacgcactagtgaaacattcagatgtgaatgctgtggctgtagttgcacgctttccagatgatgacccagaagattcagattgttaccgggaaggaaagggtgttgatctattggcaggagttgaagcaattatcagtcatttagttgtgaaagaattcaaaatcccttctgcacatgctcctgcagtgttacccccaccactcagcccattagtatgccctagatctgctgctgaagagggctaagggaggtctccgaggtgcggtggtcctatcttagtgggtcccgcgacaactttctgtactgggatcattgaatgcatcttagcagctgctgcaggtatgcacttcctcgggcgctgacaatgttcatgtggactcgtgcatatcttagttaagtaattatcaatttactagtgatatgtttcacaatcacactactattacaaggcttatattagactagtgctatgcgatcagttttaagttataatttttccgcctttttgcctctttggtcaatattttttctttttatttttaacctgattgcttattacttctgtatgttgtttgtttattcataatatgtctttaccaagtagattggacatacatttctgccttgtgtgcttgctgggttaagcaatgctccacaatatgtcatgaggagcggaaccttggaccatggttgcatagtggctggtgatgttgacagtgttattcttcccaaggactcctgtggaggagatggtacacttgcttttgctcgagctgcaagaaaggacaagcccttaatcattaccgtgcaggaaaatgagacagtgcttgatgatactccagacaagttcggcatagaagtgctgaatgtccgaaactactgggaagcaattggagtcatcgctgctcacaaagcaggtgtcaatccacatgctcttagaagacgagggattgatcatcttaagagccctcaacgatcatattctgcctactctgcaagtcctaaaccatctgcccgtcctccagtgcacgataaagtacagagacagcagctagttaggcaaatttagtactaaaaagagcactagcagcagtagaaattactttagatagtcgtgattaggaacttccaaaattttgaagcccagatacatatttttcagaccgtcctgaagtgtaggaccatagcatcacacgaattttgtcgtgttatccagtctggacttcgctgacatgagtctttctccactgccttacatttctccaatctctagtcggtttgtcaatcatttacatcattattttgccaaggtatacacagcgctggtaatcattttcgtccgacaatattttagtaagttgggtagaagcagtagtactgttttgtttcccactgaacatgaaagtttatgctgaaatgccaagctgttatggcctggtttaggtgccgttcgtttattcgggaatggag

SEQ ID NO: 36311 - DNA, 1843 bp, Zea Mays
atggttgattttgtcagggaaggttttcttgggagtactcatgaattccgaaacaggttccagaaccccattgaaaatgggcaacacacgaattcaacatcagatgatgtgaagatcatgaaccaacgatcacacatcttgtttgaacaactgaaaggttttgtccagcgaaagagcatgaacgttgtgaagaatgatctaccaccaaagaaggtttttgttattactgtaaagctctcacagctgcagaggaagctatacaaaaggttcttggatgttcatggtttctcaagtagtggttattcagaaaaatctcacaggtccttctttgccaagtaccagacattatcccaggaaagtaactggtgggaggaacttttagatgagaatacttatatgaaagcagattacagtggcaaaatgaccttgctccttgatatcctgtcaaaaagttctgaattaggcgacaaagtattagtgtttagccagagtttgaccactctggatttagtagagttttatctggcaaaattgcaaatcaatggaaaagaaggcaaacattggaagcgggggaaggattggtacaggcttgatgggagcactccatcttctgatcgtcagaatcttgtggagatgtttaatgaccttgaaaacacaagagtgaaatgcacattgatatcaactcgtgctggatccctgggtatcaaccttcatgctgcaaatcgcgtggttcttcttgatggatcatggaatccaacacatgatctgcaagccatttatcgagtttggaggtatggccagaccaaacctgtatatgcctaccgcctaatggcacatcaaacaatggaagagaaaatatataagcgccaggtgacaaaggaaggccttgcagcaagggtggtggatagacagcaagtttcaagaaccatctccaaagaagagatgctgcatctttttgaatttggtgaagaggaattaatggaacagaacgagaatggttctactatgattgagaagccatccacttctaacactattaaaacctctgtgcctgttcctgtcgacagtctcatgctgagcctgctcagtgagcaaactcggtggatttcaggttaccatgaacatgaagctctcctccaagaaaatgaagaagaaaagcttacaaaggaggagcaggacctggctttgtccgaatgggagtcattgaggaaagctgcatctgatcctgagagaaaatcaagcatgagcgcagttccaacatatcccaatcctgtgcggccacttaagcctgcttcaagaagccggcaactgcagcaacctaaggctaactcaaataaccaaaagaagtgcaccaacttaacccacttgctgactctgagaagccatggcacaaaagcagggtgcacgacaacctgtaacgagtgcggccaggaaattagttgggagactctaaacagagatggtagatcgagatgatgcctgtctctgtggcattgccagatttttttggggtctttatgtaatgttaacgtccaggtagcagtatatatattgcgtatacgagagtattagagtaggtagaatgtagaatggacaaaaaatggctcttgtggtacacatggtagaacgcatgggatgcaaaaaatgaacgatcacattgttatggaatgtagtcgtaacaagatgtttgttatgcacttattgtcattttcttttccttatcctcagcgctagctattttaagtcaagtgtttgtctgaaatttgccaatcggaaggcataactttataggtttaaaataatgaatactaataatgtcttggaaccgattctcttacctcgg

SEQ ID NO: 36312 - DNA, 2388 bp, Zea Mays
cacgcacgcggcccaaccaacctgccccaaaacctagctagatttagaaaaacaaaaaacctgtccccaacccgaaccgtgagatggctgagtacggcgagcgctaccagggcaacggcgaccaggccacggccgagggtggctatgcgcagaccgagtacgccgccggcgccggtggctcgccgccctccgacagcaatccctccgtgttctccgaccacgccgacggccgctcctcccagccccagcatgagacccaatcacatgacagtggttcctccaaatctcaagaaagggaccgagaacgtgataagggcaaggacagggagcgaggcagagaccgtgtccgcgaaaaggagaggggccgagacagggacaaggatcgtgaaagaggtgacagagacagggatcgtgatcgccaccacagggatcgtcgcgagcgcagcgagataagggaacaccgtgatcgttctgatgatcgtgaccgtcgcaggagtcatgattctgagaggagaagagatcgtgacagagatggccatcgtaggcatcgctcccgttccccttctaagggtcgtgaccgtgaccgcagatctagttctcattcacgctctagatcgaagagcgtgtgagtggttttgaccaagcacctacacaacaggcagttcctattgttgctgctggtgttatccctggtcagctgcctggtgtcaccgctcctattcctggggttggggtgcttccaaacttgtataatttggctgcaggacagttcaacccccatgttattcagccacaagccatgacacaacaggctacccggcatgctcggcctgtctatgtgggcggacttcctccaactgctaatgagcagaccgttgccatattcttcaatggagttatggctgctattggaggaaacacagctggtccaggtgatgctgttcccagtcaaccaccgctatggcctaggggcttcattcagcagcatcctttggattgcaacatgatgagaaacattaatttttctaatgcatcctatggtccaacaacaatgtgggctcccattcagacaggaaatataagttccgaatcaaccatgctaccagccacacaatctgcagtatattggaatcattatatgaactttgtcaggaatcctcttggttcagttcaaggaaatccttttccagattcgttttcaggtacaaatactagtacacctttgcagggttcgaatacaataccttcaatacctgtcaacttggagtccgctgctgaacatagtgttcaggacatcaatagtcctataaagacttctgcccctgttacaaaaccaaagaaaacaaaggaacaaaattatactgctgctgaagaccttctactttgcacaacctggttgcaaattagcagtgatcctattgtccacactggacaaaggaagaagggactttgggcacgaatagaaaaaaggtacaacgaacaaaggggcgagtacccttgtagaatgaatcgagcccttagcagcagatgggacaagattagagcagatgttggtaagttctcaggctgttacgcaagagtgctgcgagagaaacaaagtggtttgacagacgacgataagacttccaaggcggcaactttgtttgcacatgaggagaacaaaccatttcattttatgcattgctggcataagctgaagggggaacctaaatgggagagcatttgtcaaggacctttccgaggattacatggaaaagcaattggatcttctggtggtccttttattggtgtagaagaatcagatagtgggtctgctggtttgactggtaaacggcctctctgtcgtgattcttctaaatcagagagaaagaaggctgcgtcatcaacgacgacggaatacttaagccgtcttcaagaattaactgaaaaactaattcagcgcatcatagaaaagggtgagaagaaatataagtacaatgaacaggacatggagctagagaagaagaggttggacttggaagcaaaaaaattaagcattcgtaaaagggaattgagattaaaagaactaagtatggccgaacaacaactcgagatgctggagcgtactcgtgaagacgaggtcgatccagaagtatggagtatgatgaaggagcgcaaaaaacatttgcagcagttcatatttagtttttgctaaatttactgttgtttaacatgtcgtgcttctgtttccatatccggtttgcgaagaaatttataagtgcattgtcttatttgctttctaaaacattataaagttgttgtatgcttatgtcttgcaagacatgtcagtgttattaaagtttgtaacgttaattctgaaaggaaatgggcattaactattttctataa

SEQ ID NO: 36313 - DNA, 1338 bp, Zea Mays
gcccattgggctggttctgctgcttgccgacggtccatccctacagccagccagccagggcaaaccggcaaaaccccaacgcaggagcaacacagcgtcgccggcggcgatggatcccctctccgtgctccgcgactacgctggccgcaacgagctggacaagatcatcttctccggcgacgagatccacttcggctctgactacaccttcccggcttccacccccaccgccttcgcctccaagcagtcaggtcgcccctacccgctctccgctgccgtcttcctcgcgcagcaccacgacctcaagcacaccgacttcatccaggccgcgcgcctccgccgcatcccgcccgtatcgctccccgaccgcaagaccttcctcgacttcctccgcttcggccacaactccctcccctccgccgacccgctcctcccctccgccttccagccgcaggagccccacctccatccgccctcgcctccgccggaggaccccgcagctaccgaagaggccaccacgggaaagcaaatccgcgcgctcgagcggcccttcaaggaccgcaactcaatcctcgacgcccgcggccgcgactttctcgccgtcttccatgccgccgtgcgccgccaggacgagcagctcaagggcggcggcaaggatgcggcgccctcttcccgccccaactctggctccgtcgctgcagccctggccaagcccaaggtgctggacaggtccctgggcgacggcgtcgtgcccatcatccttgtgcccagcgcctcgcagacgctgattacgatctataacgtcaaggagttcctcgaggacggggtgttcgtgcccagcgaggagaggatgcgggcgaccaagggagggaagccggagagcgtcacggtgcagaagaagctgattcgtacggagagagctggcggcgctgggggtgccgtctccttcgaggttagggacaagccggcttcgctcaagtcagacgattgggggcgggtggtggccgtgtttgtgctcggcaaggagtggcagttcaaagactggcccttcaaggaccatgtagagatcttcaacagagttattggtttctatgtgcgctttgaagatgatagtgtggaagcagccaaggtggtgaaacagtggaatgtgaaaatcatatctataagcaaaaataaaaggcatcaagacagaacagctgctcttgaagtatgggagcgcttggaggaatttatgcgggcacggacataattgatgtgcagtcatattctgtacaatggaaacgtttttattgtagctgctcaacagtagggtgcagtttgaactcataaataacgtta

SEQ ID NO: 36314 - DNA, 1606 bp, Zea Mays
cgggctcagccatgccctaacacaatgccgtatgtgccaaaataagggaatagaaaggtgccgtgtcatccaataattttcctcgacaaatcctaaccacacacaaaaggccctattttaaatttctgaggagaaaaactaaacagaaaaatcgaggaaaatatgctgctagcaggggccgccattcccactagggttttcggattattaggtttctagaacctttcttcgccgccccccccccccccccccccagaccccatgcacgctccgccgctggtcgcgttcgcagggggcgcctgccccgcttccgctgcctcctcgctgtcgccctggttggcctcgctgcggcccgccatcgttgctgcgccggcgaggctgctatggttccgccgcggggcactccggctggaagccaaggccgcgtggagggctaccggagggggacggggcccgcgggtcccggccaagggcgctgtgctcgcctcctatatgggtgccgaggaggtggtgggacccttgtcgctgctcgacgaggaagagctcattttgcacataagaaaggaacgggataatggaaaacttcctgcagatgttgccattaacttggaggagctgtattataattacaggaatgcagtcctgcaaaatggtgatcctaatgcatatgagatcatgctttcaaatatgacagctttgtttgatcgtgttctactggatgtacagaatccatttacctttccaccgtatcacaaagctgtgcgggaaccatttgactattacatgtttggtcagaactacattaggcctctggtagatttcaggaactcctatgttggcaacatttcccttttccatgacatggaagagaagctccaccagggccacaatgttgttttgatgtccaaccatcagacagaagcagatccagcaattatcgccttgcttcttgaaaaaaccaatccatggattagtgaaaacatagtttatgttgctggcgatagggttgttaccgatccactttgcaagccatttagcatgggaaggtctttctcttcacccagatctttttttgacgtgtgacaatattgtctctgttttctttgactcctatcaatgtcactcaagcatttttctcccaacagaaatctcatttgtgtgtactcgaaaaagcatatgaatgattttccagagctaattgagatgaagaggagatcaaacactcggagcctcaaggaaatggccttgcttttacgtggtggttcacagctaatttggattgcaccgagtggtggtagagatcgcccaaatccttcaacaggagagtggtacccggcgcattttgattcatccacagtggacaatatgaggaggcttctggagcatgctggtgttcctgggcacatatatccactatcattactgtgctacgaggttatgcctccaccacaacaggtcgagaaagagattggtgaacagagggtgatatccttccatggagtaggcttgtcagcaactgaagaaacaaagtatggggatattacttgtcataccaagaatgctgatgagctgacaggttaaagaagcgaggcctccttcatccgga

SEQ ID NO: 36315 - DNA, 459 bp, Zea Mays
gaaaaaaaaacaaatagggacaatgtttgttgttgctgtggctgattttcttatgggtgcaaattgttcagcagataaatcatgatggagaggtcaatcgagctcgctatatgccccaaaattcatttgtaattgctactaagacagttagcgcagaagtatatgttttcgactatagcaagcacccatctaagcctccactagatggtgcatgcaaccctgatttacggctgaagggacataattctgaaggatatggcttatcatggagtatttttaaagagggacatttgttaagtgggtctgacgatgctcaaatttgcttgtgggacattaaagcaaatagtagaaacaaaagtcttgacgccttgcagatttttaagaattctgtaccatctctttgaaggtgcataatagtcatacttgtgaaaaggcctctagctgattggttaggtggtc

SEQ ID NO: 36316 - DNA, 2291 bp, Zea Mays
acttttgcccttcgaactaaaagcgcctgcatctcaaacccgacggcgctctcttctctatcctctgtgtcccctccaccaaaaccgacgacgacgtcgctctcctccaccggtgctcggcgctctccctccaccagcggtggtccacagacgctcggcgagctccaccggcgggcgctggcggctggtcagatccgctcggcagtcatccatctggcacatcggccgaagctcccagcgtcctcctgcaggccgagctgaaggttcagcgcgccggtggagttagacgacgaaactccgtcacgtcatacctctccgcctcccgtcttccagacgtctctaatcggggtcccagcgtctcggagaagaggagcagcacggcacggcagctgtggcgaggaaggctcctgtcccatcccaacccagttagcagccgcccaaggaggaggagatccaatcggcgtgcgggcgtccgcggtccatccatcgatccaattccaatctgcagtaacaaaggatttggaacccagccctctgttctccaccaccgcttcgaagatgccgcaggtaatggtggtggcacggaacttcatggatatggtggctgctcttcctgcgggcaagcttgatatgctctatgactcagcctttatctgtgaggcagtactcaggtcacttcccccactggcaaagaagtatgcactgcagatgttgtatgtgctggcaccagtgaccgctgcagcaatggaagagtgggtgcttgatgaatatgctgccaagcataaggttgccattgataagcttctacagctcagggtctttgttgaagtgcgcgacagacgacgggacgtgagctacaagatgaatcagaagttccagggaaacatgcagaagtatttggttgatggtggaagtttaccaagggaacctttaccattaagtgtcactggtcgattgcccacaccagcagatctggaagcctatgctcttgatcaatgggagtgcttcttgttgcaattgatcaattcatctcaagtcgaaaaagggtcaagttttagctcctccatgatgaagacgtttcagcgtggtcttctgagttcaagggatggtgaagcttcaaagttgactgaaaatggcttccaatttcttctgatggaaacaaatgcacaactttggtacataatgagagaatacatttcatctgctgaggaacgtggagtggaccctacggagctgatatcatttctcttggaacttagctttcataaattgggagcggcttatagcttgaacactctgactgatgtccagaggattgccatcagggatcttgcagaattaggactagtcaaacagcagcagggtcgaaaggatagctggttcattcctacccaattggctactaatctttcagcaagcttgtcagattcgtcatctaacaaagagggatttgtggttgtggagacaaactttcgaatgtatgcatactctacttccaagttgcactgtgaaattctacgcctttttgcaagggtggagtatcaacttccaaacctcatcgtaggagctgttacaaaagaaagtatctatggtgcttttgaaaatgggataactgctgagcagataatttcatttcttaggcaaaatgctcaccctcgtgttgctgacaagatacccgctgtcccggagaatgtcacagatcagattaggttgtgggaaactgacctcaacagggttgagatgattccatcgcatttgtacgaagattttcctagcaaggaatggtttgaacaatgctgtgattatgcaagggataatgggtacttgctgtgggaggaccccaagagaatgagactaattgtacgaggggagttccaccccgaaatgagggagttccttcgcaggcaaagatgaggaacgaccttgtacttgacggaccatgctatgcttctttgtagtgcatagaaacactgtatcgggtaatagttctcctttaaatatcaggaaagggtctagaaaagggctcagtttttgaattattttggtgacctgtgagctgtggaagcatatgaataatgtggtgttcaatggagcaaggcccaacatccttgatctgcttctaaatgttactagtgactgtaccctatgctggtgtatggctggtggccaggtcctgttggaactcttaggtaggtagtatggtgggatggagttggtatgctcttaatttgttgttatttggattgattctatataggacggagtgattttaaaaatgaaaaaaactcaaa

SEQ ID NO: 36317 - DNA, 2030 bp, Zea Mays
tcgtcatcctgtgcccccctccggccaccctcggccccacgcctccatggtcaccgccacgacaaccccgccgcaatgctggcgagggctccccgccttggcccgggcacctccacccctctcctctcctcttcggccgcgtgccgtagcggctgcggctcccatctatcctctcaggcgccgcatcgctattactacaaccagaggaaggcgaggcacactggactgttcccccaggtgtacgctggaaaccgccggccctggcttctaccctctggggctctacgaggaggggtctaattctctgtcgcggtctcccctgtctaccttctttggtatcatggcgccggtatttgggagctccagcggcggtggtgcaagtagggagaaggcgtccgggcgaggagcagcagctgcaattgaggatagctccattgacattggtgacttcttcaagggccctctacctgggaagttcctgaagctccttggttttttggccttgtctcggcttggtgtgtatatacctttgggtggggtcaaccgagaagcttttgctgggaaccttgaccagaacagcctgctgggcactttagattctttctctggtggaggcattggccggcttggaatttgctcccttggcattgtaccatttatcaatgcacagattgtgtttcaactccttgcgcaactctacccaaaattgcaagaccttcagcggaaagaaggggaagcaggaagaaagaaggttcttcagtatacaagatatgcttctgttggatttgcaattgttcagcacagaatgggttctaacatctgtgacattattgacacttggatcggtctttactactttcattggtgaaagaatatctgatctgaaacttggaaatggaacatcacttcttatatttacaagtataatatcatatttgcctgcatcatttgggaggacagttgcgcaggcatttcaagatgggaattatgttggacttctcacaatcatattgtcattcttactattagtccttgggattgtctatgttcaagaagctgagcgcaaaatacccctcaattatgcttctcgttacagcagtcgaactggggaacttcagcgatctgcatatttaccatttaaggtcaacagttctggagtcatgcctatcatattttctacatcttcactggctttgcctggtactttggcacggttttctggcttagactttcttaagaaggctgccatagcccttaatccaggaggtgctctctatcttccaactaatgtattacttatagccttcttcaactattattacacgtttctccagttagatcctgatgatcttagtgaacaattgaagcggcaaggtgcttcgataccacttgttagaccaggaaaaagtacagctgcttatattaaaacagttcttagtcgcatatctgtcttgggatctgcatttctggctgtgctagctgctggaccatctttagttgaacagacaagtcacttgacagcattccgtggatttgctgggacttcagtgcttatccttgttggatgtgcaacagacacagctcgaaaagttcaagcagaaataatttcccagaaatataagaatattgagttctatgatgtcaaccgttttggccaatagttgatctcactggtcattcttttcaacctgtacttagatttttatttgtgtaattgaatatcggatccgtaaggccgtaactaagtatttccttgttgttcacttggatcttaatttttttctactgtgtatagtactgaaatctgtactcaaggtacacaaatcattcatctgtacgctaacatgtcagagcactcaaatcttaaacctatgaatgcttattgttattcacagttcttgttgctgatgatgtaacatgtattgttacattatgattcccttccatatttattgtgttcaactttattagatcaactgaagaattggcttagtcgtcatgatttctattagacaaggtgagatgtactg

SEQ ID NO: 36318 - DNA, 1067 bp, Zea Mays
ttggacttctgtttttttggtgatgaggaccgtagccggaaccaacaagattgtttgcttcgtgggcttctgattggtcgtactcatggcaatgttggtgcctgatcttagtttctcggcatcgatctctagtgtgaagctcccaaggtacggggcatcaaagagtgagacattctttgttaagaagcccccaacattccgtgcagaagctaggccagcggaatctggcaaatatggtactaataatggccgggcaacaaagatggtaccaacaactgagttcaggaggaccagtggtggtcttgtaagatcagggacagttaatggttctccaaatagcgctgtcaatggctcgaccaaggtgttgattaatggttctgcaaatgccattgacaatagctcaaccaaagcagtcattaacggtacgccgaaggtggctgtaaatggtactagtctggtgaaaagcagcaagacttctcttgttaagacgcagaagcaagtgagacccaaagatgacccctttcaagaggaattgaaggttttgccttctgatgagggattcagctgggcaaaagataattacaattctgtgcagaggagcatagatatatggtcttttgtgctttctcttcgagtccgcgtgctatttgacaatgcaaaatgggcatatcctggtggattctcggaagaaaagcagaaagttcgaaggcggaaaactgcttcatggctaagagagcaagtattacagcttggcccaacgtttattaagctcgggcagttatcctccactagatctgatttatttcccagagaatttgtggacgagcttgcgaaactgcagagtacctgctttttctcctgagaaggcaaaagctttcatagagaaagaaatgggttgttccattgatgttgtgtacaaagaatttgaggaacgcccaatagctgctgccagtcttggtcagcgtttgaaggaattgtatgattctctctaattaaagtaaaataatatatccattgcacatcactcctgtatatgtctattgcttttcatatcatgtatcagtttt

SEQ ID NO: 36319 - DNA, 1027 bp, Zea Mays
caataaccagcgcgtcgtacgttccactgcacacgaacggcgtacgcacgcatcaccaccaccaccaccaccaccccatcttcgtctccgcaccactctcttcgccggcgtgcaatgactacctcgacgcgcccttgcgccggcgcagcggccgcgttcctgctactagtgctcttctcctccgccgcggtgtccctggcaacggccgccggcagggagagcaagcagggccagcacgcagcgggcgcgagcgtgtacgtggtgatggtgaagccaccggccgagggcgtcgactccaaggcgtaccagatgggcatcctcgccgccgcgctcggcaggtacggcacgcaattatttggcaccgccaagctaagcattacttcttcgatttgtggtcgatcgtgtgtggtgcgtgccttgttgtccgctgattggaggatctgcaattgtaagcgaggagaaagccaagcaggcgctgatctacagctacaaggccgccgccagcgggttcgccgccaagctcacgccggcgcaggtcgccgcgttgcagggattcaatccaatccatgtccagttgttcacccttcgtcataaaatgtgacatcacactagacaagcaagagcattttgtgcgcattcgtaactcatggagaatcattcattcatcgggagcagctggcattgcatatggtttaatgtaacaagctagacaaggaaacaacaagcgctgggtttttattaatctaatctcgcccgtgtttcggttcaaccgtcccactacacttcactactagactatacatgctgctacagcggctaacatactagatcgccgtcctgccgttgtcgttatgctttgcctgaactgctctctgctcaccatgtacgcgccattttgttttgttttttgttttgtttttgtttttgccgttctttgtgaggttaggttagtgagggatcacgtctcggtcggttactggagagccgtgagcagatgcacgagcacaccggccagttttaaaacgcc

SEQ ID NO: 36320 - DNA, 2838 bp, Zea Mays
ctgcaagaggcgtgaggatgcaacctgtagctgtagcatgtgcgagtggcaacgcggaagatctacgatccactggaggaggacgccttccgccccatccttcaccactacgacgggcccaagtttcggctcgagctctccgtcgccgagaccctcgccctcctcgacatcttcgctgacaaggatgacgcctgagccttccttgccgccccctcgccgccagtgccaatccattaatgcacagacaataaaatggctggagggacagaccaaactatccacctttgtttgatatgataaagggctatgtatgaggcacgcgtcccattatttttgtttttattataagactagacctcgttccgtaagatacatgtatcaatattatataaaaacaaaccatcagttcttgtgctgcactacagatgttgtgttggattggaattcgtccctcgcgacaatacctcggttataatactgcgtctgaatgctccagattcgacagcatcagctacctgccacttccacaccatgacttgagcttcgaccgattctggttctagaataaaactcaatcaactcgctggtagctgaactgcacgacacgacaaagcatgctgcacaaacggttggcaccagataaatcaaagtcagctgcggcccataaccttccattcacctaaaacatatttgtacaaaactgcggaacgaagctccagaggagcaatattaacaaacagaaccacaacggagaaaaagggtgggggtgggggtggggggaatctcatctctcctcaactcaaatacatccgacaatctatctccggtcaagaaaacattcataccacatcaaattttcttcccaaaggttttctttgctttccttctccagcttcaaccaaacatattgtgcggagcagggtgagccatgagcgagctgtggtgatggaccatataccacctcccattacagagctcgtacacgttcgtcacatggaacaccaaagggtcaacatcaacattcgccttcatgttcacccatgccatctcaccgagcacacggacacggacatcccttatctggaacccaatgccctgccctccatcttggccccagttgaatagcaggccccagctctccatcactgagttgtatctgataaggaacagaaatgggtgggcgcattcacaccagtaaggcctgttagataacgctgcttcttcaacagttcgattcgaaaatcaatactgatgaggggaataatataaaaaggattcttacagtttaaatacaaaacgtttgtcccaaatagaacaccaacatactgaaggcgttctatactagaaaggaaactagattcacattgtgaaaatttcataagaatcagattaccatctgtcacctgacacaccaagcctagtcaatggaattagttgtatggttatctggttaatgacaaatggtcaagtacaacctactacaagacagcaaccaatggatcccgatcctgccaaagcatacaaactttacttctcatagaagacacggacatttcaatgagcaccatctttatttatgttcacaggtacaaaggtttcaaaggtgtactttataagatgaaaagcacaagtgtgcacactgtttgaaaaggcaacccccctaggccacctaataaacgaggtgctagataccccttcagttcccatgtagcatctagtcatttttcagacatttgtgtgcgtgcataactagaaactacaacttctgtccaaaaaaaaaattccaaccaatcttcagcatagttgcaagatctcaatagttggaaaaaactatgatgtgcgtgtttctgaaaaagctatgatgtgcgtgtttctgaaaaaactatcagcactcagcagagcttgaagtttgtaaaagaaacaaaattaatcactacagcaatgcattgatatgtgtctatatgctaaataattcaagtgttgactcaaaatgtctctgctccaccagtgcaatgcaacgatacatatccgaatctgaatcttagtaacaggtatcaaattgtatcaaacaaaattacttccctttgacctaaggctatggccaacagatcgtgcatatggctgtgcaaaacactattttgcactgtagactgtactgtttacagaatagagttggaaatatgagatgagaatgagtaagctgctagagatagcctaacatatgcaacgagttaaaattaatttgctaaaaaccctataacatactccatccatttcgcgatgtgtccatggccaccattgggcataaagcaaggaaacatattgttggagggaaggccgtcgctcggccacgtgtcagtgagttccaacacatatctatgcaaacgaagcaacagatcaaccacaactaggtgcacacccccttggagtacacaagtcaacaagtgtgtacatgcattggttactcccttcccaataaacacatcacatttaaagtcaacaacataggaatcatcaaatcaacagacttgtaaataaaccataggacacattgcaaagcagaaggattagaagccagggaaaaaatagaactttgaatcgatggcagtgaagtcaagatttcaagacatacccagggcagaactccccagtcgcatgaatacacttgacatagtctgcattaagccaaaaacgactcattgctggcaaggacccttccctgatgatattgtagaactccgcgttaagattaatgatggcttttgtagctgcatagtatgccttccatccattaggaggatttatagtaccctgttccaccgtaaaatcctgcaagag

SEQ ID NO: 36321 - DNA, 4391 bp, Zea Mays
aattctgggtgtctctaatgatgaatctaggataaccagatatcttgtggtatcttgtggtatcttgtgttatttgtgaaaagctacttaatccttctcataattttattgttgttttaatggtgctatgatcaatatattgtcgataaaagatcaatggcaccatctacaatttaccataatatggctacttaatccttctcataatttttattgttgttttaatggtgctttgatcaatatattgtcgataaaagatcaatggcaccatctacactttaccaaaataggacggttgctgccgtatctccctttccaccagaatctccgtaagcaccatcttaaacttgcccattctcaactagcagatttccttatgtgaaaacgaagaaccaacataaacgaatctaatggagcataatgctgatcgcacaccattaatagacatatcaaacacaagcattacaggtgatcaaataggatcaaactcgcttggaccaatagacgatgctaatgaacgtaagaggcaaagggatagagaaagatatgccacgatgtccattgaacaaaagaatgagaaaaataggaagcgccgtgaagcacgtcaacgaaacaaaggactacccctaaagtctgagtcatctagaggtcctattaaaaacactccatcggctggtaattctatcgaacgaaagaggcaaagggatagagaaaggcgtgcaacaatgtcggttgaacaaaggaatgagtacaataacaagcgtcgtcaaatgcgtcaacgaaataagggacaaaatgtgatgcccgatgtttcaggagatggcgacaaaaaagaaaatgtggatccagatgatgatagcgactggctgcatcggaacgagacattccagtcaaacgactatgttgcaacgacagaccttctgccaccagatgaggagactgacgaggacatcgaaatcgatggtactcaggatgaatctactggcactgatgtgcctgacccgtacgacaaggtatacagtaacctccctgaagaaacacatatgctgaagcctgttcctgactgcggttattgcactgcgaagaagtttgagtacgagccacctgggttttgctgtcgtggtgggaaggttgagctagcaccactcgatacccctccccagctcaggaggttgtgggatagtgcagactctgatgctaagcactttcgtgataacattaggttttttaatggcaatttctctttcacttccctatactgttgcctcgatagtatgacaactaatgtgcgagattctggtatatacacgttccgggcacaaggcatgatgtaccacaatatcaagtcattcggtaaggaagtttttcatattgagctgcacaagtacagcacaagatatggccgcatatttacattacaaaggtgcaactttgctaacatcccactccgtccactcgagctctccaccagctttccccttctctccggtccgggaatcggaagctcagggcagaagataattggtgcctttcttgataagttgatatacaaccgtggatccttggacttcgatttagttagtgactccgtaggtatcagataaccaaaaaaagaggaatcacgtgaactactggttatatttcccctggatttcgacaaagctttttaggaaatttcgtactttttttcatggagaaatttcgaagacaccaatgaagttctcgcataaaataataaaaaaaccctaagcatgctcgattttcatttttttgccatgaacaactgctagtcaagcacaaaacaaggatttcctaattctccacactcgacaaccattattttcacagcttcaagaactctcaacttccccccaccccaacccaaaagaagtgaatacaaccataaccttcacagcttcaagaacttttcaacttcaaggaaatttctaaacagtaattcttttttaagctggtgaggtgtcccggccctcctgtttcctgaaaaaaaagcacgactgaactagatgttattaggtccgcacatgaattgcatacgaaatgttttcctgactggggctaaattgctagtttagccatggggcagacgcatcttttgttgctcgcttgtttctgggtcctgtcaacatgctccttgctacttgatgcttcctccgatggactgttaagaatcaacctgaacaagaagagactggacaaggaagctttgactgctgcgaaattggcgaagaaggagagcaaccttcgaaggtctgtgggtgctgaccagtatctcagtgcctcaactgatgacatagtccctttggacaactacctggacacccagtactttggacagatcagcatcggcacgccaccacagaacttcacagtgatattcgacactggaagctccaacttgtgggttccctcatccaagtgctacttttcgatagcatgctacttacaccacagatacaagtcaaccaagtcgaagacttacacaaagaatggagaatcttgtacgataacatatggttctgggcaaatcgctggcttcttcagtgaggacaatgtgttggttggcaaccttgttgtgcaaaatcagaaatttattgagacaactcgagaaaccagccctactttcatcattgggaagtttgatggaattcttggtctcggatttcctgaaatttctgtaggaggagcccctccaatttggcagagcatgaaacagcagaaactggtcgcaaaggatgtcttctctttctggcttaatcgtgaccctgatgcatcttctggaggaggcgagcttgtctttggtggtgttgacccaaaacactacaaaggggaccatacatatgttcccgttacacgcaaaggctactggcagtttgacatgggagatcttattattggtggccactcaactggtttctgtgctggtggctgtgctgctattgtggactcagggacttcattgcttgctggtccaactaccatagtggctcaagtcaatcatgcaattggggctgagggaatcatcagtacagaatgcaaagaagtggtgagcgagtatggagagatgatccttgagttgctcatatcgcagacaagcccacagaaagtgtgcactcagattggtctctgtgtatttgatggtgcccattctgtcagcaatccaattgaatctgttgttgagaaacagaagcgtggttctgatcttttctgtactgcttgtgagatggctgttgtctggatacagaatcagctccgtgaaaacaagacaaaagaactcattttgaattatgctaatcagctctgtgagcgtctccctagccccaatggcgagtcaactgttgattgccatcagatctcaaagatgccaaatcttgcattcaccatagcaaacaagactttcaccttaacaccagagcagtacatagtgaagctggagcaagcaggacaaactatctgcatcagtgggtttatggcatttgacgtaccgcctcctcgtggtcctctctggatacttggtgatgtttttatgggtgcctaccacactgtttttgacttcggtgagaacaggattgggtttgccaaatctgcatgaggactggagttctgcgctttagtagcatgtccagtttgttatccggaaatctagaagattgtggcatgatatgtgtttgcaaatggagctatgctatgtatggagctccaggacctagagttttatgtaaagggagacgatgaggattagggcttttaacctattctcatcacgttattgtcctgattactatgtgtaggtatagttgctgagcttgtttgggagcaagacaattggaggggatgagtggactaaaattcccttcctatcaaaattgaatatgaagagtattttagctctttcaatcttctccaattctcttgctcccaaacatgtccttatagtttggggtgtgcctctttttgtgttgtagtttggttttgatgttcgatataacataatcttgagtcgtgcaggttaaggtttctctaatttgtacaccaagtagatggtccctgaatatggaccacaagacgtgacctgcctaaaaaaacctgatcctaccaatgcaatgggtaggtatgtgctttagtttttgatccgtaatgggcataggcactggctatgatatttaacctaaaacccgacctagatttttaacctaaaatccgacctaacctgaaaaacccaactgtaaagcctaaattttgtataaaaataaatataaatataattatgtagtattttgggattatggaacctttgaggattatttgggttttcttttatttgtgcatattcagttaatggaattatattggttacataacaaataaataaa

SEQ ID NO: 36322 - DNA, 1755 bp, Zea Mays
caagagccaacagagcaacgcaggcacacacgacacgaaccaggcaaccagctgcggacggaggaaccctagcggaacactgtgccggtgacggcggcgcgctaccggtgacgggggatacggcggcatcggcccctcctccatccccggcgcggcggcgccagcagccggcctgcagttgaatggcttcaagtgcacgggacattatgtttcggcctctcaaaacattaactataagcccggcactggcatctggtgtgatcagacagcgttaccagcttcaacagcatgcaccagtgagtggcacatccaaaggaaaggctaagctcaaagcaggtcagcctttgaagcgttccaccattggagcaaagaaaggggcaccttccgctgctggtggcggcggtggtcgtggtcgtcgtgaggccattgagcgcattattcagatttccgagtcatgtctcaatgcatctactccgttgcggcacttgcccctcaaggagcgtcttcgtgaggccaaacgtgaggaactgggtcttgtctccaaggagaggcaacgagagcttgatatagccaaagccaaatctaaagccaaatctaaaggtcctggtggagatgatggagaccgtgtgcttatgggtccaccgggccttgactatatcagtcttgggctagttgatgaggaggcaatccccaagtatgaactcacagtcgaggatggtcggcgacttgctaaagaatacagtcgtgtactaatgcggcggcaccgtgcaaggcaaacagcagagtcaatgcttctaaccctaaaaaaggaggccattgatgctctccctgagaagctacgagctgctgctatggtacctgacatgacaccgttccctgcaaaccggtacatggcgacactcacaccaccaattgaaggatatattgaaaaagtgcgggaagcggccaagaagcactctgtgaaggagaaacttcgctgagaattcaagagaggaaactgtttccgtaaggtgaataaatattcaacctaatgtacaagaacagctttggcacaaactgcaattgccatatttggtgatctaatcagacatcccaatttgctgagcagccattatctagtgaaatcctttttgccatttttatgcaactctacaggattgttttttttttttgcagttgtcgctagactgtcatttcattttctgtttttgctcatttaggatgtttgctgttgagaggcatgcttggtgcaagtgcaatggtgagagctgccttactcgttatcatgtcgcagtttcgatgcacctctttgtctttgcggggaaaagacttcgatttatcccctatttacacctcatttatagtcatgtgggagcctctaggacgtttgttgttgacagcaacttccgcaataaagggttagcagtgagaccatgaaactaagaatctcccgattcctcacaaatgccccccgtactattttatactctagattgctgatacagcaagggttatatgatgcagcattttgttcgtatgtgctttcaatttttagttgcactgcatctttccatgaggtaatggtatattgtgtaccttatgtttctgcgagatgtcagtttcgacttttgagtagccctcatttggacatttggatttactacattgcagccgttcttgcatgaccttcgctccaggttatgcgtatgttatccatttgtgctgtacgatcttgaccgtgttctagtactgctg

SEQ ID NO: 36323 - DNA, 1752 bp, Zea Mays
agttcttttgtccaagttatatagtcatggctattactgagcttattgttttgcgaaaatggttaatggtggcagagtgagcaactgggcatgtattaacttctctcggaatgtgcaagatagtgccgctaggggtttctctcatgagttggcagtcatgtgccaaatatcaggaatggattttgctcttgagcctgtgctgcctccagtgactgcaaggccagaacatgttgagagagcgttaaaggcacgttatcaagatgcaatgaacatactgaggccacagggaagggaacttgatctgctgatcgtaatactgcctgacaacaatggttctctttatggggatctcaaaaggatctgtgagactgaactcggattggtctcccagtgttgtctgactaaacatgtttttaagatgagcaagcagtaccttgcaaatgttgcactcaaaataaatgttaaggttgggggaaggaatactgtacttttagatgctttgtcaaggagaatcccccttgtcagtgacagaccgaccataatatttggtgctgatgttacccatccacatcctggagaagattccagtccttccattgcagccgttgttgcttcgcaagactggcccgaggtcacgaaatacgctggactagtgagtgcgcaagcccatcgccaggagctgatacaggatcttttcaaagtatggcaggacccgcagagaaggacggtaactggcggcatgataaaggaacttctcatttctttcaagagggcaactggacagaagccccagaggatcatattctacagggatggtgtcagtgagggacagttctatcaagtattgctgtacgaacttgatgccattagaaaggcctgtgcgtccctggagcccaactaccagcctccagttacttttgtcgtggtacagaagcgccatcacactaggctgtttgcgaacaaccacagtgatcagcgcacagtcgatagaagcggaaacatactgcctggcaccgtggtcgattcgaagatttgccatcctactgagtttgacttctacctgtgtagccatgctggcattcagggaacgagccgccctgctcactaccatgtcctgtgggacgagaacaagttcacagctgacgagctgcagaccctgacgaacaacctgtgctacacgtacgctaggtgcacccgctccgtgtccatcgtgcccccggcgtactacgctcatctggcagccttccgagctcgcttctacatggagccagacacctctgacagcgggtcactggccagcggtgcccgtggccccccacccggtgcggcacgcagcagcacgagaggggccgggagtgtcgaggtcaggcccctacctgctctcaaggagaacgtgaagcgtgtcatgttttactgctgagacgctggtgggctgccttcgccaaggaaaatgccctggagcattcccatgtacccgcactgtttcggtgatacagtactatctaacgccgattttgcgcgttaagacttccagtgatctgggaaatttcttgtacgactgttgtagtgttgtgtattcgtaatgtgatgacgcggcagttcttctaggagcttagtgccgtgtaaaatatctgttgtaagttgtaacctgtcaccctctagtgttatgtcatgatgaaccaaattatttgttgtcattccatgtacttcgccaagtatttgttgtcacgatgttctaggatgatttttttt

SEQ ID NO: 36324 - DNA, 4224 bp, Zea Mays
agagtctctacccgtgatttccattctaaaaattatccttcctcccgtgcctacagtcctacacctcgacgatgccaaaaccctagcgcagcagcgcgaactacacctctccccgtcctgttcctcgtggcgcggtagccatggcggagccggccatcctcgacccctcccccttcgatctccgccactatccggcgcacctcttcgacccggacatccccctcgccgccgccgacttcccactcggtgaattcgccggagacgacggctgtgatggcctagacttcgacgtgcccgtagatttctctatcgacgacttcctcctccggtctcctgaccgcgggcacgacggcgacgactccggcgagggctctgctgccggatccggccccaccgcatcttccttggcctccccggccacctccggcactaactccgccgtggccaacgtcggcaaccgcaaggtgaagcacgaggactcggacgagggaaggagcggcgccaccccgaattggagcctcaagcggaagcaggtgagtcccggagaagcaacctcggatggggccaagtgccgccgatccggcgatggggatgtttcgccatctgcatcggcgtcgcgtgcagccacggaggactccgatgagaggggcgtgggcggcgaggaagaggacaagcgccggactgcgcgcctgatgcggaaccgtgagagcgcgcagctctctcggcagaggaagaagcggtacgtggaggagctggaagagaaggtgaaatcgatgcactcggtgataaatgacctcagttgtaagatctccttcatcgctgcggagaacgccacactgaggcagcaactcggtggtgtgggggtgagtggaccaccacctggggtgtatccaccgccaccgccaggcattcatttcccttgggtttctgggtatgcaatgcggcctcatggctcccatgttccacttgttccaatcccgcgattgaagccgcagcatgcagcagctgcagtgaaggtatccaagaaaccagatgtcaagaagtctgtggagagcaagagtaagaccaagaccaagaccaagaccaagaaggtggcaagtattagccttcttggtttgctgtttgttgcatttgtctttggcgcttttgttccggggttcaatcatagtctcggactgagaggaaggagcgacaatgtgatgtttggaaattttggccagtctgatgctagggtgtttagtgtcactaaccatggtaaaggacctaaaggcagtttcaacagtagtgacatgatcagtactgatcatgacatgatgactgggcatgatgatggagcggggcagaaacaccgagctgcaaataactctagtgagatcttgcctgctttgttgtatgtgccgaggaatggaaaacatgttatgatcaatggcaatttgattattcattctgtgatggctagtgagaaagcagtggcacataagggctcaaatagtcagtcagttaaagatcacaaggagaccagtgttgctatagctcgctatctgtcaccacctggaaaggatatgaattcaaaagagatgttcccgccagatgcaccactgccacaatggttccgtgaaggaatggaaggacctgttttgaactcgggaatgtgcagtgaggtatttcagtttgatatttctccagcttcggccaaatctggtggcattatacctgcttcggccaaatctgcctcaagtgtcaatgctacccagaaaattctgaaaccttctcctgcttataggggcaagctgaaaaacaggaggatcatgtataacgaggcaattccacttactggaaaaacagcgaacaacacaaagcctcaggcttttaacagtactgctgaaagcagcaaggtacctgatactgatagcaagcctgcatcatcagttatcgtctctgtgctagctgatcccagggaggctggcaatggggatggtgatccaagagtatcaccaaaacccctctccaggatatttgtcgtcgttctgctcgatggtgtcagatacgtgacttactcgtgcacacttcctttcaagagtgccagcccacaccttgtgaactaaccttggggccggtgcagctttctggtccatgagcggctaaatagttggggttttctgatgcattggaggtagatgaatgaatacagtaatgtggtgttgcttgctaacaatgaaaacagacttcaagactcgcactcggcctgagggccgcgcaagcgctctggcttcttccagtccagtccaccatccgcgccatggcgatggcgttcgcggctgcctccgcctggagcctcagtcttacagccttctccctcccgctgccccagtctctgcgcccgaaacctagccaactcctccatggcgcgaccagctcgttcccgcggccacgccgatgcgggtggggcgccgtggtgcgctgcgcgaagcgcacggggaagcagcggtacccgtcggagaagaagcggttgaacaggcgaaaacaggagttgctacgccaggccgccccggaggaggggagcaaggggcgggagtccgggtactggcggctctcgaagctcgctgttcccgcccgcgacgacccaggcaaggacttcaccggcatctccctgccgctactccaggccatcgccaaagccatcaagttcccggttccttctatgctccctgacgaggctttcactgtcatccgcaagtcatttgacgcacgaaaggttttgaaagaacctcaattcacttatattgttgatatggatgttaagaagattcttaatattgagccaagggcatgggattttattgctcggttggagcccaaacttggagttgtggaatacatgaccgaagagaagttagcagttgatctggtcagcatgctaaatgttagtagcaaaggttccaataatgtactaggaattagagacactcatagtggcatgatttatcgtcaacaaaagaagcccagagtggcagttataggaagtggaccatctggcttgtttgcttcccttgtgctaggtgaacttggtgcagaagttaccttattggagcgtggtcagcctgttgaacagagaggtcgtgacattggtgcactagcagttagacgaattctacaaccagagagcaacttttgctttggcgaggtacgtggagtgatgggaagctgatgaccaggataggaaaaaacactgatggtgttcaggctgttatgaaaacatttgttcactttggagcccctccaaacattttagttgatgggaaaccacacttgggtactgataaacttgttccactgctgcgaaaattcaggcatcacttaagagagttgggtgttaccataagatttaatgctagagtagatgaccttatagtagaagatgggcaggtaaaaggaattgtggtctctgatgtggaactacagccaggtcctgccagccagaaactagcatttgacgcagttgtaatggcagttggtcattcagctcgtgacacatacagtatgctttggcagcataatgtagacatgagcccaaaaagttttgctgttggcttaagaattgagcatccccaagaattgataaacagtatccaatactctgaactggcagctgaagtacaaagaggacgtggacggattcctgtggcagattacaaaatagtgaagtctgttggtgaaagagacgcagagaatgaacttgacatagctgagccaactcgcagttgctactcgttttgtatgtgccctggtggacaggttgttctaaccagcacaaacccatcagaattgtgcatcaatggcatgtcgttctcacggcgtgcatcaaagtgggcaaactcagctcttgtagtcactgtatcatcccatgatttcaagccatttcaatcccatggtcctcttgctggcgttgaattccagagacaatttgaaagaagagcagctatgatgggtggagggaatttcgttgttcctgcacagtgtgtcaccgattttatcagcaacagactgtcagttacaacactgccaccatcaagctatagattaggagttcgtccatctaatcttcatgagctattccctccttacataactgaagctttacaagagtcactaataatgattgatagagagatgccaggctttgtttctagcaaggccctacttcatggtgtggaggtctgtttc

SEQ ID NO: 36325 - DNA, 1903 bp, Zea Mays
cccgatccagagcattccccagtcctcaccccacgtccccacccttgtcgccctttcgcttccgtctcgtttggacctccatccgcggccgccgccgccgcgctgagtttgggccgggctctgttaatctgggcgactttgattttctctgctcccgctgccacggccgtcaggagtgaagcgatgctggagaaagaccggatatcctacttctacgacggagatgttggcaatgtctactttgggccaaatcaccccatgaagccacatcgtctctgtatgacacatcaccttgttctttcatatggacttcatcaaaagatggagatatatagaccacacaaagcatatccaatagagcttgcccaattccattctgctgattatgtggaattcttgcaccggataactcctgattcccagcacctatatacaatcttggagaagactgtccggtctttgataatttgtttgagttctgccaaatctatgcgggaggaactttagatgctgctcgcagattaaatcataaaatatgtgacattgccattaattgggctggtgggctacatcatgccaaaaagtgtgaggcttcaggcttctgttacattaatgatctagtattaggaattctggagcttctcaagtaccatgccagggttctttatattgacattgatgtccatcatggagatggagttgaagaagccttttatttcactgacagggtaatgactgtgagtttccacaagtatggtgacctgttctttcctggaacaggtgatattaaagatataggagaaagggaaggaaaatattatgccatcaacattccacttaaagatgggatagatgacactagctttactcggctttttaaaacagtaagctcactgcactttatcccttgttattttgtcatttttttagtcctgccatgttatctgagtttgtcatgcagattattgccaaagttgttgagacatatctgcctggtgctattgttcttcaatgtggggctgattcattggcgagggatcgtttaggctgcttcaatctctctattgaaggtcatgctgaatgtgtaaagtttgtcaagaaattcaatattccccttctggtaactggaggtggtggatacaccaaggagaatgtagcacggtgttgggctgttgaaactggggtccttttagacacagaactcccaaatgagattccaaaaaatgaatatattgagtactttgctccagattatacattgaaagttccaaatttgaacatggacaatttgaacagtaagacctatctcagttcaatcaaagtgcaagtgatggagagtttgcggtacatacagcatgctcctggtgttcaaatgcaagaggttcctcccgatttttatatcccggactttgatgaagatgaattggatcctgatgaacgtgttgaccagcacactcaagacaagcagattcaccgtgatgatgagtactatgaaggtgacaatgacaacgatcacgacgacggcacacgctaatctgcttcttctgaggccctggtgtaaatggaaacctgagattcttcactgttgtgtgtagttcagcagccttgagatgtaatagtttgtcagttgacagcagggatctaatttagcaggtcaaagtggtttagacttttataagggattctgacccctcctgaattacacattgtagtacaagtctgcatatttttaagcatgcaaaaattcaaatttctcagtggtattagtatctcaagaaaatacaaattcctcgctcagtaacattgctgatatgtggtgaatttgattatatctagaaccccaaggcctagtttgagtattctagtattgaccttaatctacatgtattgaactggattggat

SEQ ID NO: 36326 - DNA, 298 bp, Zea Mays
ggcgagttggttaggtggcctgagtagcacccctcaggtcctagcttcgactccctataggagcgaatttcaggttgtgataaaaaaaatcccctcgcctgtcccacgcaaaagcacaagtctaaggcccggtcacggtcgtttctcacatgggctacggtgccgttgtgtatggatggggcatgggttcgggggttttctcgacctgcgtgagattaagaagatcttcttcttaatataattcccgggggctatcttacccccgcaggtcaagtttttatggtgttgggtcatgggt

SEQ ID NO: 36327 - DNA, 885 bp, Zea Mays
atggcgacgatgtctgcagcgtctcatcgctgctgtgcttcttccttgagagctttaaccgtgttatttgtgttggcagctcctgtttcagatgtagaggggcgacatcatcgtcatgtctgtccttatttctcctgcggtggtttaagcaatatatcgtatccattccgtcggcaaggtgatccatctgggtgcggtgtccaatcgtgtgagctggtttgcacggatacagacgccacaattcgcatcggcagtggaacatacaaggtgcttagcatcaacttcacatattcttacttctgggttgttgatgccaacctggacatccagagcagttgcccccttccccggtgggattaccatgctgggaccagtggcaactcacgtcttgggaggattgagttcagccatgatttcacatatttttgttatcctaattctaagtgggctttctttgtgaattgttctcagccaatagagaacaacgatatatatgagccggtgtcttgcttgagcagttcttctttcatctacatggtaactgacttcttgtatgatggctatgttcctgctgatagtctgcagccttcatgcggttacctagccatgactcctttgggtagtccaggcatgccggtgcccaagaatacaagctatccagatgttgttaagttcatgaggaatggatttgcccttggatttactgtttcgattcctgaccccaacatcagagaatgtttcgctgagtttatgcgtactttccttaaggatccaagaagtagtacaggcatcaaggaactgattgtggacattcttagggtcgtcgacatattcttggcttgtgttatctatcaacttcaatcaactaataataatggtgtcaca

SEQ ID NO: 36328 - DNA, 2659 bp, Zea Mays
tttaaaaaaaccataataaagaatttatttcttaaaaataccataatgaagaaattttagatagagttaactcatgatatacatcatacgaacaccacaggaactagaactctagtagacaaactcatgacatccatacatagattcagacaccacaagtagacccaacatacgcaaagtttgtgaccacattccaccatcctacgacattacgaccatattgacaaacgccataattcttgtaacccaattttatttcacagaacgaccgaggcgaactgccgttcctcaaaccacgcaggtacgacgaccgcagaccgaggtctagccggagatctgaatggacttcacttcaggcttcttggcgtcctccttcggcacagtgactgtaagcacgccgttctccatggcggccgtgatctgctccgtcttggcgttctcgggcagtcggaacctgcgcaggaacctcccgctgctccgctccacgcggtgccaggtgtccgtcttctcctcctgctccttgttgcgctcgccgctgatctgaaggacgttgccgtcctcgacctccaccttgacctcctccttcttcagccccggtacgtcggccttgaacacgtgcgcctctggagtctccttccagtcgatccgcgcgccagcgaaggccgcggtctccgagctggtccgcgggaacgaggggaagagactgctgctgttgccggagccgaaggggaagccctcaaaggggtcccagaggtcgagggagaagggatcgaacacgttgctgcggcggatcagcgacatggtcaggttcggttctagtcttcttgtcaacgagaatctaatcgaagatttggggaagaggtttgagtgaattgattgagcttcggatcgctgcttgctgtctccctcaattcctagaaggggtctttttatagagggaaagcgagagagatgaagtggaggagaaagcagtttctggagagttctcacgtgttcgcggatagacccggatagacccgacgccgctgtattggagcgtggagaatgctagagagagctatccagtggcagtccctcttttagatcgtagtactgggctgggtttctagtaattttgttcatggaccaagacctgggcttatgctggaaaaataattcagctcaacatcaaacgaggcccattcctcagacctctctgtctcgtcttcctagttcggacttcggattaaggcgacccaccgagcacctcgatacggcggagtcgtgggaagccagggaggtgaggacgacgtggcgaagtcgtgaggacaagaaaattccaccgctgtggcagccatgtcagtgcaggagtacctggggaagcacctgctctcgcgcaagagcgaggaggccctgaatacggcggtccgcgccaaggcccctgacccggcgcttttcatcgtcggccacatgaggcgggaggcgcccaccgtgatcacgagggtgcgggcgcgccagatccttgacgggcgtagcgcaccggccgttgaggtcgagttgcacaccaacaaggccgtgcaccgagcatctacggctagcgtgggcgcgctcgagggcgccgccgccgacgcggccggggcctccgagaggcggaagttcctcgccaggggggtcgcctacgcggtgcgggtgatcaacgacaaggtgtcggaggcactcgttgggatggatccgcagcagcaggcgcagatcgaccaggccatcatggacttgacaaggcgcgccacaggctgagcttggagcaaatactatgctggcagtgtcaattgcagcttgcaaagctggtgctgctgaaaaagaggttccactctacaagcatatagcggatcttgttggcaaaagcgctacaactcttcctgtccctgcaaatacagtcattaatggtggaaagcatgctggaaatggtcttcccattcaagaaattatgattcttcttgttggtgctatgaacttcgaagaagcaatgcagatgggttcagagacctatcaccatctcaaggatattatcttggagaaatgtggctcagacagctgcaacattggagatcatggtgggtttgctccaaatatttccaggttgcatgggatgacttgttgatgtctgaccctgaacgcattaagcgggcagttagtgagtacacttgcaatgctcttgttctcaaggcaaatcaagtgggcactgtcactgaggcgatagaggttgtgaagcaggcaaatgatgcacattggggtgtgatggtgtcacataggtctggagatactgaggattctttcattgctgacctggctgttggtgctgcagccggacagatcaaagccagtgtcccatgccgtggagtctaactaaatacaatcagctgcttagaatagatcaatagaggaagaacttggaagtgaaggcgtctatgcaggggagaattgaaaatcttgacccgcctttgtatgtagccacttatcttttctttgttgtcttgtccaattgtgtgtgctcgtcctcaacaaggatatggaaatagggtggtgaaatgcaccatttatagcatgggttataaacatgagtacaaaacatggtttaagaactagaaatgagttacattctagtgaactggtcctttttcgt

SEQ ID NO: 36329 - DNA, 1749 bp, Zea Mays
cttttgttgacgtggtgacactagaaatagtgtgacgaaactatcatagagaatacccttagcatagaactcaaaaaaacatcttgcatgtattaaattatgtgttggtatgtcaaaagatgttagaaagaaaaaaaatagaaaaaatagatggtatggatttttatttgatgacctatttagaagcccactgattcagcaaccaggttacaccacacctacatgtttctttaccctaacggcctaacctttctgctctagcgaaggcacagccgccgctgtttcttcatcttccttgcagcgccggcgctccatcttactctccctcccttactagcgcttgacacgcaggtgacggcggcagcgacggcgctcagactcgggcttttagtgacggcatcagcggtttcccctcccgcctcttgccagtcccatcgcgccctcgcctcgggtcctctgcacaccgtccagtgaccttgcgtgatggactggataaagttttgcagcgattttaccgcaagtgatgggaaacagcatgcattgcttgataatcttaatcaggaattgtcccagaagtctgtactattgggtgatggttttaaactgtcagctgctgataatgatgtgtttgcaactgttcatccttttgtgatccgtgttagtgacagcgagttgcagaaatatccacatgtactgcggtggatggactacattcagaacactgttggtgctggtacaactttgcaaaagataaatgtgaccaagtctgactttgatccaccttctcatccaaggaaagctgataaaaaagatgctgaatcaagttcaaagaaagccatttccgtacagaagactgctgacaagtcaaatggaagtgctgactcaaagaaatccacaagagaggagaatcctactgctgcggggaacagcaaaacctctggggagaaaaagaaagtgcaagagaagtcagcaggaaaaacaacagagaaagctccagagaaaattgcagacaaggaatcagagtgcgatatcagtatcctgaatatacaggttggccttatccgtaaagcatggaagcatccatctgctgacagccttttagttgaggagatagatttgggagatggtaatgtgcgtcaagttgttagtggtcttgcaaagtattgcagcccagatgatcttactaatcggcatgttgtcttgatcacgaatgtgaagcctggaaagctgcgagatgtaatgtctgctggattggtcctttgtgcttcaactgaagatcatgctgctgtggagcctttgattcctccagaaggagccaagattggagaacgcatttcatttgctgggtttgatgggaagcctgaagatgttctaaatccaaagaaaaagcagctggacaagattaccccgcatcttcgtaccgacgagaatggaattgcaatgttcaaaggtgttccctttactacatcagctggcccatgtagatcttcgattcacaacggaaatgttaagtgagcagctcattagacatggttgcatagattgacatcaaacttatgcaggctgtctgtgtaccattttgtcatacatcatgttttgcccatatttagcgttgcaaaatttgaacagagttacactatctgtaagcaattttctactaatggttggcccagagtttgcttttgagaaaaaaaaataaaatagaaccaataccttgcttggttggagaattttgcatggggcagcatc

SEQ ID NO: 36330 - DNA, 373 bp, Zea Mays
cccgccgaagcagtgctccacagtgagggcacgtcgcagcagtgccgcggcatgggcatcctcacagtcctcctccggacggccataagatctgatttcttgccgacgccgctgggattgcctgttgcactgatgccgttcgtgacctagctcgggtggaggcggtcgtggtcgtagtgatttgggtgcttgcgtgcttgctgcttgggggaattttatcacaacttggagaagacccctcgccattttgcatttccaatcgtcggttagtttgtgtgcctaagcgcctgccctgttttttatgtgttgtttgttacaaaccaatttttcaccaatgttacgtgatgttcttccatgctatgcgatatatagt

SEQ ID NO: 36331 - DNA, 1055 bp, Zea Mays
ccgcgagtcagcgtgcggcagcgctccaatccgacttcatccctgctcggctggccgctacattgctgctgaaccctagccgccgcgccgctacctgctaccatcgctccacccgccgtccgccgcgacgccgcccatcgcgtcaccatcgtccggaaactgggcaataggggttgcggccgcccgttgccaccaggtcctctgcgcctgctgctacgggctgtccgcggcaccgcgcgtcacagtcgtcggaggcgcgttgggcggccgcctggttggccagccggcgactgcgtgtctctgtgctccgtggtccctttccttctgcgagaattgcagagcaattggggtacacagcacaggcacatgaatacaacacaacagtttgctctctgattcgatcgatccaactagcctccaagcatggtgttcggccggagcaaatcaacttcgtcgacgacgccatccgcgccctcaaaggcggcggctgcgtgctccgagctgcgcaccgcgtaccacgactgcttcaaccggtggtacgcggagaaattcgctaaggggcagtggcagagggacgactgcgccgaccactggcacaagtaccgcgcctgcctcgagtgacgtggtcactcaccctgtggcgggtgctctgtgcttggaggagcagcaggcagcagctaaggcgagtgctctgctatctggacttcttgtcgatccttgtaataactcttctgaagtttggtgagtgttccaattttttttatttgggtcttgtttcatgtttttttgcatattttaagtgtgaaaaactttgcgctgggtaatccaacttccagactacacgacatgttcaggtgctatgataactgtttttgcttgtcggatttcatgcctagctttgtcttgttttggagctcatgtacagacttgtgaaacaccaaattccgtaatgaatgtaatatattgctttttttcagactccgtatgtgatagtattgtcaatgacttctatcgggtaccataattagggatatctagattacatctctaaatgt

SEQ ID NO: 36332 - DNA, 4213 bp, Zea Mays
ccagaaataaaaaaaaagaagctgtgtgttggtgctgtcctatatgcatgtcccaatcccatctccatgtaatggtcttcttcccttcccatccatcgtccgtgagctccgagcgtgagggcgagaggcgtcgctagctggctctcacggccggcaaatctgcgatcaactgcaggtattagaaattgattggggggcaatacaaattgatgatagatgggaggaagaaggagaacaagagactgcctctgagtcattgatgtatgatcggttaggattgttagctgaagatgaacgtgaaactactgaaaggcaagagactgttacagttatcgtggataagcacacatgcacttctagtggtcgtcgaaaaacaacaacacccaccagctcatgggttgcttccctagcaatgccattccttacgaagaaaccacatatgggagctaaagaattgcaaaataccttgcaagagcagcacaattggtcttctggcaaccagcactggccatctcccaccagcaaattgacaccagaaattggcactgcttcatttccagtcgccagatacgtcgttgcttgctgttgccagtgctggtcttctggtgttgtccaaaatgaagctggccatctgcaaggaacccaggaactaccagaaactggccatctgcttgatttcagtcgccatctgcaaggaacccagaaactatagctaccagaagaacagcaaaatggcaccagaaattggcactgcttcatttccagtcgccagatacgtgtccaaatgaacagcaaattggcaccagaagaacagcttctttttacagttaccagcttctgtccaaatggccattacacatgtccaaatgacagaaatttgaatggacagaaaatagtaaactggaaacacaagttcaagttaccgagggccatattcagataaccttaatgaaaacagaatggacaacgttacaaaagctatcgagtgccattcaacactcgacagaatggacaacccaggttcgccggattcatcgccccattccgctctgggctaaggttccaccagcacaaccctatggcagaagcagtgctccttgctgtcactaagattggttccgttcttggagatgaacctgccaagaccattataaacaagctgtctgaaaaaattcaagctctgagggaactcccacggaaagtggatcacataaggatgaaactaataataatgagcaaagttatacagcagattggcacagtctaccttacagatgaacttgtgaagagttggattggggaggtccggaaggtggcttaccgtgttgaggatgtagtagacaaatactcataccatcttcttcaactggaggaagaagggtttctgaagaaatttttcgtcaagggtacccattatgccattgttttcagtgaaattgctgatgaggtagctgagatagaagaggagattcagcaagttattcagatgaaggatcagtggttgcagccatcccagcttgtccctcaccctgagcaactcgctgaaatcgaaagacagcgttcccaagacagtttcccagaatttgtcaaagatgaagatctagtaggaattgaagaaaatagaaaattgctgactggatggatttactcagaagagcaggctagcatggtgataacagtttctggtatgggtggactgggaaaatctacactggttacaaacatttatgaacgtgaaaaggtcaacttcccggtacatgcttggattgttgtgtcacaggtctacacagtcgagtctttgttgagaaagctactatggaagattgggcatatgcaaccaccagtgccaagagagattgacaaaatggatgtacatgacttgaaggaggaaataaagagaaagctccagaatagaaaatgcttgattgtgttggatgatgtttgggagcaagaagtatacttcaaaatacatgatgctttccagacactccatggaagccgcatcatcattacaacacgaaaggaccatgttggtgctattgcttcctttgaccaccatcttgagctccaaccgttgtgtgggcctgatgcatttgaacttttctgtagaagggcttttcacaacaagaaggaccacaaatgccccgaggagcttaaggaaattgctggtgaaatagtgaaaaggtgccaaggcctgccactagcaattgttacagtcggcagcttgctgtcatctagaccacaaataaacatttggaatcaaacatacaaccagcttcggagtgagttgtcaaccaatgatcatgtccgagcaatcttaaatctaagctaccatgatctatctggagatctcagaaactgcttcttgtattgcagcttgtttcctgaagactaccccatgtcacgcgaagcccttgtgcggctctgggtcgcagaaggttttgttctgagtaaagaaaagaatacaccagaggaggtggctgagggaaatctcatggaattgatccaccgtaatatgcttgaagttgtagactatgatgagcttggcagggttagcacttgcaagatgcatgatatcatgagggacctggcactttgtgttgccaaagaagagaagtttggttctgcaaacgattatggtgaactgatacaggtggaccagaaggttcgtcgcttgtcgttatgtgggtggaatgttaaggcagcagctaagtttaaatttccatgtctccgtactcttgtggctcagggaataatttcattctctcctgacatggtatcctcaattatgtctcaatcaaattatttgacagttcttgagctgcaagattctgagatcactgaggtgccagcatttataggaaatctctttaacctacggtatattgggttaaggcgcaccaaagtcaagtcactcccagagtctattgagaagctcctcaacctccacactctggatatcaaacaaactcaaatagagaaactaccacgagggattgttaaggtcaagaagctaaggcaccttttagctgacaggtttgctgatgagaagcagacggagttcagatatttcatcggagtggaagcacctaaaggtctgttgaacctggaagaactacagactcttgaaacagtgcaagcgagcaaagacttgcctgaacagctgaagaaactgatgcaactcagaagcttatggatcgacaatgtaagcggtgcagattgtgataaccttttcgcgactctttcaaccatgccacttctttccagcctcctaatctccgcaagagatgtgaatgagacactttgcctccaagcccttgctccggaatttccaaagctccacaggctaattgtaaggggccgctgggctgccgagacactggaatatccaatattttgcaaccatgggaaacatctaaaatatttagcgcttagctggtgtcagcttggtgaagatccattgggggtccttgctccgcacgtgccgaacctcacctatttgagcatgaacagggtcagtagtgcaagcactttggttctttctgcagggtgctttcctcacctgaaaacactcgtcctgaagaaaatgcctaacgtcgagcagctggagattggacatggtgctcttccatgcatccaaggtctgtacatcatgtccctagcgcagctggataaggtccctcaaggcatcgaatcgcttctctccctcaagaagctttggcttctgtacctgcacgcggagtttagaacgcagtggctaacgaacgggatgcaccagaagatgcagcatgttcctgagattcgtgtctaggacacaggaaagccagatggttatttctgcagtactatgctggtatatatggtgtgtctgtgaaaaaactattttttgtaccttttcttcccttaagtcctgagttgttgtatgtggacttcacttgcagacacaaacgctcgctttgggtagctcgttagacccatatatatacgtgttgtgttggttcagttgctttaagttacttgtttgttcgaggcatttgccttctgtattgaacttcatgcaaatgatgttatgatcaaacttgtatgtccatgtattttaaatttttttacatgcctcatagaaagtatggattcccatatcatcatttgtctgatcggctaaaaacaatattgtatatgagaattggagaaaatcatattggtgatacattag

SEQ ID NO: 36333 - DNA, 1312 bp, Zea Mays
tgatgtttagcttgaagcgccggccaacggctgcatgccgcacctgctcgccaatagctgcagccggccagtaggtgatgccgcccgcggtggctaatcgggtgccagcagcttcatgttaaatcaaccagccgccgctcccttcttccatttcctggccgccaagcttccaacgtacgcagcctgctcgtcttccacctccggccatcttcctccctctaccgagcttccctccccacagcagcagaccaccggcgctccctgttcttcttccccgtgggcgcccccccttcatccaggcagcagacgacacacgcacgccaggaacgcccgagctctccatctctaatccagcgcgcagggcatttctcagggtccgagctcgagcaggtccggcagccctccccaaccaagcttctcccatggcgctgctacctccaggatggagctcgacaccccaaagaaattccccctgggcgctggaggcgccaagctcgcgccggtgagcacctcccatggcgtggccatctccctgctgttgccagggccgacgagtccaagtcttgtctctagccttccttgccgactatggctgcccagcagctcgtcacctccctctctagtgcatgccccggctgtcatttccccacgccgagcgtgccctctcgccatcctttgccttgctgctcgcagctgagtttcctactcgtcgcagctcgcgcaccacctgttcgacgttatgcacagtagctgcatgtctcagattatcgcagcagcgagctccttcgccggcgcctgtccacaacagcagtcccgacgcgacactgtgacccttggtgaggcaccttgctgtcctagccgctggatcgagctttgtcccagcccgcagcttgctatcgtcgagtattgggcttgccgtcgatgtcgtgcttgtcatgcgcagcaagaaccacagcgccacgacttgttccagctcgacgagagcagccacatcgtcgtcgacccgtgcccttgtcgtcatgcctcgcgcattccatgctcgacgaaagccccaagctgtggacagcatgcggacatgcgcgacacgagtcggccaggttgttcgctttagaaaaattgtgatttcgtttttatttatgattcagtcgatggcgtgaatatgtgcgtgaaaatataattgtatgaatggacgtgggtagagaaagaagacgaagtacaaagaaactcgtatgtttttatattttgataaaaaaatatgcaatgcgttgtttgatgcgaaaaactaagttacaaaatgcggattatgttttgg

SEQ ID NO: 36334 - DNA, 2856 bp, Zea Mays
gcccacatgtcagcagctcgtgggtggccacccgtcctgtagcatggccaccgctggccacgcctcactgcgtagttgacacacgcacgcccgcgcccacgctcctaaataaagaaggcaactgcggaatcgctcgcgacgcaggaggtggggtgagttcgcgggtcgagcggaggagaagcttctggtggtggtggctctcgtcgtcaagcaggaggggagagaggagccggcggcggaggtgaatggcggtggagtaccactgctgctcggcggcctttttcgagcacatcgtcatcatcatcgtgctcgtgctcttcgcgggcctcatgtcgggcctcaccctgggcctcatgtcccttagcctcgtcgatctcgaggtcctcgccaagtccggcaccgagcaggatcgcaagcacgcagctaagattttacctgttgtgaagaaccagcaccttctgctatgcactcttctaatctgcaatgcggctgcaatggaggctttgcccatattccttgatagcttggtgacagcttggggtgctattttaatatcagtgacactgattctgctttttggtgagatcttaccacagtccatctgctcacattatgggctggctattggtgcctcagttgctccattagtccgtgtgcttgtttgggtctgctttcctattgcctatcctataagcaagctattggactatgtgctgggtcatggtcagacagctctcttccgtagagctgaactaaaaacacttgtcactctgcacgggaatgaggctggcaaaggtggagaattaacccatgatgaaactaccataatagcaggagctcttgaactgactgaaaagaaagctaaagatgctatgacacccttgtgtcaaacatttgcaattgatataaatgcaaaacttgacaggaatctaatgcaagaggtacttgagaaagggcatagcagagttcctgtgtattatgaaaagaaaacgaatattattggattgatattggtaatgttctgctattaaaacatgctacgtatttttcagaaaagtttgaaaatttcttggacttcccatctatccttcggttgactgtccttattgaagaaagattttgcgtagaataggattctccatagcggtaaggattgccaattactagccagataaaacattcaaattaagttcagaagagattcaggtaaatggcaggggaactatgcccaatagggttgccattgtcaatccttgctgagaagtaagtttacagcaaacgttcatgtatgtactgttggtttggaatttttttgcacctatatgttcaatcatagaaatttgcggaagattgatttattaagatggacacatataacatactttattattttgttaaggaagaattacttcaaacttacctgctgttcacatgctactcctagatatcatgctgaaggcatcatgtagctgtgattttgtaaaggctgaaacacgtgaatgtgtaaatgaatttaatatgaagcaacactatcaataatggcatgtgtgacattggtgagattgcttagttttttgtattatcttttatggtcatctaatgcaatataaaaatgtggggcatgttgcaagtgttaatattagtggctatgttgttgctttgagtatataattttcttttttggtaacctttacgaataactgtattgcatttatttttgtggattttcaggtgaagaatttattatcagttagtgctgatgatgaggttcctataaaaagtgtaactatccgcaaaattcctcgtgttctagaagaaatgcccctctatgacatcctaaacgaatttcagaaaggtcacagccacatggctgtagtcataaggaaaaacaatccaagttaccaaccagctgaacaagctgctaatgatggtggaacttttgaggtgtccattgctattgatgataagaacaacgaaaaggtcgtgaaaaaccttccgccaccactgcaaagatggaagagctaccctaacactcagaacacatcaaatagaggaaataggcctaaaaaatggtccaaagatcaagcagacgttctgcaggtccataaagagcccttgcccacactgagcgaagatgaagaggctgttggtatcataaccatggaggatgtcatagaggagctcctgcaggaggagatatacgacgagacagacgtacatgaggaacaatgacgctggccttgcgccctccctccagctgttagaaagtgcgcttttatgcaaaacttatgtatagataggcagatacactgagagatattttagccgtagcccgtagccgttcattgtagtactataggtggctggctgtctcgagtattggtaaagactgttcggagtgcgtcgttcgttctcgtccagaacagctgggttctgggcatccggggaagaaacggaggcgttgacgcgtgtgtgtaggttcagaagaaaccccaataagataattgcgttgttatatgatgccgctcgcattattaggacgaatctgttgacatatagtcttataaattaaaaacaatgttttgaaaacatagtagagttgaaatttaaaataggagatgggatggaagctgctgaagatagacttagtgccaacttttaccgagatcgtggcacgcagtctggtgtttgttgtatgtagtttggaggtgattgagacatatatggtgtgtttggtttgtagagtcactctatgcttaatgaggtgatgcattataagtttatttaattaatttttgtgtaatcaacccattctttatgtatatactaattattagtttatgagaaatgaggtgg

SEQ ID NO: 36335 - DNA, 852 bp, Zea Mays
aaaacccgatagagatacagaagaaaagagagaaaaaaactaagctcgcctgatcctttttaagagacgggacccctcaccactctgtaggtcccgaaggcccgaaccttaggatcgccggcgaaccaccggagctgagccccacaaacatcactgtaccacacggtttggtggtgtggcgactggcgacgaagcgcacaagaacaaaacaagagggcgagaaacatagggagaaaggaggagaggaacggagagctggaaaaggcaggaaagacccggcttttgaccccaagtaccctgttgagggcaatggcggccacctccgaggaggcaatcaagcagttctcggcgctcatggagcagctagaggagccgctaaagagcacattccagaatgtgcatcaaggaaatctgagagggactttgatgcgttttctgaaggctagagaatggagtgtgcctaaagcttataaaatgctaatggattgcttaaactggagagtacagaatgagattgacatcgtgttagctaaacccattctgccatctgatatatatagagttattcgggacacgttacttgttggattgacagggtactccaagcagggacaacctgtttatgcatttggtgtgggtcttagtactttcgacaaggcctcggtgaactactatgtgcaatcacacatacagatgaatgaatatcgagatcgtgttgtcctgccggctgcatcaaagaagtttgggagacagattaatacctgcttgaaggttatggatatgactggcctcaagctgtctgcactgagccaaataaaggaagatacgttgcagtaacacttcaatacttct

SEQ ID NO: 36336 - DNA, 3503 bp, Zea Mays
cgccaccaccaccacctggtccacgtcgccggcggcaatgtgggcgcaactggccgtcgcgctgttcgtggcgttagccgtggctcccccggcccgtggctccgacgtgccttcgttcccgctgtcgcaggcgcagtccccatccaactcctcgtccccgtccaacgccgcctcgcggccgtgccacctggacctctcggccgagctcttcggtggggtagccgcggcgtgcggcgccggcggggggccgggctcgctggaccgcggccgctgctgcccggtcctggcggcctggctcttcgcggcgcacgcgcgcaccgcgctgtccgtgcccccggcgcctccgccctcggcgctagtgggggacgagggaatggggcccgacggcgacgacgacgggcccatggtgccgtacgacaaccagaggtgtgtcgacacgctgggcgcagcgctggagcggcgcggggtggcgctgccccggcccaacgcgacgtgcgacacggtgctctgcttctgcggcatccggctccaccagatcggctcgctccgctgccccgccgcgttcgccgtcaaaactggcgccgcggccaggaacgccacgcccaccgccgcggtgaaggccctggagaagagctgccgcaacgcctcctacgccggctgctcgcgatgcgtgcagtccctgcaaaaggtaaacctttcttgctagctttctctcctaatgccattgcttttgctcatcttttccgttcttgtctcttttggcttgatctcgcattccctatataactaatgtttgaaatgttacaccacgcatatcttgccttcttggattccaaaccactgatcgatttctacccctgcttatatatagacgaaaaccttcaacaattttgtcagttatacgtaccactcctgcagagcaatagtgcggcgcttcaagcgacgccttcactccttctttgcttgtttttttatctagcaaaaggtggccatttcgatggtatcccctttcccacaaagggtttccactgcgctttctaaccgcatcattgtttcaactttcgaactgatctgcttgttcttgagcttaccatcaccactaatcatttcctacttgattgcctttctctctgaaagcaaccatgggaaagggcaatcccgccaggtaaccaccggataggaccattccttgaaagcttgaacacgcatttgtggggacaaacctccttctttcgagcaagggcaaaggcggggtattcgccttcgtattcgccttcggcattgccccccgcctttggctccgggaagctgatcatggagggctccctgggcttcttcgaaaaaagagaagctgacagtgtccagatgcagaacgtgctgtccatcaggaatcctaaacctcctgatagagaagcctgcagcagcgtcagtcccggtgctgcgacagctacttgtggctcaaggagaagacgatctttttaaagattttcatgttctttagcttttatcctctactaggtaaatacccaggagaacaagtacttggcattaacctgagggtttatcttgtcaagctgcaaaacgatctcacccaagaacttgtacccagaaccatctttcgcgtggaagttcacaggaatctctgaagtagcttgaagagcaaacaacttgcttacaacctatcagagtaaaacaaagaaacaacagaaatccaagagggcatcatcacgaacttggcctggattttgggataatgctgctaatgcagcaaactgctctgtcatgttagtcgcagacttgtactcatgcagtgcaagctcaacgaaatctggctcattcaatgacgcaaggatgcttagtgggccaactgtagggatctttccttctacatacaacatgtgggactcgctttttggtaagtcaattatctgttaattcttctatttctgaatcctaaagaaaaatggtccctaatagcttatggtttacttgaaaagttcatgaatactccggtaacagaattcaaggtgatattacagaacaatcatatctaatcgctctttcgcatgctctatatgtattcttttagggagggcaaccatctttagagtagcaattagctgaacctgcaaaaaaaatctttttgttagccctgatttgggaggatttccccaaactagccaataatattatattggtaaaattaaaataaagtggacaaggaaaggcgccttgtcaggcaaagagaagagctgaagataggattagcttctatctatattgcagagtttgctggtaccaggaaacacaaaagaaatacaatactcctatctatcacctgtctagatctccttctagaaagaaaccataggatgaatggtgggaccaccagcatagcatgagtatacaatgaaagcagatcataaccaccagcattatagctgcttttaaaaagtaagtgttactctgaaagtttctccttttcaaggtcacaaatgattggatttttttggttatataccatttgtttgcttgcattatagttgcttttttgtggtttgaatctaacaggattttcctacttttgttgtattgtttgctttttttagaaaaaaacacagtaaaaatacgggcctctagtttataaacactcggcatgtagactagcgagatagtatatagattaaacaacagttaataaatgatattaggaagaagcttgtgtagcatcggtggccctatggggcatgctatgtcaacaatgcatcagtggccttgtcagttttattttgaccccctcaaggccttgcaaccatttcccaagccacagtatccaagagatggcagtgtcactcacagaagcagctgttcttagtatgtgatttaggaattcaatgaattatatctatgtatggttacacaagtcctatgctgacaatctgtaacatgtgtatgcttgtatttgaacctgaaacctgtgtaggctggtgtgagatctgtttgtggtatttttggtaacctgaaacctattttctatgttgtgtatgttgttttttggtaacctgaaacctgttgtgtatgttgtgcgtactactttgtagaaacctgaaatctgttttgtatacaacagcttctatgctggtacgagattgaaaccatagaaggtgttgttttgtatgctgcttgcatgcccaaggtcccacaaagcttctatggttcagactaaagaacctacagttttgtatggcatatggttccacaaggttacaaagaagttgatgttttgtatgtttaacctgaaacctgtgtttgcacaaggttccgacagcatcttccatggttcagacaacaacttctgcatcaaatagttttgttcagatttaacatagatttattcaaactaaaaacttttttcaacacatattctgtgttgtcctaatatggcgccggtaagggcgcctcgagttctagtgtattgaaaggcctgtggaccgaagatagat

SEQ ID NO: 36337 - DNA, 1354 bp, Zea Mays
aatgctttgggctgatctgcaaacttgcggtgaaattccggcttcggcggtttggccagcctccttccgcggggtggatttggatagcgcggcgcagagaaaaatggcggcttcggctctccacctccaccgccggcgggtgtgaagcttcagcagaggcagctgcgctcgcggcagggtggcctatctcgaagacttttgaaagttgtgtcctattacagtctcacaactccaccatataaactggttgatgctctggaaccttacatgagcaagaggacagttgaacttcactggggtaagcaccatcaagattacgtggatggcttgaataagcagctggctaccagccctctgtatggatatacgctggaggatctgataaaagaagcctacaacaatggcaatccattaccagaatataacaatgcagcacaggtctggaaccatcacttcttctgggaatcgatgcaaccagaaggtggtggcttacctgagggaggtgtgctgcagcagattgaaaaggattttggctcgtttactaattttagggaagagtttatccgctcagccttacaactattggggtctggttgggtttggcttgtcttgaagagaaatgagacaaagctttcagtggttcatacacaaaatgctatcttcccacttgcttttggtgatatcccaatcatcaacctagacttatgcatgcttactacttagactacaaggatgataggctaacatatgttacaaactttatgggccatctcatctcttggcatactatcactctacgcatgatgcgtgcagagtcttttgtgaaccttggtgagcctaatattccggtggcatgagctacagatacaccctagttatcatcatgaggcatcctttggatacgtcgggtcaaatcctgctggaggaaccagagacatgcttatcactcgaatgccatacacgcaaagataagctgcatgcttgattttcaccactgcccttggatattgctacagggaaaccactagtcagcatccaatctgaagatgtgcagcaatgcagctttagaagctctgggagctggtaggtagcgatccaacttgggcttcgaagccatggcgctttcgctagatggctatgcccgtggcacgatctggagcagcagaccagacgctactggtgacagatgattcagacatgaaaagattaaattgtgcccggccctatgacactcgaacagggttccccaggaccctgaattctgctgtcatcacagacaaaacgaaggacacgaagaatagattgtgtcggatcggtagcagcagtgacaggtttgccacaaccagactaaaag

SEQ ID NO: 36338 - DNA, 3295 bp, Zea Mays
atggctacaggcgatgcgcgtgattcaagccccagcccagcaaccatttcagcagaacgctccaccgcttctccgaaaaggcaaaaaccccacagctcgagcgccgcgccggaagcctgcgcccccgaaaccacgagcgtaaaccctcctagtccggcggtgatggccggcgtcggtggcagcggcggtggaggtggggacgacgcggagatgggcggttggacggggcttctccactcctccacgaagctcctcgagcaggcggcgccaaccccgcacttccctccccttcagaggaatctggaccagctcgaggcgctctccaccaagctcaaggccaagaccatccgctctgaggctccgtcacagtcgctctccgccaccagattgttagcacgcgaggggatcaatgctgagcagctcgccagggacctcaagtcattcgaactcaagactacctttgaggatgtttttccatctgaagcaactactgttgaggagtacttgcagcagcttcatgaaatggccattgtttcatccatccaagaagctcagaaggacaatttgaagagttttaacaactatatgatgcaagttcttgaggatgactggcagaaagagaagagagacttcttgcagagtctaagccggctttctacattacccaagagaaacactaatctctcgaccagtgggttgggtcgccctgcttcaatgccaccatcaacttccagtcttcatgctccatcaggcctgccttctgctgaagtcatgcctataccgaacaagactattattgaaaaaaaatcttcagtttatgctggggttgtgagggacctcaatgattctagagggcgcagtctaccttttaatcctgctacggcttttagggctgcttatgaatccttgtctattgatgccattggcacaaagtcagtgagtatgcagaaagtgtggcatctaattcaggcattggttggggaagggttgactcatcgaaatgtttcaagaaaaatgtcactagtggtaggtgcaaggcaccatcttgagtggggtcatgaaaagtacatacttgagaccatcaacagccatccagctcttgctgcccttggtggatctgttggcaatcttcagaagatccgagcatttcttcgggtaaggctgcgggatcaaggtgtgctagactttgacgcaaccgatctacgcagacagcctccagtggatacaacctggcagcagatttacttctgcttgagaaccggatactatgatgaagcaagacaagttgcccaatcatctcgtactgcatataacttcgctcccctgcttgcagattggatttctactaatggtgctgtatcaccagagactgctctggcagcttctgaggaatgtgataaaatgctcagaatgggtgatcggccagggcgtcctggctacgacaggaagaagttactgctttatgccataatttgtggttgtcggcggcaaattgaaagaatgctaaaagacctaccaacactttttaacactatagaggatttcttgtggtttaagctgtcagctctgcgggaatacaccaatgcatcttcttctaatcttatgaatgaaggcttggtgccttatacgctggatgacctgcaaagttacttgaataaatttgagccatcatattatacaaagaatggaaaagatcccctagtctatccctacattctgttcttaagcatccaattactcccagcaattctttatttgtctaaagaagttggagaggatggataccatgttgatgctgtgcatatttcaattgctttagctgaccatagtgttctccctgacggtattgggtcaggccagaaaattggcgtcatggatgcctgtgcagaggctgcaagcataatacgacagtatggctctatatacttgcgtaatggtaacattgatctagccttggagtattatgcacaagctgctgctgccatgggtggaggtgaggcatcgtggattggtgaagggcatgctgataagcagcgacaacgaagtttgatgttgaagcaactactgatggagatattgctaagggatggtggtattcaacttttgcttggtccaagtggaatgggagaagaaggagagctgaaaaagtatatgatggattggagaagtaggcagcaattcttacttgaagctgcccatcggtgtcaagaggctgggctctatgacaaagctgtggaaattcacaaaagagtaggagcctttgccatggctcttcagacaataaacaagtgcttgtctgatgcagtctgtgccatggcacggagtatgttagatggcgagagtcgtgctgctgccctaattcattctggcaatgaaattttggagacagctagatactcttctgaagccagcattcaagagaaggacctcatttctgagcaacaaactgtgctgagacagcttgaagctattctccatatttataggctagctcgagctgggcaaactgtagatgctttgagggaaaccatcaggctacccttccttcatttggaccccaaggctccaaatgtgactgttgacattttcaggaacttgtcaccccatgttcaagcttgcgtgccagatctcctgaaggttgctctaaattgcattgacaatgttagagatactgatgggaccttgcgcgctgtcaaatcaaagatcgcaaaccttgtagcaagcaacatgagccggaattggccacaggatttgtatcagaaggtggcacagtgcatatgaagtggcttgtgttttgagttgatcaggaatctggactaatctgtatcagaactctgaagctttcaaacaatatggttgtcatcccatcctgtgtttaatgtgtgtcaaataatccttaggccttattcggttgccgatcaatcaaggggggttgaaggggcttgaggcggaatctctagcaagtcaaaatctttcctaatcccctctaacctcatagaatggggaataaccgaatgaagccttaagatcttaaggggcatattggtccagtgcacatgcgtcgacaaggacctttgccagctgttggcaacttggcatctccgcctgattgcaggagtgcacggagccagataaacatttgtagcctgtatgtaagttactgttggaaatgtctttgaagacttgtattgtacgagagcatcactgtttgttacggaacatcagcattacttgaggaatcgcgaactccgtatgtttattcgaatggtaaagtctcgtggtacagtttaatgga

SEQ ID NO: 36339 - DNA, 6305 bp, Zea Mays
cctggctgcctccctcttaaaacgaagatgccttccccagctcccctctcttgcccaccttgcttcctcgccaccaccactttccccaccgctgcggcactagtcagtcagcaccagcaccttcgtcaccctgcgcttgtgcgcggcaacaccaacgcgcgccgtcgggatcggcggcaccgctggaaatggcgagcgccggcgccggcccgtcggggccggtgcggtccatatcccaaacggggcggtcgcggacgatggggcgtatgcccacgcgcgccttcaccatacgtccggacggatcctccggtgaggacggcgtcgatatcgtggaggaggagctcgtgccctcgtcgctcgcgcccattgtacccatcctccgcgccgccaacgagatcgaggaggagaacccgcgcgtcgcctacctatgtcgctttactgctttcgagaaggctcatcatatggaccaaaactcaagtggacgaggtgttcggcaattcaaaacatacctcttgcataggcttgaaaaggatgaacatgagacaaagcgcagtcttgctacaactgatgcaagggagatacagaagttctatgcgcagtactgcagaaaatatctagaacaagatcatgataagaggaaaccggaagagatggctagatactatcagattgcgtccgtcctatatgatgttatgaaaactgttacacctggcaaaaatgagtatgatgattatgctaaagatattgaaaacgaaaaagcatccttttcacagtacaatattctaccccttaatatttctgctcgagaacaaccaataatgaaaattcctgagatcaaagcagcagtgaagctccttgagcagataaatggccttccaatgccaaggattgaattaccacaaagctctgacagaaaaacagtgtccgacaaaatggacagacctgtggttaaggatttgcttgattggcttcggcaaacatttggatttcagaaagacagtgttgcgaatcaaagggagcacttgattttgctccttgcaaacattgacatgagacaacagggtactgccgatcatagtgagagacatgttcacatgatacgtagtagcacagtgatatatttgaggaacaaaattttccataattataactcctggtgtcgatacttacatctggagtcaaacattaggatccaaagggatgcccccacacaacagccagagcttctgtacataggactgtatttactgatatggggtgaagcttccaatgttcgcttcatgcctgaatgtctttgctacatctttcaccatatggcaagagatttacatgacataatatctgatacaagccaaggatcatttgagccaccgttccagggagaggggagtgacgatgcatttctgcagctagtgatccaacccatctatagtgttatgcagaaggaagctgcaaggagcaaacgtggtaaggtgagccactcattgtggagaaactacgacgacttgaatgaatatttttggtcaaaaaaatgcttcaaaaaacttggatggccgatggatccaacagctgacttttttgcagaacctaccagagccaagaatgaaactgagcaacatggtcacgtgattaggagaagaagggcatcaaaaacaaattttgttgaagttcgtacatttttgcatatgttcagaagttttgatcgtatgtgggccttctttatattggggttccaggccatggtaatcattgcctggagcccttctgggtcactttcttctatatttgaaccaaatgttttcaaaaatgtattgacaatctttataacagcggcatttctgaacttccttcaagccacgctagagttaattctcaactggaaagcttggaagagcctggagtgctcacaaaggataagatatatcctaaaatttgctgtagctgttgcctggttgataattcttcctactacgtactcaagctctattcaaaatcccacaggccttgtgaagtttctcagcaattggattcaaaatttgcagaatgaatcaatttataattatgctgttgccctttacatgttaccaaacatattcagtgccctgtttttcatgtttctaccaattcgacgggccttagagcgctcaaattctcgcattattaggttccttttatggtggacacagccaaagttatatgttgctcgaggcatgtatgaagacacttgctcacttcttaagtatactacgttctggatcctgctgcttatatgcaagctcgccttcagttattatgttgagattgctcctttagttgaacctaccaggataatcatgtcactggaaaggccgccttatgagtggcatgagttcttcccaaacttgcggcataatttaggtgttgtggttactgtatgggctccaattgtcatggtgtacttcatggacacacaaatatggtatgccattttctccacaatatgtggtggagtctatggtgcattcagccgcttgggtgagatacgaacccttgggatgttgagatcaagatttgaggcaattccaagagcatttggcaaaaaacttgtacctgatcatggcagtcacttgaaaggagatgaggaggacaaaaacccacccttcgataagtttgctgacatatggaatgcatttattaattcattgcgagaagaggacttactaaacaatagggagaaagatctattggttgttccttcatctggtggtcaaacaagtgtttttcagtggcctcctttccttcttgccagtaagattccaattgcacttgacatggcaaagagtgtcaagaaaaaagatgatgaacttatgaagaggataaagcaggatccttatactgagtatgctgtaatagaatgctacgatacattattagatatcctttacagcattattgttgtacaaagtgataagaaagttgttgatagaatacgtgaaagcatcaaagatagcatccaccggaaatcactcgtgaaagaattccgattggatgaacttcctcaactaagtgctaagtttgataagttgctaaatctactgaaggaatatgatgagaacgatcctgtaaatagaaacacacatattgccaatctgttgcaggatataatggaaatcatcacacaggatattatgaaaaatggaaaaggtatcttgaaggacgagggccaaaaacaacaactgtttgcaaaattaaatctggattcattgaagcatgttgcttggagggagaagtgcattaggcttcaattgttgttgacaacaaaggaatctgccatatatgtaccaacgaacttggaagctcggcgtaggatcaccttttttgcaaactcactttttatgagaatgccaagggcaccacctgtccgtagcatgatgtccttcagtgttttaactccatacttcaaagaggaggtgctcttttcaccagaagatcttcataggaaaaatgaggatggtatatcaatactgttctacctacggaaaatatatccagatgaatttaggaacttccttcagcggatagattttgaagtgaaggatgaagaagaacttaaagataagatggatgagatctgtaattgggcgtcttataggggtcaaactctcaccagaacagtaagaggaatgatgtactacagaaaggcacttgaaatccaatgccttcaagatatgacagatcctgctaaagttgaccgagacagatcaataggatcctaccaagagttgcaatatgatattgaaatggcacaagctattgctgatatcaaattcacttatgttgtctcatgtcaagtttatggcatgcaaaagaaatcaaaggatttaaatgaaaaaaggcgctatcagaatatcctcaatctcatgataatgaacccatcactacgagttgctttcattgaggagatcgaaggtctaaccagaaatggagcaactgagaagacatattgttccgttcttgtcaaaggtggtgaaaagtatgatgaggaaatttaccgcataaagcttcctggcaatccaacagatattggagagggaaaacctgaaaaccaaaatcatgccataatcttcaccaggggagaagcacttcaggccattgatatgaatcaggataattatattgaggaggcgtttaaaatgagaaatgtgctggaggagtttgagagtagaaagtatgggaagagcaaacccactatattaggcttacgtgagcacatttttactggaagtgtttcgtcgctggcttggtttatgtccaatcaagagaccagttttgttactattgggcaaagagttctggcaaatcctctcaaggttcggttccattatggccacccagatatttttgatagactcttccatatcaccagaggaggcataagtaaagcttcaaagactataaatctgagtgaagatatattttcaggttttaattcaaccatgagaggaggaaatgttacacatcacgaatacatgcaagttggtaaggggcgtgatgtggggatgaatcagatttctagcttcgaagctaaggtggccaacgatttgacttctacagaatgttatctttctattttactacagttgggttctattttagtagcatggttactgtacttactgtctatgtgtttttatatgggaggctttatctggttatgagtggtctggaaaagtctattatgctggatccacgaaatcagcagaatgtcaaggctctcgaaaatgcactggcttcacagtctattttccagctaggtctgctgcttgtcctccctatggtcatggaagttggcttagagaaagggttccgcacagcattaggagagtttgtaatcatgcagcttcagttggcatctgtgttcttcacattccagcttggcaccaaaacccactactatgggagaacaatactccatggtggtgcaaaatacagaccaacaggtcgtggattcgttgtgtaccatgcaaagtttgctgaaaattaccgtatgtactcccgtagccactttgttaaaggactggaactcttgatacttttggttgtatatctagtctatggaagttcctatcgcagctcaaacatatacctatttgtcacctgctccatatggttccttgttgcttcatggctcttcgcgccatttatcttcaatccatcatgctttgaatggcagaagactgttgaggactggacagattggaggaagtggatggataacagagggggaattggcatgtctgtggaacaaagctgggaagcctggtgggtaactgagcaagatcacctcaggaagactagcatccgagcttttgtgttggaaatcatcctttcacttcgatttttgatctaccagtatggcattgtctaccatctgaacatagcagatcaccacaaaagcattatggtatatggagtatcatgggtggttatgctccttgttcttgtagtgctgaagatggtttcaatagggcggcagaaatttggaacagacctacagcttatgttccgcattctcaagggccttctcttccttggttttgtctctgtgatggcagtcctatttgtcgtcttacaccttactatttctgatgtcttcgctagtatccttggatacttgcctactggatggtgtcttcttctgaaaaagaaatgctctagtgtgctgaggctactgcagattggacaagcatgctcaccattgattaggaggaccctgctgtgggactccatcatggagctcggaaggtcatacgagaatataatgggtctcgtcctcttcctgccaattggtttcctgtcgtggttccccttcgtctctgaattccagacacggctgctgtttaaccaggcatttagccggggcctccagatctcaaggatccttgctggtcagaaggatgttagcgagttcgagttcaagtgaccaatttcatccctcttgcaagcaaaccaaactcactttcatgtatttgtttacgatgatcgattttgggtgtctgtactctagtatattttcatcacgtttactactataatactgtctgtacttgagaatgttttgcctctgtaaactgacatgtagaatttctgtaatatatttatggaatttgataacttccatccatgcactgaacgctttgaatggaccattattactaaaggggtaacaaatttatcattgtaaggtcaaacatgtttgggctggaagttttgctattcaatactccaaacatgtttgtaagtgttagatactcatttaaggtttg

SEQ ID NO: 36340 - DNA, 835 bp, Zea Mays
ctcacatgtggcaacctaggatatttctccatgcccctacccagccattcccctaaaaatctccagccgtctgtcttgctgctcgttcctgcagctcagacgtcgcctcccttctaccccttgctcctcagccaggcttgttagccgagcccctccaactagcgtgctagacctttgacgccgtttccccgtcgtccaagctccaccatgcccacacggcaccgttcccctgcgcgctcgctggacgccgtcgcacatgctccctgctcggcctccccggcgtgctgctccctcgccttggtgcccctgcgagctccttctctctggcccggtttccagctcgggcctcgctagatgccgatgccgcttttctgacctcgtctcgatactcaatcgctgcagcacgccatgccgtgtgtgctgcactgtcatcattcgctatcctcatttttgctaatttttctcgtcgtttctcgtctacaaccttgtcagctcctgcgtgtcgtgcgcgtcttgtgttcgggtcgagccccaggattttgaggaaaaggaagctccagtgcattggccggtgaaatgaataaaatggattttgaagaaaaggaagctccaatgcatcagccggtgaaatgaataaaatggtggtaattatggtccttgtgaaatctgagatcaacttagtcgcgggtctcgctgccgcagaacgttgtcgcagaccgcttcaccgtcgaccctttgaactgcgtcatccccggttaatctcgcgcgcgtaccgacagcttcgaagtgtccccgctgccgaattaaacacgtgtctacgttcaccgtggatcag

SEQ ID NO: 36341 - DNA, 1679 bp, Zea Mays
gactgacagcccttgacactggtcctggtcccagccctccctcgcactcctatggcgatccctccccggatcacggcggccggtggcggcggtcgcaagacgagggtgccgccgctcccaccggcgagaactctcctgacagcctttgccgcggcggtggcgctggctatcctttgcttcctctcctcgtcccccaccgccacgctgtcgggttcatggagatccggggccagaagcggtgacaagtacctctactggggcagccgcgtggactgccccggcaaacactgcggctcctgcgcggggctcgggcaccaggagtccagcctccgctgtgctctcgaggaggcccttttcctcggcagaatatttgtgatgccctcaagaatgtgcctaagttcactgcataacaccaagggaattatccaaaatggtgcaactacaaaacagagatgggaagaaagttcatgtgcaatggaatctctatatgatatagatcagatctcaagaacagtaccagttattctggacaactcaaaaaactggcacgatatagtatcaagaagcatgaaactagaagtgggaggtgtggcacatgtgcaaggaattagcagaggtgaactcaaacaaaattccatatactcaacagctctcataataaatcgcactgcaagtccccttgcttggtttatggagtgcaaggatcgcaagaatcgtagctcagtgatgttatcctacaactttttgccaagtatgccagcggaaaaactgaggaatgcagcaaataagatgaaagaaatacttggtgattatgatgctattcatgtgagacgtggtgatctattgaaaaatcggaaagatagatttggtgttgaacggagccttcatcctcatctagacagagacacccgacctgagtacattagaaaaagaattgcacaatggattccaccaggtcgaacattattcattgcatcaaatgaaagaactccaggcttcttttcccctctgtcagacagagaggctaatgatgcaaggagcaaagacatttatcaagacaatgcgagaatttgggagtgatttaaccctttgtgatgatcccaaaaagaacaccaaagtctggcaaaagccagtatatacagatgattgacgttagttggtcgtcaaatataatgcagacttgcagagctcactcttttagcaacctgatggcctgacatggacagctgattaaacctgaagctggcatggtagtgtttgctgttattgcagaagccgtctaaaatcagccagcagtggtggacactacacctacggttcatttcagcgcatctattcatactaccacgtgtacttataatctggaaaaagccaaaaagtcatgacctttttttttcataattttacaattaggaagtagttcacaacttacaagagaagatttgtttgcagatttagaatgcatatacatgtcacatccttctgtacagcatgtgtaagaatgaaccagcactgtgaggcttatgtgtggagaatatcagtaattgttattatcttttaattcgtatgggtgtgtaagaaacaacctgcacagtgaggcttatgtgtggagaatatcatgaattggttgttatcttttaattttataggtgttgctcttgcagtccttctgatcaact

SEQ ID NO: 36342 - DNA, 2583 bp, Zea Mays
ggtgaacactgacttgaatttactgccccagagaagtttattttacaattcttctgtattttatgacaccgtagaaactgagagcacttgattatatttctcataagtaaatacacatccatactgtttatttatctttggctgttaactttttgtatgtaatttatgcatttgagtattgttttcatgccctctttgtttcatgcttttcaaggtatttggagtgaatatgcaagctggcttcctgctgtttggacctcctggttgcgggaaaacactaatagcaaaagcagtggcacatgaggcaggggctaactttattcacatcaaggggcctgagctattgaacaagtatgttggggagagtgaatcggaagttaggaaaatattcactcgtgcacggactaactccccatgcatcctgttttttgatgaggttgatgctttgacaacaaaaagagggaaagagggaggatgggttgttgaacgtctcttaaatcagttacttatagaacttgatggtgctgatcaaagacaaggtgtctatgtgataggagctacaaacaggattgatgtgatagatgatgctgttttacgtcccggtagatttggaaagaaacattatgtacctttacctggtgcagacgagagagtttcaatattaaaggcacatgctcgtagcaagcccatctcgactgatgttgatttggatgcacttggtcgtcgtgctgagtgcaacaatctcactggtgccgacctagcatcactggtcaatgaagcagccatggcagcactggaagagagactggaattccgtgacaaggggacatcctcactgagttcgtctagcttgattgagatgccgcacttcgaacgtgctctatcgaagatcaagccatcagtatctgaacagcaaatcaagaattatgaggcgttgtcaatgagatactcgtcaaactgatccatcaccagctgtccacatgttagtgtgtatatgaggacaaccttgtgaaaaaaatgtggtgtctgtaccatgtttgcaaggagtgtgcaccgtcaccagcttttacccatttctgaagcacattataatctcatgtgagagcctgtggtagagtagtttagatacaaatagaaatctgcatgttatcgcgatcagttttgtttccattttcatttgtctgtaacagactggcctacaggcaattttgtatgcatctcatcaagatacatcatacatacacgaatgagttgttattgaatcatgcgtggaagtggaatattgcaagaaattgtttttggctactagcacttgtgttcctcagctacagttgtgtgagttttccattggtctcagcagcagcagcttgaggcctggtggtgtccagtttgtccaaagccgcccatagcttggggtcttcgtagtccctgatgacgagcgttgcgccgacggcgagaagcttgtcctctctgctttcctcggcgatggcaaccaccggcatccctgccgcaatgccggcctgcacgccagtggtggagtcctcgaacacgagcgcgtggtccggcgagacgccgagcaggtcgagcgccctgaggtacgggtcagggtagggcttggatcggccgcactcctcggcggtgacgacgagggaaaaaaagtcggagaggccgaggatggagatcatgagctcggcgttggccctgggtgcgttggtgacggcggcgcgcctgagcccgcggccggcggcccagcggcagagcggcgtgaggccggcgatctcccggagcccctcggcggcgtacctggcgaagagcgcctccttctcggcgaagaaggcgtcgaggcggcgctggtcccagtccgggaacaggaagcggccgatctgctcgttgctccggccggccatgttcgccatgccgaactcgggcgtgatgggcacgccgttgttgtagcccaccttgaggagcatctccgaggtggcccggtggtggaacgggtcggagatggccatggtgccgtcgatgtcgaagaggacggcctccagtggggccactctgccgatcccactgctgcaaagcaaccacacacacacacacagggaaagaagataaaactttaaactgggacggccatggttgcggagaacttgctcggattgaaatgaaatcttgacagttttggtcggattgaaacgaaatcttgacagtttctgtctctctgggaatgggggaatagaactgagtgaaatcatgcagaaaatactctggatgattacctttccatggccagttgctgctggatgccaaaactgaggcttcttttggtcttgtggtcactgctcgagtgctgatgctgcctgcacattttataaggagaagactgaagaggcagggagagttggtgaggattccgtggttcagttggcgcggttggtggtagtctctcacattctcatgttccacaccacactgcagcatctcagcagctccacccttttcttccttttgacctgtggctgcctttccaaacggcgttcaaattatttgctgttttttgaactctctgacgaccaaaaaaaaaaa

SEQ ID NO: 36343 - DNA, 462 bp, Zea Mays
cgacgacgagcggtggcggcgcaatgaactccggcggggtcggggtaccacgcctagaggaccgtaaagagctcggagatgatcggggaagcagcagcgagctccggggagcacgatggcacccttggcgcgaacggtggtgcgacggcgacaacgagcgctgacagagagcagcgaggcacgggagggggcgctggtgctcggaatcgatggcgggggttcgagtggtactgatagaggcgaggccggggcgaatcgggctccaaatcggtggggatcgactccgaccaatttccgtaaacgacggagaaaaaaaggaaagaaatactcagcgaggggaaggggagttggtcgagatcgtggggaaaagaagggtgtctcggcgtgctccacttgtggcaaggaatcaaacgaggcagctcgacgtggtggcacgcacggtgagatcctggtgcaggcgcg

SEQ ID NO: 36344 - DNA, 479 bp, Zea Mays
ctagggcgccaccgcctcagcccgctctcgcctggctggcaatccggaccgtttgccgccctctccccttcctcggatcggaaattggcgccttctcctctccctctcctccccactcccctcttctccgggcagtaacagacgtcgttatggccaacgccatcaatggcgttttgattcccgattgccattgatgaccgatcgttctcctcctccctcggtgttctctcggtttcccctctctctataaaaaccgccgaccagagctctctcttctctcccctgcccgagctctccctcacccgcgaccgcgccacaccgccggatgcccacgagcccgccgcctcgccggagctcgaaccctgcctccagtcgacgccagagtcactcgccaatcctcactgcctcgccgtccgccttgctcttgctcggccgtcgcgctccccctcgacgagcccctccctgcacactaactagcc

SEQ ID NO: 36345 - DNA, 2191 bp, Zea Mays
agtcgcccgcgtctcccacccccgcctcccccgccgccgcgctcgccctcccccgcctcccccgccgccgcgctcgccctcccccacgacagccgccatgcgccctatctccgccgtgcttgcgcttcctcacccgcgcaatttgcacgcgctccccccgcgacagtcgccacgctcgcacgcactccctctgcaatagctgtcatgcgccctatctccgtcgcatcccgcccgctcgccacgcttgattcctcctttcaatggtgcccacgccgtccaatcccgcccgcggtccttccccacgcggatcccccacccctcctccccaccgccgccgcaacaaatccgcgcacctcgatctgctcaagtgagcgtggctcaacgagaaggccacgtcagatatcctcagcttcgaatcgcccctcgcgttacgtgtccgcgagcagatccagcacctcatacgctcttctccctcccccttcttgaccacgttcctccactcccccccatagctctgggatctggccatggctccctctcctggtgtcgtgtcacccaggaggcggcgctcgatgacttcgtcgacgatggcgttgacgacctggtggtctcgctctaccagatggacctcgatctcacgctcttcctcctccgctcctaactcctcccggagaagatcaagaagtacacgatgcatatctctagggccacggccgaggcgactggtgaagttgcggcaatctgatgcgggaggtggccgacctcatccttagcttccctgacgagacgcccgtcgtcgtcctctctgccatggggaagaccaccaataacctcctcctggccggagagaatgcggtgagctgcggtgcccccaaggcgtccgaaatccctaagctcgctgtcatcaaggacctgcatcttaggacggttgatgagcttggtttagataagtcgattgtttcagggttccacatgcacattcaccgagtcaatcctgcgatcgtgtggcttccatactgggctgttcacctcaccacatttgatggatgttagagagcgatttcagctagggttaatatttgaatatttctgaagagaaatttttgaagtacttctggtggtgctggaacaagttgaaggagaagactgatgatgatattcccatgccagcctatttcaggttcctcgcgctgctcgcattcaagatattttctgctgagcaggtagatgttgctgttctcgaggttggcctaggagggaagtttgatgcaactaatgtggttaaagcacctgtagtttgtggcatatcttcccttggatatgatcatatggaaattcttggtgaccaaatcctgttcttggtgataaacttggtgtcgataaacgggttaattctgttggcaaaattaggatgacacaggttgttagttctcatgaatgtcatgttgtctcgaaataaagagcttctgtccgcacctaatcgcctaaaatggaaatgtttgactcattgtttaattcggggggaagctgaaggtggtctgatccggtaagagatcttaatctgcattacacttgttggattttgatgtcgcttctgggagtgtttgattgaattctacaccagttctaggaagagaaagcctgaccaagtcatcatctccaggtttgttattgtttggatgcaaaaatcgtcgttagttaacttttttgtgttgaagtaactgtttggttgagaaaattagttgcctatcttctattttctctgttttgttatagcagcaagctgatttgtgtctaatttatagggacgatgttagcgaaagtcaatttaatcaggtgctgaacattgagttgcaacaaatcatcgatggagactgtcaccgcagccagaaaaccacggtctcaatttgaggagcctttccatctatgtttgttagaaggcatataatgcctatttatctcttgtattcgaacatttggcaattaagaaatagaagattacttccccaatatcccttattcctaatctcacctttcacggcttctggtgaacaatcacttgctattaccgactgacatgtccactcctcatatgtgagatattggggttgatatatatgttgttcgtttccatgtaattattgtgtactaacatttattgaataatttttacgccgtaacaacgtacggg

SEQ ID NO: 36346 - DNA, 2157 bp, Zea Mays
caccaatcatttctttgcaatctgcagcctctgcaaactgatcgcgttgctggttgctggtaatcatcggaccagtccacagatatcggaagctctcttgctactgatggcgaagcccagcgtggcggtgccggaggttggcgtaccagcggcgcaggcgtcgtgcacctgcccggggacgctgctcgcgtacccgccgccgcgtggcgccggggtcgcggccgccgtgcggcgcaagtgcctgcaggtggagctcggcgcgggggcgggcctgctgggcggcgccggcgcctggggcgtggagtccatgcgggcgtcgtcgcccacgcacgccagggccgcggccgcgctcgccgccggcggcggcgtcgatgtcgacgtcgacgaggagcgcgccgccagctggatggcgcggcacccgtcggcgctgggcaggttcgagcggatcgtggcggcggccgagggcaagcggatcgtcatgttcctggactacgacggcacgctgtcgcccatcgtggacgaccccgacgccgccttcatgagcgagacgatgcggatggccgtgcgtagcgtcgccaagcatttcccgacggcgatcgtgagcggccggtgccgcgacaagcatgcaggtgttcgagttcgtgaagctggcagagctctactacgccggcagccacggcatggacatcaagggtccggcggccgccaaggcctcctcttcttctcggcacgccgcaaaggcaaaaggagtagtgttccagccggccagcgagttcctgcccatgatagaggaggtgcacgagcgcctggtacagacgacgcgctgcataccgggggccaaggtggagaacaacaggttctgcgtctccgtccacttcagacgcgtcgacgaaaagatgtggggcgagctgtcagagtcggtgaggggcgtgctgcgggggtacccgaagctgcggctgacgcacgggcggatggtgctggaggtgcggcccagcatcaagtgggacaagggcaaggccctggagttcctgctcgagtcgctcggcttcgcggactgcagcagcgtgctgcccgtgtacatcggcgacgaccgcaccgacgaggacgccttcaaggtcctgcggcgccgcggccaggaccagggcgtcggcatcctcgtgtccaagcaccccaaggagacgagcgcctcctactcgctccaaggccccgcagaggtgatggagttcttgctgcggcttgtcgagtggaagcgcctctccagggccaggctcaggctgcaatgagatgagacggcgcaactgccgtacgtggacacgtacgacgatgcaacggattaagctaactgccaagtgccagttaattaagttaagatcctgcctgctacgtggaatcgtgaacggcactgtctctctactgtccccccgtagtgatcagcatgcatgtacatcgttgtctcatacagtactagctagttagtactaagcatgcctgttacatatatatagcttcatgtgaatgtgttgtactgatgtgtgatcttaaaagtatgctgatgaacggtgtgatatttttttaatccacactacttgctgatttggttcaaagccggacctgtcgtcgtcgaagtgatccagctttgcaacgccattggccaccaccacatcgatcgaaagccacaccaataatgagcaaggcgacgatggaatcttggataacgcatgccacacgggagcgcgcacacgatctttaccatttgatgaagataatgatctacctgtggacgtacgccgcgtgatgacgaagcgcggttggactccactcggaagatcgatggagacgcgcgctctctggccattatattcccccgtgcttgtgcttgtgcttgtgcttccaatcatgtcgtacgtccaatgcaatgtccgggaagatggattgcatggcacggttctggccatcttcaagaagacaacaatccccctccttttccactttcgatggcctcatcgattgatcactgctacagcgtacgtacgtacaatcgtttatcagcttattacctgtcggcctcgctgtcaatttgttgttgggaaagaagcgcatctaaaatcagctcgtcgatccatcttttcagcaaaatgaaatattttatccatcccg

SEQ ID NO: 36347 - DNA, 1793 bp, Zea Mays
gagcgaagggttttctagggttttggtacgaaaccccccttcgtcccgtcgcatttcgttcaaaatcgcgcggtcaaatccgagctcggggccatcgccgtcgccgcgcctcccatcccgcgaagatgagctacgcggcgtacaagatgatgcatttgcccaccggaatcgaccattgcgctgccggcttcatcacccactcccccgccgacgctgccgccttctccacgcccgcgcccgcgcccaccgccgccgctggacccgacggcgatattgactccactgcggctagggcaccccggcgagtgggtcctacccccaacctggttgtgtcggcggctaacgtgctcgaggtgtatgccgtgagggccgaggtcgcgactggggccgaggatgcgggtaattcttcgtctaccggcaccatcctggatggtatctccggggctcgactggaacttgtgtgccattacaggcttcacggtaacattgaatcgatggctgtgttgtccgatggcacagagaataggcgagactccattgcagttacgtttaacgatgcaaaaataacatgtctggagtttgatgacagcatcaatggcctgcggacaagctcaatgcattgttttgaaggccctgaatggttccatctgaaaaggggcagggaatcatttgcctggggtcctatcataaaaggggatcctcaaggcagatgtggtgctgtacttgtttatggattacagataataattttgaaagcagctcaggttgggcagagcttagtaggagaggatgaacctacacgcgtgttgagttccactgctgttcggattgaatcttcgtatgtgattgatttacgtgatctagaaatgaatcacatcaaagactttacatttgtgcatggttatattgagcctgtgttggtcatacttcatgagcgagagcctacatgggctgggcgtatctcatcgaagagccaaacatgcatgctatctgcgtttagtataagcatgggtttaaagcaacatccgatgatatggtctgctgctaaacttccacatgatgcatatcaacttcttgcagtgccccctcctataagtggcattcttgtgatctgtgcaaattcaatccattatcatagtcagtccacttcttgttcacttgccttgaacagtttctcatcacagcctgacggaagcccagagattcttaaaacaagttttcatgttgagcttgatgtagctaaagcaacatggttatcccatgacattgtgatgttttcatcaaagaatggagaaatactattactaacagtggtttatgatgggcgagctgtgcaaagattagatcttatgaaatccaaagcatctgttcttagttcgggtgctacaactcttggaagttcgttcatatttcttggcagtcgtcttgcagatagccttcttgtgcaattttcatgtggcatgccaacatcggttctgcctgatctaacagatgagcctgctgatattgaaagtgatctgcctttctcaaagcgcctaaagaggattccctctgatgttctacaagatgttactagtgttgaggaactttcttttcataataaggcagtgccaaatattgtagattcagcagagaagatctcatttgttgtgagagatgctctgatcaatgttggtcctctgaaagattttgcatatggtttaagaactaattctgatcccaacgcagcaggcattgcgaagcaaagcaattatgagctgtttctgaaatcaagggaagctattgaaaaataa

SEQ ID NO: 36348 - DNA, 3782 bp, Zea Mays
gactgcccccgctccttgcccaacgaaacccccgctcccgcacgccccgccgacctctgctgccgcaacgccgcagccgccgcgaaatccgcacccacccgcgcgacctctactgccgcaaggccgcagccgccgcgaaatttgcacccacccgcgcgccgcagccctttgtccgcgccggagcctagcaccgaaccgccgcggattcgccactacatcaccggccatggcttcgggcatgccacccgcgccctcgaggtggtgaggcacctggtcaccgcagggcacgacgtgcacgtggtcatcgccgcgcccgagttcgtcttcaccaccgagatcgcctcccccagcctctccgacaagctcgcgtccccgtccacatccgagatgctcgcgcccgcgccttggatggaagcccagaatcgccttccatcgaggattctacaccacgcgtcgcgccccctccccgcacgcaagcccccgcctgcacattctccgccaccccatcccctgtccggcgcgtgtgccacggcctccctcgaccagcggcacgcgtacgccatcaccccctccctactgctcccatccgcggtgctcaccttcgccatcgcgcaatccatcaaggtcctcaccacctggtataaggagaaccggtgggacgcgaagcagctggtgggctccggtgggatgccgtcctcgcactcagccaccgtcacagcgctcgctgtcgccgtcggcctgtaagaggggctcgccagctcgttgttcgccaccgccgtcgtctttgtcttcgtgctctattccatcgctcccgtactccctattgcggcggttgagaacagtggcgacaagatctcatggagagaagctatgcggaccccaggaaaggtgaaatcgtcgtgcgatggtggagatggccgatgggaggctccaccagccctagggtgtggccaacaagacgctactcgccactgcgtgggtcggcagtgagatctcagggagagaagccatgcaaccccatgaaaggcgaaactgtcgcacgatggtggagacgaccggcggtaggatgcaagtatgagcatttggcaaagagagtattcctccccatgctcccgctccctcctgcaccccacgctcgccgacgagccgctcgacctcgtcgcagcttgccgagccatcatgcgccccggtgcggtggtcaacatcaatccacgccgtcaatcgcgtgttggtcctacgctcagtgcatgagtccttcaactggcggtggtggagcaaccgtactaccacagcgcatacacaggacgtagagaacaactccagaaggtgagccccagatctccgctgccgtcttctcgcctgaaaaaagaggggcatctctatcgccaccaaccactagcaggcggcggacgctgctcgcagcaggtaacggcgtgcatcagggtaatatattgcaaatagtttagggtttcagtttcattcacgagtttagtacatgattaatgtattttctcgttggattctgagctcccaacctgatgattagcgttgtttgcacaaaaaaccgagatctgtcgtcgaagaccacctaactgtttctcatggcagacttgcttgcttgctttggcttggttcattgacaatttaccacttcctcagttcctctgttctatcatttatggtgtagtttacctttgtgagaagaaacctgtaaccacacatacacgcacatgcatgccactcattgtttggttcatttagttatcatttactttcggcataacaggcacaataagccacttcaggcttcagtctgttctgtgatcagcagaacattatgggctctaaagcaggaggacttttgagagcttcaactaagtcaacttgttgagtcgcttgttacatatcttttgcatatgggaaaaaataatagataagaggtagtgtgagacacatattggcaactgaccaaatgacttcagatatttggggtctcatcgatgttcaaacagagaatgcacaaagtagtcagaaatggtaattatattgtcattgttgttgctggtagtgatgttactgttctactatcacgaaggagaaatttgatccaattggtgggcctttgcctaaactttcacaagctgattccaagcaatgtgtctaaaatctttttcttgtgttggtaaccaccagatgcttgtcaattgtcaaacttattttggttggcttattttcaagattaaatgatctctggtaactgaggagaatgctgtagatgttgattttccttttaggaaggtgaagctctccgatgtggtagggggttagtacccctttcctctcctctagcatgcttaaggaggtattgttgggcttttttatactcatactcagttgtatatatgtttctcaggaatggaaaatgtgcatatatgcttctgattgcagtgagattagcctcgtccaagttatgggatctgccatgaactagacaagattataagtttacagaggccttacatcaagagagtacaagattgccataaggaagtaaagtctttgaggaaagtgaccttatgagaagcttgagaaaatcaacttgtgtgtgagaagttttgtctacttgtgctaattagtcatatgatatttttagtcatgaactagacaagatcagaagtttaaagaggttttaaatcgagtacaagatcgccataaggaagtacaagtctttgaggaaagtgaccttatgaaaagtttgagcaaatcaacttgtgtgcgagaagttttgtctacttgtgctgatcagtcataccttggaatattgctgaactgttgcctttgttgctcattggcttcaatacttcatacaccatcaaatgagtcatgtgcaaaattcttcgaagcatcagttcttgctctagaagaacttcatcaggtgattactcttttgctttcctttattgaataattagcacatgtgcgttcaaaaaaattgccacatgaatgaaatgatatattctcgaattattctattgagttttttgtttttatcacaacaccaccctggcgcgctagaggcggggtcgaatcagcaactacggctgacatgacgctacccatccagttgctcactgctcaggttatagcgaagaacattgttttagctggatacaaggagatgcagaagctctgagttttgaggatggatctatggatggttacactatcacatttgggatcagaaatgtgacgcacattgagaaagctctatcagaagcttacagttgatggttctaaagcaagggtggaggttcctatgcttggagttgagtcatgtggatgtccctatttttaaatagatgaaaagtttgctcagatgattcaggaagccggattccagagggtggaatatgaaaacctcctgagcggtgtagttgccattcattctggactgaaactgtagagctgaatacggatggatgttttttcatgggtgcaccgcttctacaattagtagtatttgttgttttttaatgaattctataataggttcggtggcttgtaaaagcagctggtgctggctgtcagcattagcacaatatgtagaataagtagtatttgcgagaagtatgtgctggagcagtagcgtcagtggctattttggcttttaagccagctgacctcttccatttgtaaagcttttttcttggaaacgtgaaaccatccagaacatcaaattagtcttatcacatacctcctgcaatacattttttgttctaaaa

SEQ ID NO: 36349 - DNA, 1208 bp, Zea Mays
cgaaaattaaacttaattcgatttatcttctgtttcacatcggcaaaaccactataaaaacggctaagagtgcaacaatgaaccgtttttaaaaaataaagagggcttaaaaactgatctaatggatgaagaggaatatcggcccaagcccaaacaataagctcacagtcatagacgtggtggccttgatagggcccaagtaataatataaccacgattcacggtctcccggttggattccccggcaagcggccgcgcccggagccggaacccaaccgacgagttcttccacccacgcgacggcgacactgccaccgcgctcggaggcgctgaagccagccgagaggcggggcccggccccccggcgactagtaggcagccacagccaaccactcgaagtgttcggttccacttccacgttcagtctgaaaacagggacccttgaatgaagaattcaaatgaagagaagaaacctaaggaaaggagagcagaacaagattggtacctttgctgtgcctggccccactgttagctctctgaagagttaaagctgcgacggaggctacaacgacaaagcctaatctcacaagcatgactccgttcactcatcactctgctggcctcaaccggcaggagggccgagacggggagccccctctactcatcaaaaaatggtgacccggagttagagcagcagggaggaaagaacgcctcttcgtggctgctgctttggcccggccgtgaagtacagagcgaaagacttgtggcttggaagccggtaggcccatttgctatgcacgggatgacgagaatgggtggtgctggcctgctgggtatcacaagaaaaatgacgaggggagttatcaggctcacaggatggagcatgtcgttaccctgacatggatcagtctagatttgtttcatccaaagcaatactggatttttttttcttgtttcactgtatacgctggaaaactaggacagattttgactgggcgtaattggaataactgacctagttaactgctactgcctctttcctgaattataaggtgttctagaggcgcatagaaagagctaaaagcctaaacatcttataatttagaactcatggcactatttacctccggtttaaattcaaatactgttttattatattagaagaatattttgttgcataaactgaattgcttgccatggtaggcgcg

SEQ ID NO: 36350 - DNA, 3331 bp, Zea Mays
gttcattctttcatcggtatcaccttccggagctgatgtagcaagacggagaaagtagcactcgatacgagaacacatcgagcgactctgtttatatcagaatcgcgccaacgcgtcgccggcagcgtcgtctcgtgtgggtcgcggtcgcgaccaagcgacgacggcgagggagggaatgtacgccgctgtcccccactctcctccccactcccaccgcagtccatcgacagtggagggttcccggaagcaaagcgccagcggcaggtaagcagaagcctggctagctggcctctggtatgtggttggctcaaggattacaggatttcaatcagtaacaatcaagtatgaggaaggaacaacaacgggtgtccaagcttgggtggttggcttgccggttacagcaagtcaattagtaactacagatgggaggaaggcgaccgacgggaggaaggaaccaggcggcaggctgcccgtgccgacgtggatcgggccagagctaggtaagtgcacctgtgggctgtggtcggcaggcgatcgaaggtgagtgagccggtgagccccgccatgcactgacggagtcactgccgactctcgtcgtccgatctctttttactgtggacgaatgggtgcgtgcagcctatctgcctatgggaagcgagagggggcccgggactgggttgagcaccttgtgcgcaaaggcatggtggcgtctggggccggctgcaggcgtgtgcgcacctgcacgagcgtgcagtcgcggcgcgtggctgcagtttggtgtgcctgggacggggactcgtgccgtgtgtcctgcgcgaggtggttttgcggctggctgacggaatggttgatggaatccttgcgtaaggacgcaactgagaggtaagcccccctcgtccccgtcccccgtgggaaacgggagtgccaaagccttgtggcacaccaaactgtagcttttgatcgtgcatggtggggcgcctacctgatgctacgcaaacttttgtgtcgcagcttcagttaccctgaagagcagggcaagctagcaaaaggtgaaagcgtttggtcacgtagaatccatacaggtcatacatatatagcagtcgcaactcgcaactcgcacgtagagcgtagaggttcaaatctgagccttagttcagaatgcagcttcagtttgggagttcgttcgtgcatagcaggccctatagctggggttagtcgtgtgcaaggattctccatgtggacaacacaacacaagcaagcaagctaatataaggttggatttaaaagtcgcagaacaattcatgacgtgcttggaaaacgttggtagcgtcttttaatgcttgatctaaaggctaagttatcatccatgggctaggtttgtttgttagtattaccctgtccagtgcaagggcaggtaggaggtagagagagaccgagcaagtactaacctttcatggccccggtctgccccccagctccctctttcccttgggggccgctgtgtgctccgtcgccatcgcgggggataaaaggaaaaggctccgaggaaacagtataaaagcgcccccggcacgcacgcacgcacgcaggctcactccacgcagcagttgccaggcgcttgtcactccagccagcggcagcccttttccttggcgaggcttggtttagtttagcccgcctgcggtctgccgcctgccaagtgccacctgagacctgatagccgcaaccgtgagaggctggtagcccgtagccggcatccctcgccctcgacccatttgaacagggcctcgagctttgcctctgctgctgctcgcttgatccgtctcttgccgtagtatactacgcgtgctcgatcggcggcggcggctctacgacccgcggccgggatgggtcggcagccgtgctgcgacaagctgggggtgaagcgggggccgtggacggcggaggaggaccgcaagctcatcaacttcatcctcaccaacggccattgctgctggcgcgcggtgcccaagctcgccggcctgctgcgctgcggcaagagctgccgcctgcgctggaccaactacctccgcccggacctcaagcgcgggctcctcacggacgccgaggagcaggtcgtcatcgacctccacgccaagctcggcaacagatggtcgaagattgctgccaagctaccgggcaggactgacaacgagatcaagaaccactggaacacgcacattaagaagaagctgatcaagatgggcatcgatccagtcacgcacgaacccctcgaccggaagacaaccagcagcggcccggctacaacctctcagtcaaccaagtctgacgaggcgaccaaggagcagagcccgcagaacgacgacgccgtgataagggacgtgccggccgatggttgcagcccgacggaatcgagcacgaacaccgtgagcaccggcggaagcagcagcagtggtggcggcggccatgaccaagacccgctggtgaagtggcttttggaagaggagcctgccaccggcgacgaggcgtggctgaacttcactggcagtgtcgacgtggacgagttcagcagcattgccgccggtccggagttgttgccgtgggatggcgcgaccgactggctgctcgactaccaagattttggattgggggactcgagcttggtcgatggctacatggtcaacaacaacagctcaaacggagcaaagttctagctagctagccgaagatgtcatctcatctgcttgtgttgctttgctgccagtgaacgtagatacgtaagtaataaaagcattggtatcgaggttgtcaaaggtggatgaccacatcgcaggaagatcatgaagagtccttgcacgcactcctgtatctcgaaccaactaacggctgggatgcaattgagaaggggaggagcacaggccaatcaatctcaaagagataaaactggttcttgaagatctcgaagaaagatgtgtttcttcacaatcacaaagagaggttgtagaagttcttgctgttgtatacatggttgcgtatatattgctaaattgtaccttgttaggccattttgttcgcaaattgcacgagtcactaattagtcagcaaaaatgtgtgcataaagaagagcagttgaaatcgcctctttgtacgttgtgggtgacgttcttttagttacgttgtggatgacgttgatgcatttatagggtatttggtttgaggaataagttatctggtttgtagaatggaataagttatccatcatcacctcattaatcatggttagtactaacatgagtaattgagtcattccaccaaatttgagttttgg

SEQ ID NO: 36351 - DNA, 1575 bp, Zea Mays
agaagagagaagagggcgggcatcggccagtgggggctctgaggccgagggaggcgaggaaagcggcgggtgccgggccgcccgcgccggtgccgagccgcccgcgccggtgccgaggccctcaccagtcaccaccccctcccctcttccgtctgtcccccgcttgccgccaccgccgctgcccgctcgcgatccttcccctttttaacgctcccgcggccccgcgtcgtgctcccttttgtcgccgctgccttcgtgcccgtactcgcgggttctcctcgctcctcaatctccgcgcctgggcgcggcgttcgccgccggatctgggcgcgggacggtgccccggacggtcgatggcgcgggcggcgctccggttgggcgaccgcgcgctcgcgctcctcgtcctcgtgtcagttccgacgatggacacaaacactgcgagggtgttgtcaggggctgggcggattcctccacggggcgcgtgaaggacggggacaaactgagcctcaaggatttgctcttcttcctccacattcctaggactggaggccgcacctactttcactgcttcctaaaaaagctgtatacaaatgcgcaggaatgcccgcgttcttatgacaaactacggttcgacccaagccatcctgattgcaagctggttgttagtcatgatgactatagcttaacttccaagctgccaagggagagaacatctgttgtaacaatactaaggaacccagttgaccgtgtatttagcacatatgagttttcagttgaagttgcagctagattccttgttcacccaaacttaacttctgcaaagttaatgactacccgtgtgttaaaaaagtctcgtgctgtcagtactttggacatctggccttggaagtacttggttccttggatgagagaagatctgttttccaggagagatgccaggggtatcgacaaagttcatagtagtaagaaggttaatgcatatgatgtggaggatatggttatgccgttacatcagtacatcaatgatccagttgcccatgagatcattcataatggggctacctttcagattactgggttaacgaacaattcatactttgatggagcacatgaggttcgacattgtgccagaaagcatccagatcttggtcgtattgtgcttgaagttgctaagaataggctggaccagatgctgtatgtaggacttacagaggatcatgaagagtcagcgaggttgtttgctcatatggtaggagcacaggtgcttttacaatctgggacattgagtttggatctcaaggaagatctgcacagtgagactgactcacacccatccatggtggagcccggggatgaagaagcaagcgaacatctgaataacacacatggttggcaaaataatgaagccctgaactctaccagcgacgaacaaggaaaaggaaatatgactgtgggtaaactgatggaagcttatgaaacttgcatcgctaaactgcggaagtcccaatctagccgtcgtaaaatatcactaaagaaagtggaggaagcaaacttctcaaaagagttctgtttgca

SEQ ID NO: 36352 - DNA, 709 bp, Zea Mays
gcaacagtagccccatcctcctcgttggtcgtcgtcgccgcctcacagcctcgcccctgaccccgcccggcgccagatgcatacgaccaggagctcgattgcttaccggcaatggtgcagtccatcgtctccatcgacaagatttgtgccatgcttgaggtattaggccatacgagagggtatgttcgattatagttgttttaggttcatggagcatgattaccacattggctagtggcacaacatgcctacgtatctaatatttaatggtgcaattactatgctcgtgttctctcattgctatgtttgtcatcatctgtaggaggttgtcttaggtcactggaatcaacatgggaaacctgttgtgcagaatgttttgtagtatgtttttcataaggttcctcttcatactacatgcttttctttctgatttcaaaaatgcattacacaaataaaattaccatttatatgtctgtatctaatatttaaggcataagaaaaattagcataggcaaagaaatgggtcaaacctcatgttgagactactaagatggtaatacccatttgttcatgtagttcaatttattatgttttatcttgggcttatagttggctaacattattactttctatgattgaagaagtggattcttgttaagcagaaattggttgtcctcaagaaaatgtagaatctcatgtacaaaagttg

SEQ ID NO: 36353 - DNA, 717 bp, Zea Mays
atcaccccaaatctcgcaactctcaccagcctagccatccacgagagtcaatcagccaacatcctcgccccaaatcgacgccaacctcccatccacgccgaggatggtgatccttaaagaacatgccaacccaatccccatcgcccccaaaacagagatttggttccaccccaatctccatccttggcagcgacgctctccaatccccaattattggcggtccaatcctcggcggcggcgctcagctctcctcatgtggccacccagcacctgccccatcttaaagacgagcctgtagatgtggcactcgtgttgtgcctgcgcctgcttgtctcttctgctgtcgccgtcgaccgactgctgcttgtgtcgtacagaggaggggaccaagggactaagggtggcatgtggaaactgaaacagttctagccaacacgacatggcgtggattgaacttgaatcgacgagctatgtgccagttatcgctcttctaaacacatcaaccagtgcaccaaaactagcttctttcttccttgggagatagatggaaattgtggtcatcaacagctctagcacacaccgagagtgcattgaactgggcaaggattagttcctgtataatggcacattggcactactgtaatgcataaggatttgttctcacatttgaagtacaggctgttcacattgcaacccctgctcaagagaagaggaagg

SEQ ID NO: 36354 - DNA, 3039 bp, Zea Mays
cccgtgtttaccctagttcgacacgctccaggggctacatcgtcgtctccccgcctcaccacatctcacctcgtctcctcctccggtccttcccccatctcttcgccggcttccatttcttgcctgccagtcactctcgtccgccgcagatcgagaagccgccaccaaaccccccctccaccaccgtatgaccatgacagcccagcagcaccggcaccccaagcgccgctgcgtcgccctctccctttctccgtccctcgcgcgcatccccggcgcccccacgccgccgctcgactcgctggccgacgagcttctcttccttgtcctggaccgcgtggcccaggccgacccgcgggcgctcaagtccttcgcgctggcctcccgcgcctgccacgccgcggagtccagccaccgccggacgctccgcccgctccgcgcggacctcctgcccgccgcgctggcgcggtacccgaccgcgacccgcctcgacctcaccctctgcgcgcgcgtccccgacgccgccctcgcctccgccgccgtctccgggtcctcctccgccctccgcgccgtcgacctctcctgctcccgcgggttcagcgccgcgggcgtctccgagctcgccgtcgcctgcccgggcctcgtcgacctcgacctctccaatggggtcgacctcggggacgccgcggcggccgaggtggcgcgggccagggcgctccggaggctctcgctggcccgctggaagccgctcaccgacatgggcctcggatgcgtcgccgtcgggtgcacggagctgagggagctctcgctcaagtggtgccttgggctcacggatctggggatccagctcctcgccctcaagtgcaggaagctcaccagcctggatctctcctacaccatgatcacaaaggctagcttgcctcccatcatgaagctacccagtcttcaagagttgacactggtggggtgtattgcgatcgatgatgatgctcttggtagtcttgagagagaatgcagtaaatcactacaggtgcttcatatgtctcagtgtcagaatatcacaggtgtgggagtttcatccatcctgaagtcggtacccaatctattggaactggaactttcatactgctgtcctgtcactccttctatggtgagaagcttccagaagcttgctaaacttcagaccctgaagctggaaggctccaaattcatggccgatggactaaaagccattggaacctcttgtgcttctttaagggaactaagtctgagcaagtcatctggagtgaccgacacagaactctcttttgctgtgtcaaggctaaagaacctgctgaagctggacattacttgttgtcgcaatatcactgatgtttcactagcggccataactagttcatgctcttctctcatctctatgaggatggagtcttgtagccgtgtttccagtggagcactccaactgatcgggaagcactgttctcgcttggaagagttggaccttactgacagtgatttggatgacgaaggtacttactgaactggctactgaattattcttccctggatggacctaaagccgactctgaatattttctgtgcaggattgaaagctcttgccagatgcagcgaactttcgagtctaaaaattggtatttgcttgaagataagtgatgaaggtcttacccacatcggaaggtcttgcccaaaactccgcgagattgatttgtacaggtgtggaggccttagcgatgatggaattattcaaattgcgcagagttgtccgatgctagagtctatcaacctatcatactgcacagaaataacagaccgctcactgatttcactatcaaaatgctcaaagctgaatactctggagattcgtggctgccccagggtttcatccatcgggctctcagaaacagcgatggggtgcaggctgctttccaagcttgatattaagaaatgctttgggattaatgatgctggaatgctttacctttcccagttctctcatagcctccgtcagaacatgacgatcgtccatgtagcgggtataacgcctaatggcttggcagctactcttatggtttgtggtggtttgacgaaagtgaagcttcatgaagcattcagatccatgatgcttcctcacatgataaaaaatgttgaggcacgcggctgtgttttccaatggattgataaaccattcaaggtattctacggctcccctggttgccttacacacagcattagacccttgtgctcgccaactcgttcttgcctaatttgctactcgaaaacgctacacactatttgtttcagaaaagcttggttctattcagctgtgttttgtgctgccagatctaaatgcaatgctgtgttcttttctgtgctttcagtatattgtctatgattgaaacacacaacccatgattttgcttatggatggtgtttttttcccttcaaaaaaaggcttaaagaagagcatagcacagttgtcttgaatctattgagtgggtttgttcttacagagctattacaaggctgcaaaagtaaaacagtgtctgtctaataactggtgtggcattgtaggttgaggtggaaccttgtgatgtatggaagcaacagtcgcaagacgtgcttgtacgatgagaattgagttgaccctcgagcatgtggctatcgtggaaatcatggcatgcatcgttatggatggatgggttgttggctggcaatgtcatccgcgcaagtgattcctgtgtttgagcataggtcttgatgttgttgtatactggtataagcaagtgattcctgtgtcatccgcaagtgtatgtatgtcttgatgttgttgtatactggtatagatgagtaggtcccacatttatttggtgaggtgatcatttgacaggaagttgctgtatagaatactaccatgtaaagatgtcgatacggaagggatgagaaaatggttttgaaatttagtacgatatgccttttcctatgttcgtttagttttaatccgtactatcttctactgtttct

SEQ ID NO: 36355 - DNA, 4513 bp, Zea Mays
cagctcgtccccttccccccacttcttcctcagataaggagaggccccaggccagagaaaaaagcatcgaatttccccccgttaattggcctgagccctcagccgtctaccagcagcagctagaggcagacaagctaggttttactgcttcattgagcacaaagatccgctgacctcttgctcttggaaggcattctcttttttgccgtaccatggatgcaccggatgttcaacagagcatgggatataaggagtccaggggtggtatgcctaagtttttccatgcccttggaccagcactcctgatttcaatgggttacattgatctcgggaagtgggtggcagccgttgaagctggttcttgttttggattcgacctggtgttgctggctctccttttcaatttcactgccattgtatgtcagtaccttgctgcttgcattggcactgtcacagggaagaatcttgcagagatatgccaccaagagtacaaccagccaacatgtatattccttggtgttcaagctggattgtctttgttgacgtcagagctgactatgatttttggcatagcactcggattcaacctcctgtttgaatatgatgatctcatcacagggatatgctttgcaacagtgatggaagggacaataaatgcctgcatagcaggatttgcacttcttagttatgtgcttggcttattggttagccagccacaaattcctctcacgatgaatgtaatattccccaagatcagtggtgagagtgcttactctctgatggcgcttcttggtgcaaacataatggcacacaacttctacattcattcatcagttgtccagggtcagaaaaagtcatctgcagttggtcttggagccttatttcacgaccaccttttttcaatattgttcatttttactggaatctttatggtgaactatgttctaatgaactctgcagcagcggaatctactaatactcttctcattaccttccaagatgttgtagagctaatgaatcagatatttgtaaaccctctggcaccaactatatttttagtggttcttctcttctccagccacatcatctcgctgacatctgctatcggtagccaagtgatttcacaccatttattcggtataaaccttcctctttctggacatcgtctcctactgaaggtttttgccatagttcctactctgtactgggcgaaagttgcaggagctgaagggatataccaattattaattatatgccagattattcaagccatgcttcttccatcttcagtcgtcccactttttcgtgttgcttcatcaagatcaataatgggagcccatagagtgtctttgcatctggagatactggtttttcttgcatttctccttatgctattttcaaatatcatatttgtggcagaaatgctatttggcgacagtgggtggatgaacaatctgaaaggatatactggaagccctgtggtgctcccatataccgttttagttttagttgcacttatatctgtggctttttcactgtacctggctgttacaccattgagatctggaagtcatgaagctgaatcccatgaatggtctgtgcattctcagagagaactcttgaatacttctcaagaaagggaagatgttaaggtggacaatgttacatatgaggaagatcaaagatcagatgttgtcccttctcccagggatgtgcctgacagccatccggaactggccttggactatattgatacttctgacactgctgtagaatctgatcacgactctcaacaatctactgcttatgcatccactgctcctgaaacctgctcctccccgtcgtttactcgcgaggagtcaaaatcagttgttgcagtcaactggccggagcctttggagaaggttcctacttctactgtgatggaggaaagcacagtagaaaatgtggtctctaggatcacgactgaaagagatgttttagtagaaacagatgttgtctcgggcaaggataaggaagatatccgtactttggagtctgagaagtcaattgttgatagcaccccatatgtgtctgatgacggtccgccatcccttactttcagcaggggaaagggctcagatgcaggaaatggcagtggtagtctctcaaggttatctggtttgggccgtgcagcaaggagacagctagctgctactcttgatgagttctgggggcatctgtttgattaccatggtaagctcactcaagaagctagcaccaaaaagtttggtatcttgcttgggatagaccttagaacacctagcacatctgtaagaacggataaacaagctgctgaaatacttaagagcccactggtgagagactcaatgcggggggcagcttttttgtcaagctcagtggacatgatgtcccctaagaatgaaacgtcgaatttggaacttgcatatgggcttcagaggggacctggcatgggattgtcaagctggtctcagggtatgcagctaccaaatacacagctgcagagctcaagcaatagcctacttgagcagagtgcaagattaaactcaaattttagttcatcttattcagacaacaatcagttctaccaacctgcaacaattcatggataccagctcacatcttacctgaaacagatgaatgccagcccaagcctttactctagcatgccgctggacccacaacggcttccaaaatcatctgtgtctgctgtgccaaactatgctgattccatgatgcatgctcgtaatcataacctgcttgcttcactgggtggtactactacacagcttcctgcaacatcccgcgtaggctcaatgatgcctgaaagatcgtattatgatccttccagcgttgatgggaatgaaaacgctggttcacctgcttactcaaaaaagtaccacagctcacctgatatgtctggaataatcgctgcaagtagagctgcactcttgaatgaagcaaagttgggtgctgccattggaccacagtcatacctcagcaggctggcggcagaaagatctcaatatgcaagctcaacagccaggcccgcggctccattagcatttgacgagctttcacctcctaagctccagagtgatatcttctcggcgcagtcaagcatgagaccaagtgctagatccctttgggctaagcaaccatttgagcaattgttcggcatgtcaagtgcagagctcagtaaaggtgacttcaatcttccaggcagatcaggtggcgtggccaaggatgatttctcttataaggaatctgagacgaagcttcttcagtccctcaggctctgcatcatgaagctccttaagctagagggatcagggtggctgttcaagcaaaatggtggttgtgatgaagatctaatcgaccgagtcgctgcagccgagaagctattgatgcaagggactgccgagaatcaactgctgcttcatggtggtgatctccagcaacattcttccgaccaggccggcatccagtacatgcgcacgcttcccaactgcggggaggactgtgtttggcgcgcgtcactcgtcgttagtttcggtgtctggtgtgtccgccgagtgctggacatgtctctggtggaaagcaggccagaactttggggcaagtatacctatgtccttaaccgtcttcaggggatcttggaccctgcgttctccaagcctcggggtgctctgacaatatgcacctgccttcagaaagacaccagagtgcgcaatagcccaccccacagtgggctaacagccatgggcccggtccccacaccgatccggggcgccttcacgaccgcaggcgtggttctggagatgatcaaggacgtggaggctgcggtctcaggccgcaagggcaggagcggcacggcggcgggcgacgtcgccttccccaaggggaaggagaacctggcctccgtgctgaagcggtacaagcggcggctcgccagcaagggccagtagcgcgcgggtgtcagacaggcaggcgatcgcaagcaatgttaggaggagcctgactattgttctccaggggggctgccactggcgccggcctccctgagccctggattttttcgttgcacgacgttcctagggaccggtggttgcccgatggtcgtcttggtcccttccagcaggttttttttttccttccctctttctgttggtttctttttgttggctttgtgatgttttgtaaggggcaactagggtatgtgctcagaaggactcaagatgtacacgcgaagatgtactagtctgctgatgcagcgttgtaaagtccacactctgcaggttaaccctttttggggccgtcaagtgttagtgcgtgccctatgtatgttaatcacccctgcagagaggttgcgaatactgaactactcacagacctgcacctgtcgagatcgtttgtaatatccgacgtcttgttcagaattgttctcactcttttttgcccgttgtgtaatttaccctgaagggacttcaag

SEQ ID NO: 36356 - DNA, 2765 bp, Zea Mays
ccaattagtttccaggtcaaaaccaggcgattactttccagagtccagacccattcaaagctctccgccgtcctccttgctcctactcgggctacgacgctgcgccggtaggcacgaggcgttcgacgagtctctgcgctccgaccggccaccacggcgcgtgccgggagccgcgcggcggcggccatgggcgccgcggccttggacttcgagtacaagagggacgcttatggtttcgcggtgcggccacagcatctgcagcgtttccgcgagtacgccaagatttacaagatatggcaagcatttgtgggtgttggtgctcgaaggattcctgggtactacaacaaattgcttgatgacaggactgagacattggatgaaaaggatcttgtggacccagtggtcaacgaacagggaagtgcacccagaaaagttacccagcctgagaaatggaaaggacagatagagaaggatttgccacgaacatttccaggacaccctgcattagatgaggatgggaggaatgctttgaggcggttgttaaccgcatatgcaaggcataatccatcagttgggtactgccaggccatgaacttttttgctgggctatttttgttattcatgcctgaagaaaatgcattttgggccttagtaggggttattgatgattattttgatggatactacactgaagaaatgattgaatctcaggttgaccaactcgtccttgaggaggttgtacgagaaaggttccctaaattggccaaacatatggaattcttgggagttcaagtgggatggataactggaccatggtttctttcaattttcatcaatatgcttccatgggaaagtggtcaggttttatacagtgtcttggttctttcattatgatatgtgttattccaatatttttgttggtagttcactgctgtaatattggttaatccccttctggttcactaacatttaaatctcactatcagcatatggaaaattttcttatgtctttgtaggttatattctgttaccatatgtgtgctatcgatatctaagtaagactttacctctcttatagtacttcgcatttgggatgtcatcctttttgaaggaaatcgcataatgttgttcaggacgacacttgctttgctggatttatatgggcctgcactagtgaccacaaaagatgccggagatgcaattacactactgcagtctcttgctggatctacatttgacagcagccagcttgtattgacagcttgtatgggttttcaatcagttagagaaatgggattgcaagagttaaggaaaaagtacaggcctgaaattttaactgcaatggaggaaagatcgaaagaccgtggctcctggaaagataagaaggggttagcaaccaaactttatagctttaaacatgatccttcatatgtgtgctcaccagttaagtccaaggaagggctagatggttcaaaggtgaatggagagactgggccagcaaatcttgagacctaccttagtactagttctatactggataatgatttggatcagggtgttgatcttcaagatcaggtgtcatggctaaaggttgaactatgcaagctgctcgaggagaaaagatcagctgatctcaggagtgaggaattggaaactgctttgatggagatggtcgagcatgacaacagacgtatgttgagtgcaaaggttgagaagcttgaaacagaggcatatgaactgcgcaaagctttttcagacaagcaagagcaagagcaagtaatgcttcagatcttgttaagaatggagcaagaacagaaagtggcagaagatgcccgcatagccgctgagcgagatgctgctgaacaaaaacacgctgctcacttgctccaggagaagtatgaagcagcaatgacagcactttcacaaatggagaagagagctgtaatggcagaaacaatgctggaagctacaaagcaataccaggttgggcaggttaaagccaaccaatctttcacttcaagttcacctcgtgcagaccatgttcctgcgaagataaatcaagaaccaaaccaaactgcacctatcaggagaatcggcctgctttctaggggacttggatggcttgacaagggcaagggaaggcagaattccaatgaaacatctggagcctaaactcatctaaagtccaggatgaagtcatagctcccaacaagatctggattgttcattaacgcttggattgcttgatcaccgtaagagtgttgaaatcagcatcgatacatgttttctcgggaagattcagctggtatattccatgaagttttgcaggaagtgtatcttgtatcatattgagttcaattgtcagataaagttttgttggtaggtcagaaaggcttctgcaagtcatcggtgtaaattttcttttattagttccattaagattgtcaatagttagtgttccaaataggagaaagaaaagaacgacttactacacacaagaaaaatttctgttagattagttacagtatcatggagttgttctggagaagagcatgttttttttatctcttcagaaatgtcaaaaccaccgaagagattctctctctgtatttttgtctgatacgtgtggctcatacattcttcagtcacagttgacatgtttgatgtaaggcaattattgtcacgaggattctgattacgaatacaacagcagaaactccactatagggaggcgttttggaaagttaattgttgtcagttcctca

SEQ ID NO: 36357 - DNA, 2488 bp, Zea Mays
cttctccgctccgctcttggttggttctcccaaagtctccggccaccgcccattcccgaaattcccaagcacgcatcgagatctcttgaggcccctgctcctcgcctttgacgtgcacaacccccagtctcagatcacaccaccaccatggggagcataccgccgccgcatgctcctgccgccgcctcgccgccgccgcatcctctccggcgctcccgctcgccctcgcgctccgcctcggcctgccaccgccaccgccgtctcacccgctgctccccgccgccccctgccccgccgacgctcgcaggctcctccgatcgctccaccgcctccgccgcctcctcgggctctggcgccgcctcccatccggctccggctacgcttcctcgtccctgtcctccccgtccctcgccgcgttcgagtgggccccgcgcgccactctcgcggcgtcattcctcgccccctccgcgcacggggacgttggcgtctccaagtcccccttcgtgacgctttccatcgaggagtccggcgacacggtggcggtcgttggggaagtgtcggtctgcgtcaattttgtcgggaacaaccacattgtggtggaggcggtggtgggtgaagatgaggagtttgaaatggtgagcggttctccgccggaggagatctacgcgcactttgccaataggaggagccctggggcaggtaggaggaggaggggcaagcaggggaggaaaggaggcgggatggaggcagagcacttcgtgaggattgcggacactgagccgacgaaggcacggccactgcaagggctgtggaagactttgaacccttaactgttatcagaactacctgtccatgtggcaattgggttaatgaaatgacaagttttctttgtcaagcaaagctgtatggtttggttcctgccattgcatagtcccttgcacagatcgattctcatagtgttatgtcattgttgattaagagccatgaactgaagtgtactacgcctttggccttactgtgagtcttgaccatgaaccggtgtcagcaggaagcatgctagtgctgaattgcattatgtgaatgggttcccaaaacaaccctaagatttgttttaatttcatcggatcttgatacttcagaagcttggaaaaatctcattcaatcatcccaaaacatttctagacacaaaaactactctatgactggttagtttcaaatgctatctgtatgtgtccaaataataatggttttctggattatttcgttactaaaagctggggaattatcagttaacttttccagattccgatattgctgtgttgttatcaactacattttttatgaggaaacaattgtgggaggctgaatataattagctgtgcctgtagctgcatattattagggtgaattagttgtggtttaactaatcacgatccttgtaccgaatcctacaatattttgcagttagtatcatcttgtttagcattttgcatcttacctctgatttggagaaggcagatgtcatcttgtttattcattttcatcgaaatgttataaatttttgtttttatctcatcaatgatgaatgaccatttaatttttaatattcatttatctgtttctttgaaaaattgttttcatgttgttgatcactaggcatgcacacaacagaatgacgttaccaattttgaattggaggactactatgtacttggcagaatgatttattattagttgaccttttgccaagcacaatggattaatttccatgttcccaaacagggtatatgcgaggataggactttggaattttaccttgtcacctatgatgacattggtggagtaacttgtcgacgatttagggatacacagagccaaaactctggctactctcctgttttttggacaacagatactacatttcttgaaccaccattctctgagcaagagctggttaattatgccagccgcgatcatatccaaggtgttacttccaatcatgcaggcgctgagaacagggttgtctcaaggatattacgcatcaattccagttatgatgtggttgatactcatctctcaactcccttggatgatgggaggagcgtggagggaaggatttggctatatgaggatggaaccttcggttttggatttgttggcagtaattcaattatagatctgaggcatgtctcctcggctggctgtattcttgatacttaacattagatgatctggatcttgctggcacataatttttgccagcgagccccttgtacagtacttggtgtgaggcatgttgcctccgatttgttgtactctcgatgataaggtcactgaatactggtcccttctggcacttagctgttgctagaatgcccttgtaaaccgaaccttggttcctttgggcatgtacttgttgacataataccgatgtatattacagtactatttgttcattgaattccaataaactgcaactgttacttcc

SEQ ID NO: 36358 - DNA, 3132 bp, Zea Mays
ctactaccactcactagtcgccacaatttggtgtggccttccttccccagcaaaggcaaacccccatcccggtgtagcaatatagcaaacgtgtcccggttgtctgccgccgttgcacagcactgggactgggatgaccggtgtccaagagccgctcagttccgttccgtgctccgcgggtgggcccgccgctccactcgccgcgccctcccgacctcccgccacgtgcccccctcgccgtgacgtgggtggtggacctcaccaccacccgccgcgcgcctggccgcctccatatataccgcgccccgcctctcgccttccgcctcatcactctgctagctgccccggtctcctcctcacactccctctatcgccaggcaacagcagcgcatgccagcagcagcgctcccgattcggcgccacctcgatccccagtccccgtccacaccacccaatcctgctgtgttcttgctgcagccgttggtctcctgctttgttcgggtgctagctgccacgcgcgatgcctcctaacgcccaagacgtgcacgggagcagcggcgggctcgccatgacagccccggcggcgtccaagatggactgcttcttaaccgccgtctgcacgccgctcaacctccagttcatcgacgtgtcgtaccgtgtgaagcagacggagcggtcctcgaaggcggcgccgggcgggcggatatcgcactccggttccggcgccgcggcgccggaggagcggacgatcctgaaggggatcaccggcgaggcgcggcccggggaggtgctggcggtgctgggcccgtcggggagcggcaagtcgacgctgctgtccatactggggggccgcctggcggggcaccacggcgggacggtgctggcgggcgggcggcccccgtgccgcgccgtgcagcggcgcacggggttcgtggcgcaggacgacgtgctgcacccgcacctgacggtgcgcgagacgctggcgttctgcgccatgctgcggctgccgcggtcggcgcccgccgccgccaaggccgcggcggccgaggccgtgatcggcgagctgggcctgggcgcgtgcgccgacaccatcgtcgggaacgccttcgtgcgcggcgtgtccgggggcgagcgcaagcgcgtcagcatcgggcacgagctgctggtgaacccgagcctgctggtcctcgacgagcccacgtcggggctggactccaccgccgcggcgcgcctcgtggcgacgctgtcggcgctggcgcggaaggggcgctccgtcgtcctgtccgtgcaccagccgtcctcccgcgtctaccgcatgttcgactccgtgctgctgctcgccgagggcagctgcctctacttcggcgccgggcgtgacgccatggactacttcgcgtccgtcggcttcgcgccgggattccacgtcaacccggccgacttcatgctcgacctcgcaaatggtttcgcccaggcagactacaatgccgtcacaacacaacagcaaggcggcagcagcgtgaagcagtcgctcatctcgtcctacaacaaggtgctggccccgagggtgaaggcctccgtcgtggccgcggagccgccaccgccgccgcacgtgcagagcggcggcgaggcggcggagagctgcagcacgagctggtgcaaccagttcacggtgctgctccggcgcagcctcaaggagcggcggcacgaggcgttcgcgtcgctgcgcgtgttccagatcatggcgccggcgctggtggcgggcgccatgtggtggcgctcgtcgccgctggcggtgcaggaccgcctgggcctgctcttcttcgcctccatcttctggggcgtcttcgcctccttcaacgccgtgttcgcgttcccgcaggagcgcccggtgctggcccgcgagcgcgcctcggggatgtacgcgctctcgtcctacttcctggcccgcaccgcgggggacctgcccatggagctcgccctgcccaccgccttcaccgtcgtcgtctacctcatggcggcgctcaacccgtcccccgtcgcgttcgcgctcacgctcgccgtcgtcctggcctacgtcctcgtcgccggcggcctcggcctcgccgtcggcgcactcatgatggacgccaagcgcgcgtccacgctggtcaccgtcatcatgctcgcatacctcctcaccggcggcttctacgtgcacagcgtgccgcggttcatggtctggaccaagtacacctccttcacctactactgctaccgcctgctcatcgccgtgcagtacagcggacacctcaagcgcctgctcccaccggaggccgtccacggcgaggttggccccggggcctgcgtcgccgcgctcgtcgccatgttcttcggctaccgcctgctggcgtacgtcgcgctgcgccgcgtcaggaaatgatccatctgatgatctcaacgcgccgtcggcagtcgctgtagctagctagggaagtgtccattaactattgcatgcgtgcgccttggcccagccggtaaggccaccaaaattctcaattcgtggagagcatactgaattgctccggcttccattccatcagagtgcgaaagctgaaagccattgttcgttctaccatgtgtccaagttctaacttctaggcaagtttctgtgtcacaatgctatcagcgcactgctctgattgggccgagcaaaggtctttgggctggactacaggccaaatatcgaccatggataaacaagggaagcaatataaaaagaggagaacagtagctgagagggcatcgaggaacatctggacgacgaaccgggaaactggcggcgagatcacgctcgaggctagattactccttctcctcatgtatctagagaactaattcctcttctatattcgagttggtggtaaactatattgggtctgttacattctggtgccgcatattttttttttcaatgtccctggatccatagaaccatgtcccaaccaaaattcatgcaaggtacttgtcacatacgaatcaaattggctactggctaaaccatgtgttccaaacaagcagtgcgactccagttgagagcgtgaaatcaaactcccacctccgtatcctggagcaagggaaagaggtcaccagggc

SEQ ID NO: 36359 - DNA, 640 bp, Zea Mays
gcgacacagacaaacaggtcattattggtagtaccaaccatgaccgaggagtatttgaagcacaccagcatccatggacgactcaccaccatgctgcttttcatgattcttttggcatcctccgacgtcgtccgtgcacaaacaataagcggggaaaccaaagagggcgtcaccactcctaggagcatgaggacagcgagcaacataattagcaccgatggagaagaagcagctcctagggggtggtgctttcatgacattgtttcaggattttactactgcaggaagactgataagtactttaggagcttctgtgattgcttgaagcattgcctttcttgacgcaacaggggttgaaattaaggactagtatttgatttcatttgaggccgtgctttctttctttctccggttaattttgtggaaggagatcaccatgcatgatgttctaccttctaatcatggccgcctggctggacctaatctgacttatccatgattatgtgtttattgtttcaagaaatatcacagccgttacaaaacacttgtatttggatgcccatactacgtaaccggggattttttttgcggattcatggtgtccaatctcttttttgcggactagatcgatcgatagtcc

SEQ ID NO: 36360 - DNA, 4565 bp, Zea Mays
acaaattcaaataactcgctgacctccactgctccacacctctacctgcctgcgccaaaacctagccgccgcggcgccgcccgccgacctgccgtgccgactgctgagtgccgaccgacgtgcgcccgctggccgctcgacgttgttggcctccctcgacgccgctggccggtggccgctcgacggagtcgacgcctcacagcctccctcgacgcgacgccgctggccactcgacggagtcggcgcctcagtcacagcgtcgggaaaccagtgccaatgtggcggcgtcgtaggccgcggaagccatctcgggcgtcgagtacgtgacgaggcagatcctgctgggtttgcgcagctcgcggccggatctccgataccacttgatgaacgtatggagagaagagaggggcatcctcacttctagtattcgtagcaagagagagacagagagagagacagtgattaatggcctgcgtcctaaatttaagctagggcctggcagtaattcaattttttttttgtaatctagcaaatcttgatacggaccattgctagtacctccttgcattgcgttgataaaggtgtagcattgtagaccttgagggtcatggtattattactcctggatttctagttgttacttgacaactgaatatgctttgttacttttcttgtcaaacaactgaatatgaaatggctgtcaaacaagatgttttgttgattttctcttgttgagttgaatggctgaagtcatcatctatagttgtacagtacagtagcatatgacattgtgtatatgacagcttgttagtgctgccattgctgtatagcagcttgttagtactgtcgttgctgtcaaacaggtgttacaagtgtctttattccaggctcaaacgaacgagctattctgcagtttttgtattgattccagacctgaattcatcattgaccaagtttcggtgaaccaactggatgcactatatccgggccaggaacagaaacgtgcatgattttaatcctacacaaacgaacgcggccttagcaattttgttaatttgtttgtatccaatggccgttgcttgggtgattttgcttcgatccgttttggatcggcgtatctttcgctgctagtaccttttggaagtcaaggagtgctgtctttcgcctgatctacctagacaagagtacactatgcgccttttgttgaatcagtgacttctattttggttaagaagcaccgatagccccctgctctgttgaggttcgacgcaggggggacaaaaagcgacataagggtatctatggtgcatggttaatggatcaggcaggggctctataactttatggaagccagcgatttcccgcagggtcatgtcttctgcccacaccatcatctcactgctgttttctttgatgtactgctcgctcagttacgtttgctgctctcagttaatctgtttagtcacactctgaattctgtttcgaagcaaaatgatgagactggaacacctgaatgttatcatgtggagagcacacatatggtcttcaaatttctctggttgctttctatgtgtaccctgtacctttcatatccgatccatgtttgtctagtggagtaatgtgttctattttctttgaccatgccatctaaataatggtactagttgtgctcgagtctgaactgtagtgtttagtcactgagaggcaacatgaagatgccttgtaatctgaagctatctgatgttgatacatacattcattgtcttcaaagttctctgattgctttctctgtgtaccctgtacctgcatatccgattgacgtttgcatagtgcactagtgttctatattctttatgctatctgaatattggtactagttgtgcttgagtctgaaccgtagtgtttagtcactgagaagcagaatgaagaggtgttgtattctgaagctatctgatgttgatacatacattcatggtcttcaaagttctctgaatgctttctctatgtaccctgtacctgtcatatccgttcgcagtttgtctagtgcagtagtgttctaatttctttgactacatctgaatattggtactagttgtggttgagtctgaactgtagtgtttattcactgagaagcaacatgaagaagccttgtaatctgaagatatctgatgttgatacgtacattcatggtcttcaaaatacctatgtctccttatctaaatgattctaggttatgttctgtttcttttctgcctgaagctatagatttagattagttttgtatgtcaagaagcaaaatgaggtcatatgatctgaattgtccgatattcatgcatcatccatgatctaatccactacaagtgtagtatacatgtatcatgcctacagaccttttttttaaagtgatggtgtgcatgttgctttgctttgttgagctaatccattacaggtgtagtatacatgtatcatgcctacagaccttttgttgcagcgagaattcagactgctgcgcgccttcatccccttcccggcggccgacgtccaactccgcctcacagtgcttctgtggttctgcctagcgcctgctcctgctcgtagtgctcgactacgggctgctcttctctagccttgagacagagagtcggagactccagtgcccctgctagcctgccctctggttttgtgttaagtgtgggggtgatgatgagccaccggaggcgttctcgcgctgccggctcgccgcctagtgacgccagtacgggtacagcccctactcctgagaagtcgggatggatccggccgtgggcagcgacagggtcggaccttaaggtgctggagcttgcgctggcgttccgcgcggccaacgcgttgctcgtgcgcacatacttcaaccccgacgagcactggcagtgcctcgaggtcgcccaccgcgtcgcgttcgggtatggtcatctcacgtgggagtggaagcggggcctgcgcagttatctccacccgttgatctttgctgctttgtacaagaccctggcgctactccatctggacactccgtgggttatggtgatggctccacgtctcgtgcaatctttgtttgcagcttttggagatctatacctatataaactttccaaacttattttcaatggtcaagttgctaagtggacgttattttctcagttggttaactggttcatgtttttctgtatcacacggactctatcaaacagcttggagactgttttgaccgtggctggactctattactggtttgctgcaatagagtcttccaaggcaacttcaatcgtttcaaagcagcatgcggcctgtgaacaaagtatcccatcaagaaaagtggctcttctgatagcagccttatcatgtgccattcggccaacaagtgctgtaacatggctatatgttagccttttggattttattcagatgaaatcaaaatgttgctttatccttcttgatgtcattccagtaggggcaattgtccttgctgtaacaacactccttgattggtggatgtatggttcctgggtcatagtgccgcttaattttttgaaattcaacttattgtcttccggaggagactactatggaacacatgtctttcattggtactttacacagggttttccatccatgatttggacattcttaccatttgcattgtgcggcattgtaaagtctcaggaatggaggctttcaggtctaattgcttgggtattaggggtttacagcattcttggacataaagaattcaggtttgttcttccagtgctacctttagcattgatgttctcaggttactgcttagcttccatgtcacggtccaagggcaaaaatcagcataggaaagatagtctttcaaggatgcaaccttttgttattcttctcgtcataaccaacgttcccatggctttatatatgtccttattccatcaaaggggaacagaagacgctatgtattatttgtcaaaagaagcccatgatggaagagtgaggagtgttctctttctcatgccttgtcattcaacaccttactactcaaccttacattacaatctacctatgcgttttttggactgcactcctagtgatagcaaagggaccttggatgagtcagatcgtttccttacaagtccatctgagtttgtcggcgaggtttttggaaatttatctgcattcagtcacattgtaatatttgagtcagaagaaagacatgttctccagttgcttctgcacaattcctttcttgagatgaggaggtttttccactcacatttcaaggttgacagagaccttcagtcggctgttgtggtttattcacggaggaatgtgctctgatttagtactgatgtggcagaaaatgcctgttagctcgtgtagcaatccccacacgttcatgttgtttcagcttttcacttgagaaatgagatgtaacactgccggatacttctgatgtattaaacccctttgaacgagatgttacgttacttttactcaagtgctttacaacgacaataacaattctctgcttcttctaagataaaagtctg

SEQ ID NO: 36361 - DNA, 4324 bp, Zea Mays
ctctctcttctctacgcacatatgaatgagcactcagtttcatcgtcgtcgtccttcgtctctccatagaaaacacaccagctgcttctcgttcttccgcgtcgtacgtaccagtaccaccctcctggattaccacctccatagctttgatatctctcatccatcgattccctcctagaatccaatccgatgcggcggccaccacccccgccccaagtggcgtcctcgtgagaggttggcagcgagctacatcagcgagaagcctagggcgcgcagtatatctcggaatgtgctggctcccaacagccgcgaagcgattctcccctcaccctcgaccacgagccgcctatataaccatctccatggctccccctcccaacccccaccagagctagcggcatcactgtcatcgagctcgaccgacgaccgtcgatcggtacccgtcgtcgtcgcggcgtcgtcgacgacggcataataatataataaccaggccagggcagggaagatggtgaagttctccaagcagtttgaggggcagcttgtccccgagtggaagcatgccttcctggactactgcctgctcaaaaaggatctcaagaggatgcagcacgcccggcaccatgctgctgccgaccgtcgccaagcagcaggcctaaccgacacgcaagaaactgccgccggccaccacgcggaacgggcctctctctctctgtcccagtggctcctggacaggctccccgctggcctcttcggctccaatgctcccaacagggatcgtcatggggtcatacacgtgcaccgccgcaagctggcggggtcggcgagcagaggcggcggcggcgacgtgtacgagacggagctgctggagccgttggccgacgacgacggcgacgcggccgcggcgcgggagttcttcgcgcgcctggacgcgcagctcaacaaggtgaaccagttctacaggggcaaggagcaggagttcctggagcggggccggtccctgcggcggcagatggacatactcgccgacctcagggcggccagggccagggaggacccctccgtcgcctccgcttccgccgcctccgaggatgagtacacaaggtatgcgatgacgtcagcatcagacacggacgcgctgcagctgagcgagcaagaagaacaagccacgccgctgccgaccgacggccccggcgtcacggctcaggaggaccaccagcagcagcaggatctagaaggctccggaaccttcgcggtgaggccgcccttgagcgggtgcgggaggaagagcctgaagatcaccatcccactgaccaccccctccaggacgatctccgcgctgacggacatcctgtgggacgagctcgccatcagccacttctcctcctcctccaagaaatgcatcccggacgggaagcagagcgtcagcaagaccaagctccggcacgcggagaagatgatcaagcgcgccttcgtcgagctctacaaggggctgggctacctcgccacctaccggagcctgaacatgatggcattcgtgaagattctgaagaagttcgagaagatcaccgggaaggaggtcctgtccatatatctcaaggtggtcgagacctcctacttcaacagctctgatgaggcgctgaagctgatggacgaggtcgaggacatcttcgtccggcacttcgccggcgacaaccggcgcaaggccatgaagtacctgaggcccgcgcagcgcagggactcgcacgccgccaccttcttcacggggctcatggccggctgcttcgccgcgctgttcgtgggctactgcgtcatggcgcacatggcggggatgtactactactactccaccccggcgccgccttctcgcgcccgcggtaccggcggcggctcggtatctgtgtcggtgtcggtgtccgtgtacatggagaccgcgtacccggtgctgagcatgttcgcgctgctgttcctgcacctgctcctctacgggtgcaacatggtggcgtggcgcaggtgccgcgtcaactacggcttcatcttcgagtcgtcgccgtcgcccgccggcggggagctcgggccccgggacgtgttcctcgtctgcgccgcgtccatggccgccgtcgccggcgtcatgttcgcgcacctcgccctcgtgctcaggtggggctaccacgcgtcgccgcacgtggaagccatccccgcgttcttgctcctggtgttcctgctgctgctgttctgcccgatcaacgtcgtgtaccggtccagtcggtttcagttcctcaggatactgaggaacattgtactgtcaccgctctacaaggttgtaatggtagacttcttcatggccgatcagctttgcagccaggtgcctatgctacggagcctggagtacctggcgtgctattacatcagtgggagctactggacgcaggagtacggctactgcaccaacaccaagcacatcagagacctggcctacgccgtctccttcctgccgtactactggagagccatgcagtgcgcacggaggtggttcgacgagggggacacgagccacctggtgaacctgggcaagtacgtctccgccatgctcgccgccggcgccaaagtggcgtacgagaaggacaggagcctggcgtcgctgtcgctcctcgtcgccgtgtccagcggcgcgacggtgtaccagctgtactgggacttcgtcaaggactggggcctgctccagcccaactccaagaacccctggctcaggaacgacctcatcctcaggaggaaatccatatactacctgtcaatgggactgaaccttgtgctgaggctcgcttggctgcagaccatcatccatccaaattttgggagcttggattctagggtcacttccttcttcctagcggccctcgaggtgatccggcgagggcattggaacttctataggctggagaatgagcatctgaacaacgctggcaagttccgtgcggtgaagacggttccactgccttttcatgaagtggacgacgactaaatgcacatctactgaaccatctgaccgtcactgctactgctagatcgaacagctttgttccttcaacactctgctgaaattttttttgaactcaagacgtggagaattgttcagatccttagctgttcgcctgttcttgcgtgtaattcgttccttcagggagtggcgtctctatgtaaccgaagatgcttgaatcatttgttcgttcctagatgcgtcaaggtgtaaataagaggcatcgcaatcgcatttcgcagtagtttgtgtgagcaagtggtggtgagtcgggtattaccacatcggctgacggtgcagggccggacacgtcctccagatcagccggcgacggcgcggcgggagctggcgggctcagcggctgcggcgcttccgcgggcgcctccttcttgccgtgctgcttcctcctcctcttgtgcttgttcttgcccttggacggcgcctcggcgggcggcagctccgcgggggcctcggccacgggcgggggcgtcgtcgcgggaggcagcgacgcgggcgcctcggccggaggcgtcgccgtcggcggaggcgccgcggcgggcggcagcacggcgggtgggagcaccgcgggcggcgtcgcgggtggaggcgtcgcgggaggaggtgtcactggtggcggcgtcaccggcgggggtttggccggcgcgaccgcgggcgcgaccggcggcggcttcgctggcgcgactggggtggcggtgggcgctggcgttgtcggagccggcggcgggtttgctggcgcgaccggggtggcggcaggggtcgtcggtgcagccggagtcgtgggtgcgataggtgtcgtcggtgcagccggagtcgtgggtgcggccggggtcgtgggtgcggccggagtcgttggtgcggcaggggtcgtgggtgtagccggagtcgtgggtgcggcaggggtcgtgggtgcggccggagtcgttggtgcggcaggggtcgtgggtgtagttggcggcgactgcgccacggcggcgatgaggtggagcccgaggagggcgccgagcacggcgaggctgcgccattgccgaagcagcggcgcggccatgcttccggcggtggtggtctgcttggagaggaggcgcgcggatgctgagccctgagctcgccggtgagaatgcgagtgatggatctcggggcgatgagtagcgtagcacgcgagcagagtatataggaggcctgagcgtgcgcgggctcgccggaagtatggtatggtagtggcttgggagtgaagggagttgggtgagcgtgcagcgcgacgcgaacggcgac

SEQ ID NO: 36362 - DNA, 991 bp, Zea Mays
atggcaccttcccgaagtcggaaatttcgaacccgacctccaatctcatattcttatgcacttcacaaccgcgataggatcaatttgttggtgtctttgaaaaatccacagatcgatctaagacgggccaataacacagagatcatgttgacaaaaatcaaaatgccgctccctgatatgatgagtgctgctctagctttggacgattcagttttggatgctgaccagattgaaaatctaataaaattttgcccaacaaaagaggagatggaacttctaaagaactacagtggggacaaggaagctcttggcaagtgtgagcatttctttctagagttaatgaaggtgccaagggttgaatctaagcttaagatatttgctttcaagattcagtttcagtctcagattagggatgtcagaaagaatttgcagactgtatcatctgcttgtgaggagaagctctgagaagttgaaggttatcatgaagaacattctgttaattgggaatacattgaatcaaggcacaccaagaggccaggctgttggttttcgcttggacagcctcctaaaacttatagagacccgtgccactagtggtagaatgacattaatgcattttctatgtaagtcccttgcagagaagtcaccagaagtaatggattttcatgaggatcttgtccacttggaagcttcttcaaagttgcaactaaaagcattggcggaggagcagctggcagtggtaaaggggctggagaaagttgaacaggagctaactgcttcagaaagtgatgggccggtttctgatgttttccgtaagactttaaaggagttcattgattgttcgagtgctgatgtatgctccttgtcagcattctattctgaagtaggtaaaagcgcagatgcacttgctctttattttggagaagaccctgctaaatttccttttgagcaaggtaatattcatgcctatagacccatggaaatggtttaa

SEQ ID NO: 36363 - DNA, 5845 bp, Zea Mays
acataatcttttattttcattgccaacattgttttcttgattttctgcctttatatcttcttgattaaaactttttgatcgataattctagttctagacaaaatatgaagctagttattttcctatgaactgaatgtttattctgatacccaaagacctcccttcaaacatagtctgtcttaaactattccactttattcatgcatgttgcttgtgctcagacagtactattgccatgaagcaaagtctgtcttaaattattccactttattcatgcatgttgcttgtgctcagacagtactattggtatagtgactagccgtctagcactatattaatttattcttttctgaagacaatctaagcacacgggtgccctacccggtgctacattcggtacatggcatccggtgtacaccgtagtatccactatccagtgctatctgctgtgatgtttttccttacaatatcaaggatatcatttctattattttgttttcattcagctctctaatgagacaaaaatagttcaggggcagatatgtcattttacatgccaagacagagaatccatttaaaaaatcaggattgccaaacattcagcttttctagacaacaaattctctggaaagcgtcttctcaggaaatcaggcttttcagataagcgtttctcagaaaagtggatccaaacagggcctaaattagtgtatctacatgcagctcaatcaaaaactggatcttggatttaaaatccattattcacttctcaaaattagcaaatttaactaagttttactatagatggttcagtgacagtaagctaattgatgcaaataagtgagtctagatgtatgtgcggacccatgttcaaaccgcgcacctgcaactaaacatcacattcccacaatgtgctgttgaatggaatcccagaagaagccacatttcataggtgtgacctttggcagggtgatcccttatcacctatgttatttattctgattatagacgctttggtttatttggttaaaaaggctgaagaggatgggctgcttcagcccctgtcttcaaaggttcttcaacaccagatttctctatatgcagatgatgttgttatcttcctcaagccggctactagtgatatgctttcatcatggatgtgcttcacttgtttgggggaggcttctggtcttaaaaacaatgtgcaaaaaactagtgattttcctataaggtgtgaagattaatacttgatggtcattcaaggccttctgccatgcaacatcttgagcttgataggattgccaattagctacagaggtggaaggctaacttaataacaagggctagcaggagggtttgagtttagtttgtgctcataggaatgttgatctactttgctatgactactgacattcctccttgggttttcaaagcaattgataaaatcagacaaagatttctatggaggagaaggaaggatgccaaaggcgggcactgcctcgtggcgtggggaaaggtttgtcacccccttgagcttggcggccttggtatttcaagtcttctagagctatcttgggcactccgcatgagatggctttggctccaaaaaactgagtcaaataaaccatgggctgatttacctatccaagtcctagccaaagcctaggtgcttttttctattgctctgatttctaaggttggggacggcacatccaccctattctggactaatcgttggttgatggggcaaaatatcatggaagtggcaccaaggttgtttgctgcttgttcctaagagaattacaagaaggagaattgttcttgaagccctcactaatcatcactggattttggatgttcaagttgctttaacaattcaagtaattgtggattatatctagattcgggactgtctcagtcaggtggagttacagcagggggtggctgattctcacatccagttctcgcgtaatggaagatattcagccaaaatggcatatgcgggtttttttgttggctcggttccttttgaaccttatgagaagatttgatgttcatggccccttcctaaatataaatgttttctgtggttggtgacgcacaacagatactggatggcaggcaggctggcttgtagaggcctcccggtgcctgctgtgtgactaggaagatgaaacagtcagccatgtgcttctttcttgtatgtttgcgtgagaattttggttcaaaatcctaaggccttatggcctgcagacccttgcaccataatctgaaggtaggagtttctttctctggtggacgcaggctgaagagagaactaaggggttgacaagaaaaggtttcaactccctcgtcatcctgggagcttgaactctgtggaagatacgaaatggatgtctttgaaggcctctccccatcatatgatttcagcttctgctcactttggtgaagaaatagatttatggatgatggctcacgccaaaggattggtgttcctttcagccgtggctgaggattagtggtagttggtctgctataatctatgcctatgaataatcctttcttgtataagaggttttggccaccatgagctagccatttgagttttgtaaggcctttatacgtttcttcttagtataatgatacgtagttctcctgcgtctttgagaaaaaaagttctaacgaaattcactagaatttatttgatgtggcacattttgatatcaggtacttcttgaagattatatatagctcatttaaatgtgtgatccatgtcaaaaggtggacctgattaactgattttgaaaacattatattcacaccttaaattattaaatttgtttcaaggccaagtagcaatgtatatacacccaaatgcgtctctaccaaatttgaaatgtcttatcataaaattcaagctctaggtccatatagatctcattctctaaaaattgatccatatagatctatccctacatgtaaacaaaacctagtcatgcatacctatgatttattccaacaaggcgcccacaaaaataaatgatcaaatattttatcagaatttacatatcatttcttttttctagtcattgtaatctgtactattcaatagacacatgtttgtgaaaattatagagatgcaaggcaggttatccgtaaacccgtaaatagactaaatttttacgagttacccacaaatttgcaaaagattagcctatttgtgggtttatggacaacccgacttgcatccctcaaatattacataaaaaaactgagggtggttgaaaacatacagggagtgcttgaagatggctttgttgccgtcaagaagttatactcgtatattgcaattgaagacgaaccatttcatcgtgaggttgattgtctaatgaatattaggcaccacaacatagtcttgtttgttggttactgtgctgaaacacaggaagtggttgtgcgtcaagaagggaaacatatttttgcggaaaaacgagaaagattactttgcttcgagtatttgcataatggaagccttcacaagcatctgacaggggttacatggcacccgagtacttggatgatggagtgatcacaatgaagacagacatctatagcttgggtgtgataatcagacacatggtgaagggacgtaactcggcagacaccactgatgaagaagtactggcaaactggttgattaggctggaaaaggatccatcacagatgatgaggcagcagacgacccgattattatttgaaacagagtacaaagagcaaataaaagcgtgcatggatatatcatggaggtgcacgctgcgtaaaccaatggacaggccaacgacgcagcacatcctacttacactggaggaaacagaagcaaagatcaaatcggtcgttgggcctactccaccaaatgccgggcagcttcagattgccaaatttgggccgtggggtggagatggagggaagacgcgagacataagaatgacgccttgccatttgcatagcgtaacaattagcagtggaactattatcgattctatcgggttttcattcactgatcactatggtcagcaccacacaacagggccttggggcggtaaggagggtacgaataagattgaactaggcccttcggagtttcttacaggagtatctggaacaagcggcccattcaaaaatctaacaaatgttgtaacgtcacttacgtttgtcaccaatactcgtagttacggaccctttggaaaagggcgaggaacaccgttccacatccaaacgcagaacaacggcaggatcgttggcttctttggccgttctggccagtatctctatgcgattggggtctacacgaaccaagatgctagggtcgcaaggatcgggcgacctttgggtggagatgaaggggttcttcatggcatcacagacctcagtgggcagcagcgcagcagaggtggaggtccatcgggagaatgtggagacagcgacgacgagcccaacggtgatttcgccaaattcggcccgtggggcggcgacggaggacagccgcaggacatcggaacactaccctgccgtctagacaggatcaagatcagcagtgggcttatcatcgactcgatcgagttctcgtacgctggccctgacagccagtaccgcaccgcaggcccttggggtggtcatggaggagacaacagctcttttcagctagctggttcagagttccttacaggtgtgtctgggtcaatcggcacattcaacggccatgcaaacgtcataacgtctctgacgttcgtcaccaacgctcgtagctacgggccgtttggaagagggcgaggcacatccttccacatcccagtgcagggcaatggctgcatcgtcggtttctttgggcgctccggacggtacctcaacgcgatcggtgtctacacggcgccgaaacccgaaccaaaagcaggtggtgatgaggccgtcgtcgccaggattgggccttggggcggggttggaaatgctctccatgacatcgcagagaggccgcatcgcctgcacagagtgacgatcttcagcgggacgatcgtaaactcgctggagtatctgtacagcgatggcgacgggcagcagcacaccaccggtccgtggggcggctgcggaggaactggtcgaaagattcatcttgcccctgaagagttcatagtggaagttactgggacattccatccatgcgcgtgggacagaacaatacccagtgtcgtgtcctctctgacgctcgtgaccagcacgggcaaaacacacgggcctttcggaacgcagctgggagccgcgttccaggttccggtgcagagcgacagcaggatcgttggcttcttcgcccacggagacaattacatcgaagcaattggcgcctacgtgaagaaattgacagaatccagcaaccgttaactcttggaacaacttgcagctgttcacactgtttcttgggccattgctccttaaatttagtccagatggccaaggagcaaccaaacagaaatcgctatggcagggaagatggactaaactggactgtggcacctccagcatagcctgctcttagattagtgaccagacatcatcgagatatttcgatattataataaatgaggaacccatctcagatgtttatgttagctcctcagtttttgcttctgaatgattaatttagatcttccttatttttgcaataaatgaggattcttttctgtctcttctgaatggatacgaatcatgcatcacgtatcagtgcacctattgcagtgaggagatgaggacaaggtgctgacgaacttattgtcctgagctcccacttgagtttctg

SEQ ID NO: 36364 - DNA, 1661 bp, Zea Mays
ggcccttgcccctcaggcgcattgtttttttttgtgtctctggcgccgttgggtggggcaccgtgggcggtgagctgaccgccgcgccgtcggtgggcgtgggttgggggtgggggtgcttattctgggcggctccgcctccacgtatatattacacgcgcgcgcatgtacgcgaagaattttagtggggagccaacgaaggcaaggcaagccagaccagcagcgggggagagaggaggcagaaggagattctagggagttaagggaggcgaccgccatgggggactccagcgactccgtgtcggtcgacgtcgagcggatcttctttggcggcaaggggcatcgagtgaggacgaggcacggccctctatcggtttctgtatacggagacgaggacaagcccgcgctcgtaacttatccggatttagccttgaatcacatgtcttgcttccaaggattgttcttctgtccagaggctgcgtcgctgttgcttcacaatttctgtgtgtaccacatcacacctcaagggcacgagtattgcagttaggagcggctccaatttcagctgatgtgcatgtgccgtctgtcgatgaccttgcagatcaggtcgctgatgtcctcgattttttcagtttgggttcggtcatgtgcttgggtgtcaccgctggtgcctatgtgctcaccctctttgcgacgaagtatcgggagagggttcttggcctaatgttggtttcacctgtatgcaaagccccctcttggagcgagtggttgtacaataaggtattgttaaacttgctttattactatgggacgcgtgggatagtcaaggaaagtttgcttcagcggtatttcagcatggacgtccttggtaacggacaggatccagaatcagagattgtccaagcctgcagaagtttacttgacgataggcaggggactaatgtctggcggttccttcaggcaattaataggcgacatgatctaacagaatcgttggagaagcttcagtgccagacgctgatttttgttggggaaaactcacagttccatgctgacgctgtccacatgaccacaaagctagaccggagatactgcgccctagtcgaggttcaggcatgtggttcacttgtcacagaagagcaaccccatgcgatggtgatcccgatggagtacttccttatgggatacgggctttacaggccatcgcagcaggaaagcagcccccggagcacactgagcccgttctgcatctcgcccgagcttctgtcgccggagagcatgggagtgaagctgaagcccatcaagacgcgcatctcacgtaacgtttagtgtggggtggatctcggttggccatggcatattggcatggcaatcacaactcatcaaagtgaaggactcccttgggctgagctgatcaaccacgaaattttgatgcctttcggcatctagcgtgagaagatttacagggtgaaggcaatttttgtcgatgcagggaggttgtagataatgagggggaatggttgtttgttcatatacatatatgtgtaagttagtacacatgtacacctaaacacggcatcgttccatacagtacagaatacagagaaagaaaatgggaaagctgaatcgtcgtccgatactgacatgaactctcaagcccg

SEQ ID NO: 36365 - DNA, 801 bp, Zea Mays
tgtgcgtgtctgctccctctcctctggctgccgctctccacagtcctcgggctccaagccttgcgtaaaccccgacccccacgcgcatagatgaagactaggtcgcagacgtcgccgaagcctctcaagacggtggcgatggctcccaggccgagcagcaccaagcggaagccgaggcccaagccggcggggaagggcgacccccgcgcacccaagaagccacccaccgccttcttctacttcatggaggattttcgcaagatctataagcaagaaaaaccaagtgtaaaatcaatgcaggaaatagggaaggcatgtggcgaaaaatggaatacaatgacatttgagttttcacttaattcatttcacaggaaaaggtcaagtattatgatatagctactgagaaacgtgcagaatttgagaaggcgatgattgaatataacaagaaaaaggaaagctgaacatttgtctgttccaaattcccgatggttcactgtaactggatgaatcaatcagctgtatattacagaactgtgatttttagtggaatttataaataccactagttggaaccgtcagctcacgcagatatgtatcttttgtagtcgacttgcacattttgatgacaccgagtcttctacccggtgtttttcatctggagataatttgtgtttcgtgctaactgctcgttaaattgcttattatagagttgtatgtatgattgtgtatataataatgtcctccaacgcaaaaaaatatatatattatcacagctaaaacaaatgatatccctactgtcaa

SEQ ID NO: 36366 - DNA, 1748 bp, Zea Mays
ctctcccgcttccgcttcccctcagccgtcacctccccgctcccaccgccaccaatcgcactcgcagtggctgttggcgtgcgctcgcgtccaaaccaagcaaaccccacaaatcctaccttccgccggcgtcgccaccggccgtgctccctccctccggccccggttgaccctagcctcgcatcaccctaaccctacccccctcccgccgctgccagagcaggggaaaaagatgccgcgcgagatcatcacgatccaggtggggcaatgcgggaaccagatcgggatggagttctggaagcagctctgcctcgagcacggcatcggcaaggacggcctcctcgaggacttcgccactcagggtgaacaatttgttgatgatatcatggacatggttgacagagaagctgatggaagtgatagccttgagggttttgtcctgtgccactctattgctggtggaactggttcaggtatgggttcttatctattggagacactgaatgatcgatacagtaaaaagcttgtgcagacatatagtgttttcccaaatcaggattgccgtcgagcgccttcatctatcaaatcctacgtttgcacaaacaaactctttggtctccacggttatgtctgcaagcacaactactttaaggtatcctggatatatgaacaatgatctggttggccttcttgcctccttgattcccactccaaggtgtcattttttgatgacaggttatactccgttgactgtcgagcgccaggttaacatgatacgcaaaacgacggtattggatgttatgagaagacttctgcagacaaagaatataatggtgtcatcatatgctcgaacaaaagaagctagccaggctaaatacatctccatattgaacatcattcaaggggaggtggaccctacacaggttcacgagagcctgcaaagaatacgcgaaaggaagcttgttaactttatagactgggcacctgcaagcattcaggttgctttgtcaagaaaatccccttatgttcaaacaacccacagggttagtggtctgatgttagcaaatcatacaagcatccgtcatttattcagcaaatgcctgggacaatatgaaaagctaaggaaaaagcaggcttttcttgacaactacaggaagttcccaatgtttgcggacaatgatctatctgaatttgatgaatctcgagagataatagagagcctagttgatgaatacaaggcctgcgagtcgcctgactacatcaaatggggaatggaggaccctggagaggcaaatgttgtggcggcacttgactctaagttggtagtgtaaatataaagtgttgtgcagcaatccacgcaactgaggaagtgctgtctacaatctacattcaagtcatgttggtcatccagaccaaatatgctactgtcacatctagtagtcatcagtttgacgccgcctgcttctatagatccaatcggagtgcagccaaagtgggttttgacgttatttcgacctcaaatttgcctttagtctgtgctatgtatatttcgaaacccacttcctctggcctgttttcatttctttagggctagtttggtaacaccatttttccaagggatttttattttctcaagtgaaattagttcattttcccaaacgaaaattgaaatctcttgggaaaatgttgttcgcaaactatcccttactatatttattgagaatctcccttcgtgcgttgcctcctgc

SEQ ID NO: 36367 - DNA, 299 bp, Zea Mays
ggtgcttctccgttgcttgcatggcgctccacctcgcggccatatagatcgggccatcgtgatcctcctccttgttttcccaccgagcccagccgaaaccgctctaccattgtcgcctccaagattccacccgccattgttgccgagagtgggacctcgccaggattggtgtgccgctcgaattgagtaggtcggggagctccactacgactcgacgagcgtgtccacggccttatgtcaggttgggtgctcttgtgcccttctaatttctcgtcggagctcggcttgtgcatagatcc

SEQ ID NO: 36368 - DNA, 1612 bp, Zea Mays
tcaaatgcgtgcacgtgggttcctgatagattgccacagaagcagcagggccaggccgagaaggaattcaaggtggaggttgaagccatcggcaaagtgaggcacaagcaccttgtcggtctcatcgggtactgcgcagaaggtccaaaacggatgctcctttacgagttcgtcgaaaatggcaacttggagcagtggctgcacggcgacgtcggaccggtcagccctctgacctgggaaatacggatgaagatcgccgtcggaacggccaaaggcatagcgtacctgcacgaaggcctggagccgaaggtggtgcaccgcgacatcaagtcgagcaacatcctgctggacaagagatggaaccccaaggtgtcggacttcggcatggccaaggtgctggggcccgggtccagctacgtgacgacccgcgtgatgggcacgttcgggtacgtggcccccgagtacgcgtcgacgggcatgctgaacgagagcagcgacgtctacagcttcggcgtgctgctcatggagctcatctccgggcggagccccgtggactacaaccggccggccggcgaggtgaacctggtggagtggttcagggccatggtgggcgcccggcgcgtggaggacctggtggacccgcggatccccgcgccgccgccgcctccgcgggtgctcaaccgggtgctgctcgtctgcctccgatgcatcgacgccgacgcgcacaagcggccccggatggggcagatcgtgcacatgctcgagggtgacgagttccccttccgcacggagcaccgctcgccgcgggcgtctcaccggacgtcgacgggctcacggccgtcgcttctgtcggagaacgtcggtgccaccgacgactcggacaagtcgatggcgagatgaaggatccgagctgcctgcacaagcaactctgcaaacaagcaagcaaccctccactaacggatctggcgccgtcgtgcggcgtgcgaggagctggagcagaggggcttgggggctggactgactttttttcacccgatgcttccggatttgggcaccacccgaagctttcttcgaccggcgtgctccctccgccacatgatcggattgcttacgggacgacgggaaatcccggtgatgagatcaagtgtggaacaacatgtgatttaggggcgaaagggaagacgggaggggtattgtttggtttaggttctatatattttgtaccaacgattatgcacttagatatagatttcttttatatctatgtacctagtagaaatagtatatttctaaagttaaagaggtgttatagtttataatgaaggggacagcttcttattgcctagcaaaatagaagtctaagaggagatgatgcagataaaataatcgttacatgccaaaggagcccaatttctgacatagttaccctatttcgatctaattccctgacatagttaccctgaccaagatggatctgaccatgataaaactagttggcatccccaaacataattaccccgaccaggttggacccgacctcgaccatcccaagcaaaagtcttgatccaagttgtcctagtcggttggcctcgactttagtcacgccaagata

SEQ ID NO: 36369 - DNA, 1492 bp, Zea Mays
ctaagcttcagagattcaaagcaacgaaaaacaatctacggttgccaggtctgcgacgtcagtgccgacgaactcatggctcgcgagaggcccgtaaaaacatgatagccagatctgcgacgtcacggctgtcgccagtgatcgccattcgccaccctctccgttccattccaatccgttcagcggtcagcggaacatgatacgcctgcttgccgcgcttgcattgaggggagttcggggagcggccggtgcggaaggaatcgacacagagttcagttcacatggctgctgaatcagagaacggcaactgcaaagcttgggcagcgagagatccttctggagttctctcaccacacagttttaaccgcagagcagtgcaaagcggcgatgtttcgctgaagatcatatactgtggagtctgttatgcagacgttgcttggacgcggaataagctcaatgattcaaaatatcctttggttcctgggcatgagatagctggagttgtaactcaggttggtgcagatgtcaaaggctttaaagtgggtgaccatgggggttactccactcacattgtagtccatgaaaggtattgcttcaaaatacccgatggctaccctttggcgaaggcagcacctcttctgtgtgctggaataaccgtgtatactccaatgatgcgacacaacatgaaccaacctggaaagtcacttggggtcattggtcttggtggtctgggtcacatggctgtgaaatttggtaaagcatttggtcttaaggtcacagttttcagtacaagtgaatcaaagagagatgaagccatcaacctccttggagcagataattttgttatatcatcagacacacagcaaatggagtccctgaagaactccctgcacttcataattgacactgcttccggtgaccatccatttgatccgtatttctctctccttaaggttggtggtgtgatgacattggtaggttttccaagtgagatcaaaatgcatcctgcaagccttatacttggtgcgcggaccttgtctggcagtgttgttggaggtataaaagacatccaagaaatggttaacttctgtgcagccaacaatatctatccggagattgagatcattaagatagattatatcaacgaggctctcgcgaggcttgttaatcgagatgtgaaataccgctttgtaatcgacatcgagaactccttcaagtagcgtgctagtgcacatgctctcgtctttctgttagtgttcaacagttcaagagctattacaaatgtgagtcatgccaaataaacttgatgtaaacaaccataattgaacagcaaggggaaacaggtatattgtgataatgaagtcgctctatgaatattcaactgcagtgttctctgacaaataatagcaactagtctgtctgcgatgtctaaatcagcaggtgtgctcttttacacgcaacagtgagtttgaactttgaatacactcctgcc

SEQ ID NO: 36370 - DNA, 2561 bp, Zea Mays
atgggagagagcgtttccagtcgctgcgctgcgcgtcattctcctcccctccttccacccggcaaaaaccccgcgtcggccactctccggaggcgactagggtttcagcccctgggacacgccgccggtcgtggcacctccgccaccggatcccggtacccgagctacgccatcgccgccccgcccccggtcaccgccggtgcgcttccgccgacaccagacgcagctcgtccgccccgtcacgtgcacctctgcgtgggcgcgggattggatagggtttggggtttcggcggctggcgccaaatcccaccgctgctgctcgcgcaggaggtctcgagccctcggggttcccctactccgctccggctggagttctcgatgaaacttgttctacagtgttcttctgttgcatgactcagttgttttgagttatacttcataataacaatgcaaacacgaaaaaagggtgctgcaaaaaatgcagtggggtatcatgccaatcctaagacaagtaggccatccagaagggcaactcaatctacagttgctgaaaagaaagtatctgatctcatcacgtcttcttccaagaagcagagacctgttggtgtcacttccaagaagcattctaaaggaggaaggaagctgctagtttcatgtgatacaactgatgctggaaatgatgcacctcaggcccagcattctgatggtgttgcagatgatcgtcccaacgattccatattctctccaacataccatcatcacaaggaaggtggtgtgaataacctatccaaaggcttagaagaacaaacaacacatgttcatggtagtaaggaagctagcctaaaatctggttcaaaccttgcatgcaacactcatgatgggataaatgaccactctggcacactaaagttgcaatcagctgggcaaagcacattgcttgaagtggatgagtacagtgaactgggaaacctttcctcagaagtatcagcaatatatcttgctatgcagcagtctaagttggagtgcattgatgaacagagtcaagattctacctcaacagaaggttatggtgaagctgaggagactgaagagtatgatgattttgacccctactcctttatcaaagatttacctgatttatctatggtggtccccaagtttcgtcctgttctccttccaaagcagacccggagttgtcctacgatgactcttgtacttgatcttgatggtatgaactattagctatatacacacttaaatagtcttcaatactgcatttaatagccttttatagccatttacacgagtatctgcaaccaaagctgcttattcatgttattcggttcaaaactgcagaatgtctgctgcctctacaatgcataagtttaaagcacgaatccatctatctaagactactaattagggaacaagcaagcactgatctaattttgttgtcttagtacaattttcttgcagctatgggctggtatgtgttataacaagataaactccagtgctccacatgttggctaaatctagcagaacagaaggcgatattatttttgcaggctgatgtatttgtacgatgaatatatcactatcatggtatttcagaactcagattcatcatggatgtagatcttggttatttatgtaaactagattgtttgctgtatggtagtaatctagcacttagtagtaccgaaacttccctagaaccatgctttggtccacaatgttggatttatttctctttctcttgtctaggttctattactactgccagtttgatataagttttaaagtatcattcatttcttatattgatgttaatttcatgtttgtcttgctacaatgtagagacacttgtacattcaactcttgaacactgtgaggatgctgatttcacatttccagttcattttaacttcagagagcacacaatatatgttcgatgccgcccctatctcaaggaattcttggatagggttgccagcgtgtttgagacaattattttcactgctagtcaaagcatttatgcggagcaacttctcaatgttcttgatcccaaaagaaagttgttccgtcatcgtgtttatcgtgaatcttgtgtctatgtggagggaaactacatgaaggatctgacagtacttggacgtgacttaactcgcgtaatgattgttgacaattctccgcaggcctttgggttccagttggacaatggcattcctatagaaagctggtttgatgatcccaatgacatggagctgctgaaattgctcccgttcttagaaagcttggtcggcgttgaagatgtcaggccttatatagcaaggaagttcaacctaagggagaagcatgtcaggatctcctggctccttgcattattgtatgctctaccgaccgcaatgtacaattttcgctgcagttggcagttgtagacttcacttgcattttgttggcccagttgacatgggaagggcctacttgaacattttgtcgatcagttaatatcgtgttgattcatatattgtctgcgacatgtgtgaaagtcgaccgag

SEQ ID NO: 36371 - DNA, 5851 bp, Zea Mays
ggaacatgtctcctccggtcctcccctccacttccgttcgaaattaaggagggaaagaaaaagggcaaggccagcgagggccgccgccgagccctccgcccctcccggccccgttttcgctggcggcgatcgcggggccatggcgacctacatcaacgagctgcgcgccctcatcgcctccacctcgacctccactgcgtccgccgagggcgccgggccggcctccgcgcacctcgaggtcaaactccgcgaggtcctcccgaacctcctacgagactacgtcgtaccctcccccaaagccgccgggagggagctcagggaagtcagcgcaatcctgaagctgatcaccttcacggcgctcaagttccccggggtcttctacaacggtcgcgccgccgacgtcctcagcgtcatcgcccgcatcctcacgttcctcgccgagcccaatttcagaggatatccttccgcgaacctatgtaaaattgttgaaatcctagaagaacttgttgtaagaaacaatagcttgctaaagcaacatatacgtgaactaccactgttacctagtataccgtctttatcggaagtaaacaaggtaatacaggaagctagagggctaatgacactgcaagatcatctgaaggatgctgtcaatggtcttcatcatgaaagcttaaatgtgaggtacatggtagcttgtgagctgagtaagttattcaatgccagaagggaggatatgactgctcttatcattggtgaagatattgctgatttggatatgataagctctttagttatggctttactaaaaggatgtgcagagcaatcaaggactgttgttggccagagactgaaactagtttgtgcagattgtcttggcgcacttggtgctattgatcctgctaagttaaaggtaagttcttgtgagcgctttaagatagaatgttcagatgatgatctgatttttgagttgatccacaagcatcttgcaagggcattcagagctgctgttgacactacagtgcaagattctgctgccttggctatccaggagctattaaaattggcaggttgccagtcttcatctagtgaagaatcaaattgttgtgagatgagctacaggggccagaagttgtgggatcgtttctcaaactatgtcaaggaaattattgccccatgcttaacatcgaggtttcatcttcctaacacaactgattctgctaaagtcagcccaatataccgccccacaatgtcctttagaaggtggatatactactggattagaaagttgtcatcacatgcaactggatcccgttctagtatttttagtgcatgccgtggaattcttcggcatgacatgccaactgcaatctatctcttaccatacttggtcttaaatgttgtctgttatggtactccagaggctcgtcagagcattactgaggaaattctgtgtgttctcaatgctgctgcttgtgaagatagtggtggggctgctgttcatgaaattgtagtggggcagagtgaggtctgtattcaagccatcttcactttacttgataaccttggacaatgggttgatgacctcaaacaggaaattgctttattccagtctacttatgccatgtctggaaagcatggaggtaaattgaaagatggaacatattctgatcatgaacaggatcaaatgctggtgcagtgtagcaatgttgctgagttgctggctgctatacctaaagttactctagcaagggcctctcttagatgtcaagctcatgctcgtgctctaatgtactttgaatctcatgtccaggagaattccggttcctccaatccagctgctgagtatagtggcaccttttcagacaatgacatatcttttcttatggaaatatatggaggactggatgagcctgatggcctcctaggtttagcgaatctaaggaagtcatcaagcctacaggatcagcttatcattaatgagaaagctggaaactgggctgaagttttaaccttatgcgaacaggccttgcaaatggaacctacctctgttcatagacaatccgatgttcttaattgtttgctaaacatgtgccaccttcaaggcatgatcgcccatgtggatggtttggtttgcagtataccccaatacaagaaaacttggtgcatgcatggagtgcaagcggcgtggcgattagggagatgggatctcatggattcatatctgactgggacagacaagggtctggtgttcagcagttctgagaacaatgcttcttttgacatggatcttgctaagatattcaaggccatgatgatcaaagatcagtttctggtcgctgaaaaaattgcccagtccaagcaagcattgcttgtacctctggctgcggcaggcatggactcatatatgcgtgcatatccttatgttgttaagctgcatatgttgcgtgagttggaagacttcaattccctattgggagacacgtcgtttattgataagtcatttggttcagacgatccaaattttctgaagttaacaaaggattgggagaaccgtctgagatgcacacagccatcattgtggacgagggaacctttacttgctctgcgaagggtggtttttagtcagagtcatatgaatgttcaggttgggaactgctggcttcagtatgctaagctctgccgcttggctggtcacaatgagacagcccaccttgcaatactagaagcagatgcctcaggtgcccccaatgctcacatggagaaggcaaagtatctctggaacatacggaagtttgatagcgctatagctgaacttcagcaaacacttctcgacatgccagcagaagttttgggaaacaccgtcctttcatctctttgtagcctctctcttgctttgccaaatgcacctatctctgcaacacaaacatcgaaagagaatccagatgtatctaaaaccctgcttctttatactagatggatccacaatacagggcaaaaacagagtgcagatatcaaatctctatattctagagtaacagaattgcgaccgaagtgggaaaagggttttttctgcatggcaaagttttttgatgatttgcttgttgatgctagaaaaaggcaagaagataagttcgcttgtaaagtcggaccaatcccttctagctctgcaagcagggcaagtgacgaaaaagagaagccttggtgtgaatttcttccgagagtgctactatgttatggaaaagcacttcacaaaggacataagaatctttttcaagcactgcctcgtatgcttactctttggtttgaatttggaagcatatacgtccgagatggatcttcctccaatcaactcatgaaagagattaatgcaaatgttttaggcctcatacgtgggtgtttgaaggatctgccaacatatcagtggcttactgtgctgtctcagttgatctcccgcatctgtcaccaaaatgctgatgttgtcagaatggtcaaatgcatcatcacatctattttacgggaataccctcaacaagctctttggatgatggctgcagtgtctaattcaactgttctggcaagacgagatgctgctgcagaaatattgcagtcagcaaagaaaggatgccggcgtgggaatccaaacagtgcactctttagtcaatttacaaatcttataggccatcttattaagctctgctctcatccagggcaagcaagggcaaaaacaataaacatctcaactgaattcagttccttgaaaagaatgatgccactaggaattatcttacctgtccagcaagctttaactgtgactctgccatcatatgattcaaatatgtcggatcaatctggttttcaccccttctcagtctctgaacatcccactatagctggaatagctgatgaagcagaaattcttaactcccttcagaaaccaaagaaggttgttttcctcggaagtgatggggttgaacgtccatttctttgcaaacctaaggatgatcttaggaaagactcacgcatgatggagttcaatgcaatgatcaaccgtctcctctccaaggtccctgagagccgcaggagaaagctctatattagaacttttgcagtggtaccacttaccgaagattgtggaatggtagaatgggtgcccaatactcgtggtcttcggcatattcttcaggacatctacataactcttgggaagtttgatagggtgaaaacaaattcacagatcaagaagatatatgacacatgccatggcaaaatgcctgacgatgtgatgctgaagacgaaaatccttccaatgttccccccagttttccacaaatggttcttgatgagattctctgaaccagctgcatggtttcgtgctagagtggcatatgcacataccacagcagtgtggtcgatggttgggcacattgtggggcttggtgacaggcatggcgaaaatatcctttttgactcgacgaccggggattgtgtgcacgtggattttagctgcctttttgataggggcttgctgctggacaagcctgaggtggtgccgtttaggctgacacagaacatgatcgatggcttgggcatcacaggttatgaaggcgtatttctcaaggtctgtgaaatcactctatctgttctcaggacccacaaggagaccctcatgactgtccttgagaccttcatccatgatccactcgtggagtggaccaaagttaacaagtctagtggaggcgaagtccagaacccgcacgcacagagggccatcaccaacatcaacgcaaggctccagggagttgtggtgggtgttaaagccagcccttccctgcctctctccgtggaaggccaagcccggcggctgatcgctgaagcagtctccctcaacaacctcggcaaaatgtacatctggtggatgccatggttctaagttatacatatctaacagataacacacacatacgctgtgactgtgaaggaggaggaagtgagtcagtagcagcaagcaagggtccaaaaccatctttctgcacggcacagactttgaaaggctcaacccctcatgactcttgaggcacaggggattcagaggcaggtctgggtacgtaggacagaatagtctgcacacacagaaactcttgtccacaccccacccaccatcccaaactttggtgagtgagtgacatacatgaaccctcgcgcggaatgaggcccgtgattttgcttccccttctacagcccagggctaattctatatgttgtggtgctgtgttgggtcatgctgctgatgctagctgcagcaaggttctttttattgcccaaacacaaacagtacctgccggaaagatggaattcctgttgcatatataggggtggaggaaggatgaggaggatgatgaaaaccacgtgtccaagttccccccttctctgcctcctcattgtcatgccagctgaatgcaatgaaacggagtggattgatttctgtgacaaacattttctttagtcgctacgtactaggagcagtcgtgtatacactcttgcaactgctgctacatgttacgtgttcctgatcctacatatgtatatagcagaagcaataatgttctggttctaaactgcaaggagatggtatttgaacgtgaccagatctttattccgcttggaaaatacgcctagttgagagcatgattaggctgggaccagaccagatcagatcagatcaaatcaaaaacccggtctcagaagatcccgttggtgtgaggggccccccgcaggtttgacccactgcgtctgaatcgaaaacggctttggtggacagcggccgtgtcagtttcccctgctcatctctctc

SEQ ID NO: 36372 - DNA, 1706 bp, Zea Mays
tgggatcgtcccctccgccgttgcggcgagcaggcagcgagcgccgcagcccgcagcccgcagccaaacgccgccaggccggggaaggggaacggtggaagagaagtggagcaccagcgaaccgcatatgctcggggttcttcgtcgcgcagccctcgccgcagcgtcatcgccggcggcggacctccgacagtttcagtgtgcttaccatagaagcagtgagagattatcacctatccgagagaagaccaagaagtttcatatggtcttaattgggctattgctggaaaaggtgtcattgtgaaagataaggtcctccataacttggaaacatctgagcttcagaaaggtggcgctacttaccctgactttttgtctggtataccacttcatgttagaggagatgttattggtggtgtccctggtgtttctaaagctcaatttgcaaagcttctaaaactggtgacgttccatctttcatccatctcgtgtctatatgttcaagatggcgccattggttcctcagcagaatgtgatgcaaaggttcgggtcattagtgataatccctctgctgttatgttactgtcgaatgtcctttggaaaataccagatcgtgcgatttcccatgacacatcccctttgactatatatgctaccagttcaataagtaacaacgttaagactgttcttggttctggaacacaatatgctaatggatttgctgtggcggatattgaacgatcatctctaatcctatgcggtaaagcatttgctgattcagctatcgtgaaagatgcacttactgctatgacagccccaatattgtctgcaagaggaggcctccctgttccaggatggattctgaactttggtggttctactgtattattgtttgccccagtggaaatcatgatgtcctgcgtagaaatccacaatgctctattgtccattgactgtggtgcagtcatatcttccaaggggtctactgtgcttttcccaacaaaggcaagcagggagcagaaactgcttaccaaaccaactgcagtaattatcgtatcatctgatagctctggcgccataccatctgtatgtaagctctctcctggccaggctgcctaccatttcttggctggatatcacgatggaaaatttgtcccagcatacaacagagccccctctcctgctgacccacttgcacttgcaagttctttattctcacatttgaaagaagatgatacaccatcgtatctgatcaacgctaagcactctggaaagtacattgacggcaatgggtttatgaaattattaaagctggcactatctcacgatcttcctgacatcaaaactgaaggctctagagttggggaactcaaggggaagtacaggagctttctatccagcaagtttggccaatgtttacccgaggaattctctttttaggagatacaccctgaggttgcaatgaacatgtatatttactggcataggtttacattttggtttgaaaaggtgtcagtattcccattctgtctcagtttcaatgtaatactctattaccttacattgcatctttccgcctcctggtgtttggatatactgacgtaacgacaatgtagctagtacctacatgcatgaattgtcttgtgcactccgcttcagtcaaattttgttaagcagcagaaaattggaaactctcagtatacatg

SEQ ID NO: 36373 - DNA, 2418 bp, Zea Mays
attctctcctacccctagtggcactgtgctctcttttccccggccctctttcccttcgtcccatccctacttcggtgagagtgaggagatcatggcggagtggtggtggtgctcatgctgcctctcgttgatgtgcaagcaaacccaagggtgagagtgctgccgttgagtgggatcattgcggcgtcctaagactcgtgcgcgcttgcgcccgtgagacgggaaattgggtcgcctcttattgtggtcgccagttttagcgacgaataagacatcgatcactccagtaacagactatggagaaacaatatctgagcttccttctacctgcatatactgtataggtataatgccgtgtgtttaggcattagctatatatatagtcgccaggtggtgtgcaagtgcaatgcagtagcggctagctagcaacaaagcccagagcacgtagtaggtctccatggcgtggaagatgttgcctgcggctagcgagctcttccccgcgatcgtccgggccggcacagccactcctccccggccacagccaccagccgcacgcaacagcccatcgcccaccgtccacaggcacgcccctcccgcggcacggcttggcagcgcggggacggtgctggtggtcgacgtcgacggcgccctgctcctgtcgcgttccctcttcccctacttcatgctggtcgcgctcgaggccggcagcttcctccgcggcctcgtcctgctgctcctctaccccgccatccgctgctgctactgctgcctcggcggcggcgacctggccgtgcgggccatggccgcggtcgccttctgcggcctgcgcgcgcggacgttccgcgccggccgcgccgtcctgccgcggtggctcctggaggacgtggcggccgaggcgctcgaggccgcgcggcgtgtcggcgacccggctcgggttgtgtgggccagcgccatgccgcgcgtgatggtggagcccttcctcagggagtacctgcaggtgccggccgcggccgccgtcgccgcgagggagatgaagacggcgtgggggttctacactggtctcatggagggaggtggtgaagactgcgaggcgacgatggcactgatgacgaagaggacgtcggcgggggaaggcgccggcgacgtcgaggtgtacgtggtatgcccggaggagaagagcaagtggcggcgcctggcgcggcgcgactaccccaccccgctggtcttccacgacggccggctcgcgtttctgccgacgccactcaacacggtggccatgttcacgtggcttcctctgggcgccgcgctcgccatcctccgcctggccgtcgcgctcgcgctgccgtacaaggtcgccacggcgctgctggccgccactggccagtcgtggcgcctccgcggctcactcccgccgccgggaaacagcggcgggtccgggcagctgtacgcgtgcaaccaccgcacgctgatcgaccccgtgtacgtgtccatcgcgctggaccggcccgtgcgcgccgtgtcctacagcctgagccgcgtgtccgacctcatctccccgatcggcgccaccgtgcggctggcccgggaccgcgcgcgcgacggcgccgccatggcgcgcctgctggcccgcggcgacagcgtggtggtgtgccccgagggcaccacgtgccgcgagccgtacctgctccgcttcagcccgctgttcgcggagctcggcggcgccggcggcgtggtgcccgtggcgctggcggccgaggcctccatgttctacggcaccacggcgagcgggtggaaggccgccgaccccttctacttcctgtgcaaccccagggtgtgctacacggtgcagttcctgaagagggtggacacggcggacgtggcgggcgacgggaagaagaagaaggcggcggccagcagcgtcgacgtggccaaccgcgtgcagcggctcatcgcggacgcgctcgggtacgagtgcaccatgctcaccaggaaggacaagtacctcatgctcgtcggcaacgacggcgccgttgccgcgccgcgttgccgccagcggcaagtaactaattaagctagcgcgtgccgacatgcatgcgcccgttgttcgagctcgttggctgcatgccagctgcacatatgaccgtatcagatgtggattgaagctgtttgatgcactctttttttttgtcgtatcgtcccacaccttttgtggctagtagtagaaatgtacgtagaggttcatgtgtattagaaaatgttctgtatgtaaggaaagagtattatattatatactgtatgtatatatgccatattcaccgtcatcagcatatacaggggaggacatatatataagaagagacgagtttgtctactacttgaggagcgtaatcaagcaagtttcgttatgggtttgagagt

SEQ ID NO: 36374 - DNA, 1771 bp, Zea Mays
attgtattagggagttgctatgaactaaccctaatcacacacactcctaactcccatcccatcccatcccatcccagccgccacagctgctgctcgccctctccctgtctcctctctctttccagccacggtttccccttcccccatccgcgcgctagggcacgaggcaaatctgtggccctctcctagtctcctgaagtccgactcagccgtctcccagctcccgctcgctcgaactcgggttggggaggcacggagtcactgaccccttcgcgttaggcggtgcccttaccggctcttcgtctaaggtgtagtcaagctgccggccacgcccggcacccccctatccagtacaaggccttctccgagatccagtacaaggtcgtcgtctccaagatctgaccccgacgctagtgaggcttgctttgaagggaacccattcaagacagttccaggcccatttaagctcttctggcaatgcatgcgctcaaaacctggaggtatttcacgaatggacctgtggttttcagggaggaaccaaccgagccctatacctacctgcagctagatcctccgagaagggtggaagtgaatctggagcaaacaggaagtgaaccttgaacgagcatgcctagtttagcatctcgtgcctatttgtcttcacctttcgagcagactttttcctcctagggatcacatcatgtgagcacaaagctgcatatgtttggatgtttatataatctacctaataaaccgtgatccccagagctgcctgtccaggctgccaactccttgaaatttgctgatgctggtgtaagaattgtgcccctttcttctgataaatggtgcacgcccaagtccacatgccgccagacatcagagctagtgcatctgaatgcttccactatgggtctaagcagcagtatttcggtccagaaaaccttgtatgaggttttatctgtgagcgaagacgctacgtatgatgaaattcgtgcagcatacaggtctgctgctctgaacacacaccctgacaaggcacggacacctctcgagtcatgtgttctttccggtgagcaacaggaattttctagtgtgcagaaagcatgggaaatcctacgccatcctacatctagagcagactacgataagcagctgcagtcatccagacagaacatcgagatcatcgcatctgaagtccaagtcggggatatgatcattgagagcactgccgatgccgatactgtagagctgtcgtacccatgcaggtgcggtgattacttttccatcacttcgtgcgagcttagcgggatgggaatttccgtcagtggagatggagatggagaggtagagctgcaggcgtccgattctccgtcggcttccgttgttctgggctgcggctcttgttctctcaaaatacggttggttttatagatggaactccatgatatatattgtgtgcggctcagcaatgctcactttaaactttagcagccaccacatgtttctcaaacactatgcctcctggtctgccgaaatcaaaatagtgcagcttaaccttgcctgttcctatttccgggagagatgtcgagtttgtaacctgatggtggttgcgttgtgataaatgacgttttttgaccgttgttatcagctaaccaccgctgtcgaatccagctgctgggaaatccaaagttgttccggtggtggttattcggtagatgagatcttcagttaatgttgttttacaggcccgatttaatggtcccatctgcca

SEQ ID NO: 36375 - DNA, 2119 bp, Zea Mays
cccgatccagagcattccccagtcctcaccccacgtccccacccttgtcgccctttcgcttccgtctcgtttggacctccatccgcggccgccgccgccgcgctgagtttgggccgggctctgttaatctgggcgactttgattttctctgctcccgctgccacggccgtcaggagtgaagcgatgctggagaaagaccggatatcctacttctacgacggagatgttggcaatgtctactttgggccaaatcaccccatgaagccacatcgtctctgtatgacacatcaccttgttctttcatatggacttcatcaaaagatggagatatatagaccacacaaagcatatccaatagagcttgcccaattccattctgctgattatgtggaattcttgcaccggataactcctgattcccagcacctatatgcaagtgaactaactagatacaatcttggagaagactgtccggtctttgataatttgtttgagttctgccaaatctatgcgggaggaactttagatgctgctcgcagattaaatcataaaatatgtgacattgccattaattgggctggtgggctacatcatgccaaaaagtgtgaggcttcaggcttctgttacattaatgatctagtattaggaattctggagcttctcaagtaccatgccagggttctttatattgacattgatgtccatcatggagatggagttgaagaagccttttatttcactgacagggtaatgactgtgagtttccacaagtatggtgacctgttctttcctggaacaggtgatattaaagatataggagaaagggaaggaaaatattatgccatcaacattccacttaaagatgggatagatgacactagctttactcggctttttaaaacaattattgccaaagttgttgagacatatctgcctggtgctattgttcttcaatgtggggctgattcattggcgagggatcgtttaggctgcttcaatctctctattgaaggttctccagtttttaacagatatatacacacatagaatctacaagactcatgtgtgtatataatatttatccatcggctgctagagtgtcttttgtgggaatgggaagccccatgtccttgattatccattttttctgtttttgctgagtttcctcgcattattggaggtttagagttccttcggacaagtcacctagtttcctgaagctaagcctactatatttgtccattagtgcttaactgcttacttgccctatctgttttcataaacaggtcatgctgaatgtgtaaagtttgtcaagaaattcaatattccccttctggtaactggaggtggtggatacaccaaggagaatgtagcacggtgttgggctgttgaaactggggtccttttagacacagaactcccaaatgagattccaaaaaatgaatatattgagtactttgctccagattatacattgaaagttccaaatttgaacatggacaatttgaacagtaagacctatctcagttcaatcaaagtgcaagtgatggagagtttgcggtacatacagcatgctcctggtgttcaaatgcaagaggttcctcccgatttttatatcccggactttgatgaagatgaattggatcctgatgaacgtgttgaccagcacactcaagacaagcagattcaccgtgatgatgagtactatgaaggtgacaatgacaacgatcacgacgacggcacacgctaatctgcttcttctgaggccctggtgtaaatggaaacctgagattcttcactgttgtgtgtagttcagcagccttgagatgtaatagtttgtcagttgacagcagggatctaatttagcaggtcaaagtggtttagacttttataagggattctgacccctcctgaattacacattgtagtacaagtctgcatatttttaagcatgcaaaaattcaaatttctcagtggtattagtatctcaagaaaatacaaattcctcgctcagtaacattgctgatatgtggtgaatttgattatatctagaaccccaaggcctagtttgagtattctagtattgaccttaatctacatgtattgaactggattggat

SEQ ID NO: 36376 - DNA, 1443 bp, Zea Mays
cgtgtcccaccggccggccacccgcagcatctttaaaattcggcccggcgcgcgtcgggtgacgaaaacggaaccctggctggtggagcgcggcgcggggcatgcgtgcaagtgcaaccaatcgcctcgtcgtgtgcgctcgcctttgcttccctcgttaacgtgagtaacctcgttggctgatcaaggctttgacggcggcaccaacgttcttccctcgccgcctcgttgcgtccgcccgcccagcgccaactcctcgtcctcgtacataaccccccaccccaccgcgtacagcgttccctctcgcgccccgcggtgagctacccccgctcgccttagctagctacccaccatggccctcccgccgtcctcctcgccgtcgtcgctctccgccgcgtcagcgcagcccacgcccctgcacctgcacctcccgaccaaggcgcccggccgcctcccgctgctccccttctcgcgcgccgccctcccgccgccgctgcgcctccgcattgcgcgcaccagcctctccccgggcacgcccctcccgcgcgcgctcctgccaccaccctccgcctccgccgacgccgcagcctccgacgtcggcggcggcggcgccggcttcggcggccatgacgacgacggccacaaccaccacggcggcgagggtggcggcgacgacggcggccatggcgacgacgccggccacggcgatgacgcgcccggcggcggcgacgcccgcggggaggcgctgttcgtgctggcgcagctgggccgcaagctcgacagcctgccgtccgatctcgccgccgccgtcgacagcggccgcatcggggccgacatcgtgcgccgcttcaccgaactcgaggccaacggcttcttccgatggctcctccagttccagggcttcagggagaggctcctcgccgacgagctcttcctcaccaagctcggcatagagtgcggcatcggtctcgtcgccaagaccgtggctgagttccagaagagaggggacaatttcttcaaagagattgaagttgtcatatctgatgtggtcatggcgattgttgcggacgtcatgcttgtctatcttcctgctccaactattggtttacagccgccactggcaagaaacgctggagctattgccaactttttctataactgccctgataatactttccaaattgctatggctggaaggtcattctcacttctgcagaggattggagcttttgtgaggaatggtataaagcttttggcagtgggaactactgcttctttgattggcactagtgtcacgaatgcagcgctcaaagcaaagagggctgttgataaggaccttgaggacgaagtcatggaaattccagtcgtctcaactagtgttgcctatggtgtatacatgtccatttctagtaacctcagtttcattcttatgacataaatcat

SEQ ID NO: 36377 - DNA, 811 bp, Zea Mays
catcatcttcgtggaggccgacatgcgggcgtgcctcggcgactttggcctctccctcctcctcgcaccgccagacgcgtgcgccacggggggcactcgtgacctcgtgtgctgcaccacgacaggatgaagcccgtgggcgttggcaagaagcggcgagacttggcgctggcggactgggtggtgcccaagatccaggtcggcgagcacagggtggtcgtcgaccgaccggtgctgcctaagatccagtttggcttgctttgcagactgcagtagggagaccaaggccagacttctggcgatgttttcctgatggaaagcagttatacgatcaagtgactggtgatgtgatttgccatggtgagaaaacttcttacaagatgggcgcaagagctttcctagtggccattcgcgtaagtttgcagtaataagtggtcatagactctagcatttagatggataagcttgttgtacaagtttagagctaataattgaggtataaaataccggctctagattgtcatatgcattcattagcagtagtggcatggatctaaatattttgcaactggtgcaccgtgaccactgttgacaacataaaacccgtggttgcatgcagggagtagggaaggcactgtcgatctctaattgtcagctgagtatttggactgtgcagttcatcatgtactcatacatataccacctcaaagacgccttattaatcctgtttcttattgcatttattcggagcactacgtactcatttatgaaagcctcgccaaaagatgtccttcttatagttgagtacaag

SEQ ID NO: 36378 - DNA, 4082 bp, Zea Mays
aggtttgttgctttatttcctgacttagagcaatttcttgacccttatgcagagctggtccacatggattcaagattcagggaatgttggttcctcctgcttaggcaattcgggctgcaagttttggcaccgcaatcatctaatataaatttcatggaatggtggcatgaagcaaatgaagctattcagggtcccttcagagatggcctaaactctcttattgtgctaggtgcttgggccttatggaatcatagaaaaacacatgcatctttgatggttttgctccggaagttgtcacaatttctggatccgataggtggtaaatttctgcattttaggcattactctgataattcaaagtctccttttctgtatcggtgcagactagaagggactgtaagtgaatatgaggcccttttgctaacagaaagacaacaaaatgaagcagctaatgctgcagttgctgaatctcaagcaagaagtgaagcattggtaagcaagctcgaagatgctgtgaaacaaaatgatctcctccatgaagctgctcaaagatttgaagaagctacaaaaaatttggaatcttcactaacatttgagaagcaacggcatcaggcaaatttgatagaattagatgaagcgcgagaaaagattgaagaacttcaaagagaagttggggacactgatgaaaaatccaccctgcttcagactagtatacaaagccttgaagaaaggttaggagagaaggatgctctattgacaacagaaaggctagaaagtgaagcaactaagaaatcgctcaatgaatctgaggatagaaacaaggacttactaatgaaaattgaagttgctgagaaagacattgctcacttccaagaaactgtccaaagaaatgaagaaaatatggcagcactggaaacttcgttgagatctgaaaggcagcaaaaggatgcaatcatgaaacaactagctgaatctcagggtgaaataggagagctgcaaaggaagcttgaagatgctgatgccagaaatgggcttcttcaagattctttgcagagactcgaagaaagtacagcagataaagattctttattggctacagaaagacatgaaaacagtgaaaccaagaaggaattagctggttctcagaaaaagattgcggaattgctaactgaagtgcaagataccggtgcatatattgcagaacttgagggctcggttaggagactcgaaggaaacttgacagtaactgaagcttcattgctaactgaaaaggaacagaatgcttccaccttaaaattacttacagaagcacaattgagaatcgaagaattaataaaaaagcttgaaggttcaaatagaaaatctgatagtcttctggatacaataacaagacttgaacaagatgtctctgccaaagaggtcttattgcttacagaaaagcaggcacacgaggcaacaaggaagactctcactgaagttcaggaaaaaagtgaagaacttctgaagaaaattcatgataatgataaacatattcttcagcttcagtttactatacagaggcttgaggaaaccacagttgcaaatgagaatttgctgttgagggagagggagcagaatgacacaacaacaaaagcgcacaatgaaagtcaagaaaaatatgaagaattactaaagaaatttattgatgttgacaggaaaatcgaccttcttcaaggtaccatagaaaggcttggagaaaatacaacagcaaaggattctctgttgctatcagagagacatgaaaaggctgctattaagaaagcacttactgaggctgaagagaaaaatgaagagttactgatgaaagttgaagatgctaatgaaaaaataggacaccttcaaactaagataaatatgcttgaagataatgtagccgcaaaagatgtttctttagaagctgcaatcaaggaaaatgacgcaaccaggaaatctcttactgaagctcaagagagaaatggtgaattactcaagaaaatcagtgacagtgactacaggatccatttacttcaagacacggtacaaaagcttcaagtagatgcaatatcaaggttgtcgtcttttgtaatggaaaaacaagaaagtgatattgcaaagagagccgttactgaagctcatgaaagaaatgaagatttactaaagagaaatgaggacctcctcaagaggaatgatgatttgattaagaaaattgaagactctagtaaaattgtcactcaacttcaggaagctctacaaagacttgaaggaaaagcatccaacttagaggttgagaaccaagttcttcgtcaacatgcaacttcaactccaccgtctactgctaaatctccagcttcacgctcaaagatctcaaggatccatagaagtccagagaatggccatattttgaatggtgacattaggcaaactgaaatgaagccctcaactggcacatcagcagcaattacctcagtagttcaaaatgacatgagaacattggcgtattggttgtccaacttatctacattaacagttttccttcaacggtcattcaaaactactaggaccacaatctcaactccacaaaggagaagattttcgtccgagaggatgtttggaaatcaaacttcaaatgctgggcttgcttatctcagtggtcaatcagttggatctgctggattgctccaagttgaagcaaagtatcctgctttgctattcaaacagcagctcgtggatttaattgaaaaggtttatggcatgataagtgacagcgtgaagaaggaactaaaccctttgcttgaattgtgtatacaggatccacaaacttctcagtcaagtattgcaaaaggtaatcttaatggcatgggtcaacagaaccaactcacacattggctgggcatagtgaaaatcctcactagctacttggatgtactaagggaaaatcacgttccctcaattctggtgcataaacttttcactcaaatgttctcacttattgatgttcaattatttaaccgattacttttgcggcgtgagtgctgttcttttagtaacggggaatatatcagagctggactagctgaactaaaacattggtccgacaatgctacaagagagtttgcaggttcagcgtgggaggcattgaggcatattagacaagctgttgatttcctggtgatttctcttaagccaatgaggacattaagagagatacgcactgatgtgtgccctgccctcagtatacaacagctagagcgaatagttagtatgtactgggatgatgtgaatggtacaaacactatttcagcagagtttacatcaagcttgaaatctgccatacgtgatgaatccaatatggccacaaatttctctatactgctagatgatgattccagtatacctttttcacttgatgatattacaaagacattgccggtcattgagctggctgatgacgactttctgccatttgtccatgaaaacccaagctttgcgtttttattgcaaagaggggagtagtcttttttttttgtcaccattgtgacttcacctacctgtggataagtcaggattcctgctaggatgtacagtacgcgtgattctttttgtaccaggtagcaaggcatcaaagattagatgctaggtgagcttataggcttctggtttctattgatttgtttgttggttgtatatttgtattcaggttttccttgccattttttctacttgtagccgttttttgggcttgtatactaggtggtaagggcagaagaccctgccctgtaagcatagttacacaaggtcttgctgtaggtatggaagctgtacatgtgttgtaacggattataaaagggggaaagtagtgcgtagtgatggctttgtggttggtgtgttgcttacctttgatcaatgatcatgtattggttcgtcatatattgtttattgtactgcacaccattccattgtagataacatacacgctcaagacttgttctgggatgtcaaatgagtaatctgttacggtacagaaatgtcatgcttacttccagatcttctgtaatgaacacaaa

SEQ ID NO: 36379 - DNA, 459 bp, Zea Mays
caagaatccagcccttcgatcttttccctgcctatataaagagcaacagggagagggaaagaaggcagaagtcagttcagtgattcgtgcttcgatcatcaaccatagtgagtagcttcagtcagcagtattgctcttccttccccatatcataccctggacacgcctaattccatcgatcaaggcactgaacgtatctggtgaccacctcgcccatgcatcaacctcacgcggccaggagattacggtacgataagtggtcacgtgatgcggaagacgagccaagtcgaccctaagcgcgggctaatccgcaggatgaagttgatagaccaacctgaagatggttaaatcaagcaagtgctcggtcgagggatgatcgtcaagtggacattgcctaacaagcactaacctagttttattcagtcatagttttgtgctgctgatgatggtgttaagtgt

SEQ ID NO: 36380 - DNA, 1426 bp, Zea Mays
tcctatgtatgggcatggtgagctgcctcaagctttctgtcgctgtgctgcggttaagggtgccatatatgtgttgcggatgccagtggttgcacttcttatggatgaggaaaagaaacattttgtaggcgctagattggtatctggtcaggatattttatgccaacaattgataattgatccgtcttataagactatcttggatgtcccatttgatggttcagattctcattttccaagaaaagttgtgagaggggtatgcataattagcaagtccgtgaaacagggatcatcaaatgttctggttattttccctccaaaatcactagaagagcagcaagttacagctgttcgacttcttcagttgagcagcaatctcgcagtatgccctcctgggatgtttatgtcatatctgtctactccctgtaccgatgtctcagtcggaaagcaatgcataaaaaaagcaatagatgctctttacagtcctcaggcttcagatggttcagaagaccatcttgagacagccagtgaaagcaccgaggatgtgaagccaacactaatctggagttgtgtgtatgttcaagagatcacacagggaacagctggtcctttattgtcatgccctatgcccgatgaatacctggactacagaaacatactgggatcaacaaaaaagttattcgcaagtatctatgctgatgaagagttcttgcctaaaaagtcagctcctgtatatgccaatgatgactctgattctgcagagtaaaaccatctttctagagcccgtcactgaaattccgagggcaaaagagcgtcgcaaggggagcctgtggggcttgatgagcagttgtgctggatttccaatgtacaggtgcccactggctggccatacattgcattggtagggaacagttggagggagacatgctcggtgcaaatggccttgtatggattggcaaacattgttgtacgcaagatcacagcaaatacgggatacaaaatgctgaacgctcgatttggtcccccaatttgaacgacagagtgtagaagggtattctgaagacttactagttaagtggctgagggctgatttagcgacgagggaaataaaggtgatccatgaggaaaatagcaatgaaattcctcccccgtgtggccatgtctccatgtggtcattaaaccagccctgaatgtatttttggtcggccaaagcggtgtgtatagtatctttctttgtttttggttgtttcaggtgaggttttagtcttcagctcgcagaattgggcgatattattacccggcctatagtattttttttcttctcgcaaccattttttgtttgttgatgagttctgagagtgcattgtttagttttctacaagaacaatcgtaggacgacacgggaacatgggactcactgctgaag

SEQ ID NO: 36381 - DNA, 433 bp, Zea Mays
atttccttcacatttgttgtacacaggcattacatcgagcaccttgcacgcgtcttttccgacgtcactttttgcagccgtcgctcgccatccacctcacagaccaaagcgaagctactgcaaccagactcgccaactcaccaacacgcgacaaagataggtatggtgcgtcccaagtcctccgcgccgccatggcgaccgagctcgaccttgattgctacgacgacttgcttacctttatctcaactaaatcaggaccagcctaaaatcatattcgccacacttcgccctcctgccgctcagcttcgtgtcgagctccgacgagaaccgttgcaatccaactatcgcctcgaggaagaaggtcgcaagcagcatagacacgagctcggaacttttcagatcgaggcgggaggaggaagcaactgacgtttgg

SEQ ID NO: 36382 - DNA, 2195 bp, Zea Mays
tccgcactcgtcctcccccaccccggcagatctccccgtgaccaccggcggcagccccagcacctcccccacctcccgcacccacaacgtcggtggtccgcgcccctcccttccttccctgccgcgcccgacgccagtggtccgcgcccctccctagccacgccgagatctccgtcgattcgagatgcccgcgtgcagccccctacctgagatcgacgtcgatttggcatgtcgggaggtccgctccccacccaacccccgagatcgctgtcattgtcccccctccctactccaaccccacgctcccaccatcacttgctcgcgtcgcgctccgccgaggccatatacaaaaagctgccgacgacgcagacaaggaaagcgtgggggtccagggcgccgagcagcgccgggaggaacgagcggggggagctcctgccgctgacgcgcagcgagtccaccagcgcggaggggtccatgttcgcgcatgccgtggcgatggctttcaccagagccgacgacgtctcccccctgcctgcggcgtgcggatgttgctgccttttcctccgcctcgtcctcacggccttctctgtctacgctcccgttgacggcctcctcctccactaccatctcgatgtcatcattgcgttggtggggagacgccacggctgtcccgtgtcatctccttctcgtcgtttaatcagatgtgctatttgcgcgtgctaacagcacatttcagtttcttactctcacaacatcgagtaagacacttaggtatattagaatagtacacttttcgttttaattttttagaacaattactgatgaaacaaacaacactttctatctttactactcctttaagaacatactgtaggcgtccacatctggtgcggttctgcctcccgaggccgcgacgcccccatccctcacaccgcgcatcgtcgtctacttcccgcccatcccactgccgcgtccgccccctcccccaccgaaggaatccccgcggactccgccctggctcccgagaacgcgatccactctcctctctccctcaatccccgcttcctttcatggattgggatctcaagacgccggtctcctgggacctgcccgacctagagcaggcggcacacctccaccgtacctcctcctctccccatcaccgcgcccctccctcgccgcacacctccaccgcgcccctcccccagaccgaactcaaatatcaagaacattccaagctttggcattccagacaagtgctctttcgaggaattgaggacaatcctcaagtcaaaaagattaggtgtatatccatccctcgacagcatggaacacaccagatggtgactttgccagaacatcttcctgagcatgagtttttaatgatcttcaacccttgggatggatgcatacatagccaaatgaagatccacagctatcgccgtaggatctaacatcacatgccaagattctggagaacaacaaacaatgggatggtgagaagtgcatcattctggaatgtagtttcaccccaggatcttgttcattgactgcttacaagctggcaccaagcggttttgagtggccaagtggggacgcaacaacaaggacaatggaagcaacccacatggataccttccaattcattacaagaatgtccagatgcttctgagcgataacttccttagtttctacatgattctagataacaccccttggaatttcaacttcatgtgagtgaagcacgacccacagatgaagtacaacatgaagctgggcatgccgcaggacatttatcacgaggaccataggccgacacacttccttgagttcagcaacattgagggagaggtcgctgaagctgatagggaggacacattcacgtaggtgcctgttcaaaattgtatctcaaacgcacttagctctattttgaatggcaatgtgtgaaagttgtaacctgccccgatgggtgtcatttgttgtttggcttaatcctgtattatacttgctgtaagacagccttagagagggggaaattgtacaagtgcacgggatgacaagagtaaagattttgcatagtagcaatgtctactatataaatctctttgccttgtgcataggatgcaaagattctttggagaaactttgtgatcgatctgttaaattatgaagacaattcgtaccgatatgttatc

SEQ ID NO: 36383 - DNA, 2562 bp, Zea Mays
cacattgcacgcaggaggaccggccgccactctttctcgctctcttctcttctcttggctccagctccacccacctctagctgcctcccttcggcaatggaggaggcgccaccatcttcttctcccccctcccctcctgtgatgctactcttgctgctgctgcttatcgtctcctccccttgtagctctagcgccctcctctcccccaagggcgtcaaccctgaaggttctgtcatctctctctctccttttccttctttcctgtttcctcacgtactctgcgactacagcagtaccagtttctatctctgtttcgtttgcctcaaacagaatcgttgttttcgacggcgaatagaaatgaaaatcaaggactccactcactgtcagctgtcttcgtcgtcgcgttgcttcttagttgcattggtgggacctcagctcactgggttaattctctggtatatgtgtgtatgatgttgtgcagtgcaagctctgatgacgatcaagaacacgctcaaggacccccacggcgtgctcaagaactgggaccaggactccgtggatccctgcagctggaccacagtcagctgctcgctagagaacttcgtcaccggactggaggtcccaggtcagaacctctctggcctgctctccccaagcatagggaacctgacgaatcttgagactattctcctgcagaacaacaacatcaccggcctaatcccagcagagatcggcaagcttacaaagctcaggacacttgatctctctagcaaccacctgtatggcgcaatccccacttctgtgggcaaccttgagagcctgcagtacttgaggctcaacaacaacaccctgtctggcccattcccttcagcatcagctaatttgtcccagcttgttttcctagacttgtcatataataatctgagtggtccagtgccgggatctttggcaagaacattcaattgggaatcctctcatctgcggcaccaacaacgccgagagagattgctatgggactgccccaatgccgccatacaacctcaacagctcactgcctccggcaataatgtctaaaagccataagtttgcaattgcatttggtaccgcaattggctgcatcggcctcctcgtcctcgctgccgggtttctgttctggtggaggcatcgtagaaaccggcaggtcctttttgatgtcgatgatcaacacatggagaacgttagcctcgggaacgtgaagaggttccagttcagggagcttcagtctgcgacaggcaacttcagcagcaagaacatactgggaaaaggtggctttggatacgtctacagagggcagttccctgacggaactcttgtggccgtgaagcgactcaaggacggcaacgccgcgggcggcgaggcccagtttcaaaccgaggtcgagatgatcagcctggcactgcacagaaaccttctcaggctctatgggttctgcatgaccgccacagagaggttgctggtctatccatacatgtctaatggaagcgtcgcgtcgcgcctcaaagggaagccacctctggactgggtgacgaggaagaggatagctctcggggcagggagggggctgctgtacctgcacgagcagtgcgaccccaagatcatacacagggacgtcaaggctgccaacatcctgctagacgactgctgcgaggccattgtcggtgacttcgggctcgctaaactcctcgaccatcgggactcccatgtcaccactgcggtgcggggcactgtcggccacatcgcgcccgagtacctctccactggccagtcgtcggagaagaccgacgtcttcgggttcggcatcctgctgctggagctcgtcaccggtcagacggcgctggagtttgggaagacggcaaaccagaagggagccatgctggactgggtgaagaagacgcaccaggagaagaagctggacgtgctggtggaccaggggctgaggggcggctacgacaagatggagctagaggagatggtgcgagtagcgctgctgtgcacgcagtaccttcccggccaccggccgaagatgtcggaggtggtccggatgctggaagcaggggaagggctcgcagagcggtgggaagcctcgcactcgcagtcgcagagcgcggactcgcacgagttcaaggtgcctgacttcactttcagccgctgctactctgaccttaccgacgactcgtcgctgctggtgcaggccgtcgagctgtcgggcccgagatgatgatgacgacgacgccgccgccagtttgcactttgtacagcatgcatattaaggaccgagaatcctgtgtggactaccatactagaatagctagctatagatgtgtattagattaactgtacaaaaagaagagcgtgtgaggtttgtactgatttggatatttacagaattagtagtcgagacaataagaccaagtaaaaaagagcttttcattgttcatttcagagtgcaacaggttctgaaatagtgaaatctcatcagagtccttagctgattttgacataaatgaaacattctgccgagcc

SEQ ID NO: 36384 - DNA, 377 bp, Zea Mays
cacagatacattatatcatattcacttaatacattgaatcattaaatacaataatacctatgccttgacaaaggttgtattccgagagatgcgattgcaaaaatcagaatgcgtgaacagtaacggaatactgttcactatttataggcacaggacgcagcctgtgaggaattacaagtatgccccttataaaaacttacaacattgactcagacatttatggactaaaaggtcattctatctttaagtcggtttgcaatgccgaagctttacgaagaggaaccttcggctatcttatacaaacagcttcatccgaggatcgcttctctctataagaccttcggcgacgaagcatggacccaacacgcaccatctac

SEQ ID NO: 36385 - DNA, 306 bp, Zea Mays
ttggtgagttcatgccacattattccccacaacttgttgagcaatgaacatgtgtgagctcaaccttgctgtctcacaccccccacaggagaagaacaggtggttcaagaggagccacacaacgaggagttcaatttgatctaggtggcgtctcctagttgacttattggcgccaaggatgaactttagtttgttttatatttatcttttattctgtaagacttccgctatgtaataagtactttgattatattgtgacatttatctctatacactctgttattatatgtgttatcttctttggcg

SEQ ID NO: 36386 - DNA, 2251 bp, Zea Mays
tctacttccacggacggtctctcctgtcggctgccaccgtcgccgagaacctttcttttttgtggattcctaccactcccccgacgaggcaagcagcaagcgttaattccattccttaattgccaatggcgaccgccttcgccagtacggccttgcggcgggcgccttgggataaactccacggcaaggaaggcatccgaagcctcgggggccttaatagcttcttcctcccgtggctgagactctggtcccgcgggctggtagggcatcggcatgggtggtcttgctgtctccgccttcgtgctgttttcttgggtgcttttcttgtcctgcatcttctcagtggatggactgtctaaagtgaggggtgttaacttgggaggatggttggtcattgaagggtggattaagccatcactttttgacgggattccaaatggggatatgctcgatgggacacaggtgcagatccgctcagtggtattaaacaagtatgttagtgcggccaatggtggtggctcaaatgtgacagtggaccgtgatgtggcctcaacgtgggagacattctggctttggagggtttcagataatgaatttcagcttcggtgccttggaggtcaatttttgacatcaaacagtgaagatggtttgatcttggctacttcaaagcatccattgtccactgaaactttctccattgaaaggaatgctagaagggttcatatcagacttctgaatggaggctatgtgcaagatgggataataatttagcgacatttgaattggtgatcgttgccaataacttgcatggggactaccagcttgccaatggttatggccctgacaaggcgaagatggtcttagaagagcacagaagaagtttcattacagcaaaggactttgatttcctgtctcgccacggaattaatactgtgagaattcctgtcggatggtggataacacaagatccttatccaccttctccatttgttggagggtctttggcagccctggacctagcattttcatgggcacagtatgccgtgcctccaaactcttctttgcagtatttaatatccctgacctttcctgatgctatatttacttctgttggattagatcttatggtttgaaatgtataatcgatcttcatgctgctcctggttctcaaaatggaatggaacatagtgcgagcagggatggttctgtggcctggccctctcctgaatatatctcacaaacattggaagtcattgacttcctggcgacaaggtatggaggccatccttcccttttgggtattgagcttctgaacgaaccttctgcagctacagttactttagatgttcttgtgtcctactatatgaggggataccaaattgtgcgaaaccattcgtcaactgcatatgttattctctgtcaaagaattgggaatgcagacccaattgaactgtttcaagctggtattggtctttcaaatgtcgtagttgatttacactactacaacttgttcaatccatactttgccaccatgaattccagtcagaatattgattttatttacaagatgagagcaccacagttacaagaccttaagggcatgaatgggcctcttgtcttcattggtgaatgggttaatgaatgggacgtgcaaaatgcatctcagtatgagtatcagaagtttggcagtgctcagttggatgtttatgccaacgctacctttgggtggtcgtactggacacttaagaatgacatgatccattgggacttcgagtggaatattaagaataagtacctattattcagtggttcatccatgctgaagacaccaagcttcctgctgctgctagcgttaggatggggaattcacctgatcatcatgccaagataacctggattctaggaactaagctgattggaagtgtggatgtacacatagactactcaaatccgaattatagttgaggcaaaattggtgcatatatctttcttatataaagtcatgtagttgctcctaggtttctccagtttttttatgaaaaaaaaagaaatcctggattactcgaacatctcgtagcacaccttcgtaatgcaatatgttactcagctgacgaaatgttcaggtgtgtacagcgtgccatttgatatttttacttttgaagatgttgaggtatcatttgttcaggatggagacagtagcactggacctcatgccatctccagcaagccatgtaaatggccgtgcaaaata

SEQ ID NO: 36387 - DNA, 1930 bp, Zea Mays
gcccacccggccacgaggcgcgagctgaggcgtgaggcgtgaccacgaactgcgcacgcacgcaacgcaacgcaacgcgatctcagctcccaaccaaccttcatcaatccagtaccatcggaagcgtacatgcatacataccatacgtccataccatacggccggaccacgcccagcaaccaatcaataatactcctagtccgccaccagtcgctccgcctcggcgccatcgcacggaaagcttgctgttgctggcgacctcgcggcggggcgccggagcagccatgcctataaaatccgggcgagagcacccacccattcgtaccctatcacccgcctcccctgcctccggtcctctcccgcctctctctctctcttgcacacacacgacgtcgtacgcggcagctagcagcacgcacgatcgatcgccacagcgtacgtactagcacagaggacgacgaccgacgccatggcggcctccttcgcgcgcggcggcgtggcagcggcggcggcgacggcgctggtgatggtggcggcggtgctggcggtgtcgtgggccggcgtggcccgcgcggacttcgcccaggaccgcgccatgtgcgcggaccggctgatggggctggcgacgtgcctgacgttcgtgcaggacaaggcgacggcgcgcgcgccgacgcccgactgctgcgcggggctgaagcaggtggtggccgccagcaagctgtgcatgtgcgtgctggtcaaggaccgcgacgagccggcgctggggttcaagatcaacgtcacccgcgccatggacctgccctcgctctgcagcaaccccgccaccttctccgactgccccagtacgtcacgtgtggcgtcgtaacggagtgcctgtgccgcccctcctctctctctctctctctctctctctctctctctctctggctgagtggctgctgcctcatgaattcctgatgcgctgcgccggcacgtacaccaccgccgtacacacaccgcgtctcgctgtgtgtgcaccaatcgttgctctggtggtcacagcctttttgaagttacaacaccccatggcccatgcacgtgctacagtagcagtaccaccgaccaatcgatgcttgccttttttttttttgatttgacttttggatgacaacctgcagagatcctgggcatgtcgcccgacgcccccgaggcggagatcttcaaggagtacgcgaagaagcacgagagcaacaacggcaccaccattcctgccgctgcaaccggcgccgccgcggcgaccgggaagagcacgagcgcggcgccgacggcggacggcgccgggaggcagcccggcacggtcttcttctacgtcgtgtcggcgctgctcgtctccgtcgcggtcctgctgtgctgatggcttaacggccggccgcggcagcgcatgcattcatggccggccggccggcagggagatggaggtgctactgcacgctgcacgactggaaggaagcccggagacacaattcaagtctttgagatgagcaaactaaaggacacgagtactctttttttttctctttcctgtagcctttttgtgtgtgtgtggcgtgttgtggggagtttgtgagacgtcggcttgtgctagtgctgacggtgcaccagcgacgcagctctgtactacttcccagctgttgggctgtggccttccagcctggggattttaatgtggtggcccgagactgccgacatgtctgtctgaatctgatgattctgatccactatgttggcacattgtatgtttggtttctttggtttcagttttagttctcgtcttcttgcttttttttatttaaagtaatattgtgtaagcaacatgcatgtaactagaaggacctttgtttgtatacgcttaagaaacagtttcgatactaaattttagttcccgtcacat

SEQ ID NO: 36388 - DNA, 3503 bp, Zea Mays
ctttacgatagagaaaagatatacatgcccctccctctttcttcgcctagagacagccaagtcactcacgctcctctccactccgtccactactttcacctgatcgccaccactacctccacctggaacctggaagagagagagacaatggcgtgtaggccgccatgtccatgtggctgcttctgcttctacatggtgttcttcctcggcttgctgctcgtcgaggccgtccatggcacagggcggagcgaggtggccgcggccgctccgactccgagcctcgttccagctgaagcgagcgtccttcgccggatcgcggccaggcttggtgtgtccagctgggacttcaccgccggcgccggtccctgcgaccacggagactccggggtgcactgtgactgctccttctccaacggcaccgtctgccatgtcacagagatattcctcaaggggcagaacttctccggtgagctcccgcctgacttcgctgacctcccctacctcctccagctagatctaagcaggagcttgttccatggcggagtgcctcaccagtgggccaggatgaagttacaaggactgtcactgatggcgaatagattgtcagggccttttcccatggttctcacaaagatcacaaccctgactaacctgagcattgaaggcaatgagttctatgggccaatccctcctgaaattgggtatttaattagaatggaaaagctaatattatcaaccaatgagttcactggaccccttccagctgctctttcgctattcagtaatttaactgatttgaggatttctagcaccaatttttccggaaggatacctgatttttggggaaacttgaaaaggcttgacaaattgcaaatagaaggatctttcttagaagggccaattccctcgagcctatctgaattgaaaaacctttctgatctgaggattagtgacctgagaggtagtggttcatctttccctgatttaagtggaatgacatacatgaacaaattggtactaaggaactgttccatcagtggaagcatacccccatacattggcacatggacatctcttaagcatctggatctcagctttaataaactgagtggagaaataccaccttcttttgctagcatgggagctgtagattacatatatctatctggaaattcactcaccgggaacatacctggatggttattaagaagaaacaagatcgcggacatatcttttaataacttcacgatggggagttcaggtccgagccaatgccttcaagggagtgtcaatctggtggagagctattcagctgaagtgaaccgtttaaatagtattcatccatgcttaaagaggaacttcccatgtgttgcttcgaatggacaatatcactcttcactgcatatcaattgcggcgacaaagaagcaactattaacggaactaaatatgaagccgacacaacacccaaaggggcatcattgttgtatgtgtccccaggcttgaactgggcattcagcagcaccgggaacttcatggacgacaacataaatgacgacaactacatagcaacaagtgcatcaaaattggccgtgcccaattcagatctgtacaacaaagcccgtctttctcctctttcgctcacatattatgggctttgcatgttaagtgggagctacacagttaatctccactttgctgaaattgttttcacaaatgacagcacatattatagccttggcaaaaggagattcaacgtgtttatacaggggagaatggtgctagaggatttcgatattgaacagtcatccggtgcggctgcaaaaccagttaccaagacttttcaaacatatgttacaaatcacactctagagattcagttctattgggcaggaagagggacaacaggcattccatatagaggttcttatggcccactgatatctgcaatatcagtaactccaaatttccaaattccattggctgttgaccctcccaaagctggaagtagggaaaaaaggagttcaagggcatctattgctttaggaattggaattcctattgtagcaatattcactgctctgattctcggcatttattgtattaagaagcagagaaagagttcgatgcatgaagaactcagagcccttgacctgcaaattggctccttcaccttgcgtcaaatcaaagcagcaactaggaacttcgatgcagctaacaagattggtgaaggaggatttggttcggtttacaagggtttattatccgatggcaccatcatcgctgtcaagcagttatcatcaaggtctaaacaagggaatcgggaatttgtgaacgagataggcatgatatctgcactccagcatccaaaccttgtcaaactctacggctgctgtacagaaggaaaccagctgtcgctagtttatgagtacatggaaaacaattgcctcgcacgagctcttttcgttgaacagtatagactgagaatggattggggaacaaggcataagatttgccttggaatagcgaaaggtctagcatatttgcatgaagagtctgcaataaggatcgtgcacagagatataaaggccagcaatatactgctcgacaaagatttgaatgccaagatctcagattttgggctagcaaagcttaatgaagatgatcacacccacataagcacaaaagtagctggaactatcggttacatggctcctgagtatgctatgcgtggttatttaacagataaagctgatgtatacagttttggtgttgttgttttggaaattgtcagtggaaaaagtaacacaaactacaggccgaaggaagactttgtttatcttttagattgggcttgtgttctacatgagagaggaactctactggaattggttgatccagatctaggatccaattactcgacagaagaagcgctcctcatgctgaatgttgccctgctatgcacaactgcggcgcctacactcagaccaaagatgtcaaaagttgttagcctgcttgaaggcagtgccccactgcagcctttgctgtcagacctcagccttgcagcaaatagcctgagctcaagtggtgtacgcaggaacttctggcaaaacccaggtgagagtcagagcctgacagcacaagcttcatgcagcgatactaatgaatcatccaccattgatatagatggtattctactggtaagttagatgtagtttgctgtgcatcatgaactaggtttacatgtaggaactactaagcataggccagcatgtttgtattaagttcaccagtgcaatgtaaatagcaagtagcatactaatgtctagtacaggtagagccctatgcattttacaccagtgcaatgtaaatagcaagtagcatactaatgtctagtacaggtaaagccctattcattttagtagtctctgtttcatattacatgggaatattaagatgtctgtgacagaacactggaagttctctatggactatagtctctgag

SEQ ID NO: 36389 - DNA, 3377 bp, Zea Mays
catgttcctcctctcccttcccctggcttcccaagtcccgtcccgtctcctgggctggctgaccagtgaccagccctctcccacgtcgcacgcctgtggctcctgacctttccaccaccggagttaatgcctccgcctctccgtcagcgccgcctggcctcgccgtctcgctgtgcgcggcgtgggtggtagcagtaccacgcgtggtggttgattgagccattggatgggcggaattgccgttggcgaggtgaggcgtggagactgagggggagctgttgtggcgcgtgtctccctgtcgctcacagcttctttttattcactccgcgcccggttccgttccggggaatgggttctgcggaaggattctgagccgcggagtcgggggagggaggaggcgcgacgctggtgcggccgctgctgcctcgatctcttgccgcctgggctctcgtacgtacgtcctcgtagtcgtcgccgcggcgcaatttggcggcgtgcgcgttccttgcctagattggtgcgatccaatttctgagaggcgtagaggtgcggcgccacagaacacgagcgcgcgcgcctggtgcttgctgagaagcatctgcaaccgtcattccaggctcacgaggaaactcatttactcgaatcatgtcggactttgtcaggagtagatatgataagcaagaagatttccaagttttgttgagcaagaaagatcctggagaacaacctcagcacaaggattacctgtggatggctcactggaccaaagcaagcagcgctgcagaaccccgaaacaatgacagcaatcctttggaggataccaacaatggcactactacgaaagatagcgagaccttgccttatgaattcatgaaatctacagttgctgaaaggctcatggtaggagtacgccatggaagtgcctccatgcagcatgtccgacaattcaagtctagtatgcggggtatgccacgactttccaatgaattgggaccaaagaatagtgaacaggttgatgagtcttttgaaaaatctttgaaaaacgatgctatgaacttgagaactaggcaagttgtgtcagaaacatattctattcacaagctttcagagttaccgttggattttcagaaccttgggagctcagatgatccaagtccagattggagccactttccaatgttcgaaattaatcaaaagattgacagtattgtcaaccgtaaacgaaggtctccacctctggatctaaatgtgtctgcatcccatgtgatggccctatcgtcacaagaatacatgatgcactcacatcaaacagctgatgagaacatggatacgtgcaaacctgcagaaggctttgcatctcgtgtagaagatcatgctggcttcaattcagatcctccagggccaaagttaaaagggcaattgttggataccatgtcatgttcttgcagcaaggatgacaacaactcagcagattgtccaatagatgagcagcacacaagccactattttgcaaactcaaagcatgaactaccctctgtatctaacaaaaagaagttcaagtttgcaggaaacaaccacaatcgaattgttgcaagtgcgtcccacgatctgaagacaaaaagatctgctgtccataaacaacaaagtgctgcagaggcagtgttctgtgcaccagtacttgatagtgagtttcagaatgaacctataactatttccaacatcgacaagaaggatggtgaaaattttcatgatatgtataaatgtcttggcaaggctgtttcatgtcctttgttaccttatgagcatcgtcatctgaatacacagagaacggaatctgcagaaaatttgaaagtctgcacgcttcctgatcatcaaactgcaaataaattgacagaaaagagtcatggtgagctgctgacatatggaccaaagtcaaaggaaatgtatacaggttcttgtaaccaaagaaggtcttatttctttgaaaagttaacgattccttccaaatcacaaagtacatatcctaaaaattctgcgtcttcaggaaaatctagcgactttggagtttgtatgtatggcaccaatattggcagtcagttattcagagcacagaatcaatcttcagctaagactgaaacattgcacagcgatactctcattgggtccaaatccccagcaggtgaggtctaccatctctacaatacagtatcagctaagagcgtgtttaagtattgttgttagtgttaaaaggtgcttcttagttatgcaaaacatatatgctaacggagcagcatcactggactgttttgtctaatacatatcctttttttttctgttgctgatggtagcaatatcattctcagactcacatgttttcctttttctggattgttgtaggcatcgcttcattgtcggcacaaaaggactatggttgcacggacgaagcaaaaagtgagcagctcgtagctccgtccaggagaggagattcaggatacggtaaagaagatggatttcataatgtcaatgaaggtcatgatgtttggtccaaagcaactattggtagtaagcaatcatgcatgcccggaacgggaatcacgaacctagatctgatactttcccagatgagcagaatgagaaatcaaatttccattggtagaattcaaccaccaataggtgccgagccaagtgacagatggctcaagcgcctacagcctgacataccagatcctgacatccctggttccaggaggccaaacgttggaggcagccctccactcaggcaaagaaatcgttcgtttgacatggcacttccttgcaacaggactgacactggaacaactgactgtgttatggaggaccagagcttggataaagtggaaaaaacgcaagaaaagcaagaaagtaccccaattccagcgaagagcgtgaatagctggataggaagatggtgccagggaggcactcctgttttccatgaaggcccaggccagggaaggcaagcaacaaagcctggccggccatctgaagaactcgaaggtcggttcccaagcattgcagcgatggcgatgatggggcgagcgatgaacaagcttcggccgtgcgagcatcagaagatggggccacttgtggtgtggaagacagattgacctcatatatatatgtttttgggtgtaatatagtggtttctttccaaaaaaagaaaaaaaaatgaaaagcaacagtgaattttgcctggtttattgtttatggtgtaataaaccatatgatggctcatggtttattgttttctgaagtgaaagtagctaggtgtagtggatactggtgatgtaatggtctggtctcatataccaacaatataataatattttactgtttac

SEQ ID NO: 36390 - DNA, 1173 bp, Zea Mays
cctcacctcccgcgacagcaccggtagctgccatggcctcttgcgacctccttgatgtcgaccctctggagcttcagtttccgttcgtgctcgacaagcagatcccctgcccgctgcggctcgccaacaggactgaccgtaccgtcgcctttaagtaggtgaagacgacgaacccgaggaagtactgcgtgcgccccaacaatggcatcgtaccgccccgatccttgtgtacggttgtagtcacgatgcaggcgcagacggtggtgcctccggatttgcagtgcaaggacaagttcatggtgcagagcgtggtcatcagtgatagcttgtcagccaaggacataacctctcaaatgttcgcgaaagaggggggtaatgtgctccaggaggtaaaattgaaggttgcttatgtgatgccacctgaaccaccatcagagattgcagaggagcacgatggtttagatcgagttttagtgcctatgcagaggatcgtggataatgggaaaagtacttcagagctatcgagtggctccgtgtcattgaggtcagctgaggagtttggatcacctgttggtcgaattgtgaagagtgaggagtttctgaaggctgcaggacctgctatggaaacaaaaacatatgcaggacctggtgaacaatctcatcagctgtcagctataattacaaagctgactgaagaaaagaattctgctcttgagcaaaacagaaagcttcaagttgaattggaacttgtaaggtgcgaagccaggaaacagcaaagcgcgttctcgttggttctcctaatagcgtttgggctccttggcattgttctaggttacattgttaagaaatgataatttcatagtctaatcgagcaatcgctatggtaaataaaaggtaacatgtcgtgtgattcttacattcatcagccagctgccaatgctacagagaagtgcaagcgtcagttgacaaaccgggggtgggggtgggggtgcggagtacaatagcatgtattttgatccacatgatgtatttacacgaatcactggaaaagtgattgttgtttggtttctgtatctatcccataccgtttgtctctaaaattgtgaattgggtccactcatggatgtgaccacgttgttaacaaaatgagcgggagatcgtgtccgagtaatg

SEQ ID NO: 36391 - DNA, 6296 bp, Zea Mays
tgaacctccaaggatacaagccaccagtctccctcgcatcgcgtcgtcaccagcctatgctcgatgctcccatagtcccatctcgtgatccttccgctcctatcaaagttcgaggtttctcagaacttgcactcccgattccgcgccggcgtccaaagccccaccgaatggtccaccacaccgtctgaatcatcacatatggggaggaagaaatcgagaccggttcgagctgcgggcgccgcctttgcggcggctgaggccgacccctgtgcgccgagccctagcggcagcacgaagcgtaggaccaagggcgaggcgaggagagacgtctgcgtggaggtggataggagcacgtggggtcacgccgacatcgagcaccgcgacgtcgccgaggtggtcctccgcgacgtgagcgtctacggcgacggggatggggaaggtgcgttggaggaggcattcggggcgtcgacgttctcgttgcgtctgcgggtgcgcgacgcgccggaggaggggttcaggatgggccagtggcccgttgtagagtcggattgcgtgctcctggagtatgtcgtccacgggggccgtgaagggaagcacgcagaatatgtggtctcaggatgttttgatggtcctgatgaaggtgtatcgggtctcgtccatttggtgagcttgagattcatcacgctccgggtccaatcgttcagagcatttcagcatatgggtgaggtgagagttgagtcgtttagggttagagtggaggtgatggaacaggctttcagtgcgtgcggttcgctgctggaggtggctagacatccatggaggaagagtttgatgaatgtgattgcttggctgcgtcctgaggtcacgacatcagctgcgatatatgggttggataaccttggtgtgccaatggatgatggtggtaatgctgatttggtacctaagagtgattcacagtttgatcttgctgctttttatgaggccattaagccttcggcgtgagtatcttacatattactatcactctaacctcataatcatgtgctttaacatgaatatgaaatgaaagcatttaaacttacagacaactacttgctgccattattatgatatacaatatgttcttgtgtgatcagaatctatgatgtgagttatccaaagcatcgttacgattcttaggttgtatcatacttctttactttctggcaattttatgatacttatcttttattcctgttgttagtaatgcaggacagttggaaagggaccttcctgatttaattcctcagctcagaccatatcaacttcgcgcagcgcattggatggttcaacgtgaaaacggaaatacgctccatcaagaatacgctaattctgcaccatattgtgttccttttgattttgttcacaagaattccaggatgttctacaatccgttcaacggaaatatttcatcgcaaccagagccttctccaccttacatctctgggggcattttggctgatgaaatgggcttggggaaaactgtcgagcttttagcgtgcatttttgctcatcgtagaccaatttcattagacttttctgtcttccagaacaaaaccgaaatggatcaaattaagaggcagaaagtagaaagggttgagtgcatctgtggtgctgcgagtgaaagttctgcatacacgggtctatgggtccaatgtgacatttgtgatgcttggcaacatgctgattgtgttggttactcacccaagaggaatatactttttgctgataccactgaagatgtagtatcaacaaacaaaaaaagcaccatgaagtctggatttagaaggaaaaagaaacccaggtgttctattgttgagacagaagacaaatacatttgtgcactgtgcttggagcttattgaagcaactcaaactaatatactcagccatgctacattgatagtatgtcccgcaccaatattggcacaatggcactctgaaattacccgacacacaaggccaggatctctgaaagtttgcatttatgaaggtgcaaggaacttggatccttctaccatccaaaaaaatgatatgactgaaataattactgctgatgttgtcttgacaacatatgatgtcttgaaagaagatctatcacatgattttgatcgtcatgatggcgatcgccgtttcttgagatttcaaaagagatatcccgtcattccaactgtcctgacaaggatccactggtggcgactttgtttggatgaagctcagatggtagagtcaggcaggacttctgtgactgagatggcattgaggctaaatgctcaacaccgttggtgtatcacaggaaccccgatacaacgcaagcttgatgatctctttgggcttctacgttttcttaggacaaacccatttgacacatatagatggtgggtggacattattagagatccatatgagagggggaacaaagtagcaatgaattatgcacacaatttctttagggaaatcatgtggcgttcctccaaaattcatgtctcggctgaactgcagctgcctccacaagaagagtgtttttcatggctcatcttttcttccattgaagagtatttctataagaagcaacatgccacctgcatggaccatgcacatcaaattattagaagtttgagaaatgacaccaatagaagagaatcaatttctgattcaaatgctttgctaaatgtttacctctccaatgacgacattgccaagctcctagtcccactgctgaaacttcggcaggcatgttgccacccacaagtggggagttctggtctctgctccctgcagcataaccctttgtcaatggatgaaattttacaggttcttattggtaaagcaaaaattgaaggagaggaagagctcaggaaaattgtagttgccctgaatggtcttgctggattagctgttattgaacaaaggaaccaagaagccatttctttatacaaagaagcactagcattggctcatgaaaatattaatgatttccgtgttgaccctctgttgaatcttcatatcaactacaatcttgcagaactgcttagaattagttctgagtatttacaagaatgcccattaaaaaatccggcttttgaagttgcaatcagccgaaaaagaaaggaaatagatactgttgagacaaatgtacttagtgtaaaacgaaataaaatatgtgaaaacagtgttttgagtttgacagctaatgggctagaaatatctgaagataaaaacactattggacaaacatgcatgactagagatgtggatgtggagaatgtcactgggtgccactcatcatttgaatgttttgctgatgactgcttgaggaagacttgcaatacaatcacagaaaaatacctgtcaacttttacttcaaggctggtagtagcgcagaaggattttaatgcatcattcacagaggtcttgaatatcactaaagagctacagagtgagtatatgaattggtggctgtatgctttggactgcattgaagagaacaacatttctgctgacgatctgatcaagaagattgataattcttctagtaagagcaccactggtttgggttcatggggaatatcttccagggttaaaagtattgctggcttaaaatatgcaattcaagctgatattgattctctacaaagttcgaggcaacatcttatggatagacttctggaagttgacaaaacaatggctaacccaagggatgaggacattgagggccagcgatattgtccaaactgctatgatggcactggttctctatgtatccagtgtgagctagatgaactctttcagaggtatgaatcacgcctgtttcttgttaagaaatcgaacaatggttctgtcattgattcagtagaagaagcacatgatctactgaggcgaaaatatgagctcaatcacttcttccgtaatagaaaatccaaggagggacctgaacctgactatgacaataacaaccctaggtcagctcgagaaaacatacaggtgtgttacatacttccattcctgcatgtaatataagtcaatagtcgtcacttgtttttcctcacctttttcaaggataacattacaccttctacttgtcttttaccatgtgtcttctatgatctgcattgatcagtccatctgcctttgtgttctgtgaaaggtgttacaaggaccatcatcacttaaagtttcttcacctggcattcaaagggatattgatccatttatgcgttgtctatttgttatatatatatttttaatactgccgatgtttacaggtctataggcatccttctagaaccgagactgcattaagggttatctggaatcactcaaagacagtattgggaaagcaatattccacaatggctaaaaaacatttacttctttttgaggctatgcgcaaggaatttcctcaagcaaggtttctgtcaattgctcaaacacaattattgcgtgctcatgatgagatcaagatgtccatctcaagacttcagctcaaagagaaagaggatgatcctagcgctgccaatattgtaactagagaggaactcataccatataatgttcagtttacaagtgaaaaattcatgtcactctcatctttagcccgtgtaagaggtcaactccggtacttaaagggattggcggtatgtaacaagaaaacacataaccagcatgatgaatcactggctaaagcaggcgatgctgttgatacagctacttcatgttcagccacagggcaaactgtttctgattttcgtaatgaaccatgcccgatatgccaggagaaggtttttgaccagaaaatggttttccagtgtggtcattttgtatgctgcaagtgttgtctttacatgacagaacaaactgcagcacaattcggaaagcgtaaacaatggattatgtgccccacatgccgccagcgaacagatattgagaacattgcttttgtagttgagaaaccttgggacaaacatgaaaagagcattgaagatttggctgaaagcactatttctgtccaaggttcatatggaacaaagtttgaagctgtcacaagaagaatcttgagaatcacttcaactgatggaacagctaaagttcttgttttctcaagttggaatgatgtactggacgtactagagcactcccttgctgctaacaacatttcatatgttcggatgaaaggaggaagaaaatcacaggcagcactctcccaattcaagggtcaggagagcaatataaatgtagataaagtgaacagggcagcctgcaaaatgcagcctgttcaagtacttctgatgcttatacagcatggagcaaacggtcttaatctactagaggcacagcatgttattctagtggagccattactaaatcctgctgctgaggcacaagctatcagcaggatccatagagttggacaagacaaaagcacatttgttcaccgttttatagtgaagaaaacaatagaagagagcatctacaaattgaacaggagcagagctgtctgctctactataaaccgtaaatccaaaaacttcaaagatgagcctgttttgacgctgaaggatgtggagtcgctattcccgatggcaggacctgatgaacccctagaacaggcagatcaaaattacggcgatagcttgaggagtttgcctccatctgttgccgctgggttagctgctgaaagaaggcgactaatggagcaataagttaatggagtttgcctccatctgttgccgctgggttagctgctgaaagaaggcgactaatcaagggacctccatccatcgttgtggcagttgtgctaattttacttgatcagaatttctcttcgcagcacagtaacgacagtaggagaatgatgctccttagttatgaagcacccccatcatgagaatcaggctatttacgttgtaactttaggattttttttttatgtacctgtaggccttttagactcttgtacataagcttctagttttagttcgtttatacggcccatcctgtagttttgatgtagcagctctcagctctgccactgctacaccaacttatggcatgtataagtgtactaatacatggtcatcagcatgatacattctttagatgcttggtcaattttttagatgcttggtggtggcagagccagtagtcattatggaagaaaattgtcggttgtcctatgctgtctgcagatgtgccggatggtcagtcaggaagatgcagcaaggctttctgatagcttctgcatccgggcccctgctg

SEQ ID NO: 36392 - DNA, 4673 bp, Zea Mays
aagcccctctgcctctctctctctcacctcctgtcccctctcctctccgtgtccggtggagcttctccacctccggccaagatctggaaccagcgagggtgcccggcggttctcatcccggaccccgactctttcctcatctctgcaacctctggatcctccatctgcccccctgcaggatctggaagctgcacccgtcggggggagaagcaagcagcacatccagcccgctcgagctcgctcatctgacctcaccactgagcttccgcaggatcttcacatccccattccattgacaacgtgaaagagaacatgtgacggggctgccaagctacatgacaacgacgccgattgccgaatgccgagacaccgcgcacgctcttgcagataaagatgatcggttgatcgacgtggtatttgtaccactttgctgtccgtgaaagcccgctatataggtggtgacatcaagtgatcaagattttatggtgcgcaagaggttgggttatagttcccgtggccatcgaattccaactatgccacgtgttccaaactcagctcgggggaaacgttctaccagaagaaagaaagatgagaatgatgatatgtgtgcaatggatttgctcgcaactgtggcaggaaagttactagcagatcaggacaattcatctagcgttcctaataccagtgcagcgaaagctaaaaaaaggaaatcagttaaggaagaacactttgatgaaattccgcctctaaaaaatgtggctatggagaaagatgtgggttctggtagcgttagtgccttccctaggcaagctaaaaactgcctggcagaaaactcatcgacaagaaatggagctgatacagtattagagtcactaacagtgaaatcaaatatgctagcaaaaattcctgagtgtggatcttatggaatacaccatgcaggctcctcaagttcagcagagcctgaacaagtgcatcaagctgaacctaaagtgagcagaagacaagcagatggacatcctgtggcttatggtatatttaactccgtggatgtggatggcaaacctccggctttggttagttctgacagtagctcgtgtgttcctctgagcagccatgacaaggaacatcaaacctcttccttgtatcggggtgtagtgcagtatactgcagatagagaagatgatgaaaattcttctgggtgcacgcatccaagcaccatagaaagtaagggttgcaaaccacaatatctaggtaaccataggataaggaaattgcttgcctcgaaggtaaggaaggcagcacgtaataagatttgtggagggattccatcaaaaaagatctgtggagggttgtcaaaaaaaggtagcaagctaaacttatgtgggaaaaagatgtccaccacacaccaaaaggtgcaaagaatgattttcaaaaagaaaaagctaacgcaccgtacatcttttgctaaggagatgctaactgaagctagtgggacatcatttgctatggaaggtcaaaataaatcatgtgaagctgagaattaccatgttaagctaagaatcaagtcattcaacatcccagaattgttcattaaggtcccagaaaatgcaaccattggatcactgaagagagctgttatggatgttgtcaatagtataatggaaggtggcctacgcgttggtgttcttcttcaaggaaaagatatccaagacgacaacaagacactttgtcaggctgggatatgccacgataaaaagctaaataacatagacttcacgctggagtgcgagcgtgagcgcgagcctccctctggagtcattatacaagaacagatggatttcctcaccacagatatggtggagccattagctaggatgaagtgtgaggaaccttttcctgaagccgacgtcggagatgacagccagcagcctagagcgccttatcgaagccgctctctctctgacctgtactctgtccattgtcctgttcagatggcttcacaggacacgacggcgagctcccaggccatcgtccctgtttcgcctgcgccttcagacgtgggcgctctagccattgtgcccctttgtaagtccaaggggtctgaagtcgggcagaggcgcatgaggaggcccttcactgtcggcgaggttgaggcgctggtgggagcggtcgagcagcttgggactggaaggtggagagctgttaaaacgcttgcattcgacagtatagatcaccggacctacgtcgacctcaaggacaagtggaagaccctggttcacactgcgagcatatccccgcagcaacgaagagggcagccggttccacaagaacttctagaccgtgtcctcctagcgcaggcctactggtcccagcagcagcagcaggcgaggctctaggacaagccccgcggcaaggctcctctcctcttcctgagatctgttttccaagggaaagcttgtacttgtcctagattggcaacctatattgtttattttaccctatattgtttattttaccaaacaaagatgctaacatatagattggcaacctacaacacctatagaaaatggctgcaggctgctatgacaaattagtcactgtcagtgactgacatccgtataagtggaaaaacagtgacatgacatgctccggtcctgcggcttccagccaaacaacaacgaacccgcctcctcccctggcccgacgcgggctctcccgtctcctctgatggacgggaaccaaacctggccgccccctaccccctcgccgccgcccttctcctcccggccccgcgcgtcgccgtccccggcgacgcaccgccggcgccgccggcactccaaaaaacataagccccggcccgcgccggcgccgacgccgcagggcgcggacttctccgcgctcccgccggatctcgtccaccgggccctcgcggccgcgtgcgcctccgacgtcgcggcggccagccgagcgtgccgcgcgtggtgggacgcgctgcggccgttgcgcgaggccgcggcgctgcacgcgtatggccgacgcgtcaagcacgaccccgtgacaggagccagagccgtagccgcagccgctgcctcgcgcgggggaggcgaacgtgtggagacggagaggcagcgcgctctggggctgttccggcgggcggcgaggctgggctccgcggcggcgatggtggacgccgggctgatgtgctgggaggacgggcgccgggaggaagccgtcggttactaccggagcgctgcggacctgggacatcccattgggatgtgcaaccttggggtctcctacctcgaagctgatccacccaaggccgaggaagctattagatggttttatccatcagcatctgcaggcaatgctcgtgctcaatacaacctaggcctttgcttgcagaacgggaagggtgtcaagcggaatcagaaggaagctgtaagatgtgatacctctgctatgtcggtgtcacacaccacttaaaattttccttacagtagaagtatttctgttttctatacgcattcagtggttgaaaaaaaactaggataattggtacactatcctattcatacaatctatgcatttaccacacctcttactagatatattaggaatagacaactgatgttcagttgacgaactactcgttaccctctgatctgatgatgctattgagtaccagactcttttgaagctctttaactcagctaagagaaagtagcttttaatttgaaaaaaagtaatcttggttgggtttcctctatcaatgtaattatgatcatgtcacctggaccaatcaaaatacactaaccagcagatactggactaccagcaagttcccatactctttttagtacttgagttgtgctgaatatgaaagagacttattaatgcaggcaaaatggtatttgcgagctgcagagggagggaatgtacgggccatgtataacatttccctgtgttacagctacggtgaagggcttgcacaggatccagtgcgtgctaagaggtggcttcaactagctgctgattgtggtcacaagaaagctctttatgagtgtggtattaagctttgtgcggcaggagacaaggtcaagtgtctcatgtatctagagctggcgacacggcgtggagaagctgctgctgctcacatgagggatgtaatacttgaatcgctctcggttgtgaatgcgcagcgtgccatgtcggatgctgataaatggaagcctaggacactccatcctagacctagaaggtgaggaaatgacgacgccaaagtgcagaagaaccatatcatcaagatgtccacaccctagtcatctgtggccagaattgaagcacagaaggtcgaagcaaacatgtatgcttcctcggcacccacagccacaggaatgtcagtagccatcctgtggctctctgtataaagccatccattggcagatgtaataccaggagaacttgtagtacagaaagttctgtagcaaatactacttcctcccttccaaattgctaccttaattctcgaatatttgtcaccactagttcatttttgaactaaaatgtgacaaatagaaataacggagcgagtataaaatactttggcttttctagatatgtattttttatacacttaaatacaaagtaaaaggaatgtatctataaatgca

SEQ ID NO: 36393 - DNA, 2219 bp, Zea Mays
gctagggttcggagtggggagaggaatgggggagaaacgtatgcggtatgcctcaacggcaattaggagaaaaatgagaggtccttccgacaaattgctggttttagtcgatctgagccgtctgattaccgatccaacagctagtatcttgcacatgtcaagggtttacttgtcacttgcatgcacgtgacgaacgccatggcgcttgcggttcgtctcatcggccgccgccggttcctcccgccgccgctcgccgccgccgttgctcacctctctgccgcttcccagagcccgtgccaccaccaccacccacttccgacccccgcgctcccgttgccccctcgtgagctccatcctttcgctctccactggcgaagcttctcctggtactcccgctccggctccgggtctgatagcagtcccggcaccgctgccgcggacgctcgcggagaggacgtgtacatcgagaaggaaagcgtgcacttggatggcgtgacaatcgttgatgacgggggaggggtcgtcagtgaggcgggtgctgcggcggatgccgtgggagatgccgccggcgccacggccgacggcgtcgggggagtgccggaattggctgttagcacagttttggacctcatggacgggatccatagcctcaccggactgccgtggtggatgacaatctcctttttctactgtggccatgagattgtggatacttcccgtcctcatagtgcagttacagaagactgctgaaattggtgaagtgttccgaaaagtgtccacttcattaccccctcctcagcctggaagcaatttccgtgaacagtacactctgttccagaagaaaaagaaggagcttggttgcccctcatttatctggaattttgcctattttttggtacagttcccttgctttattctttggatgacgagtataaggagcatgtgcttgaataatcaccctggatttgataatggtgggattctgtggttccataacttgactgagtttccacatggtactttagctcccatctttcctatcttagttgctggtctgcattacctaaatgttcagatttcttttcaggggtcccagatcaaggatcacccaggaatttttggcttgctggctaagtactatagaatatacctcaatgtcctgactatccctttgtttcttgtcgcacatgtggttcctcagggatgcctggtctactggactacaaatggtttattttctgtagctcagattccatgcatttaatttgaacaagcttgatgcggcaaagtaagcattgtgtactttatgttacattctattgttttttcaaatgattaaatcgcagcaattatccttgagaaatgatgctgtccgcaagctgttgggattgccagatactagagctcaggttggttacagagcacaaaagtcacctcttgaggtacctgagatgatgcagtggtcacagcttgaagatgctaacttgcaaacgaaatcgatgccatctgacaagggaacagccagtgagagtacaactcctaattttgcaatgggaagtatggatggaaatatatctgcgtccagctcacctgaggagctacttgaacaagcattacagtatctgggcacaggctgccgagatcaagccattccactgatcagcagtagagagaaacccagatctgtacacagcgttgattgggatgggacaaaccctgttctcaaatagattgtttcccgaagccgcggtttgttttgaacatgctataccaaagattcaagaagatgaccctcttcttgtgcttgcgtattttggggcaggtctttcgaacaagcgtcagggggataatgagacggcaataaaactcctggagagattagcagagctcaaggaaccagaaaagcccatcaacaaaagccgctacttccaagggatgcttgctttggcaagtatattatatagagaaggccggaattcggaggctgccaaatatctgcggatggctattgcttatgatccttctgtagaaaggcttctcaaggaatgcgaggaaggaatggacgatcagccaaagccagaggagaagtgatgtgctggacctgaaaaagccacagtaacagagatagcacaccgcttttgtttttgaacactaaaaccgcccccagctttttaccctttacccatatgatcgtgcaaaacagagtgaagttgaataga

SEQ ID NO: 36394 - DNA, 2748 bp, Zea Mays
ttttttaaaaaacgagcccgaccttgctccaactccctcgattccctctccctattcgcgttccccacttccgttcgccgccgacaccgcgtgcgctctctccccccctccgtctctgtctgcgacgactgggtgggctaccgctgccgccctacccatgtgctgaggcttctgcctacctcttcgccggcgaagagcgcccagcaggtttcatgactggaaatcagagcaatctgtttctgttatttcagatagggtagtatcagaaaaagggcataacatctttggcttgttaaaggacagaacagcaggagccttttcattcctggggaactcttcacattctgaagccctaaacaaattaggcctaggggagaagtcaaaaacaaaagttcttgatcctcaagggccatttttgcagagatggaacaagatatttgtgatatcatgtctttttgcagtttttgtggacccattgttcttgtatgtcccagtaattgatggtggcaacaactgcctgtacttggacaagaagttagagaccacagcaagtatcctgcgctttttcacagatatcttctatttactccatatactgtttcagttcagaacaggctttattgctccctcttctagagtgttcggtcggggtgccttggttaaggacacatttgcaatagcaaagcgatatctatcaacattgttcctggtggatttcttagcggttctgcccctccctcaggtgtttgtgttggtggtgctgcctaagctccaaggtcctgaaattatgaaggcaaaaattgtactgttggttattattatttgtcaatatgtgcctcgactgctccgaataataccactttaccttcaaatcacaagatctgctggcatacttacagagacagcatgggctggtgctgctttcaaccttataatttatatgcttgccagtcatggctttggagctctttggtacattctttccatccagcgagaagacacctgttggagacaagcatgtatcaatcagactggctgtgatcctacatctttgtactgcgggtatcattcacttgcaaataattctttcttacaaaatgcgtgcccaacaaatagcactgccaatccagaccctatatttggaatctttctaccagctctccaaaatgtttcacaatcgacgagtttctttgaaaaactattctattgcttttggtgggggctacaaaatctaagttcccttggccagaacatgaaaacaagcactaatacattggagaatctgtttgctgtttttgtctcgacatcgggtttggttctatttgcactacttattggtaatgtgcagacctatttacagtcagcttctgtgcgtatcgaagaaatgagagtgaaaaggcgtgatacagagcagtggatggcacataggctactccctgagaatctaaaggatcggattatgcgccacgaacaatataggtggcaagaaacaagaggggttgacgaagagggccttcttaaaaatcttccaaaggatcttagaagagagataaagagacatctttgtttgtcacttctcatgaaggttccaatgtttgaaaacatggatgaacagctgttggatgccatgtgtgatcgtctaaagcctatgctgtacacagaaggaagctgcatcattcgcgaaggtgatccagtgaatgaaatgctcttcatcatgagaggaacactagagagtaccacaacaaatggtgggcaaactggtttcttcaactctaatgttctaaaaggtggagacttctgtggtgaagagctcctcacgtgggcccttgaccccacttcagcttcaaatcttcctggctcaactaggacagtgaagacgttgtctgaagtcgaagcttttgctctgagggctgacgacttgaagtttgttgccacacaatttaggaggctccacagcaaacaacttcagcataccttccggttttactcacagcaatggaggacctgggctgcttgcttcatacaggcagcttggcacagatactgtaggaagaagctggaagaggctttatatgagaaggagaagaggttacaagcagcaattgtaagtgatggcactacttcgctcagtctcggtgcagcgctctatgcttcacgttttgctggcaacatgatgcggatcttacggagaaatgccaccagaaaggcccgtttgcaggaaagagtacctgcaagactgttgcaaaagccagcagaacccaacttcttcgctgaagatagctgaacttgtaccctgtagcaagcagggattcatggtccaaccggtgaagtttgtgcagaagttaagattggatgctgtagatagacagatcaggtgctctaaagccgtctggtttaaatcacctaattcgcgaaaaggcctggtccgagttagattctccgttgaaataaatttgaagctgacgttaaaaaaaaaatccgcttttgctccacgttaaattctggcttccatagtggtcggactagggtgctgagataagggtattgagattttttagatctgtgtgaaaagattttctgtaacgtaatatctgaaggctgtcttatcctctgtaggttattttaaaaaaaacacgtatatttcgattgtatacaggtttcatgtattataaacactctaatttaccttgtgcatttgaaaaaagagagaagatgctgtgaatataatcgattaattgtttgttcatt

SEQ ID NO: 36395 - DNA, 2447 bp, Zea Mays
cgggttcccatcgaaccgcatctgagtatctgaccacgtcacacgacaccaccaccagccctccccttcatcaattggagcacggcgcccgttcattcccctctgctccgctgcttgcctccggctccccaattccacgagatctccaattccaccgcgtcgtctctgcatccggaccccataccccgatcgatccctaaggcccatggttttctccgccgccgcgtcgcctctagtagccaccgctgctgactctgcttcctcctgcgtcgcccacctccgctgctgctgtcgcgttagttgctgccgttgttgaagacgcgtagctctttagggttcgcgatttctcgccgatcggttcgagaattggtaagctatggatctctcgcggcccacatcgtcggacctctcgctcgggctccactctcacggtcacgcccacgcccacgctcgcaggcacgcggtagccgcgccgctgcgcctgttcgacgacgcggaggagccgaagccggagcgcgtcggggccggagaggccgacgcggagagggatgacgaggacgggggcgaccagcacttctccctcctcgggcactccctctgcgtcaagcgcccgcgccgcgccggcaacggcggcgggggcggagagacgtcatcctgctcgtccacgtccgcggcgcttcgccctgccaagcgacaggcgacgggggagggcagcggcgcagatctggagacccgccgcgccgcggtccgcgcctggggcaatcagtcgctggcggaggccgacccggacgtgcactcgctgatggagcaggagttggaccgccaggtgcgaggcatcgagctcatagcgtcggaaaacttcgtctgccgcgcggtgctcgatgcactcggcagccacctcactaacaagtactccgagggggccccgggtgctcgctactacggcgggaatcagcacatcgacgccatcgaacggctctgccatgagcgcgctctcaccgccttcggtctcgaccctgcctgctggggcgtcaacgtgcagccctactcgtgcacgtctgccaacttggctgtctacactgggctccttcaacccaaggaccgcatcatggggctggagccaccgtcgggcggccatgttagccatggttactacacgcccagtggcaagaaggtgtcaggtgcctctattttcttcgagagcatgtcgtacaaggtgaacccacagactgggtatattgattacgacaagcttgaagaaagagcaatggatttccaccctaaaattctcatctgtggtgggagctcttaccccagagagtgggactttgcacggatgagattgattgctgataagtgtggtgcggtgcttctttgcgacatggcacatatcagtgggcttgtcgcagcaaaggaatgccgtagccctttcgactactgtgatgttgttacgtcaactactcacaagaatcttaggggccctagaggtggtataatattcttcaggaaagggaaaaatttaaggaaacgagctggatctttttctcaaggagatgagaatgaatacgacttcgaggataggataaattttggtgttttcccttcaatgcaaggagggccccataataatcatattgctggcttggctataactctgaagcagaagaaaatgcagattggttacaggtggcacagataatcacttagtactttgggacctcagaactcttggcttgactggcaagatcttcgagaaggtttgcgaggcatgccacatatctgtcaacaagacaccaatatatggagataatggctcgatatcgccaggtggtgtgcggattggaacacctgcaatgactactagaggttgcttagaagaggacttcgaggtgattgcagacttcctcataagggctactcaaattgctaacaatgttctgaaagaacatggcaaagtgcaaaaggagtttctaagaggcctacagaacaataatgatgttatagaactccgaaatcaggttgaggcatttgcgtcacagtttgcgatgccaggttttgatgtatgaatgtgcatatatacgtagtcagcaattatcagattcacagcaacattgccatcctttccgttactccaatactagcaactattgctttcaactgcacaatgattagggagtttttttttatttgatggtagacggtctagatggttgattcaaacaattatgtacagcaagttgtgatgaattatgtatgcagtgaaccttggtatgacgggttcctataggagatattttcttgtcactacaacagaaccctttgttgccttttgacacctgtttgttgccgaggctgaataagctttaaccatatggtttctggctaattattagacgatgatatttggtaaattgtactggggcttgcaactagtttcgtcagtttgc

SEQ ID NO: 36396 - DNA, 5520 bp, Zea Mays
tttcgctctcacgaacccctctggcctctggccctctccaaccttctctcttccccgttcccccgtcgcctcggcattccgccgccgactccgacgagggggccccacctgtcatcctcctcccccgccgccgttcgccggacggcagcgcgacgaggagccgtttaccccttcctgccccgcggcatccgcgttcgcgttgtgcgccgctgatccgagcggaccgcttcccgcgctgatcgctttctccgttcgacccctagggtttcggcgttcccctgtctccccgcgcccccttggaggcagcaccagagatctcgatcttccgcggcctcggtcgcgctacgcagttgaccccgctcgatttatcaccggggaattagagaggcgttttccgggggagtttcttcgcggggaagaggggccatggcctcgagtctgctcaccacggacaggagatggggtgctactcctgcaaggaaatctggtatgactgttctaggaaaagtcccaaaacctattaatttaccaagccagaggttggaaaacaatggtcttgatcccaatctagaactggttccaaagggcacccacacctggggcagcaaagcaccatccacaacaccaaatgcatggagttcctcgtcaattctgtctaccaagaacgatggaagttccagttcatctagccacttcaatggtcgaccgtcctctggcggaggctcaaggccatcaacagctggaagtgaaccacttggttcacccaatgcttggggtccaaattctcgcccatcttcagcatcaggcacatttccatcatctcatctaccaatggccacaaatcgtccccgaagtgcggaaacaagacccggaagttcacaactttctcgatttgcggataatgcttcagataatgtgaaagcgtcgataaggactattgatagaccggggtcttcatcacatgggcctgggttcacactaagtactggtgatttcccaacacttggctctgaagcaaatagtcaacgaggccatagttcgaaagggcgcccaatttctagttcgggtaaagaggtgtcgcaaggtgaacaagtgaagagcctaacaactgtaatgggaaatatcttgtgtgctaggaaatggtgaattaatttcacaatccaataatcaacctgttgatatcatgaagacagagcagcatgcacacactggaggtgctcctgtcctcgccacaaatgtgccaaatgaaggcctgcaaccgcggccatatccaccaaattttcctatgcctcatccgcagtttgattcatggcgtgcacctcctggtcacccccctgagggaatgtggcatagaggactagtgccaggtgggccatacagaccagttggcccccctggtagttttcctgtcgaaccatttggttattatggtcagttcccacccaactctgaagttgcagcaaggcagggcccagggcatggtggatatcaggctaaaaatggagatgtgtatcatcctacgcctcctaattcctatattatgaatcagcctgttattccagtcagaccagtttatcagggtccagtgccgtatgatgggtattatggccctcgagcacatttcaataatgccaatgttagagatcctcattttgttggaggtcctggaatattaaatcaattccctaatcagaatgacaggtttcaccctggacatcctcaaaacagaccaggcagacatgaaacagttccaagggagcagctggaatatgataaaatacatgtgtttcatcgaggaaaccctgggagtttgcatgataattctgatcgtctaggaggttcccgtgaatttgaaaggaatgcgcagccagcatcgccacttcttccacatcctgatggaaaccggactgatgtgaacatgaggacagatacaagggacacctttagtgaaagtgaaagaaccagggtacttacaaaatcggtgcctaatcagagaggttcggttggtacagaacatttgtctgtttatgacaatgcacattcccatcacagagaaactggcgatggcactctgcgcaagaaattcaaggaggatggttcagctgcactgcatcctgtaattaagaagaatgcagctttaatagagaaaattgagagtttgaacaacaaagccagaaatgttgatgcacgtaatctcccagaatcagcttcgtccaaggaattcaataagcataaaaaaagcactgatgtttcatctaatgatgtcatgggtatggcatgcaaatctgacccggcagtttctgtttcctgtgtttctcctgcggtgcagagactaccaaacgtgcccatcaagggtacaattcttggtccggcacatccacagttaactgaatttagcaaagctgaaaagcttggtgattcaattagcgatcatgtacataggaaaagtgattcttcaagaaacagttaccatggtccttctaaagataggccagctaataaattcggaagtcatggacggggagaaagttccacaactgatctgaggaataatatcgatcatggccaacaacctgagattgcttcgcagctgcaacctgcgattgtacctgatgatatgccagcttcactcgattatgagtctcagcgtgcaaaaatgaaggagttggctgcagaacgtgcaaaaaagttgaaagctgaggaagaggaacggataaagaaccaaaaagcaaaagcgctcgcaaagttggaagaattgaacaggcgatcatcagtacttcagaagaaatcaaatgatataaaagtagaaacttatgatgcacatgataagcaacatgctggacttgatgtgactgctaaacttgacacttcaactgaaccacatgatgttattgcgcctgataggcttactgatcttctgcctcctaatgatcccaatcatactatggttcatatacaggcccagtctacagcacaatcacatgctttagatggtggcaaagaccctgatgctcatgcaacctcgtctttggtcaagaacactcacagcaacatggagcctgttgtgcagaagagtatctcgcagttgcatgacatcactgtggtaaaggccaagcaagggtacaggaaaagacatgtgtcagaagagaaaatttctgatgagaaggcaagtgcttcaataaccactagaaatattacgaaaaatgttgatgttctcatcgacacagtgacggctgttgttgcaccacatgatgatccacctactcagaacaagaagggaacccgacatttgagaagtaagaaaaagttagatgatgctccagttacttctaaacatccacctgtggtgttgaatgagccgaatacagtgaaagtctctaccgagccaaagacacatactggtggtgttatcatcagcagctctattgttcccactgaaggtactattgtaactgttggaagtataactgttggtggaatttcacttaaacctatgaatcaggagcgggttaaatcaccagatggaacaaataatactgaaagtagccaaccaagacctcagcaaacgagaaaatctggaaagcatcagcatgttcttcggcctgttgagaagccacatgggaatgatggtatcttgtgtgcaccagttaagccaccagtgccgaatgagcactctgatggagccatgccgactgcagcagtagctgacctcactaaaccagtagggaaagccataaatgatggggagaatgtgacaagaacaaagagggctgaaatggaaagatacgttcctaagcctatgtccaaagaactgcaacaacaaaatccaagtgatgataaggaagcagttgataagcccagtggtgctaaatcacatcctgcagccgaacccaagaaaactagcaaagcacatgggggtaaatctaatccttcttggcgcaagaggaatccagatgaatcagctttggtggcaccaaattctgttgagcaagcagacgtctcttatgaatcaaaggaggttcagaacttcacctatcagaagcagcctgttgaacttggcaagcaagatacacagttaaaattcagtgtagatgctgctgctgaaaatagctcagctccagttcaaacagttccgctatctgtcggtggcgcaaaacaacatagtgcagctaacagacaaaggcgacagcatgttaaggctcaaagaaatgaagcaagtggctactcaaatgagagcaaaggtagcgagggcaagaatgatgttgtctatcaatcagcaacacccgtcatggattcgaactcatccaatcacaggaatgtgccaagatctgatgtgaaaaacagcggcgtagtttcacactctagagcctggaagccgaaaaccaattcccatcctcaggacagctcagacggcaagattgctgttgacgggcaagtggattcccatggtggtaggcttgagatgaatacgtccaaaggatctgatacaattacccatctagtgaccagtagtgaaccgacgaaaaggagtgatggcaaagaggtctcacacagcaaacatgagaacctggcacgggaagatggtaaccagaagggtgagactgaacaggagcaggctaatcctacactacgtcgccaaggccagcccaatgcaaggtaccacaggggaggtgggtcacacaggggaagggggggttatgacactgggaggccaaaccatgtcacaaatgtggagaggcggaagggtggcagccatcttgaataccagccagtcggaccccaaaacaaagctgcagacttccaacagagcctgggcatggaagaacgaaccgaggggcctcctgcttctggacaagcgttcaggcagcgtggacacaacagggggctacgcccagcaggccgctttgtccagcgaaaccctgcttctacgcctaccactaattctcaccaaaatgaataatcttccgcggctgccacatccactgagcttcaggaactcgcgcttgtggtggtgtttcacaacagataggtttggatgcgcggcaggtgtccttctacgactaaactctactggtggtgagcattaggatcctgtaatgataatagtctttgtcccaagggcacctggaccctgtgattgtgggaatttgcctttgttgggatgcaatgttggaacgtgtactaacagagttgttgtgtttgagaacttggtttaaatgttagcctgtgatgctaatgagaacagaaagtgttggtttttgcccaacttcctggcctcagtggataatatgctggcatcaccatagcacgctggcgttttatattgttgtcgatggtgttcatggcaatttgctttggatcgactggattggatcgccgaaataatcaaatcgtatgtggttattttgataaacggggtggtgatcatcttggccctgtttactgtttagcaagctgtttaaatccatagcaaggtcaatgctaaaagctgttatgtttcaaatttattccttccattcc

SEQ ID NO: 36397 - DNA, 1272 bp, Zea Mays
cggacgtgcctgctttctcgggcgtgctaggcgctatccatcctgagccgccataaccaccgcctgctagtgcagccagcaagccgctcgccacgcgcgcgacgccgtgtttggcccccaccgccgttcggccgccttccctgccgccggtccgccgtactcttcttcgctagactgctccccttctccatcgatcacttgctccactacgcgcaagacgcaaccgtgcctacggcctgctagtgcctaacttcctccccctctctatgcgtgccactccaggcgtcgagctcgcctctgcgggaccgtagcccccacccctcattggctctctgcgcgagcgtgatcgcgcctccgcatcccatgttcagtggagccctaaaggtaatgcaaatccattcacattccattttgggtttccacacaaccgatctatatattagacaaaacacaaaatcgatttagtattctttattccaagttctggctaccgatgctggaggatttggaaaggcgctgtttgattagaagacgagcatcctgacaagtgggtacctatatcctgtatgggccattttctggtagcagtttgtttcgcatctccatgtatttctcaatttggagactggagagagaacaacagagagaaactgatgttgaggagaaccatagaagtaattggttaggcttgagattaggaatttggcaaacaggtactatattttggagagcgattttggttcttatttgaaattcttatgttgcgtcaatacactgataatttccaatgtcaggttgtgtttctacgaagatccaaaattccttggaccaaaagcttcagcttccaatagtcgttaagggccttgtactgcgaactctggacaaagtttcatgctgctacaaagtgctctgcatacctggtgagtgtttaatcaatctcggtgctgatttgttagttttctttaagaggtatatatggttggatctgtgttttttgtgttagaatagataaaagtgctggtatatcatggccataagaacgattgttttatttagtggaattagaacaaattggttggatcttttactgcttgatcagatgcagatgaatatgtggggtttttaattaatagcaaaaactttcttactgtttgatcagatgaatatgtgggtattaccactaaaaggagaaaaagctcactcgagttgttacttggctacctttttaaattaatgtggagaactaaacaatgatattgatgacatgttggc

SEQ ID NO: 36398 - DNA, 1225 bp, Zea Mays
gagcggagcacagctcgcagcccgtagcccgcagcgggtatcgtcgtcggctcgtcgccggcggtgccaaattcccctttccccctcggcgtcgacgggccgaacccccgcgggtgctgtctgctgtctgagcaggagcagaagcaggctgcgggcggggcactgccccgtcgtcctcgtcccgccgcgacgtgtatgcgacgcccgagatctgtcccacgatttcgaggaaatcgacaagatcatggagcacaacatcagtgtcatcgttcctcatcagaacctcagcaacctctgcgggcgtaaccgtcacctccttgatcagtttctcaatctctggatacgtgtcatggtactcgatggagtggtagttgttggcaaggatttggaaagactctggggtgcaataccccatgtggatgtgcatgtccatccttccaggccgcagcagtgccgggtcaagccgctccttgtaattggttgtgaagacgatgatcctttcttccccacttgttgaccacagcccatcaacaaagttgagcagtccagacagcgttacctgttcagaaaatccaaattatttgtcaagataactgaggaagtggtggaatcgagaagatagtactcaccttgccttcccccttgttttgttctgtagaatctgactcatcatgtccctcggcctcctgccgttgtttgagttcgatggtgcagtcaatatcttcaatgactagaatggatcggttgtccatgttaacaagaagcctcctgaggtctgagttggatgtgaccgcagttagctcgagatcatatatgtcaaacctgagatggttggccatggctgcgattaggcttgacttcccagtcccaggtggaccatacagaaggtcatcgatgatggactgcttcagcttcttgtccatggcaagcgtgtcgaatgtagatgggtggtggagttcaatcggggaccaattgccgtactcagtcatgtgtatcatgagggttctctcctgggctttaatggccttggctgtggccaaaatgaacgggagacaaggcaccacttgaactccgtgccttgataaacatcgagcatctcgtcgccctcatccatgctgaccatcatcttgtcgtcctcgtccatgctgctgacgcgcaggcgctgctggatgtcggtgttcatgcgcgtggcgaggtagccgaagccggagaggaccagatcgcg

SEQ ID NO: 36399 - DNA, 1629 bp, Zea Mays
aaaagttgcggctttttttattccggtgttttttttaaccttgtcccttgtttttatcatttaggtttctggcacctactcattctgaatggcggaccttacagacatcggttgctgctgttgctttagctttttaaggaagcccagtgtacctgtatgtgaacatcaggatgctgatggcatgttaactgaagatttactgaagcgtcaatcagctgaagatcatgatggaagtttctacactggagatgatcctggggatgatcttgatagaagcttctacaatggagatgatcatgatagaagcttctacgatagagatgattctgactatcttgacggaagtgatgatggaccatcaaggaagagttctgaagatattatacagatgaaaatggtaataagatggtcaaccaatatgtccacttgggaaagatcggttctggaagctacggaaaagtggttctgtacagaaacattaaagatgggaagctgtatgcagtaaaggttctgaataagccatacatgatgaaagtacatgttgtacatacaaaaactgccatgacagatgttcttcgagaggtatccataatgaaaatgttgaaccaccccaacattgtaaatctcgttgaagtgattgatgacccaaacatggataaattttacatggttcttgagtatgttgaaggaaaaatggtttgtgataatggtttagaagaagctactgcaagattttttttgcgagacataatatctggtcttttgtatcttcactcccataatgttattcatggtgatatcaagccagacaatctcttggttaccagtaccggcaacgtgaagatcggggatttcagtgttagccaggtttttgaggatgatgatgatatgctttggagatctcctggcactcctgttttcactgccccggagtgctgtcaaggttcagcctaccatggtagagcatctgatacatgggcagttggtgtaactttatattgtatggtctctgggcactatccatttctgggggatacattgcaggaaacttatgataagattgccaatgatcctgtggaattacctggcgacgtgaatccccaacttgccgatttgctcctaaggcttctctgcaaagatccaggagatcgcatcacactgcgtgctgcggctgagcatccttgggtcgctggggatgaggggccagtccctgaattcatctgtagatgtgggtttggccgcaggaagaggaatgatgtccgggaagaagttcaataacaaagcatcctcggatggtctaataggtctagcgtagataattgatgatcggcaaagcgaagccctgacgatgagttcgttgttccgtgttccctgtttctaatacgcgctcgactgaacatatttctttttgctacagaatatatactgcgtaaccctatgccagtaaggcaacgtttgtcacagtttcacgttgtcaaacgcagcttaacgggtgatgtttttttttatgatccgagaggaatggataagtgaattttttttttgaaaaaaggtgtatctttacggatggtctacgggtgaagcttccatttcatataaggagccattggtgaagctgttttactgaac
